United States Patent Application Publication US 2026/0103690 A1 - sequence listing, part 2

SEQ ID NO: 1607 - DNA, 1941 bp, unidentified
  source 1..1941: mol_type = unassigned DNA; note = element_21a4d98
  misc_feature 1..2: note = core
  misc_feature 3..133: note = LE
  misc_feature 134..1420: note = CDS
  misc_feature 1421..1941: note = RE
  misc_feature 1608..1878: note = bridgeRNA
agcttcctgtataattcaaatatagggaattccaagaaagaaggttgagaaaaagaaatacctcagagtaaaataagattactgactttggacggttagtaaaaaatcttattaaaacagtgaggtatctataatgaattgtaacacacagaacgcaaaaattgcatccataactgaaaaaactttgattgttggaattgatgtcggcagtgaaactcattttgccagggcatttgattggcggaactatgaatatacaaagaagccgctggaattcagtaatactgaggcgggtttcatgatgttcaaggcatgggtggaagatatcgcagaaaagcaaggtaaaacagctgtaattcccggaatggagccgaccggtcattactggtttgcactggggaaattcctgcaggacagcgggatgaagcctgtacatgtgaatccacaccatgtcaagaagtcgaaagagctggatgacaacaatcccaataagaatgaccgtaaggatccaaagacgattgcggcactggtcaatgaaggacgcttctcttatccctacataccaaccggtatttatgcggagatcaggagcttatcgaatcttcgtttccagacgcaggaagagctaacaagaatcaagaatcgaatcgccagatggtttgccatttattttcctgaatataaagacgtttatggggatttaatggcagtcagcggacgaatgatactcaaggaagctccattgccggaggatatcagaatacttggagtgaacggtgtaaaccagatttggagaaacgtgaagctgcgaggtgctggaatgaagagggcaaagatcctggtatcagctgcagagcatagcgttggaagtaaggaagcaccggaagcggcaaggattgaactgaagaatctgctgaatgacatggatgtatatgtgtcaaggatggaggaactgctccaaactatagaggaaaaactgaagacgattccatatgttgataaactgatggaaatcaaaggaatcggattgattacagtcagcggatttattgcagaagtaggtgacattggacgttttgataatccgaagcagctgcagaagctggcgggatatgcaatcgtggcaaatgattccggaaagcacaatggagagagccggatcagctacagaggcagaaaacggctgagatatgtgctgtatgaagctgcgatatcactggtggggaagaatgctgagtttaaggaaatacatgagtattatcgaacccgcaaagaaaacccgttaaagaagatgcagtcagtagtagcagtggcatgtaagattattagggtattctacacaatcctgacaaagggtgtggattatgacccaatgaaactgatgagtgatatcagaaggccacagttgcaggcagcgtagtaagcagagacaaacaggtaatgttctgtcacagttgaattgaactttcagaaatagctgcggagagttgaattcagctgtgacaggaaggctgagaagtatgaagaccgagtcgggaaaacgtccgccgtaaggtgccgtgaggtattgatacttaaacaggtcagtaagacttaaaacaaaaaagaatgagccagtagtcggcaggaataatcaccatagggcatgaccctgtagaggagctaagctgacaccctggttatggacaggcgggacgaaggaagttaggacccggcagaaatgcgggtgatcctggtagacacgggaggttcgctgccgtagatgggagggtatacacaaggccatgtagaacgaaaatgatgacgttttattttgtgtaccccaacccctctattttcgtaccagatacagagaaatgtccatcttcttggctcattcatctgagatatggaactaaaaattccttgaaaaataaggaaaaaagacttgactatataggg

SEQ ID NO: 1608 - DNA, 1691 bp, unidentified
  source 1..1691: mol_type = unassigned DNA; note = element_21ab5a9
  misc_feature 1..4: note = core
  misc_feature 5..277: note = LE
  misc_feature 278..1516: note = CDS
  misc_feature 1517..1691: note = RE
  misc_feature 12..291: note = bridgeRNA
ttgctacaatgagtttgaccctggaaagacgcaaagaaactgcgttgctcagaggctcaaacctaagctacaatgagggggtaatcggtcttacggggcattgcttgagcttccacgctcgtactggcaaactgtaaaccgccccctcattgcagcgttcgatttacgcaggttgaatcatcggagtttttccgtacattcgtgtaactaagcaagctgaatcggtaatgagcctgagcggtcaccgattgaatacttttttgtgggaggactgcctatgagcaagaatgagataaccgccgttggaattgatgtttccaaaggaaaaagtaccgttgctgtccgcaggcccggaggcgagattgtgatgatgccattcgttgtcctgcacacagcagaggacctggcagagctgacgaatacgctccgaagcatcggcggcgagattcgtgtagtaatggagcataccggaatgtactggcggccaatcgctttagccctaaaggaagcgggcttttttgtcagcgtggttaacgctatgctgatccatgatttcagtgataattctatccgaaagatcaaaacggacagagccgattccctcaaaattgcaaattacgcgctaaccttctggcaggagcttcgagattactctgtagaggatgaaacccggcaaatgctgaaaattcagagccgcttgtacgaacgtaccctgaactccagcgttgcacttcgtaatggactgatctctttactggatcagaccttccccggtgcaaataagttgttcgacgaacagcgcaccaaggcaggacacatcaaatgggtggattttgtgcggcgattttggcataaagattgcgtggctgcctcgtctttttcttcttttgcagacaccttccaaaaatggtgcaaaagaaccggataccactactctctttcggatgccaaacggattcatggtattgcccgcaactcggttgccacgcttgctaagaatgatagcaccaagctgctcattacgcaagctgtagacagcctaaatgcggtttatgataccttgcaaatcctgcgcagcgagatgcagcgtctggcttcactgctccctgaatatgagattgtcatggggatgcaaggagccgggccaatcactggacctcagcttatggcagagattggagatgtgcgccgtttcacaagcaaaggtgcgctggtagctttcgccggtgtggacgctcctccatttcagtctggatcttttaattccaaatcccgccatgtttcaaagagaggctccccacatcttagacgggtgttgtttaccatttgcagtgtgatccttcaacactccgatcctgaaaacgcggtctttcagttcatggacaaaaagcgggcggaaggcaagcacttttatgtttataccgtggcaggcggtgcaaagttcctgcgaatctattatgcaaaggtaaaggaatatctaaacacgctggattcacaaaccggctgtgttgcatagccagccattcttatatactgctgacggcggcgtcagtccatacaatgcgcagcattacaaaaacacagatctgcaaaatggcttcgtttgcaggtccatttgtcatgcctgcttttgagcgcaaagtgtaaagtgcgatttttctcggtttaactcttgacatctatttgcaggt

SEQ ID NO: 1609 - DNA, 1340 bp, unidentified
  source 1..1340: mol_type = unassigned DNA; note = element_21af8e6
  misc_feature 1..2: note = core
  misc_feature 3..87: note = LE
  misc_feature 88..1116: note = CDS
  misc_feature 1117..1340: note = RE
  misc_feature 1138..1335: note = bridgeRNA
tgatgtgatggacgtccccctcttcagttgcaaacagtgtcatcgttaacttgatactgaatacattgcatttcgggagtatttctcatgaacacaatcaaagtggtgggcattgatctcgccaaaaacgttttccaggtctgtgtctggtcaacggataattctgtgacctggaataaaaaaatctcacggcaaaaattgctggatacactccgggcgtttccgctcaatacccttattgcgatggaggcttgccagggagctcattattggggaagaacgctccaggctatgagctatgccgtccggcttattccgactcagtatgtcaaagcactctgtaaaaatcagaaaaacgatgccaatgatgtgctggccatctgtgaaaccgcctgccgtcccgggattcattttgttccggtcaaaacggttgagcagcaggatatcaaagctctgcgcagtgcccggcaactcgtggtagaacagcgtaccgccctgattaatcaaatccgggcattgctcgtcgaacagaggatcgttatccccgcgggcattcagcaactccggcaagccctgtctgatattctggaagacggaaacaatgctttatcctttgttcttcgtcgcctgttgcattcattacaggacgatatgcggcgatttgatgctcgtcttcacgaaatggataaagagattcaggcggtttcaagtcagcaatcgggttacgcccacttactgaccattcccggtgtggggccgttgattgccgccgcttttgtcagtgacgtcaatgtagatcagttcgcgcagggtcgtcagctctcggcctggtgtgggctggttccacgccaagacagttctggagggaaaatccatctgtcaggcatgaccaaacagggcaaccgtcacctgcgaacgttaatcattcacggtgcccatgcggtgatgcgctgttgtcaaaaacgtgaggatgttctgggcgaatggttaagaaaattaattgcccgatgtggcttcatgaaggcaacggtcgctttggccaacaaactggtgcgtattatctggcgaattttaaaggatgatgttgattttatgatgaagaaagccgtgaattaaccgattaaaaaagacgtttactgagtttgcaaacactgatgagaaaacagctactgtcctgtaatagcctgtgcttgaccaaggtaatcatatacctatgtagtgataaggaaacagggctcggatgacatcatggcgcgggtgattcagcccacaatgacgccggatatatggtcgcaaaccgtatcaattcaatgcttgcacaaccgggggacgtccatata

SEQ ID NO: 1610 - DNA, 1495 bp, unidentified
  source 1..1495: mol_type = unassigned DNA; note = element_21b08ed
  misc_feature 1..2: note = core
  misc_feature 3..204: note = LE
  misc_feature 205..1473: note = CDS
  misc_feature 1474..1495: note = RE
  misc_feature 5..204: note = bridgeRNA
ctgatggctctaccatccttgggcataggagcctcccccgaggaacgctgccaagccttgtcccttgaggactgacgtgagatggcgtccttgggggatggcttcttgaggccagacgccagcaagggtgtcgtcccgtgaggactggtccatcaggccgccgccgtgcctctgcccgtcccgctgcgaccggaaggaggcgccgtgctgggtgttggcatcgattgggctgaggagttccacctcgtcgccctgggacggccaggggagggggtgatcgaggtcacccgggtgcggcacaccccctcggcggtcgacacgctgatcggcaaggtcgccgctttggagtcggacccggccgaggtccgcgtggcgatcgagacccgccacggcctgctggtggagcggctggtggatgccggctacacggtggcaccggtcaaccccgacctggtcgcgcgccgccgcgggccggcccgcaagaaagacgacaccgaagacgcccgcatcctgtgcctgttggcgcttgaccgcttcgccgcgctgcgcccgctcatcccccacggcgagctggccggtgagctgcgcgccatcgcccgcgacgacgagcgcgccgcccgcgatcagcgccgcctgctcaaccggctgcgccaagacctgcttcagaccttccccgccgcgctgcaactcgccgccggcgacctggccgccccgaccatcctcaagctgctgcaacgctggcccacccaagacgcccttgccgccaccacccgaaccgagctggtcgccttcgcccgcgccgcccaccatggctggcccgaccgcttggccgacaaagtccagcaagccctggccaccgaccacttcaccccacgcgactacctggtccgcgccaaagccgacaccatccggctgaccaccacccagctgctggcgatcggcgcccagcgcaagctctgggagcggcgcatgggcgagctgctgcttggcggagcgcgtcagggtcgagccaggacacctcgccaggagcggcctgacaacgcgatccctggcggcaaggtctacctcagcttcccagggcttggtgaccgccttgccgccaggatcgccggcgagatcggcgaccaccccgagcagttcgagtcgccgaacgcgcttgcatcctacgcgggcaaggcgcccgtgacgcggcgatccggccggtcggagttcacggtcgcctgccggctggcctacaaccactggctcggcaacgccgtccagcagtgggcgttttgcagcctgcaggagtcgccctgggcgcgggagttctacgacgcccaacgcgcccgcggcaaacgccaccacgccgccttgcgggcactcggcaaccgctggctggaggtgctgtggcactgcttgcgcaacaacatcccctacagcgaggccgtccacgccaccaaccgcgaccgcgccctcaagcgagctgcctgagccagtggttgacaaagggtgt

SEQ ID NO: 1611 - DNA, 1362 bp, unidentified
  source 1..1362: mol_type = unassigned DNA; note = element_21b67a9
  misc_feature 1..3: note = core
  misc_feature 4..76: note = LE
  misc_feature 77..1105: note = CDS
  misc_feature 1106..1362: note = RE
  misc_feature 1078..1350: note = bridgeRNA
tgatggggtggacgccccctcgacggcatcgatgtgccagagtggaaggtgttgatcaccactgaaggaggcgtccgtgacagaggttagcacgatcgggttggatttggcgaagtcggtctttcaggtgcacggcgccgatgcgagcggcgcggtcgtgttccgcaagacgcttcggcgggccagggtcctcgagttcttccgcgatctgccacgttgcttcgtcgcgatggaggcatgcggcggggcgcatcattgggctcgcgagatcggtcggttgggacatgaggtgcggctcatcccacctatttacgtcaaaccgttcgtaaagcgtcagaagaacgatgcgtccgacgcggaggcgatctgcgaggcagcgcagcgcccgacgatgcgcttcgtcgcggtgaagagcgagtcggcccaggcaagcgccgcaatcttccgcacgcgcgatctactggttcgccagcgaacgcaactgatcaacgcggtgcgcgggcaactcaccgagtatggcctggtggccgctaagggaaccgcgaacctgccgaggctgctggcattggtcgacgagccaggctccgatctgccgcaggccacgcgtgcgatgctcgatgtgctgatcgggatggtaatgatgctcgcggaacagatcagcgcgctggaccgcgagatcgccaggcgggccaaggaagaagatatgccttcgcggttgatgacgataccgggtgtcgggccaatcacggcgactgccatcgcggctcttgctccgccggtggagacgttccacaaagggcgcgacttcgcggcctggctcggcctgacgccggtgcaacgatccaccggcggcaggcagaagctcggggccacatccaagatgggcgagcggaccatacgccgcctgctcatcattggtgccgccgcactggtgcgccagaccagccgccgcgagccgccgccaggatcatggttggcgcgcatgctcgcccgaaagccacgcatgctggttattaccgcgctcgcaaacaaaatggcgcgaactgtttgggcgctgctcgcccacaacgaagtttaccgagctcccgctgtagccgctacgtaagcgattagagcgtgaggctgtcgaaggagtagagggcgaaggcaagtacggcgcaacggtcgacgagacgggacaggcaaaaccagataggttcactgtgctgcgaagcacgcagtcctgatatggagccggtccgcgaactcccatacgggcccgcggcgcatcatcgccgcatctagaggccggacagatggcagcatccgactagcgcgtcagaaagccaaaatccctcttgcttttccgggggcgtccacaga

SEQ ID NO: 1612 - DNA, 1315 bp, unidentified
  source 1..1315: mol_type = unassigned DNA; note = element_21be954
  misc_feature 1..3: note = core
  misc_feature 4..214: note = LE
  misc_feature 215..1180: note = CDS
  misc_feature 1181..1315: note = RE
  misc_feature 36..197: note = bridgeRNA
cattgtatattgtttttttttattatctttgcatagaaattcaacatcagggtgtggaataagaccgattcttcattagctttgcaagccgttgaatatgttccgtccccacactcttacatcagaacctggatagttcaaagggcatagaccccgtattcgcaatgatagctcatgatgtatcgatgtttgtttaattataaatattatggctatgacttacgtaggaattgacgtcagcaaagcaaccttcgttgttgcttattcatctgccaaaagcagtgaaaccaaaactttcaagaataccacaaagggtatccgagagtttatccgaaccatctctccagaagagaaccattgtgtgttggaagcaacaggcaactacagtatgctgcttgtctatttgctctccaaggcaggctttactgtctgtatggagaatcctctgaagataaagaactttgcacgtgtcatgctctctgttgtcaagacagacgagattgatgcccgcctcattgccttatatggtgagagaatgcaaccagcaccattcaagctccgtagtgattcccttttgttactcaagcagaagcgtactgtattacgtcaactgaagaagcagcttaccgctaacagaaaccttgaaggttcacttaaagtcctgccattcattgattccaagtgcaagaaagtcttggaaaagactatcaagtttcttgagaagcaaatcgaagaaatggaggaagagctaacgtccttggcagagattgaatacaagaagcagatggatttactcacttccataaaaggaataggagcaacccttgcagctgcactcatcattgccacaggcggattcacctactttgataatgctaaacaacttacccgatatttagggctgtcacctacttaccaacagtctggtacgtcagtcaatgtcaaagggcacattaatcgtaacggagatgcttacctgcgtagtcagctttatattggagctatggcatcattgcggtgcaacaccgaatgcaaagcatgctttgaccgcttgcgatcaaatgggaagccagggaaattggctattgtcgctgttgccaacaaactcatcagacaagccttcgctattgttgcacatgaaaagaaatatatagatggatataagtctgtaaagccataaaaccatctctccgtctgagggtacaccttggcggctaggggctgagatatcagtcctgaagaccctctatgtgcttacgaaaatgcatatttatgctaaatttcgttaaccgtattcatttttattattatagtt

SEQ ID NO: 1613 - DNA, 1407 bp, unidentified
  source 1..1407: mol_type = unassigned DNA; note = element_21c2491
  misc_feature 1..2: note = core
  misc_feature 3..79: note = LE
  misc_feature 80..1123: note = CDS
  misc_feature 1124..1407: note = RE
  misc_feature 1124..1395: note = bridgeRNA
tgttgggttggacggctcccaacggcatcgtgatgtgccaggatgaggtcgttgaaacactcacatgaaggagccgcccgtgacaaatattatccgcatcggcatcgacacgtcaaagagcgttttccagttgcatggcgtagatgcttcggaacgaccggtgttacgcaagcagctgagccgccgcgagatgatcaggttttttgaaaagctgccgccgacggtcgtcgcgatcgaggcctgtggagcttcccaccattgggcgcggctgttgggttcgttcggtcatgaggtgaagttgatcgctccgcagttggccaagccttacgtgaagcgaggcaagaatgacgcagctgacgccgaggcgctgtgcgaggcgatgagtcgcccgacgatgcgcttcgtgccagcgaagaccccagaccagcaggccgcgctcatgctggtaggcatgcgcgcacgtctgattaagcggcgcactcagcttgcgaacgcaatccgcgggttcgcggccgagtttggcgtgaccacggcaaccggaatgtgcaggatcgagcccttgcttgaaacgatagccgcggatgagacaatcccagctttggcgcgtgaactgttcgcgctccatgcggaggagtacggtgcccttaagtgcgagatcgagcgggtcgaggagaagctgatggcatggcatcgcagcaatgaatgcagccagcgattggccaagatcccaggtgttggaccgatcggcgcctccttcctgatgatgaagacgcccgatccgcggctgttcaagtccgggcgtgattttgcggcctggatggggcttacgcccaaagatcattcgaccgctggcaagaccaggcttgggggcatcacgcgggctggtgatgagttgctcagaagcacactgatcgtcggagcaactgcggtcattggccatgttcgccggacgcgaggccggaacgcctctccctggctcctgggcttgcttgatcggaaaaagccgaagcttgtagcggtggctcttgccaacaagatcgctcggatcgcctggaagatgatggtgagtggcgagcagtatcatcgaagcactacgcgggcagttcaagccgccgcagcgtgaaaggaatcagccaaacacgatgagcaaatcctaggcgctatcgtgttgacctgatgccggatcttgcaagaaacgagtagatggtgtgatcgatcgatccaaggcccaagacaatccgcaaccggcaatggccttctaggccgcggcagtgttaggagcttgtgctgcggaaaccatcttggccagcggtcctcagtggccgcaacaaaaggccggacatatgatcgcaagcgatccgatcaaattatcctctcagcctcttgcaagagggagccgtccacata

SEQ ID NO: 1614 - DNA, 1161 bp, unidentified
  source 1..1161: mol_type = unassigned DNA; note = element_21c6f0b
  misc_feature 1..2: note = core
  misc_feature 3..207: note = LE
  misc_feature 208..1149: note = CDS
  misc_feature 1150..1161: note = RE
  misc_feature 14..213: note = bridgeRNA
cttgttttatgacctttccgctggttttcgacattaagagatgcccgatccgaggtggccaccccggatcgggaggaaggggatggatcgaagtcgtctcggtcgtagaggaccgtcgattagtgtgatcacccctttcttttccaccagacctggacggaaaccagggcttcgggcccggatgacaagagtaggacagcggaagagatggataatcttctaccccaaacggtcggcatcgacatctcaaaagcgacccttgatgtatatgcccatcctgtaggctgcgagcggcaattccccaataccgacaagggccaaagggagctgatagattggcttgcacaatggcagatcgatcggatcgcctatgaagctactggcgcttaccatcggcggttagagcaggctctgacggatctgccatgcgtcaacctcaacccggctcgagcacggcggttcgcacaagcagcaggcactctcgccaagacggataaaattgatgcggtcattctggcccgcatggcgacgacgctccagcctcctgtgcgccccgcaagtacgccccaacaagccaagctcgcggaattaatcagcgctcgcgatggcttggtccgcgataagatcgcgctgcaaaatcaagcaaagaacctgacgctgcctctcctcaagcgccagcacaaaacgcgcctggatcagatcgagcggcatatcgagcagattgacgccgaggttgcgacgatcatcgcggctgacccggagttggcccgccggcacgaaatcatctccagtatcgctggggtaggcacacggaccgccgaccagctggtcgtgaccatgcctgagctaggagcactcgatcccaaacaagctgcttcccttgcaggcctggctcccgtcgcccgacaatcagggcaatggaaaggccgcagctttattcaaggaggaagggccaacgtaaggcgtgcactttacatgccggccctcgttgccgctcgttacaacccagatctcaaggcaaaatatgaaagtctcatcgcgtccggaaaaccagcgaaggtcgctgtggtcacgcttatgcgtaagctcatcgtgatggccaatgcgctgatcaaagccgaccgcctatgggtcgaaaaatgtgcttgatcacaacggaaa

SEQ ID NO: 1615 - DNA, 1514 bp, unidentified
  source 1..1514: mol_type = unassigned DNA; note = element_21cf5d1
  misc_feature 1..4: note = core
  misc_feature 5..259: note = LE
  misc_feature 260..1504: note = CDS
  misc_feature 1505..1514: note = RE
ctcactggtccaccctatgagggtcggtggggatgatgaggccgccgatgcccccgaggtgccatcgggccatcgccctgctcgctcgacgccgtgacgtccaggctgagttctgcgagccccggtggttacccgggacgcgccgaccgtcgatagggctgagcgccttcgagcgccgaacagtgagcggaccggcagccgcgtcccggcaccgataggagggggcctccccactggagctagcagcgaggaggctgatatgcagcatgcgtcgaaccacacccttcctgccgcggggccgggccaccggacggcgggcgtggactgggctcgcgacgaccacgcggccgccatcgtggacgccagcggtcaggtggtcgagcggttctccgtcgcccataccgccaccggcatccgtgacctggtccgccggctctccaagatgaccgcccacgaggtcgccatcgaacggcccgacggtccggtcgtcgaggctctcctcgaggccggcctgaccgtcgtcgtcatcagccccaaccagctcaagaacctccgctcccgctacggctcggccggcaacaaggacgaccgcttcgacgccttcgtcctcgccgacaccctccgcaccgaccgggcccgactgcggccactcgtccccgacagtcctgccaccgtggctctgcgcgccgcctgccgggctcgcaaggacctggtcgcccaccgcgtcgcgctcgccaaccagctgcgcgcccacctccagcgcgccttcccgggcgccgtcggcctgttcgccgacatcgacagcccgatcagcctgcgcttcctcgcccgcttcgactgccaggagcgcgccgactggctctcctccaggcgcctggccgcctggctggccagcgtcggctactgcggcagggtcacgcctgcgaccctgcacgcgcggctcacctccgcaccacggggcgccacgagcaccgagggagccgcccaggcccacgtcacccgcgccttcctggccgcgctgagcaccgtggtccagcagatcaagctcctttccgagcagatcgacgagcagctcgccctgcacaccgacgcccacatcttcaccagcctgccccgcgccggccgggtccgcgccgcccgcctgctggccgagatcggcgactgccgcgctcgcttcccgacccccgactccctggcctgcctcgccggcgtcgcgcccagcactcgccagtccggcaggttccgtgcggtcggcttccgctgggccgccgacaagcagctccgcgacgccatctgcgacttcgccggcgactccatccgcgccaacccttgggcggccgacctctatcgtcgggccatcgcccgcggccacgaccacccgcacgcggtccgcatcctcgcccgcgccaggctgttcgtgatctggcactgctggcaggccgggacgccctacgacccggctcagcaccgcgcccttcaggcgctcctcaaaccggcagcttgacatagggcta

SEQ ID NO: 1616 - DNA, 1615 bp, unidentified
  source 1..1615: mol_type = unassigned DNA; note = element_21d9038
  misc_feature 1..3: note = core
  misc_feature 4..250: note = LE
  misc_feature 251..1486: note = CDS
  misc_feature 1487..1615: note = RE
  misc_feature 8..227: note = bridgeRNA
gttcgtattataaggttaaccagaaattactggttgaccttattttattaggtcttatcatttacattgtagccggggtagaacgtccctgcccgtgggagttggatcccgtaaagtaaactgttcgccccctacttgtagaaacatgattgaggctggttgggacgatgatcccgtataacaagcgaagctgtgatactacaagaaggattaggggtaccggcaaatacttcttaggaggagataatcaatgaatccagtagtaggtctggatgtagctaaaggagaaagtcagattcaaggtttcctagataagaagaagccttataaaactagttttaaagtaccgcacaccttggatggtctagagaaattgcttcacttcttaatcgagattgaaaataatactggagtacgacctcctgtcgtactagaatcaaccgggcattatcaagcaccagttgttcaattcttagataaaaaggattacttaaccattattgtcaatccacttatcccatataaggcaaagagttctagtttgcgtaaggttaaaacagatgttatagacgcgagacatctctgcgagctgtactataaggaagaccttgagccgcaaaagaaacgtggtatacaattactaaatttacgtaaccttactcgacaacatgaaaatattactggtttatatgtacaaacgaaattacaatttcattctgtgttggatcaggtattccctgagtatcgtggggtttttggggacttatattctaccgtttctctatttactctattaaactatccaacatctaaagatgttttacaggcagataaagatattttagctgaacacattcatgaattctgtccaagacgctcatctgattgggcagctacaaaggctgaaaagctaatagaagcagcacttcgtgatccatttcaggaaacactctatgagagtcatatgataagtattgaaatgtatatcaagatgttgcttgagtaccaaaagcacctatctaaactcgaggaccaaatagatgctttggcacatcaaattgaagaatgtaaaattatccaatcaatacccggtatcggtgaaaaaatcgcggcaacgattatttcggaaattggggagatagatttatttgataatcctaaaaaactagtagcatttgcaggcctggatcctaaagtttatgaatcaggtagattcaaaggaactgtgaaccgaatcactaaaagaggatctagccgattaagacacgctttatttatggcagttcgctcagcaatccgtgattctcgcaaacagaaaacaacggatgaagtaatccctcgtaacaagaaattacgagccttttacgataaaaagcgcgaagaaggaaaaccttataaagtagccataattgcatgtgcaaataagttattgcactggatatacgcattattaaaaagtaatactaccttccaagatattgcttaacttacaatttaaccaatttccaaatccttccaaacattagaagttgggagggttatttggcatgcgcaaatttagtatatcataagctattttagatttttagagaaaaatattgacaactattagctg

SEQ ID NO: 1617 - DNA, 1383 bp, unidentified
  source 1..1383: mol_type = unassigned DNA; note = element_21df889
  misc_feature 1..2: note = core
  misc_feature 3..81: note = LE
  misc_feature 82..1104: note = CDS
  misc_feature 1105..1383: note = RE
  misc_feature 1122..1372: note = bridgeRNA
tgatgatgtggacggccccgcttcggggcatttacctgccgaaacgtggtcgctggagcgccacaagaagggaggccgtccatgaagaagtttatccgaattggcgtcgacatcgccaagaattcgtttcaggtgcacgcgctggagagcgaagacggtcgcgcgacgaaacgcaagctgagccgttcggggatcgtcaagttcctggctgaggttgagccttgcctggtcggcatggaggcatgcggctcggcgcattactgggcgcggcggcttggcgcgatgggccatgagatacgcctgacgccgccgagttacgtgaagccttatgtcaagcgcggcaagaacgacgcggccgacgcggcggcgatttgtgaggcgatgtcgcggccgaacatgcgtttcgttcccgtcaagagcgaggaccaacaggccacgctgatggcgcacaagacccgcgacctactgatcaagcagcgcacgatgggcgtgaacgccttgcgcgctcatctggcggagtttggcgtggtcgccgccaaaggcatcggtcacgtcgaggagctcgtcgagagggctgccgccgccgaccttccagcgatggttcgggcgacgctggaggttctcgtcgggcaattgcgctctcttgaggcggcgatcgaccaactcgagcgcgcgatcgtcgtcgcccatcgccgcgatccggtcagccggctggcggctggcgtgcccggcgtcggcgcgctcgccgcctcggcgattcgggccagcgcgcccgacccgcacatattcaaatccggccgcgatttcgccgcctggatcgggtcgacgcccaagcagaactcgaccggcggcaaggcgaaactcgggtcgatcaccaagcagggcaatcgctacatccgacggcttctggtgttgggcgccatctccctcttgcgggcggcgccgaagcgcaagggcgcattgtccgactggctggccgcgctcagagcgcgcaagccggccaaggtcgtcgccgtggcgttggccaacaagctcgcccggatcgtctgggcggtcatcactacaggcgagcccttccgcggcgctctctacgctaaggcctgagcccaatcgaggcgccgcattcgagggaggaaacgggttcacgcgtttggcgagcgcgacgaccacgtgatgaacgacacggcgtgacgatcgaagaccatcggacactccgccaggggtcaggagcccagagctcgcagccttgatctggagccgagggtcgtcggacttcatcagggccagcggatctaggtccgcgccaacaggccggacatatgaccgaaggccgccagccgttcgtcgccgaaacaaaacgcttgccaaggggccgtccacata

SEQ ID NO: 1618 - DNA, 1637 bp, unidentified
  source 1..1637: mol_type = unassigned DNA; note = element_21e136b
  misc_feature 1: note = core
  misc_feature 2..225: note = LE
  misc_feature 226..1617: note = CDS
  misc_feature 1618..1637: note = RE
  misc_feature 11..237: note = bridgeRNA
ctaattgtgactgaggatgctgcggttgtgccgtagcgttcgtgaggtctgacgggctggctctcgaaccgcctgccggccgcgtgcggtctggctttagaacgaggtgccagcctgccgggtctcgccgtggcgtggctcgaaagaggtgcgagtcctggcagatctggaatcaggcatgcccgccacgttctcccttcccggtgagcgacttggaggatgctgatggcggcagtgatgatcggtgcggacccgcacaagggctcgcacacggcggtggcagccggcttggcggaggagccgctgggcgagttgcgggtgcgcgcctgcgccgcccgggccggggagctggtcgcgtggacggcggtgtggccggagcggacctgggcggtggagggtgcccgcgggctgggccggctgctcgcccggcagctggccgcggcgggcgagcgggtgctggacgtgcagccggagctggcctgcagggtgcgcctgctgcaggccggggacacgaacaagaacgacccggacgatgccctgccggcggcgatcgcggcgctgcggtccagggcctgccgtccggtgaccgccgatgactacccggcggtgctgaaggtgcgggctgagcggcaccgggacctgggccgggcccgcaaccaggttgcctgccggctgcacgccgtgctctgcgacctggtccccggcggccttgcgaaggagatctccgcagctcaggctgcggagatcctggagcaggccgcgccgtccggtgccgtggcccaggctcgcgccgggctcgccaccgagttcctggccggcctgcgccgcctggacgcccagctgcgcggcacccgcaagaagctggccgccgcggtcagggcctccggcactaccctcacccaggtcttcggcgttggcccggtggtcgccggcaccatcgccggtgacgtgaccgacgtggcccgcttccccggacgcgatcacttcgccgcctgtaacggcaccgccccggccggggcgtcctccgggaaccggacggtccgccggctgccgctgcgcggcagccggcgcgtcagccatgccatccacatggccgcgatcaactggatccggcaccggcacagcgacggccgcgcctgttacgagaagaagctggccggggggaagacgcacaaggaagcgctgcggtccctccagcggcggatcagcgacgccatcttcgcccgcctgcaggccgacgcccggcgagccgcggaagcctccgtcacgggcccgggagggcaaccggggaacgactctgcatccagcgcggccggctcacaccccgcacgccggctcttcgggcaagccactcccgggcctgacaccacgatacggcccggcacaacagccggcccgccttctggcccccggtccagccggacggagtcccggggcagggccgggcattccccggtcgctgccactgagccgtcggcgaagcggcaggcccaggtggagcgcccggagccaagcgcggacgaacgacctggaggtacggcgagacgacggccgcacccggccgcgaggaaggccccggtgggtacgacttcgaagaaaaacccgacacccacttgacagcaccagcaaagaggact

SEQ ID NO: 1619 - DNA, 1381 bp, unidentified
  source 1..1381: mol_type = unassigned DNA; note = element_21eb556
  misc_feature 1..2: note = core
  misc_feature 3..87: note = LE
  misc_feature 88..1119: note = CDS
  misc_feature 1120..1381: note = RE
  misc_feature 1150..1369: note = bridgeRNA
tgatgctgtggacggctcctccacccggcacgtgagtgccatgtatgtgggtgctgttaaagctcccacgattcggaggagccaaacatgcaagcgatcacgacaatcggtctcgacatcgcgaagtcggtctttcaggttcacggcatcgatgcggagggcaatgtcatcgtccgccgtcagctcaagcgacgctacgtactgacattcttccagaagctgccaccgtgcctggtcggaatcgaagcctgcgcttcgtcgcatcattggtcgcgcgagcttcaggcgcttggtcacaccgtacggctgatgccgccggcctatgtgaagccctacgtgaagcggcacaagaacgatgccacagacgccgaggcgatctgcgaagcagtcaccaggccgaacatgcggttcgttgcaaccaagacgccagagcagcagagttgcctgacactgcaccgaacccggcacttgttcatccgccagcagacctcggtgatcaatgctatccgcgctcaccttgcggagtttgggatcgtcgcgccgatcggccgcctcggtgtcgagcaactgctcggcgttgtctcggatgcaagtgacaaacggttgcccgacgtggcccgcgcatgcgttgccgcccttggcgcccaactgcagagattgaaggttcagatattagagttcgatcgcatgatcagagcttggcaccgatccagcgaggcgagccggcggctcgacgacatacccggcgtcggtccggcattggcgactgctctggttgccagtgtcgctgatccgaagatgttccggtcaggcagggacttttcggcctggattggccttgtccccaagcagaactcgagcggaggcaaggaccggcttggcaatatcagcaaacgaggcgatcgctatttgcgcagcctgttcactacaggcgcactggcggttatccgatatgccaaaatccatggcaccaagcatcggccttggctcaccgcgttgctgacgcggcgacccacgaaggtcgcagccatcgcgctcgccaataagatcgcccgaatggcctgggcgatgatggccaggggcgaacgctacaaagaaccagccgcactcgcggcgtaaacgagatcgcgccaagtattcggcgtgatgtgaaggttgggagggcgaaccgcacgtaatgcagagccggtcgatccggcgatcaggacaacccacatgggccagagcattgtcgaatgcgtccttttgaccgggacctgatccgcggagggcattatggccagcggtcatgtgaaccgcatcaacaggccgaacacatggccgcaccgaccaatgctgcattcgtgaagaaagtccttgccaactcggagccgtccacaca

SEQ ID NO: 1620 - DNA, 1420 bp, unidentified
  source 1..1420: mol_type = unassigned DNA; note = element_21f3e85
  misc_feature 1..2: note = core
  misc_feature 3..133: note = LE
  misc_feature 134..1168: note = CDS
  misc_feature 1169..1420: note = RE
  misc_feature 1184..1415: note = bridgeRNA
agatggggtaacgggccggccaggccgagcaggtcgcttggcgaattggcggaagggtggtcgtccctcaaactgatggtgtcaatcaacggagtcagggcgagcccgctccaagcatcatcgaggaacgaccatgtaccactatgccggaatcgacgtgtctttggaacagtctgcggtttgtgtcgtcgacgggagcgggcggatcgtgcgggaggcgaaggtggcgagcgagccggcggcgctgatcgcctggtacggttcgctggcgacgccgctggagcggatcggtctggaggctggaccgttgtcgcaatggctctacgcggccttgcgcgaggccgggctggccgtcgaactgctggagacgcggcacgttcgtgatgccttcaaggcgatgtcggtgaagaccgaccgcaacgacgcccgcgccatcgcgcagctgatgcggctcggctggttccggccggtgcattgtaaatcgatcgaggcgcaggaagtccgtgccgtgctgacggcgcgcaagctgctgcagacgaagttgctcgacgtcgagaacagtcttcgcgggattctgcgcggcttcggcctgaaggtcggcaagacgaccgagcggagctttgcggcgcggatcgaagaattgacgaagggccacgcggcactggcttcgatcgccaaggcaatgctcgcggtgcatgccgtgctgctgcgcgagttcaaggggctggacaaacaggtgctacagatcgctaaggcgcagccgcaggcgcgcctgctgatgacgacgccgtcggttggtccgatcgtggcgctcacttacgccaatgcgatcgacgatccggcccggttcaagtcttcgaaggcagccggcgcccacttcggtctgacgccgaagaaatatcaatcggggcagaccgattacaccggtcgcatcaccaagatcggcgacgcttcggtgcgcgaggcgctgtatcaggcggcgcacatcatgctgacaaagccgatcaagaattgcaccgagttgaagagctgggcgatgcggattgccaagcgggccggcctacgcaaggcgaaggtggcgctggcgcgcaagctggcggtcgtgctgcaccggatgctggccgacgccaagccgtttaaccccaacgccaagctggcgacgacctgacgaggagaaatcacggattcggggaaggccaaggcaccaagccatccttgagcgaggtcccttcgccgggacgatggatccggtcaggccgccacccgggaagtcggttcacaaccacgcttccgtagattggtcggccggttcctctacgcaccccaaaaggtgacggccaccgcgccgatcccggacagaagcaagtcaccggcgacaggaccacgcaaaagggattgactaaccgaggcccgttacaga

SEQ ID NO: 1621 - DNA, 1378 bp, unidentified
  source 1..1378: mol_type = unassigned DNA; note = element_220461c
  misc_feature 1..3: note = core
  misc_feature 4..87: note = LE
  misc_feature 88..1110: note = CDS
  misc_feature 1111..1378: note = RE
  misc_feature 1124..1364: note = bridgeRNA
tgatggggtggacggccccgaccgccggcatcgcgatgtgccatgttggtgttgtcatgaaccaaccatgggaaggagccgtccgatatgaatgttacaaccatcgggatcgatctggccaagtcggtgttccagcttcacggtgtagatgcgcagggcgaggttgtctttcgcaagaagcttcgccggtcggccgttctcgatttcctgcgcgaacttcgaccctgcctgattggactggaggcctgtgcgacggcgcacttctgggctcgcgagattggcgcgctcggccatgatgtgcggcttatcccgcctgcttatgtgaagccatatgtcaaacgacagaagaatgatgcggccgatgcggaagctatctgcgaggcggtgacgcggcctcacatgcgcttcgttccgatcaagagcgcgaaacgtcagggcgtgttgatgctgcaccggacacgcgacctgttgatgcgccaacgcaccatgacgctcaacgccgtgcgcgcccatctggccgagttcggcatcatcacggcccagggacctcaaaagcttttgaccctgatcagggcgatacggacaggcgaggtgccgggactaccgcggatcgccgggatcgctctcgaaagcctggccagtcagctcgacagtcttaccgacgagatccgcaagctcgaacgccagctcatgctctggcaccgcgcagacgagaccagtcagcgtctcgagaccattcccggggtcggtgtcatcaccgcaacagccttggctgccagcgtgccggatccgggtgtcttcaagagcggccgtcagtttgcggccttcctcggcctggtgccacgccagaactcctccggcggcaagggccgtctcggccgaatatcgaagatgggcgatggttatctgcgcaggcttctagtcgtcggcgccacttcggtggtacggcgtgccaacagcaatacatccgcgaccggcgcctgggtgcgatgcctgctcgagcgtaagccagcgagggtggtcaccgtggccgtcgccaacaaaaccgcccggatcgcctgggccatactcgcgcgcggcgagacgtatcgggcctcgatggccgcataacagcgctaccaaaccgcagggccatctcgtcgccgcgcaacgccgcgagggcaaatggaagtgatgatgatcaaacggggccgcagccaggaaaacccgaggtgctgtcagggctcaagagctcgctagactgagagggacctggtgcgcggacttcatcagggccagcggtcagtcgtaccgcgcaaacaggccggacacatgaccgcatcccgcaccgatcaatatcaccccaattcacccttgcaccaaaggggccgtccacaca

SEQ ID NO: 1622 - DNA, 1402 bp, unidentified
  source 1..1402: mol_type = unassigned DNA; note = element_2208727
  misc_feature 1..2: note = core
  misc_feature 3..289: note = LE
  misc_feature 290..1120: note = CDS
  misc_feature 1121..1402: note = RE
  misc_feature 1118..1389: note = bridgeRNA
tgttggggtggacggcctccgacggcatctaaagtgccacattgaggttgttgagatctcaatcgaggagaccgcccatggaacagattatccgtatcgggatggatacgtcaaagcatgtctttcagcttcacggtgtgaacgcggccgaggaaccggtactgcgcaaggcgttccggcgtagcgagatgattgcgtttttcgagaggttgccggcgacggtgatcgggatcgaggcgtgtggggcgtcccatcactggcaaggctgctgggatcattcgggcatgaggtgaagctgctcccggcgcaatatgtgaaggcctatgtgaagcgggggaagaacgacgcggcggatgccgaggcgttgtgcgaggcgatgagccgcaagacgatgcggttcgtgccggccaagagcgccgagcagcaggcggggctgatgctgatgggtgcgcgcgaccggctcgtgcgcaaccgcacgcagctcaccaacgcgatccgcggctatgccaccgagttcgggctgacggcggccaaggggatggcgcatgtgatgccgctgctcgatcggatcgcggctgacgagacgctgccggcgctcgcgcgcgacctgttcgcgctccagcgagacgagcttgtgcggatcgaggccgagatcgatgcgctcgatgcgaagctgaagacgtggcaccgctccgacgagtgcagccgccgcctggccgagatcccgaccgtcgggccgattgtcgcctcgctgctgcggttaaagaccccggcgcccgagctgttcagctctggccgggacttcgctgcctggatcggcctgacccccagggatcactccaccgccggcaagaacaggctcggcgtcatcacccgagccggcgacgaggcattgcgcagtgcgctggtggtcggcgccaccgccgtgatccagcatgccaggaccgggcacagcaagcacgcctcgccctggctgctcgatctcctcaagcggaagtcgcccaagctcgccgccatcgcgctcgccaacaagaccgcccgcatcgcctggaagctcatggtcaccggcgaacgatatcgacccagatcagcggcatcgcctatcggacacgccgcatgaagctcagccggcacggagagcaaccctgaggcaaccgtgccgagatgaggccggaacttgcaagagacacagcagatggagtgatcgatcgatccacaacgagggacaatccgtttgaatcactggccttcatcaggtcacttttgtgtttggaaccctcgtcgcggatgccatcttggccagcggtcacgtgcgaccgcaacaacaggccggacatatgatcgcaagcgatccagcactttcttctgccaaacgcccttgtaagcggaggccgtccacata

SEQ ID NO: 1623 - DNA, 1626 bp, unidentified
  source 1..1626: mol_type = unassigned DNA; note = element_220ae29
  misc_feature 1: note = core
  misc_feature 2..289: note = LE
  misc_feature 290..1510: note = CDS
  misc_feature 1511..1626: note = RE
  misc_feature 14..312: note = bridgeRNA
tcctacaataaagatgtaggtaacagatacctagcagccagccaggatctgcttcctttcattgctaacactgtacaatgggatggcatggatctgacgttagcctcctaggaccatcggcgtccgtacgaaagccagtcagtcagccatactcatttgcagccgtttggtttatgcaggttgaaccgatgtgaatcattacattgcgttcgtgtgataccccaggagattgaatcggcaatgagaaaactggtcatccattgcaatcattatctcggaggtatcagttatgttaaacgcagtaggtattgatgtgtcaaaaggcagaagtacagtcgctgtcctgcagccaggcggtatcgtccttcataaaccatttgatgtgtatcacaatttcaaggatcttcatgatctcgtccattaccttgcatccctggaaggggagacaaaggtcgttatggagagcacaggccgttatcatgagccgatctgcaataccctgtcagaggcaggcttgtttgtttgtgcagtcaatccgcatctgatcaaaaactttggcaacaacacaatccgaaaagttaaaacagatccggcagatgcaaagaaaatcgctcgttatacacttgacaactggacttctctgcatgagtattcagctatggatactactcgcgctgagctgaaaactcttaattcacaatttaacttcttcatgaaacagaagacttcagccaagaccaacctgatcgcacttcttgacgaaacatatccgggtgtcaataagctttttgacagtcctgttcgttccgatgggagcgaaaaatgggttgattacgcttattccttctggcacgtaaactgtgttctggattccgggcttaaggtattcacagagcgttatcaaaacttctgtaaacaccatagatacgaatatcagccagataaacctggagcgatttacgagcaggccaaaagccttgtacctgccgttcctaaggatccaatctataaagagctgatacaggacagcattcagcagctgaacctcatgtcgcagcatgtcgagcagcttcgcaagaggatgaatgaccttgcctctacacttccggaatacaatactgtgctttctatgtatggtgtcgggcaaagtcttggtcctcagcttattgctgagatcggagacatcagccgttttactcatcgcgaagcactgactgcatttgccggtgttgatcctggaaaggacgattctggccaggttgtacataaaagcggacatgcatcaaaatgcggctctgcaaggctcagaaagacactgttccggatcatgaaggtcatgctccaagttgggccaagagatgatgaccccgtaagtcagtttttgttcaagaagaaggccgaaaacaaaccttacctcgtatatatgacggcaggggctaataagtttctccgggtttattacggcaaagtaaaggaatgtttgcgcaaccaagctaaaacagaggtctgactgcagctacccataatgatcatttgagactgcctgaatgaagacagttttattttgtatacccattttcatttctccactttttcttatttatccttgacttttacttagcaggc

SEQ ID NO: 1624 - DNA, 1756 bp, unidentified
  source 1..1756: mol_type = unassigned DNA; note = element_220b174
  misc_feature 1..5: note = core
  misc_feature 6..382: note = LE
  misc_feature 383..1711: note = CDS
  misc_feature 1712..1756: note = RE
  misc_feature 186..369: note = bridgeRNA
cccgctcccacaggtttcgagcaggcttgaagcttgtgagtttcctgtaggagatcacccagcccttccgggctgcgctgtcgcgcagcaaacattgaagtacacgactttagatttgcagtggcgctgacattttgtaaaagaaaaggcggctggcccggtagggccagccgccttttgctttgttagggttcaagcgcgcgggacagagatcgtagccagcactggtgtgtgtccgcacacccgcgtaggagagtgatccgcacggtatcggcgtgaagtccctgtaggcatcagctgaatcagctgtgaccacgtatgagagagtgaaccctttcgccaccgtgtgccccgcgcgccctctatcctccgaggattcattatggcgcgcaagccttccaagcaacgcttcaccgtcgttcatcccgattgcgctgcgatcgatatcggcggccgtgagcactttgtcgcagtcgacccccggcatgacgacgctgtccgagcgtttacctcttttactgatgacctgtacaagctggctgactggcttgagagcctgagcatcaaggtggtcgccatggagtccactggcgtgtactggattccggtttacgaggtcctcagcgaacgtggctttgacgtttacctcgtcaacgcccgagcgacacgacagatcactggccgtaaatcagatgtgctggattgccagtggatctggcagctgatgacccacggactcctgcgaggcgcctttcgtcccgatgatctgacttgttgtgtccggtcgctggtcaggcagcggagttcaaaagtgaaagaccaggcccagactttgaaccggatgcagaaagccatgagccagatgaacatccagctcgcaaatgtcatcagcgacatctccggtgtaactggcatgaagattctgcgagcaatcactaagggtgaacgagatccagcacagttggccgaattgaccgatcctcgcatcaaagcaagcaaagagacggtcgctcgtagcctgcatggcaattggcggcgtgagcacttgcatgcgctgactcaggaactggctgcctatgactttctggaacagcaaatcgcggattgtgacgcggctataggggcagccttggagcaaatgccggtgctggtgagtaagccagggctttccaagaaagccattcgtagcccccatagaacgggtgctcaacaagcggtattgcaccaagcactctggaaagtactgggcgtggatctgacggcgatcccgacgattggcgtggacacggccttggtgctggcgggcgagatcggctctgatctatcacgtttcccctcatcgcagcacttctgttcttggctgggactggctcccccgacccgaatctccggaggtcaccggctgggagggggtgggccaaaaataattaatcgagcagctcaggcactcaaacaggcagcatccaatgctcggaatgacaagggtttcatcggcgcatcgcaccgagccaggctgacccggatggataccagctgtgcaatcaaagccactgcgcatcagctggcacggctggtttataacctgctgaccaaaaggcaggcctatgttgagcaaggccttgaggaatttgaagccaggagccaagaccggcaggtccgggctttgcttcgcaaagcccggaaactggggtatcaggtagtggctgcgtgaggcttaaaaaaacaatgggttgcattttgtttgatgagagcgggc

SEQ ID NO: 1625 - DNA, 1342 bp, unidentified
  source 1..1342: mol_type = unassigned DNA; note = element_220d30c
  misc_feature 1..2: note = core
  misc_feature 3..72: note = LE
  misc_feature 73..1095: note = CDS
  misc_feature 1096..1342: note = RE
  misc_feature 1074..1329: note = bridgeRNA
cgttggggtggacggcccccgcggcatcttgtgccatagttccgctgtcaacactgaactgaggagccgtccatgaccgagattacgcgggttgccatcgacacgtcaaaatctgttttcacgcttcacgcggtagatgcgcgggaccgacctgtcctgcgccgcaatctgaggcgacaggatttggtgtctttcttcgccaagctgcctgccgtcgatgtggcgatggaagcttgcggcgggtcgcattattggggccgtacgcttcaggccatgggccaccgggtgcggttgatcccggcgcaatatgtcaaaccgttcgtcaagcgcagcaagaatgaccgcaacgatgctcaagccatcagcgaagctgcggcgcgtccgggtatgcaggaggtcgctgtgaaatcggcggacgcacaggcgcgggcgatgctgctgacggtacgcgaactgctggtgcgccaacgtacccaactggtcaacgccttgcgtggccatgcgacggagatgggtttggtggcgccggtcggcggtaaagggcttgccgcgctgcgctccgagatcgaggccgatgccacactgccggaggcggctgccgaagccttgcggctgctcggcggggaggccgatcgactggaagcaaggttggcggaaatcgacaagaatctgctggcgcaacacaaggccgatcccaacagccgccgtctgtcagccattcccggggttgggccgatgagcgcacttagcttttctctcatggtcgatgcgacgcagttcaaatcggggcggcatttcgcggcctggctgggcttggtgccgcgcgagatttcaaccggcggcaagcaacgcctcggcggcatcagccgcgccggtaacgagcggttgcgtcagttgctggtgctgggcgccaccgccgtcattcgctttgccaagccagggcgccccagcgcatcggcatggctcctcgctttgctggagcgtaagccgcgcaagctcgcggccgtcgctctggccaacaagatggcccggattatctgggccatgctgacgagaggggacgattaccggcccgcaaagccggtagttgcatgaccccgatcgtcatgtcgcaggtgtaagggcagacaggaaaagatgctgatcggtcgaaccgacgatccacaaaacccgtgtagggtggcggccttcgaggtcactgatccgtttgggtgtggatcgcggaacccatctgggccagcggtcatcgtgccgcgtcaaataggccggacacacgaccgcttttcgcaccagatcagatttttttctcaaacccccttgcattcaaagggccgtccacaca

SEQ ID NO: 1626 - DNA, 1342 bp, unidentified
  source 1..1342: mol_type = unassigned DNA; note = element_220d90b
  misc_feature 1..2: note = core
  misc_feature 3..291: note = LE
  misc_feature 292..1116: note = CDS
  misc_feature 1117..1342: note = RE
  misc_feature 1139..1337: note = bridgeRNA
tgatgtgatggacgttccctttttcagtggctgacagtgtcatctttaactttatactgagtatattgcatttcggaagatcttctcatgaacacaattaaagtggtgggcattgatctcgccaaaaacgttttccaagtctgtgtctggtcaacggataattctgtggcctagaataaaaaaatctcacggcaaaaattgctggatacactcaggacgtttccgcccaataccctcattgcgatggaagcttgccagggcgcgcactactggggaagaacgctccagaacatgggctatgaaatcaagcttatcccgactcagcatgtcaaggcattctgtaaaaatcaaaaaaatgatgctaatgatgcgctggtcatttgtgaaaccgcctgccgccccgggattcattttgttcctgtcaaaacggtcgaacaacaggatatcaaagccctgcgtagtgcacggcaactcatcgtggaacaacgtaccgcatcagttaatcaaatgcgggtgttgctcgctgaacaaggtcttgtgctccccgcgggcattcagcaactccggcaagccctgcctgatattctggaagacggaaacaatgctttatcctttgttcttcgtcgcctgttgcattcattacaggacgatatgcggcgatttgatgctcgtcttcacgaaatggataaagagattcaggcggtttcaagtcagcaatcgggttacgcccacttactgaccattcccggtgtggggccgttgattgccgccgcttttgtcagtgacgtcaatgtagatcagttcgcgcagggtcgtcagctctcggcctggtgtgggctggtgccacgtcaatacagttctggagggaaaatccatctgtcaggcatgaccaaacagggcaaccgtcacctgcgaacgttaatcatacacggtgcccgggcggtgatgcgctgttgtcaaaaacgtgatgatgcattgggcgagtggttaagaaagttacttgcccgatgtagcttcatgaaggccacagtcgctttagcgaacaaactagtgcgcattatctggcgcattttgaaagatgatgtggattttatggtgaagaaagcggtgaattaacagattgaaaaagacgttttattgagtttgcatacactgatgaaaaaacggctaccgtccctgtaatagcctgtagttgaccaaggtagtgatatacctatgttgtgataaggaaacagggttcgaatgacattatggcgcgggtgatttagcccacaatgacgccggatatatggtcgcaaaaccgtatcaattcaatgtttgcataaccgggaacgtccatata

SEQ ID NO: 1627 - DNA, 1221 bp, unidentified
  source 1..1221: mol_type = unassigned DNA; note = element_22151eb
  misc_feature 1..2: note = core
  misc_feature 3..225: note = LE
  misc_feature 226..1218: note = CDS
  misc_feature 1219..1221: note = RE
  misc_feature 37..199: note = bridgeRNA
tcctttagatttgtaatcgataaaattattaaatttagaaagagaaaagcatttaattaaactatgttccgctcagagtaaaactcaaggcttgattcagaattaaatgctcttcctttcattaaaaactcaaatagaaattcgggatttgaagcccattattaaggagttgagtaatgatgaaagtttctctttcgtaaggtgttaacttgtaaattcaaaattatgaaaaaattaattattgggattgacattagtgcagaaacattggatatttgtttaaaaacagatttagaggaaagatacgaggttattgaaaacgaaatttctgtgattaaaaaattcttcaaaagctttaaaatttatgaggaagttgtagtagcgatggaaaacacagggaggtataattggaatctttacgaggttttagagcattttgaatttaaagtttatgttattaatccgcttcatttgaagaaaagtttaggtttatcacgcgggaaaaatgataagatagatgcctcgagaattgcgcattttatagaaagaaacagtggcgatattgaactttggaaaccgagttctgaatcaatgaagaaattaaaagttcttttaacagagagaaaatcgaaggttaagttgaaatcaagtttacttcaacagaagaaaaattacaagtgtactaaagccattggattagaaaaaatgcttctaaagattaatgaaaaagaaataaagctgctcacagatcatattaaatttttagaacaggaaatggaaaaagtgataaaaatggatgcagaattaaaagagaaaagcggattaatgcaaagtattccaggagttggaaaagtattaacctggatgattttggcgaaaacagataattttcaaatgattgatagtgcaaggaaattggcttgttatagtggtgttgttccatttgatcatcaatcgggcacctcattgcgataccggccaaaagtttcgccatatgctgataaatctctaaaaagtacgttacatctgggagcaatgagtgtggtgaaactggataatgatttatctaaatattatcaaagaaaagttttagaaggaaaaaataaaatgttggttttaaataacatccgaaataaaataatccatctcatttttgcagtactcaaatctggaaaaaaatatgaaaataattaccaaaatagtttggcggtgtcatagaaa

SEQ ID NO: 1628 - DNA, 1434 bp, unidentified
  source 1..1434: mol_type = unassigned DNA; note = element_221db8a
  misc_feature 1..2: note = core
  misc_feature 3..120: note = LE
  misc_feature 121..1152: note = CDS
  misc_feature 1153..1434: note = RE
  misc_feature 1187..1387: note = bridgeRNA
agatggggtaatcggccggcgatcttgtggatagctgaagattttgggtgctgcgcttcaggctgatggtgaaacgaggtccgtggtcacggcctcaagcatcagaaggagaagcgcagcatggaccattttgctggattggacgtatcggtcaaggagacgagtgtctgcattgtggatgacacaggcaggatcgtgcgggaagtgaaggtggcaagcgagccagagtgtttgctggcggtgttgacgaaccccgcctaccacttcaagcggattggactggaagccgggccgctatcgcaatggcttttcagcgctctcgccgaagccggcttgccggtgatctgtgtcgagacgcggcacatgcgggcagtattaaaggcgcagatcaacaagaccgaccgcaacgacgcacgcgggatggcgcagatgatgcgggcggggctttatcgtccggtgcatgtgaagacgttacgcagccagaagctgagaatgctgctgacccatcgcaagctgttgcagtcgaaggccatcgccgtcgacaacgacctgcgcggcactttgcgcaactttggcctcaaggtgggtatggtcgggacgttgaagttcgaggcgcgcatcaaggagctggtcgagaacttgcccgatctggctgttctggtcgaaccgctgctcatcgtccggcgggtgcttcgcgaacagatcggtatcctgcaccgccgcttgttggcgatcgtgcgggacgatgaggtgtgtcggcgtctgatgacgattcccggtgtcggcccagtggtggcgctgacctatcgcgccactgtcgacgtgccggcacgctttcgtaagtccaaggcggtcggggcagtgttcggactgacgcccacccagcatcaatcgggcgaaagcgaccggcccggcgggatatcacgctgcggcgacgagatgatgcgggtgatgctctacgaagcggcccagatcacgctgacccgcaccaacaagtggtcctggctcaaggcctgggccatgaagatcgccaggcaccgcgggatgaagaaggcgatcgtggcgctcgcgcgccgcctcgccgtgatcatgcatcgcatatgggttgacggcactgagttccgctggacccgggaagccgcagcggcatgagagccgtaaaggatcaaatgcgataggaggaactcgagctccacctagcggtggaatgatgtccctcgcgggacgatggatgaggtgagttcgtatgtccgcttggacctgtcgtttatctgacgccaaggccgcctaatagattgttccacctcgttctcgaatcccatactggaagggccctagcgccgattccgaagagaagcacgagcccgcgggcgacatcgacactgtagtggtggatagtctgaaagcgcttgaccccgaacggccgattagaga

SEQ ID NO: 1629 - DNA, 1359 bp, unidentified
  source 1..1359: mol_type = unassigned DNA; note = element_2224950
  misc_feature 1..2: note = core
  misc_feature 3..81: note = LE
  misc_feature 82..843: note = CDS
  misc_feature 844..1359: note = RE
  misc_feature 1135..1354: note = bridgeRNA
ataatgaaatggacgctccaacttttacggcatcaaagtgcctaaatgtgagtgttaaaactcagaagaaggagcgtccacatgaaagtatctactcttggtatcgacctggcaaaaaatgttttccagcttcatggtgtcggctgcaacggtcaaactgttcttaagaagaaactcacccgcgataaattcctcccttttctcatgcaacttgaaccttgcttgattggcatggaggcctgtgcttccagtcatcattttgcgcgtgttttacggcagtatgggcatgaggttaaactcattccccctcagtatgtgaaaccttatgtcaaaacgaataagacagatgccgctgatgcagaagccatttgtgaagctgttgcacggcctaatatgcgttttgttcagattaaaacggcagagcaacaagctattctggtgctgcataccgagcgaaacatccttatccgcgaacgcactgcttgtgctaatagtatgcgggccattttggctgaatttggcatcatcatgcctcgcacattaagtcagctgtataagaaaatccctgaaatattggaagaatatgataacgagttatcaccttttgtccgttgtagtgtcgcgcgtcaacttgaacaccttcagggtgtggaagatcaaatcacgttgattgaacaagaacttagccgttgggcaaaaacacaacccgcctgccagcgggtcatgaaaatccccggagtgggattgatgacggcgacctaccttgtggcgtcagtggggaatgggcaacaatttcattcagcgaaacagtttgctgccgagagagttctcaagtggcggtaagcagagattgggccgaatcagcaaaagaagtgagcgctatttccgttatcttctggctcatggtgcgcgggcagttgcagccgttattgagagacacaaagacaatatgccgtggctttacaggctgttgaataaaaaggcctataacgtagccgttgtggcacaagccaataaaacggcacgtattttgtggtcgatgctggttcagcatacggaatatcgaaccttatccgcggtttgagataatctcaaacacggataaggctcaagaacaaaagtgaatacgtttcaggtaattgcaagtgtaattattgagatggcaaaacaggtaagaccgcaagtgagagactccgtgagccgccggggcatttggcccgtaaggatgacaggaactcacttggcggatttcatcatggttcgggcgcaatcgcgcccataaagaaaccggatatatggctgcaatacctgagcgctattttcaagaaaaaacacttggtttattgggagcgtccatat

SEQ ID NO: 1630 - DNA, 1410 bp, unidentified
  source 1..1410: mol_type = unassigned DNA; note = element_2225afa
  misc_feature 1: note = core
  misc_feature 2..90: note = LE
  misc_feature 91..1125: note = CDS
  misc_feature 1126..1410: note = RE
  misc_feature 1184..1405: note = bridgeRNA
caatgggatggactcctcccttctcaaacggcatcgaagtgccagactggaggaagttgccccccgtcgaattgaaagaaggagtccgaaatgaaagttacccgtgccggtattgatttggcaaaacaagttttccagttccacggcgtggatgccgaggaacagaaagtgacgcgccggcagctccggcgccatcaggtcttggcgttctttgcccgcctgccgccctgcctgatcggcatggaagcctgcgccagcgcgcaccactgggcgcgcctgctgatggcacaagggcatgaggtccggctcatggcgccgcagcatgtgaagccctatgtgaagggcaacaaaaacgacaccaacgatgccgaggccatctgcgaggcagtaggtcgtccgaacatgcgcttcgtcccgatcaagagcgcccagcaacagaacatccaggccttgcatcggatacgctctggcctggtacaggaacgcacggccaaggccaaccggattcggggcctgctgggggaatacggcatagtctttagtgcgcgaatcaatgtactgcgcaaggccctgcccgaggtattggaggacggtgacaatggattgctgccggcattccgctccttgctggaagggctgcgccaagatctggtctatttggatgagcgcgtgagcgaactggaccgttcgatcgaacaactggcgcgcgagcatgccgatgccagccgactgatgagcctgcgcggcgtggggccaatcacggccacggcactggtggcggccttgggagatggcagcgatttcaagcgaggtcgggatgtctcggcctgggccggcctggtcccgggccaacacagcagcggcggcaaggaacggctcctggggatcagcaaacgcggtgatgcctacctgcgcactttgctgattcatggggcacgagcagtcatccaaggtgccaaagacaaacaggacggcctaagccgatggatccaaagcctttgccatcggcgtaacaaaaacattgctgcggtggcgctggccaacaagacgttgcgcatggcctgggcgctactgagaacggagacggaataccaagcggattatgcggcaggaaggccggcctgaaagaaaccgggttgtcaaacaacccgcggatgcaacgaactaccggagtcacactccagacgattgcgcagcaaaaatcgttgatggcccccaggtcgaaccggcgtctgaaaaaccttgttcatccggagtgcccttgagcacgatagcccgatcaggatcagacgcgcgaatagcccatcatggcccaggcgaatgcgcccaacacaaaggccgaatatacgtgagcagtcgagcctaccgccaaaaacgaaaaatgctggcaaaacgggaggagtccatata

SEQ ID NO: 1631 - DNA, 1642 bp, unidentified
  source 1..1642: mol_type = unassigned DNA; note = element_2225cc1
  misc_feature 1: note = core
  misc_feature 2..296: note = LE
  misc_feature 297..1481: note = CDS
  misc_feature 1482..1642: note = RE
  misc_feature 60..273: note = bridgeRNA
cctgatatattgtaaatgactcacctaatagtcaatgtacaatatacatttcctttctatcaaccttgtaaaccgtggttgatgacggttcttgtttcttgtacaatcttgaatatgtgattgtggatttgtattttttcctgtggcttgactactttaaggaggttcctaccacaccttattcctaaataatgattagttagatgagtctttgaattcgtatctcgtaccaggttttgtggtttaagtgtacgtggttactcaatcactattttctatgaaaggatgtgttatttatgattcatatcggtattgacattggtaagcactcgcatttcttctgtatcatcaatcaaaacgatggagaagttcttatcgaacctactagtttcaaaaataatcaagatgggttttctttactccttgattatttgaaaccttattccctatcttctatcctcatcggtatggaggatacagggcattatcactttgctttactcaagttccttcttgataagcacttttctgtcgctcttatcaatcctacaacgacggatctcactcgtagactttatggtggtatcacgaagaatgacaaacttgattccttgactatctgtgatgttctatcttctcatggcagaaataaactctatcgtatttctaaaatcaacagttttcagttgtatgaacaaaaacagctcactcgccatcatcataatcttaaggaagaacttaacatctataagaatcgtcttcaaaaatgtattgatatcgtttttcctgaattcaatagcctattcaagtcgaaatacggctctatctatatgaatatcctcaaatcctttggcagcgctgatgctattgctcatagcgacattagaaatattcgtaagtgctttaatatcagaggcaaaggaaatcgtatttctttaactcctgaactccttaaggaaactgctaaagattctattggtataaactccgtagctgatgtaatgcaaatcaaacatcttgtttctcaaattgaactcttggaagctcaaatttctgaagtggataaaaaaatagaagagttttctaccaagaccaactctcctattctctccataccgggaatttctcacttctccggtacttctattttagccgaattaggagatattaacaactaccctaatgcaagaaaaatcatcaaagcggcaggggttgctccatatcattacgaatcaagtcaatttaatgcacaacatactgctattaccaagaaaggttctaaatacctcagaaagactctttatcaaatcatcgttcctatcattcgctttaatcccgttttccaagattactataacttaaagcgttctcaagggaaatcacaccgatgtgcacaaggacatcgtgttagaaaattactcagagtcatctttcatcttttgaagacaaatcatcaatttgatccttcactcttaagataatgaatacaaaaacaaaacttgaacttcttgtaagttgttttcgtcatgcctttttatacaaatctttattcacattttcaaagatcaatttttagccactatttcaaatttttatattttcatactttttcatctaaactacttgatttttatatagttag

SEQ ID NO: 1632 - DNA, 1461 bp, unidentified
  source 1..1461: mol_type = unassigned DNA; note = element_222712a
  misc_feature 1: note = core
  misc_feature 2..226: note = LE
  misc_feature 227..1447: note = CDS
  misc_feature 1448..1461: note = RE
  misc_feature 13..241: note = bridgeRNA
ctactagagacttcctcccaggatcggtgtctggccagactcggtccaggtgtccggcggagggctctctatgcggctgcccaccgagtgctggtgtggctctcttccggtctgcaatccgtcgggcaccgtgacgaggcgtggctcgaaaggggactgcccagctcgtagtagcactgcccacctcgccgtccttatcggcacgaggtagaggcaggagaacgctatgacgagagtgatcatcggtgtcgatccacacaagctgtcggcgacgatcgaggtagtcgaccgacacgagaagctcctcggatctggtcgattcaggactgatcaggccggctacaccgcgatgcggacctacgcgaagaactggcccgaccgactgtgggcggtcgagggatccaacggcgccggccggccgttggcccaacgactcctcgaggctggcgagcaagtggtggacgtgccggccaagctcgccgcccgggtccgactcttcgacaccggtcacaatcgcaagaccgatgcccgcgacgcgcattccatcgcgatcgtcgcggtccgcaccacgaccttgcgggtcctgcgacctgacggtgagcttgaagcactgcggatgctgtgtgatcgtcgcgaggaactcactcggcttcgggtccagaccgtgaaccggctccaacggttgctggccgagctgatcccgggtcaggcgaagaaggacctcacagccctgcaggccaaggcaatgctcgccacggtgcgtccccgcgacgtggccgggaagacgcgccggcggatcgctgcagaggagctcgctgacctggtcgcggtcgaggcgaagatgaagaaggccaccgccgagttgaaggtcctagttggggcccgcggatcacggctgatggacctgcacggcgtcgggcccgtcgtcgctgcccgcaccctggccgacgtcggtgacatcgcccggttcgccgaccgcaaccggttcgcgtcctggaccggaacagcgcccttggaggcgtcctcgggcgagcagaaccggcaccggctctctcgagctgggaaccgtcggatgaaccacatgatccacatcgccgcagtcagccagatccgcctcgacaccccaggccgtctctactaccgacgcaagctcgccgccgggaagaccaagctcgaggcgctgcgctgcctgaagcgaagaatctctgatgctgtctaccgacagatgctcgcggacaccgaacaagctcacggcagttcagctgagcccgttggcacgggcccgggagggcactgcggggcgtctcaagaatccagcgcggtcgacctgcccccgcacatcgacacttcggatcagccacttcccggacccgcgaaaccgacgctacaaccgcatcagccgactcggaagacctctcgaacgaagacccctcagtcgaccggttgacaacaaaggggagc

SEQ ID NO: 1633 - DNA, 1397 bp, unidentified
  source 1..1397: mol_type = unassigned DNA; note = element_2227aa0
  misc_feature 1: note = core
  misc_feature 2..87: note = LE
  misc_feature 88..1119: note = CDS
  misc_feature 1120..1397: note = RE
  misc_feature 1168..1389: note = bridgeRNA
caatgggatggacgcccccacccgcaacggcatcgatgtgccaaagtggaagtgtcaccgaccacttgatacgagaggggcgtccagatgaaggttacgacgatcggctttgatttggcaaagaacgtattccaggtccacggggttgatgagcgagggcatgtcgtggttcgcaagcagctgcgacgcgaccaggtcgcggtcttttttgccaacctgccggcatgtctggtcggcatggaggcgtgcggcagtgcgcatcactgggcccggaagctgcaggggatcggtcaccgtgtgcggttgatatcgccgcagttcgtgaagccgtatgtcaagagcaacaagaccgacgcggccgacgcagaggcgatatgcgaggcggtagcgcggccgaacatgcgctttgtgccgatcaagacgatggagcaacaggcggtgctgtccgtacaccgagtgcggcaggggttcgtaaaggcgcgaacggctcaggcgaaccagattcgtggtttattgaccgagttcgggctggtgctgccgcaaggcatcacgaatgtcatgcgcggagtgccgcaactgatcgatgcggctaccgagctgccggcatcgatgcggcagctaatcgcccggctgctcgagaacatgaaggtgctggatcggcaggtccaggagctcgaggcacagatcaaggcttggcaccaaggcagcgagctgagccgcaagctcgagaagattcccggcatcggcccgctgacggcaagtgcactggtggcctcgattgccgacgccaggagcttcaagaacggtcgtcagctggcggcgtggctgggcctggtgcccaagcaggactcgagcggcggtaaagcgaagctgctgggcatgagcaagcgcggcgacacctaccttcgaacattgctgatccatggtgcgcgctcggcaattgtagcggcgcagcgtaaggggaagccgaacgtctggctgtcaggactgcttgcccgacgccatccgaatgttgccgccgtggcactggccaacaagaatgcgcgcacgatctgggctctgctcgctcatgagtgcgaattccggcccgattacctgccgcggcctgcaaccgcgtagccgcagctcataaccgcaagcgatcaatcagacgaaggagatcgacccaccgattgctaaggcgctcaggcaatgatggcaaacaggtcagaccttggttggccaaacccaaaatgactgctgcaccgcgagtgcgtcatagcgatcgggagccaaccagccaatcccatcagggacagcggcacgatgccgcacgcaaagtccggatgtacgggtgcaatctgctccttcatgccatcgagaaaatgagcgcattgcaaaccgggggcgtccatgta

SEQ ID NO: 1634 - DNA, 1607 bp, unidentified
  source 1..1607: mol_type = unassigned DNA; note = element_22320d8
  misc_feature 1..2: note = core
  misc_feature 3..277: note = LE
  misc_feature 278..1498: note = CDS
  misc_feature 1499..1607: note = RE
  misc_feature 16..300: note = bridgeRNA
ctcctaatatataggtgtagtggttagcgccccaacaaccagctggggcattagtcctcttgttgcttaagctgttagaatgaagtggcattggttcggacgggcacctccttggaccctgcgtccgtgcgtaagtctgtctgccagccactcattcgcagctgttcggtttacgtagattgaaccacgtcccgcgcgttcgcttgatgcccaggagattgaataagcaatgaggaatggctgacccactgcgaaattgatctcaggaggttatcttatgctgaacgctgttggtattgatgtttcgaaaggcaagagcacggttgcgatcctgcgccccgcaggagaagtcgttcgaaagcctttctctgtttctcattctgtcaaggatctttcggatctggtctcctatgtcggaagcctcgacggcgagacgaaagtcgtcatggaggcgaccggacattactacgaaccggtcctgaaagcctttctggacgccggtattttcgtttccgccgtgaatcccagcctgatcaagcgccacgacagtgatgaaaacccgcttcgtaaagtcaagtcggatcccgcggatgcccggaagatcggcaaatacgcccttgataagtgggagtatctgcgtcagcattcagctatggataccactcgagaacaactgaaaacgctgaatacgcagttccacttcctcatgcagcagaaggttgcactgaagaacaatctgatctcccttctggacctgacctatcccggtgcaaatgatctgtttgccagccccgtccgttccgacgggagcgagaaatggatcgattacgtccactccttttggcatgtggactgtgtccggaagatcggcctgaaagccttcacagagcgttacaggaacttctgcctgcatcatggctatatcttccagccagataagccggaagagctttttaatgccgccaaggagctggttgccgtcgtcccgaaggatccagtttacaagcagctgatcctcggcgatatcgaacagctgaatacggtctccaaacagatcgaagcgttccgccaaaccatgaacgagcttgcttctacgctcccggaatacgataccgtgatgtccatgcatggcgtggggaccacgtatggaccgcagcttatggctgagatcggcgatatctcgcgttttgaccaccgctccgcgatcaccgccttcgccggcgtcgatccgggcgtcaaccaatccgggacgatgaatcagcaaagcaaccgtgcctccaagcatggagatcccaggcttcgaaagacgctcttccagatcatgagcacactgcttcagctcgcaccgtcggacgacccggtctatctcttcatgatgaaaaagaaatctgaagagaagccctaccaggtctacatgaccgccggcgcgaacaaatttcttcgcatttactacggcaaggtcaaggagtgcataactgctcaaacctccgcccagtagccaaatcacaatgttttcttacaggctagcgtacccggtggtctttttgtggtgcctccatttccgtctgctaaaatcttaaaatcatgcttgactttttattagtaga

SEQ ID NO: 1635 - DNA, 1423 bp, unidentified
  source 1..1423: mol_type = unassigned DNA; note = element_22389b4
  misc_feature 1: note = core
  misc_feature 2..86: note = LE
  misc_feature 87..1139: note = CDS
  misc_feature 1140..1423: note = RE
  misc_feature 1189..1415: note = bridgeRNA
caatgggatggactcctcccccttacggcatcgaggtgccagactgagaattgcattcccagtcacaggttgaggaggagtccgagatgaagattacgcgccttggcattgatctggcaaagcaggtgtttcagttgcatggggtggatgagcggggtcatcgggtgttgcgccgtcaggtacggcgggcgcagctgctggagtatctggcgcgtcttgagccgtgcctgatcgggatggaggcgtgcgccggtgcgcaccactgggcgcggcgcctgcgcgagctgggccatgatgtgcggctcattgcgccgcaatttgtgaagccgtacgtgcgtggcaacaagaacgatgccaacgacgcggaggcgatctgcgaagcggtgggtcgtccggacatgcgctttgtgcgcatcaagacggtggcgcagcaggacattcaggcgctgcaccgggtgcgcagcgagcgggtgacctcacgcacggcgctggtcaatcagattcgcggcctggtgggcgagtacgggattgcgatcgcacaaggggtcaggcaggtacgggtggcgctgcccgtgctgatcgagaacgcagacgagcggctcagcgaggcgttcgtgcagattctgtcggaacagtacgacgatctggtcgcgctcgatgagcgcatcgcccggctcgacgcacagatcgagcgcatcgcgcgcgaggatggggccgcgcgacggctgatgagtttgcgcggagtgggcccgatcaccgccaccgcgctggtggccagcttgggcgatggccgtcagttcgcccgggcgcgccaggccagtgcctgggcggggatcgtgccagcgcagcacgcgagcgggggcaagcagcgcctgctgggcatcagcaagcgcggtgacgcgtatgtgcgcaccttgcttatccacggcgcgcgctcggtgatcaagaactgcgcgcacaaggacgatgcgttgagctgttgggtgcaggcgctgtgcgcgcgacgcaacaagaacgtggccgcggtggcgctggccaacaagacgctacgcatggcctgggcgttgttggtgcgaggcggtgagtacgatccggagcatgcacgaacacggaccgaagagcctgtgggtgtggcgtgagcgctgcgcagtgattgaagtgaatcgaagtaacgagaaggagtaagcccctaccgtcgattgcgaagcccaagtcgtggatggctcacaggtcgaaccgacgtcggcacagcctgcttaacgcgaagtgctcccaagcacgataggtcgatcaggcgccggcgtgcgaatagcccatcgagacccgagcaaatgcgctcaactactgaggtcggatatacgtgcgcagtcgtacccaacagccaaagacgacaaaaggcttgcaaacgggaggagtccatata

SEQ ID NO: 1636 - DNA, 1411 bp, unidentified
  source 1..1411: mol_type = unassigned DNA; note = element_223d1ca
  misc_feature 1: note = core
  misc_feature 2..87: note = LE
  misc_feature 88..1128: note = CDS
  misc_feature 1129..1411: note = RE
  misc_feature 1179..1403: note = bridgeRNA
taatgggatggacgccccctttccgaaacggcatcgaagtgccaaagtggaatcgttgcagtccacttgaactgaaaggaggcatccatgaacaaggttacgacagttgggatcgatttggcaaagaacgtgtttcaggtgcatggggtcgacgagcgtgggaagccggtgctgcgcaagcagctcaagcgcaaggacgtggtcacgttcttcgcgaacctgccgctctgcctgatcggcatggaagcctgcggcagcgcccattactgggcgaggaagctctcggagctgggtcatacggtacggctgatgcccccgcagtttgtgaagccgtacgtgaagacgaataagaacgaccgcaacgatgccgaggcgatctgtgaggcggtggcgcggcccaatatgcgctttgtgccggtgaagagcgctgagcagcaggcggtgttggcgctgcaccgggctcgggctggattggtgaaggcgcgcaccgcgcaggccaacgagattcgagggttgctcgctgagtacgggatcgtgatgcccaagggcatcgggcagatcgccaagtgcatgcccgagatcctggaagatggcgagaacggcctgccgggaacgatgcgccacttgttcgcgcgcttgaacgataggctcaaggcgctcgatgaacaagttgcggaactcgagcgcgagatcgtgctttggcaccgagggaacgagtccagccgcaagctcgatgacattgccggcatcgggccgattaccgcgagcgcctttgtggcttcggtgggcgacgcgaagaacttcaagaatgcccggcaagtacccgcgtggctgggcatggtgccgcgccacgagggtaccgggggcaaagcgaggctgggccgcatgagcaagcgcggcgacgtgtatctgcgtacgctcttgatccacggggcgcgtgcggtaatccgccagtttgaacgcaagcccgatcggcccgatggctggctcaagcggctgctggcccggcgcaacaagaacgtcgccgcggtggccctcgccgccaagaacgcacgcatcgcctgggcgctgcttgcgcacgagcgcagtttcgagcgcgattacgtagcaacacgcccggtcgcgtaatcgcgatcggttgaaccgaacgagcgaactgtttagcaaaggaggactttccaccgattgctcaggcaatcacgacgtgatggcaagataggtcagaccgtgacgggacgaacctgcgcagtgcaaagcactttacagtgcgcgcaattgataaggaccccgtcagccgattccatcagggaccgaggcataggcctcataccgagtccggatctatggccgcaatcttcaaccttcttgccctcatcgagtggtcgcttgacaaaccgggggcgtccatcta

SEQ ID NO: 1637 - DNA, 1393 bp, unidentified
  source 1..1393: mol_type = unassigned DNA; note = element_2243b6b
  misc_feature 1..2: note = core
  misc_feature 3..88: note = LE
  misc_feature 89..1120: note = CDS
  misc_feature 1121..1393: note = RE
  misc_feature 1091..1381: note = bridgeRNA
agatggagtggttgccgctctacccatacgacaattcgtgtttgaagattgtggtgttcacggccacaaaatgggaaggacggcaatcatgatgacggatacgatgattgggattgacctggcgaagaatgttttccaggtgcacggggcgtccctgacggggcagattaggttccgcaggaagttatcgcggctgcagtttcgcagattcatggccgagcaacccgcggcggttgttgtcatggaagcctgcggcagtgcgcattcttgggcacgggaaatggccaagtacggacatgaggtgaaactgatcgcgccgcagtatgtccgcccgttcgtgaagcgccagaagaacgacgctgctgatgcggaagcgattgtcatcgctgcgcagcgacccgagatgcggtttgtcgctccgaaggctgaggctcagcaagcccgtgcgcttcttttccgcggcagagagcgacttgtgcatcagcgtactgagctggtgaacgcgcttaggtctcatctttatgagttcggtcacacaaccccgcaagggatcggcaacatgaagcgcgtcgaggcgatcatcgaggatgaggcctgcgatctgccggagctggtccgtgaggagtgccgtgatctcctattgcagatctccgagaagacgcaacgaatacaaaccaagacaaagcagatcagctctctggcagcacagactgacgcaacgcgtcgtctgcaaaccatgccgggcattggtccgatgagcgcgttggccgttgaagcctttgcgccgccgatggagagctttcgacgtgcacgggacttcgcggcatggttaggtctggttccgcgacagcactcgtccgggggcaaggagcggcttgggcgtgtctcgaaagctgggcaggccgatattcgcaggttgttgatcatcggtgcgatgtcgaggctgaactggctcgggcgcaagacaatccccgacggatcctggctagcccggatgttggatcgaaagccaaggatgctggtagccatagcgttggcaaacaaaatggcgcgagcgatttgggccatgctgacaaagaaagaggactatcgatatccggtgcaaactgttgctgcatgactgaggtgcagcgttcgacaggccagcgccggtaaaggaggtgtgagaacgtcgacgacctacatgggcaaaatgatcgaacagatctgggtcaggaaaaccagttaggggctaggagcgcatcagctcgttgaatagatttggccctgatccgcagatcaccatatcggcaagcggcttctgaagtgccgcattgaaggcctgacagaagaccgcactcgatcacaccccaaacgggtcaaaaacttcttgcactggggcggcaaccacaga

SEQ ID NO: 1638 - DNA, 1536 bp, unidentified
  source 1..1536: mol_type = unassigned DNA; note = element_2249b85
  misc_feature 1..2: note = core
  misc_feature 3..240: note = LE
  misc_feature 241..1419: note = CDS
  misc_feature 1420..1536: note = RE
  misc_feature 3..218: note = bridgeRNA
cttgtattatgaagtagtagtttttatagcccctctccaagggctgtgctacactgcaagggatgctgtggattggtatcattctcctaccgcatgacggttcacgaaaggctccaaccacagccctttgcagtattgttaatcagttagataccgccagacggtttatgtggaacaaggttacaagagcaaagtgtcctgtggatgcagcatcataaatcatcctctggaggtatcatcatggtttgcgttggaattgatgtggcaaaggacaagcacgactgcttcattctcaattcggaaggcgaagtgctggcggacgctttcaccatcgtcaacaaccgagaaggctttgagactctgttgcagcgaatccacacctgtaccactcctgcggacaaaataagagtagggcttgaggcaaccggacactacagctacaacatcctcgggtttctgcttgagaatgggatgccgcccttcctcattaacccgctgcacaccaatctctaccggaaaagcctcagccttcgtcaaaccaagacagaccgtattgacgcgcggacgattgcatctatgctcatgtctgatgtggacctcaagtcctacacagacacagcataccacaacgaggaactaaagtcactcacaagatacagatttgacaaagttcgtgagcgcgccaagcccaagcagtctgtttcccggctcgtcaacattctgtttcctgagctggagaagctcgtgccctcattgcacatggcgtcggtctacgccgttctcagcgagttcccgggagcaaaacagatcgccaacgcgcatttgacgcacctgaagactgtcttgtctgacgcatccaaaggccgctatgaccgcgaaaaagccgttgagatacgcgaggctgccagatgctccatcggctctgtcatgccggcaaagtccttggagctgcggcataccattgcgctgatccgcgagttggatgctgagatcgaagaaatcgaagccgaaatccgttgcttgatggacgagatccagtcgcccattaccaccattcccggtatcaacttccgcatgggcgccatgatccttgccgaaatcggcgacttctcgcgctttgactcgccggacaagctcctggcttacgccgggctttcaccgtccacctaccaatccggcaagctcaacgcgaccggtgcttacgcgcacatggagaagcgcggttctcggtatctgcgctatgctcttttcaacgctacaaaatacgtttgccattgggagccgacctttgcggcatacctcgccagaaaacgagccgagggaaagcactacaatgtagccatttcgcacgccgtcaagaaactcgtgaggctgatcttcgctttgcaacaatccggcagggcgttccaagccgcctgaccgctcgccaaatactacgctgagcgccctacgggacgctttggttgttgtaccttttttacgtgtctgccaattcacagcttttcttaatttagggcttgacttttaatagttagt

SEQ ID NO: 1639 - DNA, 1648 bp, unidentified
  source 1..1648: mol_type = unassigned DNA; note = element_224aa21
  misc_feature 1..2: note = core
  misc_feature 3..294: note = LE
  misc_feature 295..1554: note = CDS
  misc_feature 1555..1648: note = RE
tataatccgcctttctgcgaaaggcacctacggggttatgaaacaaggtgctttcgctcttttaagttttttgctatactgaatttggagtgtcggcacactacaacagcccgaggaggtgagtggcggggcggtatagcggctaccccgcatagctatatggtgtcggtcgtccgttaaggcatcaacgaatggcgcaatcaacagcccgtaaacttatctcttacaaatcgactcgattttgccggacgaccagtccctgccgactttccaaatattttttggaggtttgctatgtttaaaatctttcgcaaaaactgctgtggtctggacgtacacaagacttggatttatgcctgtatcggtattaccgatgaaaatgggcgtacagactatcaacagactcgtttttcttcgttctcaaaggggttgcgcgaattagcggattggctcgcgaagcatgagtgcaaggaagtttgtatggaatcagcaggtagatactggattccggtgttcaacatccttgagaatacttgctgggtcacgctcgctcacccaaagtacaccaagccgcaaaagggcaataagaccgatcgcaaggacgcaaagtggatttgcgacctatttatgtgcgatatgatcaagccgagctttatcccgccgcctgacattcgccaccttcgcgacttggtgcgctaccgtttcaagctgactaatattttgaccggtgagaagaaccgtgcccaaaattgcctaactgtgtcaaacttgaaacttgacgatgtattttctgatatattcggtaagtcggctatgtcgattaccaaatatattttagaacaccccggagagcaatttgacgtcactccgtttgtgaacagtcgctgtaaatctccgattgaggagattcaagccgctgtcgatggctctatctcgcgtgaacaagctacaaagctccgcgaaattcttagccacatcaacgagcttgaaactcacaaagcaaacattgaaaccgagattatgcgccttgccgcgccatatgaagctgcacttgaactgattcgtaccgttccgggcttttcctccgacccgatgaccgctattgcagttatttccgaaatcggaatagatatgtccgtgtttccaacggcgaaaaacctcagttcttgggcaggttgttgcccgcgtaacgatcaaagcggcggtaaacgtaaatcaaatcgcatatctcgtgctggtgtttacattaaacctcttttggttcaagtggcaaacgctgtcgttaaatccgacaagtaccctgaatttaaagagcgttatcgcagaatcaaagcccgcagaggtcacaagaaagccattatcgccatttaccgtatgttcctgaccgctatctggaacattatcgacaggttggagccctattctgccaaaggctatattactgaccgtcctgcaaatcaatctatggtaatctctaaaacacaagctcttaatcttttgcgtttaaggggatacatcatcaaagatgatgttgcgccattggcacctgtttaatcgtttttctatactcctttttttgactgtcttacgacagtctgttttgctatgtccttttttaaggtagtgcaaaattaatttgtttcaaact

SEQ ID NO: 1640 - DNA, 1419 bp, unidentified
  source 1..1419: mol_type = unassigned DNA; note = element_225511e
  misc_feature 1: note = core
  misc_feature 2..95: note = LE
  misc_feature 96..1148: note = CDS
  misc_feature 1149..1419: note = RE
  misc_feature 1190..1409: note = bridgeRNA
taatggaatggacccatccctactttaacggcgtcacgtagtgcgccaggatcaaggtgagttaaatcctttcataccgaagaggagatgggtccgtgaagaagattacgactttaggtgtcgacttggcaaaaaatgtgttccagttgcacggcgtggatccggcgggaaagatggcgctgcgccgagaggtgcggcgggcgcaattgatgcagacaattgcacagttggaaccgtgtttgatcggcattgaggcttgcggcggcgcacattattgggcgcggcggtttgcggagcacggtcatcaggtaaggatgatgagtccacagtttgtgaagccgtaccgcaagagcgacaagaacgatcgcaatgatgccgaggcgatctgcgaggcggtcactcgtcccagcatgcgctttgtcgcggtaaagagcgtcgagcaacaagacatgttgacactgcatcgggtgcgcgaggggctaatgaaggagcgcgttgcgctgatcaatcgcattcgtcgctcgctgtctgagtacgggattgtgatttcgaagaacgtgtgcaatcttcggagcgagccacccggcatcctggaggatgccgagaatgagctgacggtaatggctcggcaaatattcaatgagttgtacgaggatttaggcgcgcgcgaggagcggatcgctcaactggagcgttcgattcgcgcgctcggttcgcggcacgatgtggtgcgccgcttagaaacgataccaggcgtcggatttttgtcggcgagcgcgctgtttgccacggtgggagatgcgaagcagtatcaaaacggcagacagttggcggcgtcgatcggcctagtgccccgccaatcctcgagcggtggcagacaacgattattcggcatcaccaaacgcggcgacaaatacttacgcaagctactggtgcatggagcccgctcgatcgcaacacgcgccgagcgtaaaccgcagccacaagatcgatggctcaacgaactgcgcgagcgccgcggaaaaccacgtagttatgtggcgcaagcgaacaacacggcccggatcgcctgggcgatcatggccagaggtgaagtgtatagagcgcctgcagcaacgctggaatcagccgtggcagttgcggcgtgagcagagcggtggttgattgatagcgatagtaaattcacctcaatggttgcagagccgatgacgacgtgatggcgtaattgatcagatcaactcggtgcaaacctgtttttcacacaggtcgataagaccgctaggctgtttaggtcaccgagagcagattccatcagggccagagagcgtgctctcagaaacaggccggatatatggctgcaatctcgatcaaaacaaaatcaccaactcatcgtcttgcaaacgggggtgggtccatata

SEQ ID NO: 1641 - DNA, 1620 bp, unidentified
  source 1..1620: mol_type = unassigned DNA; note = element_225f309
  misc_feature 1..2: note = core
  misc_feature 3..297: note = LE
  misc_feature 298..1473: note = CDS
  misc_feature 1474..1620: note = RE
  misc_feature 47..275: note = bridgeRNA
ctcgtattatatagtagtagtgtttaaagaccctctccaaggtctatagatactatcattagtcatagtcattctttaccttttctataggttaggctatgatattggagatactgtggattggtaaatcaccgcctaccactttgatggttacagaaaggctacaaccacagtctctttgcctatttgttaatcagttagataccgcatgacggttgatttagaacgaggttacaatcgcaaggagtaccagtggttctaaaacagtatcaaatatttattcaaaggagatttactatgatctacgtcggaattgatgttgcaaaagataagcatgactgctttatcactaactcagatggggatgtattgtttaagtcctttaccatcaccaacaatcgtgaggggtttgaatccttgttccaaagaatcgaatctgtatcagatgatttaaccaaagtaaaagtagggcttgaagccaccggacactacagttacaatcttttggggtttcttcttgataaaggtctgaccacctttgtcatcaatccgttacataccaatctgtacagaaaaagtctaagccttagacagacgaaaacggataaagtcgatgcccgtacaatcgcttccatgatcatgtctgatgtaaacttaaagtcctactcagacacatcttaccacaacgaggagctaaagtcactcacccgttatcgttttgacaaagtacaggaacgtgctaaattaaaaacttccgtttcacgtcttgtaaacatccttttcccggaactggaaaagcttgttcctgtccttcatatagcatctgtctatgcaatgctttatgaattcccaagctcctccgacattgcatcagcacaccttaccaggcttacaaatctgctttccgaaacttctaagggcagatacgataaagataccgccgtcctgtttcgtgaagccgcaagagcctctattggttctcatatgcctgccaaatctcttgaactgaagcacaccatcaagctgatacaggaactgacagttgagattgatgaaattgaatcggaaataaaatccattatggataacattcactcacctatcctttctattcctggaattaactatcggatgggagccatgattgtcgcagagattggtgatttcagccgtttcgattctccggataagatacttgcctatgcaggtctttcaccatctacttaccagtcaggacagcttgataactgttattctcatatggagaaacggggttctcgctatctacggtatgctctgtttaatgccactaaatatgtctgcatatgggacagcaactttgcaacttaccttgccaaaaagcgggcagagggaaagcactataacgtagccatatcccatgctgcaaagaagcttgttcgtgtaatttatcagcttgagaaatcagggcagacatacaataaagcagcttgatcttttctaaatctaatatctcctttttgagtgccgaaaacgacactctatttgtcatgcagttttcaatgttcaaatatatctgaaatgcatttctgcaattcaatcaaaaaatttcattttaggtcttgacttttaatagttagt

SEQ ID NO: 1642 - DNA, 1593 bp, unidentified
  source 1..1593: mol_type = unassigned DNA; note = element_22611ef
  misc_feature 1..2: note = core
  misc_feature 3..100: note = LE
  misc_feature 101..1228: note = CDS
  misc_feature 1229..1593: note = RE
  misc_feature 1332..1534: note = bridgeRNA
agacataatgtattaaacctgtccaaccttaaagcacgtgggttaagctttaaggtgaaagaaaccaaaggctcagagccacaattaaggaggacaggttatgcatcagtataccagcaaatatgtagggatggatgtgcacaaggaaacgatagctgtagcaatagcaaaggaaggacgcggggaaccggattattacggtgagatacccaataacgctgaggcaataaggaagcttgtaaagagagtagcctctaacggggaaagagtatcattttgttatgaagctggaccgtgtggttatgaagtataccgtcagttgatcgaccttggtcagaggtgtgatgtggttgctccgtcacttattccaaagaaatcaggagaccgcgtgaagacagatcgcagggatgctaacacgctgactcgtttacatcgtgcgggggaactgacgccggtatgggttccggataaagagcaggaagcgatgagagatttaacccgtgcccgtgaagatatgaaggccatggaaggacatgccaaacaacggcttggagcatttctactgcgtcatgggaagaaatatcctggcaaaagcaaatggacgcaggcgtattttcgatggctggaagggataaagtttgagatcccggcacagcagattgttttccaggagtatgtcgatacggtcaaacaaatgaaagaacgagtggcttcattggaagaagaaatgcgtcacgcattggaagggtggtctttggcccctgtagtgacaggtctgatggcacttaggggagtggatatcattacagcaatgactgtcattgctgaactgggcgacatcagtcgatttgattctccccgtcagctcatggctcacctgggattagttccgagtgagcactcaagtggtagtcgccgccaacgaggagggataaccaaaacgggcaatggacatgcaaggcgtgtgctgatagaagcttcgtggtgttatcgattgccggcacgcaagacagctcattttcgtcggcgtgcagagaaggcaagcgaaacagtacaggctattgcatggaaagcacaaaaacggctgtgcaagaggtattggtacctgatcaataaggggaaacttccggttgaagcatgtaccgctgtagcacgtgaattgagcggctttatttgggcaattgtatgtgacgtaatggggaaaactaatgcctgtgttaccagataaggataaaacgaattgacgacagaacaaaacaatcggtgttgtcttccggggctacgaaagaaatggagtgtttctccgctcctccagacaacgctatttattggggaaatgtgcatttcggccagggcagcagtcggttgggagaaccctcgtacctactttgaggcacctgtaaataagatggccctcgtgataagacagaggaagctccaagacgaagataagtcatgcggtacccaacccgcgtatatcagagtgatctaccgtcgtttatcactgctgttctgcccgaagtttatattctcaaaggagaccatataagaggcaataaaaaaatcacccacttgacaggtttaatacatatc

SEQ ID NO: 1643 - DNA, 1373 bp, unidentified
  source 1..1373: mol_type = unassigned DNA; note = element_2262fc2
  misc_feature 1..3: note = core
  misc_feature 4..85: note = LE
  misc_feature 86..1114: note = CDS
  misc_feature 1115..1373: note = RE
  misc_feature 1140..1361: note = bridgeRNA
tgatgctgtgggcggcgcccactctgcggcatcgaagtgccatagggtggttgcgtcgaaacgcaccacttgaggggagccgtccatgggcgaggttagcacgatcggtctcgatatcgcgaagtcgatttttcaaattcacggcgtggacgccgatggcgcggtggtgatgcggaagcgcatccgccgagcgaagctgttggagttcttcgcggccctgccggcctgcctcgttggcattgaggcgtgtccgaccgcacattattggagccgccggcttcaggcgctcggccacactgtgaagctaatgccgcccagctacgtaaaagcctatctaaagcgcagcaaaaatgatgccaacgacgcggccgcaatctgcgaggcggtcacgcggccgtcgatgcgatttgtggcgacgaagtctgaacagcagcagtccggcgtgatgttgcatcgcagccggcagcttctggtttgtcagcgaacgatgctgtcgaatgccatccgtgggcacatggccgagctcggccttatctgcgctaagggccgcaatggcacggcagagctgcttaagattattgctgacgagcacgatgatcgcattccagcggccgcgcggttcagcctcggcgtccttgctcgccaatatgcggctatcagggaagagatcgtagccatcgagaaacgtatccacgcctggcaccgctcgtgtgaggaaagccggcggttggaggaaatccctggggttggcccaatcgtcgccaccgcgctggtggccgaggtgggagattggaaagagtttacgtcgggccgcagtctcgctgcgtggattggcttggtgccgagacaacattcgactggcggcaaagagaggctcggcaggatctcaaaacagggcaatcgacatttgcgctggctgctcgtcgccggcgcgatggctgtcatccgatatgcgcgccagcacggcacaaagcggccctggctcgctcgtctgatggaccgtcggccgatcaaggtcgctgccgttgcgcttgctaacaagatcgcccgcatggcctgggcgatgatggtccgtggcgagcggttcaaggagccgaagttgctgccggcatagctgctgacagcaggcagaaagtcataaggaattggcgagggcacaacgacgtaatgcagacacggtcgttccggggatcaggggagcccgcttgggtcatcgcatcttcgaatgcgtgctttcgattgggacctgatccgcgcagagcattagggccagcggccatccgcgccgcatcaacaggccggacacatgaccgcacccgaccaatgctgcatcaacgtcaaaaagctcttgtcaatcaggcgccgtccacaca

SEQ ID NO: 1644 - DNA, 1378 bp, unidentified
  source 1..1378: mol_type = unassigned DNA; note = element_22676fe
  misc_feature 1..2: note = core
  misc_feature 3..76: note = LE
  misc_feature 77..1105: note = CDS
  misc_feature 1106..1378: note = RE
  misc_feature 1108..1365: note = bridgeRNA
tgttggtgtggacggcctctcatcccaacggtttgatggcgcttagcgtcaacaagccagtcgagaggagagcaacatggttacaccagtgcgtatcggcatggacacggctaagtccgtgttccagctccacggagtggatgagaacgagattgtagttctgcggcgccagctccggcgcgccgacatgatccgctacttcgaaaagcttccgccggcccttgtcgccatcgagtcctgcggcagttcccaccattgggcgcggctcctggagtcattcggccacgaggtgaagctgatcccgccgcagtacgtgaagccgtacgttaagcgcgggaagaacgacgcggccgacgccgaagcgctctgcgaggccgtcaccaggccgacgatgcgcttcgtgcctgtaaagtccaaggagcgtcaggcggcctgcatgttgatgaccgtgcgcgaacgcctggtcatggtgaagtcgcagctcagcaacgctttccggagctatgcggcggagtttgggatcgtgggcccgtccggccggcagaacgtcaacggtctgatcgcgcgtgtcctcgaagatgacacgctgccggaactggcccgcgagctgttccacttccaggccaaggagtacgccgcagtcgaggcgcgcctggcggagatcgacgcgaagctaatgaagtggcaccgcgctgacgagctgagccggcgcatcgccaccattcccggcgtcggtcctattggctcgacgatgctgagcatgaaagcgccgccggcggagaccttcggctccgggcgcgacttcgcggcctggcttggtctcacgccgcgagaccattcgacgggcggtcgatcaaggctcggcgggatcaccaaggccggagatccatcgatccggtcaacgctgatcgtcggggccacagcgctgctgcgccatgtgcgcctcgggcatacaaagccatcgccatggctggccaagctcatggagcggaagccgcccaagctggtcgcggtagcgatggccaacaagttcgccaggatcgcttggcggctgatggtgtcgggcggagtatacacccgacccgcagcgctgaacccgacctgatctgagaccggcgcccggaagccaacgaggctgcacccggaccgcccaggagacttgcacgaacgaatagatggaaatgaccgatcggtcggtacgcgcgacattccgaagattgcactggcacccagatgtcgccaatgtgtttggagcgcgagtagcgaacaccatcttggccagcgaggtttcctcgcgcaaaataggccggacatctgatagcaagcgattaggtcagacagtctatgcgttcactgcaagcggggggccgtccacatc

SEQ ID NO: 1645 - DNA, 1218 bp, unidentified
  source 1..1218: mol_type = unassigned DNA; note = element_2271351
  misc_feature 1..2: note = core
  misc_feature 3..231: note = LE
  misc_feature 232..1203: note = CDS
  misc_feature 1204..1218: note = RE
  misc_feature 6..202: note = bridgeRNA
cttgtatctcgactaaatacctccacaggggtaatagtccccgactgatcatcgggggaggggctggaagtcgtgtccacccttaggccgcgagcctgcaacgtagatagtgctccgcccctccacactcactcgaacagcccgaacggtatccagagcctcgagctcgcattcacaaggttgggccgggtgcagtgatgatcgcgtctgaacggatcgagaggagaatccatgcccagcgtcatcggcatcgacatcgccaaacacacctttgacctcgccaccctgcagcccaacggcaagtaccgcaccaaggccaagctggccaacgacaaagcgggcttcgccgtcttgcgcgactggctgaacaaacacagcgaacccggagcctgggtcgtgatggaggccaccggcatccaccatgaagccctggccgaatggctgttggagcaaggctatcgggtctgtgtcctcaacccggcgcaggtcgcccactatgcccgtagccagttgcagcgggtgaagaccgacaaggtcgacgccaagctgatcgccgaatacggcgagcgccatcaggacagtctgcgtccctggcaacccgagccccgtgccgtgcggcgtttgaaagccctggtacggcgcctggaggacctgcgcgaaatcgagcagatggagcgcaaccgcctggaagtggccgatgccagcgtccaggcctcgatccagtcggtgctggaacatatcggtcaggagatcgaagagaccctcaaggcgatcgacgaccacatcgacaacgacccggatctgcgcggcaagcgcgacctgctgaccagcatcgacgggatcgccgacaagaccgctgccctgctcctggcggagctgggcgacccactgcgctttgccaacagccgcgccgtcactgcctttgccgggctcaatccgcggctgcaggagtccgggaaccaccggggacagacgcgtatctccaagacgggctcatcgcgcctgcgggccggcctgttcatgcccgcgatcagtgccctgacgtacaacgaggcgatcagggccctgagcgaacggttgagggcgaagggcaagaccggcaagcagatcgtctgcgctgccatgcgcaagctgctgaacatcgcctacggcgtactgaaatcgggccagccatttaacgcaaaactggcccttgctcactagaaatcaagacggtat

SEQ ID NO: 1646 - DNA, 1379 bp, unidentified
  source 1..1379: mol_type = unassigned DNA; note = element_227ec4d
  misc_feature 1..2: note = core
  misc_feature 3..83: note = LE
  misc_feature 84..1112: note = CDS
  misc_feature 1113..1379: note = RE
  misc_feature 1086..1366: note = bridgeRNA
tgatggagtggatgccccctcccgacggcatccaatgtgccattgtgatgtttccgaacgtcacagcagaggagaaggcatccatggacggggttagcattgttggcctggacctggcaaagagggttttccaagcacatggagcatgctcgaacgggcacgtgatatttcgcaaaaagctgagccgatctcagcttgtggcatttctggctcggcaaccgcgctgcattgttgcgatggaagcttgcgccagcgcacatttttggggtcgggccatcagagacttggggcacgaggttcgcttgatcccgcccatttacgtaaagccatttgtgaagcggcagaagaacgacgctgcggacgcggaggcgattgctgaagcggctgtgcggccgaatatgcgtttcgttgaggtcaaatctcagaggcagcaggccggtgcgatcgtgttcaggactcgcgacctattggttcggcaacgcacgcaattgatcaacgcgctgcgcggtcatcttgctgaacatggtgtcgttgctccccaaggagtgacgaacgtccggatactggaggccgcaattgaggaagccgaaacatctcttgatctgctgatcatcgagacggcacggctttacctcacgcagatcgcctcgctaagtgagcagatcgttacgcttgagaaagttctgcagcaagaagcgggcaaggcggctacgacggcccggctgttgaccgtaccggggatcggccatgtcaccgctatggctatcgaggccttcgcacctccaatggagactttccggcgcggaagggattttgccgcctggctcggacttgtgcccatccagcgatcgaccggcggtaaacaggtcctcggcagaacctctaaaatgggtcagcgcgatatccggcgattgctgatcacgggcgccatgacgatcgtgcgttgggcaagccgtaaagcgccaccggaagggtcatggctatcccgcatgctggagcgcaagccccgaatgcttgtcgccattgctttggccaacaagatggcccgctctgtctgggcgatgttgaccaaggatgaggattacaggaatccggtggctgtcgcggcgtgatcaaatgatcgcgcggtcagctcccggtgcgtcgggcgtgtgagaagatcgaggagtagtaagggcaaatgatcggacagatccggttctgaaaatgcattccgagtcatagggctacgagcccgcagaagtgttttgcatcagatccgcgcatctccataccggccagcggatatcggtccgcacaacaggcctgatacatgaccgcatccgatcacacgccggcgccgcttcaaaacctcttgtgcgaccgggggcatccataca

SEQ ID NO: 1647 - DNA, 1351 bp, unidentified
  source 1..1351: mol_type = unassigned DNA; note = element_2287628
  misc_feature 1..5: note = core
  misc_feature 6..241: note = LE
  misc_feature 242..1294: note = CDS
  misc_feature 1295..1351: note = RE
  misc_feature 29..224: note = bridgeRNA
cttttatttttactgagaatttaaaaaaggttagtacattgttgttattcaaaatgtattgactgttgtgtgtgagacgaatcagggctaggtaaacaaattcgttataccgtaaaaaaggtttagtccacacacattattctcaggagtctgaacagtacttaaggccaaaaaatcttgagcctggataaaagaaaaggatagacgaaggaggattcagtcaaacctaaaacttttaactatggcctatttaaagcaatgtattggaattgatatttccaaagattcgtttacagcatgcctctgtaaacgtgaggatagcgaaggattttctttctcaaaagtagctagtttcacaaatgaaaaaacaggttttaatcaattactgagatgggttaaatctgaatcagaaagctcagtggagttagtgtacttaatggaagcaacaggtgtttattatgagtctttagcgcaccatttatacaagctgaagaagaccgttcatgttgccttgccaaatacgaccaagcactattttgctagcttaaacatcaaaaccaaaacagatgctattgatgcaaagtggttgagtcaatttggtgtggagcgtgatcataaactttggataccaccctcacccattttaattgaattaagaaatttaactcgttactatgttcaattacaggagcagagaactgctcttgggaatatcaaacacagcaaagattgctcacatggcgtacagaaattcattcttcaaagtaacaaaaaccttattcttcaactcgataagcaaattttaaaatgtaaacaggaaattgaacgactcattacaaccgatgaaacacttcattcaacagttaaaaaactcttgactataaaaggggtaggattattgacaattgctaccatattagctgaaactgggtgttttgaacgcttccaaaatatcaagcaagttgtaagttttgcaggatatgatgtagttcaaagagagtccggaacttctgtcaaaggaaaaacacgaatatcaaaaaaaggcaatagatacatccgaaatgcgttatattttcctgcaatggttgcttgccggtataatccaataatgaaagaaacttacatcagaattaaccaaaagaaagcttcaaaaatgataggtcaagtggcaatacaaagaaaattgcttgcactcatttttacactgtggaaaaacgaatcaatattcgaaccagcatataaaaaagtagtcccggtaaaaaccgagactacacaagatagtttaacaagttaacttctttaaaacaaaaatacttttttttgtcaaattacttgctttttaaaacagtac

SEQ ID NO: 1648 - DNA, 1487 bp, unidentified
  source 1..1487: mol_type = unassigned DNA; note = element_229aa51
  misc_feature 1: note = core
  misc_feature 2..109: note = LE
  misc_feature 110..1126: note = CDS
  misc_feature 1127..1487: note = RE
  misc_feature 1180..1405: note = bridgeRNA
gaatgaaagggacttccccgtcccgacttagccgcgttgcggcaaccggcaacaaagtgccacgatgggaagtgcgaactctcatcaactcactcggaaggggaagtccatggctatcgtattcgtcggcatcgatctcgccaagaacgtgtttgcggtgcacggggttaacccggctggcaagcccgaactggtccgcccgagcgtgccgcgcgctaagttgcacgagatgatcgccgcgctgccgccgtgcaccatcggcatggaggcttgttcgggtgctcatcactgggccaggttgttccaggcgctgggccataccgtgaagctcatggcgccgaagttcgtcacgccgtaccgcctgtccggcaagcgcggcaagaacgacgctgctgacgctgctgcgatctgcgaggcggtgcagcggcccaacatgcggttcgttccggtcaagagcccagagcagcagggtcaactgatggtccaccgcgcccggcaggggtatgtcgaggctagaacggccaccatcaaccgcatccgtggcctgctcagtgaggtgggcatcgtgctgccgctgaaggccgagaccgtgcgtcgagaagcgatggcgcagctcgaagacttgccggggtgggtgaacaccgtcatcggcgatctgctcagcgaagtccaccgcctggacgagcgcatcgccgagtacgaccggcacgtggcgctgatggctcggcagagcagccaagcccagcaactgctgcgtctgcgcggggttggggagaccaccgccacggcgctgatcgccatgatcggcaacgggcgcgatttccacaacggccgacagctcagtgcgtggatcggcttggttccaggccagtacagctcgggcggcaagactcggcttggccggatcaccaagagtggcgatgcgtacctgcgaagcctcctggtgatgggtgcccgcgccgtcctgaatgcagccaaggacaagaccgacagcatcagccgctgggcgacggctttggccgaacgggttggctattggaaggcagtggtcgcgatcgctgcgaagaacgcccgcatggcgtgggcggtactggtgaagggcgaagcgtttgccatgccggcgtgaagcatcaactgccaagccgaccaaccccactacccggagaccacacacaccgaatacaccgccgcgtgacggctcgcgttgatgcgtcaaggttggacctgtgcgaggaatacctgattagctcaaggaggcggcttgtactgacctcggctaacgaatgaggacctcgcgcgcgtcttgcatcagggtctgcagcagatgagctgcgtcgatgaccgcttgtagtactcccagtccgcacccttgacctgttcaacgcgatatccgaagcgtcgtcggccaccgaagccaactaccgtgatgagtcgctgtgcgacccatcacggcagagtattgcttgacagatgggcaagcccttgta

SEQ ID NO: 1649 - DNA, 1366 bp, unidentified
  source 1..1366: mol_type = unassigned DNA; note = element_22a6bb4
  misc_feature 1: note = core
  misc_feature 2..76: note = LE
  misc_feature 77..1096: note = CDS
  misc_feature 1097..1366: note = RE
  misc_feature 1126..1358: note = bridgeRNA
taatggaatggtcgccccctacatcttgtgccacagtgggatgataaatcgtcactacttgagcggagcggccatcatgaacgttaagactatcggcatcgatttggcaaaagaagttttccaggtccacgggattgacgaacacggcaagcggttgttcaacaagcaactcaaacgagcaaaaatgctttcattttttgccaacatccctccatgtttgatcggtatggaagcctgtgcttctgcccacttttgggccggcaaactcatgtcgatgggccataacgtcaagctgatggcccctcagttcgtcaacccctatgtcaaaaccaataagcatgatgctgcagacgcagaggctatttgcgaagccgtcacacgacccaatatgcggttcgtgccggtcaagccccctgagcagcaagccgtattggctcttcaccggagtcgtcagagtttcatcaagcaacggaccgctcaggcgaatcaaactcggggaatattggctgaatttggcatcatcgtgccccgggggatccagcagctacacttacctgagatcctggaagatgctgataactcgttgccatctctgttctgtgtacagctgagtctgttacagcaccatatggtatatctgttcgatgtcatcgctacgctcgacaagcagattgagcagtgctaccgccaaaatgcgctatgccagcgtatcagcaagatcccaggcattgtcccgatcaccgccaccgcactaattgcaactatcggcaacgccagcaatttcgaaaatggccgacagttggctgcctggtcaggaatggttccacgtcagcattcaagtggtggcaaacacgtcttgcccgggataagcaaacgaggcgatatttatttacgaaccttactcattcacggtgccagggctgtgttgcagtcggtcaaacgtaaacaggatgctatatcgggatgggccagtcggctactggcacgccggaataacaacattgcttcgggagcattagctaataagaatgcgcggattgtgtgggcactattggcaaaagaccaggagtactatgcaccaataatgaacgtttaagtatctgagtcagtaagacggaaacaacaccaccgattgttcaggcaagcatgacgtgatggcaggacaggtcagaccgtgatggggaaaacgcggtttattcaaggctcctgaaagagcgctttgttgatagaggcctccatcagcgtattccatcagggacagaggtgtttcacattacctaggcaaagtccggatctatggctgcaattgatgacctgcaaacccaccacaacatatttagcctggcaaacaggaggcgaccatcta

SEQ ID NO: 1650 - DNA, 1200 bp, unidentified
  source 1..1200: mol_type = unassigned DNA; note = element_22a7618
  misc_feature 1..2: note = core
  misc_feature 3..222: note = LE
  misc_feature 223..1185: note = CDS
  misc_feature 1186..1200: note = RE
  misc_feature 28..198: note = bridgeRNA
cttgtatgttcctcccggctcctacgaggtatgtaggagccagggtggagggaccgtcaacatgatatctgcgggtaccagccgacagacgagccgagcgatccccatcccgcaccttaacgtcgataaaggatctagcggcctttgaggaccgccgatgtaggcaagccaacgtggtgcggtaccaccccagcccctcaacaatagctgggagttgcgcagatgtcagatcgtttggctgtcggtatcgatgccgattcaaagaccctggtggtggcgtgtcacggcaccaagggcagcatccgcatcgtcaattcagcatcggccattgataagtggctttccggcctgccggccaggtctcgtattggtgtcgaggcaaccaaccgttaccacgagtgtgtggttcaagcggcccagaaggccgggcatgaagtctttgtcctcaatccgcgtgacatcaagcattacgccaagggcgtggcctgccgcggtaagaccgactctggcgacgcacaggtcattgcgcgctacatcgccaaggaggccgacaatctgcacgagcatgtcgcccgttcgcctgcgcaggagcggctgcatgtgctgctccagcaacgcgacagcgtcgtgcggaacaaggcgatgctgaatctttcgctgggtcctggtgcggcggagtctgccatcttcgggcgcattttcagcagtctgaaagaggccattgctttgctggatcagcagatccagcagctgtgccgcagcggcgaacaaggcgatctgtatcggcggatcatgaccattccggggatcggaccgacggtggccgccgtcgtcacccatcacatcacgcgctggcccttgaccagctcagatgcctggatcgcctgcaccggcctggatcccagacccaacgagtccggcgcccggatcggcagacggcggttgtccaagcgtggcaacgccagtctgcgtcagattctctacatggcagccatgggcctgacacgctcgaagggtggcaaacctctctacaccgccatccgcgagcgcggccacagcagcaccgccagcttcaacatcctggccagaaagctggccaggattgcctggggcgtcttcaagagcggccgggagttcgatccgaccatgctgaaagtgggtcaagcctgcttccagcaggcttgatctcgaacataggat

SEQ ID NO: 1651 - DNA, 1359 bp, unidentified
  source 1..1359: mol_type = unassigned DNA; note = element_22aa809
  misc_feature 1..3: note = core
  misc_feature 4..87: note = LE
  misc_feature 88..1116: note = CDS
  misc_feature 1117..1359: note = RE
  misc_feature 1130..1347: note = bridgeRNA
tgatgctgtggacggcgcccactctacggcatcgatgtgccaaagggtggttgcgctagaagccaaccactatgaggggagccgtccatgggcgaggttagcacaattggtctggatattgcgaagtcggtgttccaggttcacggcgaggatgttgatggcggggtagtgatccgcaagcgcattggccgttcgaaggtgttgcagtttttcggagctctgccgccctgtttgatcggcattgaagcgtgcccgagcgctcattattggagccgccggcttcaggggcttggccataccgtgcggctgatgccgccgagttatgtgaaggcctatctcaagcgcggcaagaacgacgccaatgatgcggctgcgatctgcgaggcggtaacgcgaccgtcgatgcggtttgtgccgataaagtcagaacagcagcagtcgggcttgatgttacatcgcagccggcagcttctggttcgccagcgtacgatgctgtcgaacgcgatccgtggccacatggcggagctgggcatcatctcggccaagggccgtaagggcactgccgagctgatcaagatcattggcaacgacgatcggattccagcagccgcacggttcagtctcagtgttcttgcgcgtcaatatgaagccatcgcggcagagattggagccatcgagaagcacatccacgcctggcatcgctcgtgcgaagaaagccgccggctcgagggaatacccggcattggcccgattgtcgccactgctctggtcgctgaggtgggcgattggacagccttctcgtccggacgcaacctggcggcctggattgggctggtgccgcgacagcattcgacgggcggcaaggatcgtctcggcgggatttcaaagcagggcaatcggtacttgcgatggcttctcatcgccggcgctatggccgtcatccgctatgcgcgtcagcatggcacaaagcggctttggttagttcgcctgatggagcgccgtccgcccaaggttgccgccgtggcgctggcgaacaagatcgcccggatggcttgggccatcatggtgcgcggagaacgatttgaggagtcgaagctgctgccagcagcggcctagacgacagggtttgaagaattggcgagggcatgacgacgtaatgcagatacggtcgctccggggatcgggacaacccgcttgggtcatcgcacgtccaagtgcatgaaaacgattgggaccagatccgcgaacagcattagggccagcggccacccgcgccgcatcaacaggccggacacgtgaccgcacccgaccaatgctgcagcagcgtcagaaagttcttgccagggcgccgtccacacg

SEQ ID NO: 1652 - DNA, 1311 bp, unidentified
  source 1..1311: mol_type = unassigned DNA; note = element_22bbece
  misc_feature 1: note = core
  misc_feature 2..240: note = LE
  misc_feature 241..1296: note = CDS
  misc_feature 1297..1311: note = RE
  misc_feature 4..231: note = bridgeRNA
cagtgaggatggtgggggtgggtcgccgggctggtctgactcaccggcagaccgacggttgctgtcctcatcccgattcgtcggccggcccggtggccccggcagctgcatgtcaccggtcaggcgtcgtgacctgataggagcctgtgcgagaggcgcccatcactgctttgtccgtatgcctgaccggcgacgtgtccacggatctcgacgcagacgaggagggcggactccatcagcatggcagccaagaagcgatctgttatcggtggtgtggacacccaccgcgacacgcaccacgccgcgatcatcgacagcaccggcgggctcctggacgacgccgagttccccgcgaccaccgccggctacgcggatctgctggcctggatgcgctccttcggacggctcacggccgttgggatcgaggggactggcagctacggcgccggcctggcccgatacctgaccagcaagaaggtccccgtcgtggaggtggaccggccggaccgccgagcccgccgcaaccagggcaagtccgacccgatcgacgccatcgccgcagcgagggccaccctcgccggcaccgccatgggcaccccgaagactcgcaccggaccggtcgaggccatccgctccctgcgggtcgcccgtcgaggagcggtcaaggcccgcaccgccgcgatcaatcagatgcgcggtctggtcgccgccgcgcccgaggctttgcgagcccagctgaccaaggtcagcgtcgccacgctggtcagccgctgcgccgcactggcctacgacccggccaggctccacgagccggaacacgccaccgccgcagccctggccggacttgcccgccgagtcaccgccctcaccgaggagatcgccatcctcgaccggcaggtgacacccatcgtcgcgaaagcggcacctcgcaccagcgccctgttccgtgtcggccccgaggtcgccgctcaactactaaccaccgctggcgacaacgccgaccgcctgcactccgaagccgccctcgcccacctctgcggagcagcccccatccccgcaagttcaggacgggtgcgccgccaccgcctgcaccgaggaggcgaccgcggcgccaaccccgccctgcacaccatcgcgctgtgccgcatgcgctacgaccagcgaacacaggcctacgtccaccgccgcatcaccgaaggcctcagcaagcaagagatccttcgctgtctcaagcgctacatcgtccgcgacgtctacaccgccctggccgcagacttcgccgccctgaccacttgacctccctcggaacat

SEQ ID NO: 1653 - DNA, 1198 bp, unidentified
  source 1..1198: mol_type = unassigned DNA; note = element_22bcdf7
  misc_feature 1..2: note = core
  misc_feature 3..183: note = LE
  misc_feature 184..1164: note = CDS
  misc_feature 1165..1198: note = RE
  misc_feature 13..192: note = bridgeRNA
cttgtatctctccagggcaatgaggttagctaccttgatgcccaaggccgggaaagccgttcccatcctgagagcctgactctgtttcgtagattgtgctcccggcccacttctccaactcctgaatggtatccaagcccctccagcggagtgaggctgtatgaacaaggcaaggatcgagagatggcggttattggaatcgatgtcagcaagcaaaagctcgactgtctgtggctacgcgacccggaaagtctgaaggtcaaaaccaaggtatttaccaatcaagtggacgacttcgccgcgttggttgattggtgttgcacgcacaccggagccacagccggggaactgaaggtgttccttgaggccaccggggtctatcacgaatccttggcgtattacctgcacgagcgcggcgttcaagtctttgtcctgaacccggcgcaggtccgcgactatgcgcgcagccagggcattcgtggtaagacggacaaacaagacagcctggtgctcgcccgttttggcgcaacccagaaggcccggcgctggttgccggaagcgcgggaaatccgcgagctgaaagcgatgatcgtgcgctatgaggcgctgcaagaggaccttcagcgcgaactgaaccggcgggaaaaggccgaggtcagtcaggccagcctcagcgtaatggcctccatcgatacgatgctcagtgcgttgcgccaggaagccgagcgcctgaaacaagagatcgacgatcacatcgaccggcacgaccagctcaaacgcaaccgacagctgctgcagagcatccagggcatcggggatgtcctctcccgtcatctgctggcgtttctgcacagccgcgactttggcactgcccgacaatgcgcggcttttgcgggcctggtgccacgaccttgggactccggctcatcggtgaagggcaaacctcgtttgaccaaggcggggcagcctcgactgcgggccaagctctacatggccgcgattgtcgccaagcagtacaaccccacggttagagcgctttaccaacgtctactggcgcggggaaaagccaagatgagcgccctgggtgccgccatgcgcaagctgttgcagattgcctatggcgtgctcaagacgcagacaccctatcagccgcaaccgacctgatagggtcggttgcatctgatcggagagatggtat

SEQ ID NO: 1654 - DNA, 1399 bp, unidentified
  source 1..1399: mol_type = unassigned DNA; note = element_22c4c10
  misc_feature 1: note = core
  misc_feature 2..222: note = LE
  misc_feature 223..1386: note = CDS
  misc_feature 1387..1399: note = RE
  misc_feature 13..237: note = bridgeRNA
ctacctattggctggtggtacgaccgcagcccggccaggcttggtcgaggtgaccggtggggtcgctctctttgcggctgcccaccgtaggttggtgtggctctcatctggcgtgcgtcctgccggtcaccgcggcggtgagaggctcgagaggggactgcccggctcaaggtagcgctgccctcccgtcgacgttccatcgtcggatcgagggaggacacgatggcccaggtcatcatcggcgtggacccgcacaagcgttccgccaccatcgaaatcatcaatgcccgggagaagacgctcgggcagggccggttcggcactgaccgcgacggctaccaggccatgctcgccgccggccgcaggcacaaggaccgcctgtgggcggtcgagggctgcaacggcatcggccgacacgtcgcccagcgcctggtcgctgacggcgaaaccgttgtggacgttcccgcgaagctgtccgcccgggcccgggtgttcgccaccggtcagggacgcaagaccgacccggtcgacgcccgcagcgttgctgtggtcgccctgcgcgccgaaggtctgcggcaggtcgtcaccgacgacaccacagtcgcgttacggctgctggtcgaccgccgtgaccaactcggccgcgcccgcaccgacgtggtctgccggctgcaccagctgctactcgaactggtgcccggcggcgcgaagaaggacctgtctgcccagcaggctcgcgtcctgctgggcaccgtgcgcccgcgcgacgtggtcggcaagacccgccgccggctggccgccgaactgatcggcgaactcgtcgtcatcgacaagaagatcaaaaccgcgaaacaggaactcaccaacctggtcaacgacaccggaagccgactgatgaacctgaccggcatcggaccgtccggcgccgcccgcctgatcggcgacatcgccgacatcgcccgattcgccagccgcgcacatttcgcctcgtggaacggcaccgcaccgatcgacgcctcgtccggcgaccagcaacgccatcgtctgtctcgtgccgggaaccggcgcatcaaccgggcgctgcacatcatggccatcgtccagctacgccgtgacaccgaaggacgccgctactaccgacgcagactggccgccggcaaaaccccgatggaggccctccgggcactgaaacggcgtctgtccgacatcgtctaccggcagatggtcgccgacgcgaagctggtcaggacgggtccgagaggacacgcgggggcgactctgcaatccagcgcggccgacccaaaccccgagatcgacacttcggaaaagtcacttcccggatccgccacaccccagcctagaacaaccctcgccgccgcctcttgacacagaggggtgc

SEQ ID NO: 1655 - DNA, 1315 bp, unidentified
  source 1..1315: mol_type = unassigned DNA; note = element_22c9564
  misc_feature 1..2: note = core
  misc_feature 3..55: note = LE
  misc_feature 56..1087: note = CDS
  misc_feature 1088..1315: note = RE
  misc_feature 1089..1309: note = bridgeRNA
ttaattagatggtccgcctcacctccaaaccgttaggttaggaggtgagaaattaatgaggcgaaccactatgaagcgtaacatcattggtatagatataggtaaatcttctttccacgtcagttgtcacgatgcagacggtcatcagctgtatcgcaaacgttttacccgtccaaaactcattcaacacctcgctactattcccccggcacacatcgcgtttgaagcgtgtgggggttgccattggcttgggcgtttatgcctgttgtatgggcatacggtatcagcgctccctccccagtttgtaaagccttacgttaagaatcataagaatgattttcttgatgcagaagcgatagctgaagcggcatcacggccctctatgcgttttgttcccattaagtctgaagacgaacaaattaccggtgcgattcatcgcatcaggcaaggctatgttaaagagcgtaccgcctgcatgtctcgtattggtgcattgctgctggagtttggtatcagcttcccaaaagggcaccacgcgatgaaagccttgttcatgaaactggcagagataaatacccccttgcctcaggcgttgattttggaattgcaggggctacatgaacattatctctatctgaatgacaagattgctgagcagggcaacaagcttaaacagatagtcaaagagtctaaagttgcacaactgctgacctctattcccgggattggtgtactgaccgcgagtcaatgtatcgcagcggtagggaatgccagccagtttaagcaagggcgtcaatttggggcatggctgggtttggtgccaagacagcactcaacaggagggaagccgacgttattgggtatcagtaaacgaggggataagcatttacgcaccttgttcattcactgtgcgaggtcaattctgtcgaggccggagaaaaccggtacagtgtttggtacttggttatcaagtttactggcgaccaagccatttaatgtggtgtgcgtcgcactggcgaacaagctggcaagaattgcatgggctgtgttgcgatatcaacggccatttgaagcaacagcgttataaaccgggtttgcaagagtgagaacgagatgacgaaaacggtaagaccaccggattaaaacctgacacaaaaaacagcagtcaatgctttcggctttttgaggataatccggcgcggaactcatcgtggagcgggatgcatgagcctcccaacagagactccgaatacattagcgcagaccaaccccgtcattgcgaatttgttcttgcaacaacgaggcggaccataca

SEQ ID NO: 1656 - DNA, 1355 bp, unidentified
  source 1..1355: mol_type = unassigned DNA; note = element_22c9e41
  misc_feature 1..3: note = core
  misc_feature 4..82: note = LE
  misc_feature 83..1099: note = CDS
  misc_feature 1100..1355: note = RE
  misc_feature 1105..1341: note = bridgeRNA
tgatggggtggacggccccgctcgcggcatcgatgtgccaaaacgtggtcgttgttgaacgccacagtgagaggagccgtccatggacaagattatcacaatcgggctggaccttgcgaagcaggtctttcaggtgcacggggtcgattgcgaaggccgggtgctggtgcgccggcagttgcggcgcagggaggtggtttcgttcttcgcacagcttccgccctgcctggtcggaatggaagcctgcgcgaccgcccaccactggggccgcgaactgatcaagctcgggcacacggtcaaactgatgccgcccgcctatgtgaagccgtacgtgaagcggggcaagaccgatgcggcggacgcggaggccatcgccgaagcggtcacccggccaacgatgcgctttgtggccgtcaagagcatggaccagcaggccatgctgatgctgcacaaggtgcgcgatcttctggtccgtcagcgcaccatgctgatcaacgcgctgcgtggccaccttgccgagttcgggatcgtgaccgcgcgcggaccggcgggggtcaaggcggcgatcggggagttgcacgccatgcacgacagcctgccgccgctggcgagggtagccctccacggattgcttgatcggctcgaggcgaccagcgaggagatccgcaaggtggagaaggagatcgtggcttcgtgtcgttcccaggaagccagccggcggctgatgacggttcccgggatcgggccgatcaccgcaagcgcgattgtggcggcagtgccggatgcgtcgctgtttcgatcgggacggcagttcgcggcctggctcggcctgacgccccgcgcccacagcagtggcggcaaagacagacgcggaggcatcagcaagcagggcgacggatacatccgccgcctgctcgtcacgggggccaccgccgtcatccggatggcgcgcaaggctaacccgagcaaggtctgggcggcacggctgctggaacgcaagccggccaggctcgtctcggtcgcgctggccaacaagacggcccggatcgcctgggcggtgctggcgcgcaatcagtcctatatggccccggccatgtagccttgcttccgttccggtgagccgcaccggagttggagccgcaagggtggtgagatgtgatgacgaaccggtcgaaccgggaacagggcaaacccgtagtgtctcaagcgcgagatgcgcggcaaactgatcgggactctgttcgcggacttcatcagggccagcggccatgggcgccgcctcgacaggccggacacatgactgcacccgaccgcagcatcacaaaccctcttgcggaaagggggccgtccacaca

SEQ ID NO: 1657 - DNA, 1464 bp, unidentified
  source 1..1464: mol_type = unassigned DNA; note = element_22cd656
  misc_feature 1..2: note = core
  misc_feature 3..209: note = LE
  misc_feature 210..1448: note = CDS
  misc_feature 1449..1464: note = RE
  misc_feature 25..212: note = bridgeRNA
ccctcaagttcgtagttgcagttacttcgtgttgttacgttgagctgtgacccggcgggtcgggtgaggctgcatgtcatttgccggcccgcaggtgcggcttgaaaggactggccgcccgacctgcctggacttctctggccgctgattgagatctgcgatccgatcgcttgtttaaggaaacgctggcggggttgtccgtggggatcatgttgggcaacaagcgaataggaggtttcctggcgacgggccagttgtgggctggtgtggatgtaggtaaggaacaccattgggtcttcgtggtcgacgaccggggcactgcggtgttgtcgcgcaaactcgccaatgatgagcaaccgatccgcgaactgatcgccgaggtcgatgcgctgaaccaagaagtgtcctggacggtggacctgaccacggtttataccagcctgctgttgacgttgctggccgctgctggaaagtcggtgaggtatctggccggccgcgcggtatggcaggcctcggtgacctaccgcggcggcgaagccaaaaccgacgccaaagacgcccgggtaatcgccgaccagtcgcggatgcggggcaccgatctgccggtgcttcatcccgacgacgacctgatcaccgaactgcgcatgctcaccgcccaccgcgctgatctggtcgccgaccgcacccgcaccatcaaccggctgcgtcaacagctcatcgcggtctgcccggcgttggagcgggccgcgaagcttacctccgaccgcggttgggtggtgctgctggcgcgttaccagcgaccgaaagccattcgacagagctgggtttcgcgcctgacgaagatgctcggcgacgccggggtgcgcactgcagccacgatcgccgccgcggcggtgaccgccgccaaatcgcagacggtccgcctgcctggcgaagaagtcgccgccggactcgtcgccgaactggccggggaggtggttgccctcgatgaccgcatcaaatccaccgacgccgacatcgaggaccgatttcgccgccatccgctcgcggaggtgatcaccagcctgcccggcatgggcttccggctcggcgcggaattcctggccgccgtgggtgaccccgccctgctcggatcggccgaccaactcgccgcctgggcaggactggaaccggtatccaaagactccggcaaccgcaccggaagactgcacacccccaagcgctacagccgacgcctgcgccgcgtcatgtacatgtccgcgctgaccgccatccgctgcgacccccactccaaggcctactaccagcgcaaacgagacgagggaaaacggccgatccccgccaccatctgcctcgcccggcgcctcaccaacgtcctctacgcactcatccgcgacaaccgcgcctggcaacctgattcacccccaatcacccagtcggcggcttgacaacgtcattgagagt

SEQ ID NO: 1658 - DNA, 1583 bp, unidentified
  source 1..1583: mol_type = unassigned DNA; note = element_22d5403
  misc_feature 1: note = core
  misc_feature 2..260: note = LE
  misc_feature 261..1460: note = CDS
  misc_feature 1461..1583: note = RE
  misc_feature 9..238: note = bridgeRNA
cgttacctttttagtagccccataaataagtaggatttggggtggttggcctgtcggtcccggcatgattaagtcccccagtcatcaatgatccggggggtgttgtcaccgggattcgataggcgccaggggatcgctaatggggaccggaccagcacaatgaaccgccgtgcaggtcagccgtaacgtggatgccgagccttgccgccgtaggacaagccaacaccgaaatgaatgacactatttctgggaggtttgcgttgatcaagaaccacgaggacgtcgatatcttcatcggcgtcgatgtcggtaagagcaatcaccatgcggtcgcgatcgaccgtacgggcaagaaaatcctcgaccgtgcactgccccaagacgaggccaaactccgtgccatcatcaaggccgtggccggcaaaggcaccgtgttgttggtcgttgatcagccctcgaccatcggcgccctgcccgttgctgtggcccaggccgagggaatactggtcggctacattcccgggctggcgatgcgccgcatcgcggatttacatcccggagaagccaagacagatgctcgagacgctgccatcattgctgaagccgcccgaagcctgccacacaccctgcgttccatcgtcgtcgccgatgagcaagccgccgaactatcgatgctctgcggtttcgatgacgatctagcgaagcaggcaacggcaacctcgaaccggattcgggggttgttgacccagatccacccggcactggagcgggtggtgggaaagcacctcgatcaccccgccatggccgaattgctgatcaaatatccgtctccggataagctccgcaaggccggccagaaccgagtcacggccttgcttttgaagtatgcgccgcgggctgggaaacgctgggctaccgagatcttcaccgccctagatgagcagaccgtggtagtcgctggaactggtgccgcgagcatcgtattgccgcagctcgctgccatgctcaagcagctacgcacggcccgtgacgagctcctcgttcaggttgaaaccctcgtggaggatcaccctcttcatgccgtcctgacctctatgccggcggtcggggtcaggacggaagcccgcatcatcaccgaagttgcgggtaaggaattccagacctccggccacctcgcctcctacgctgggctggccccggtgacgtggcgctccggaacctcgatccgaggcgatcacccctccaagaaagggaacaagtccctcaagcgggctttctttctctccgcgttcgcggctctgaaagaccctctctcacgggcctactacgaccggaaacgcgccgaaggcaaacgacacaatcaagccctcatcgccctagcgcgcaggcgttgcgacgttctcttcgcgatgctccgggacggcaccttctacgaagccccaaccccgaaaaccgcctgaccgttccgagctgtcagctggcggacacgcaccgccagccacctacctctgcccaaaaacagtggcccaaaaaactttgaagaaaatccctccaaagccttgacgaaaaacatagggacaccc

SEQ ID NO: 1659 - DNA, 1450 bp, unidentified
  source 1..1450: mol_type = unassigned DNA; note = element_22d543c
  misc_feature 1: note = core
  misc_feature 2..221: note = LE
  misc_feature 222..1250: note = CDS
  misc_feature 1251..1450: note = RE
  misc_feature 15..233: note = bridgeRNA
ctgattgatactggtggcatgcgttgcggtggttccgtagcgtttgggtgacctggccggtgggctcttgaggtgcctgctgcccatccgggttggctttctaacgagctgcttgccggccggtttacccgactggggtgtggctcgaaagaggcgagaacacgatcaacccgaatcaggagtgcccacctcggttcaccatctaggaggaaggcactgccatgaccatgattggtatcgatccgcacaaggcaacccacactgcagtggcggtcgacgacaacgaagaggtactcgacgagttcaagctcagggcgtcaacagcccaagccgtccggctgtgtgaatgggccgacgatttcgaaaagcgggaatgggcggtcgagtccgccaacgggctcggctatctcgttgctcagcaacttgttgcagccggtgagaccgtgttcgatgtgccgccgctgttggcgtcacgggttcgcgtgttgggttcaggaaggtcacaaaagaacgatccgaacgatgcccggtcagtggcgatcgcggcgttgcgttcggatcggcttgcccaggtccggcctgatgaccacgcccgagtgctgcgagtgttggcgaaacgacaccgggacatggcccgactgcgtaacaagcactgcacccggctccatgcattgctgctcgagctcgaaccgggcgggatcggctcagaaatcacggtaaccaaagcgaatcagctacttgccagggtcaagatcgacaatgagataacccgacatcgagccctcatcggaaacgaaatcgttgacgacatcgcccgactcgacacagcgttgaagacatcaaagaaacgaatcaaagtggcagtcgctgcctcagcaacgaccctgactgacattgtcgggatcggaccggtctgtgctgcgatcatcatcgggttcaccggtgacgtcacccgtttcccgaccaaaggacacttcgccacctacaacgccactgcaccaatcgaagcgtcctcaggcgacaggccccggcatcgtctcaacccaagagggaaccgcaaactcaaccacgccatccacgtcgccgccatctgccaactccgttatcccggcgaaggccgcacctactacgacaaaaggatcgccgaaggcaagaccagcaaggaagccatccgggcgttgaagcgaagaatctccgaccgtgtctaccaacacctcattgccgacgctcgacgctccacgacaacctgaccgaaaagggtccgggaggacactcaggaacgactctaagtccagcgtgaccggctcaacatcctgaaaggccggctcttcggacaagtcactcccggacccaacaccaacactagaaccaacccggtcccctgaacaggccaggccaatcaaccgcgcccaaacacccccaaaaagacccccttgacacaaagaggctt

SEQ ID NO: 1660 - DNA, 1354 bp, unidentified
  source 1..1354: mol_type = unassigned DNA; note = element_22d9e83
  misc_feature 1..2: note = core
  misc_feature 3..1103: note = CDS
  misc_feature 1104..1354: note = RE
  misc_feature 1107..1344: note = bridgeRNA
ttatggatggcccgcccctcctcgcgaagcagctgatagcgtgcttccgcaactcaaaggtgaagacggagcggaccatgcagctttccatcatcggcatcgacctcggcaagacgtcgtgcagcctcgttggcctggacgcgggcggcaaggtcgtcctgcgtcggcgcatgcgccgcgacaccgtcgtctcgttctgcagcaagttctcggcttgcatcgtcgccatggaagcttgctgcggcgcgcaccacattggccgcccactggccggccagggtcacgagatccggctgatgtcgcccgaatacgtgcgcccctatgtcaaggcacagaagaacgacgaccgcgacgccgaagccatcgcggaggcggcgagccggccgaccatgcgcttcgtcaccttgaagtcggaggagcaactcgacatgcagacgctccaccgcgtgcgcgacaggctggtcggcgaccggacgtcactgatgaaccagatccgcagcctgctgctgaagcgcggccacgtcgtggcccagggtcgggccaggctggccgccgctcttacccttctgctcgacggcgagcaccgcgtcctcgctccgcgcatccacgaactgatcgtggacatgcgccggcaatggctcgcgctcgacgagcgcatcaaggccttcgatgcggagttcgccgccgccgcgaaggcacaggacggcgcacgacgacttctatccattcccggcataggcgcgctgaacgcgacggccctcgtggcggccgtcggcgacgcgggcaccttcacccgtgggcgggacctcgcggcctggctaggcctcgtgccgcgccaggtgacgacgggcggcaggccgaagctgctcggcatcacgaagcgcgggagcaaatacctgcgcaagatgctgatccagggtgcccgggccgccttgccgacgctgaaggccggggacacgcgcgtgggggcctggctgcgcgggctcctggcccgggtccacctcaacacggccgtcgtcgccctggcggccaagatggcccgcacggtgtgggcgctgctccggcacgggagcacttatgaggctgtcgcccaggcggcctgaaaccggatcggctgacgcgagcgagcgccggccctcgatgtctgtgggtggcgacgaggagatggcctcactgtcaaccggtgttttgcaacccttggctgaaaaatggcactcgatgccggccgctttatgaggaccagaacgcgcggctctccatcttggccaacggcttgccggaaggccggatacgtttgtgcagacagctcaagccggacacgacgaaaccacttgccgacggggcgggccatacg

SEQ ID NO: 1661 - DNA, 1392 bp, unidentified
  source 1..1392: mol_type = unassigned DNA; note = element_22dbe2e
  misc_feature 1..2: note = core
  misc_feature 3..68: note = LE
  misc_feature 69..1091: note = CDS
  misc_feature 1092..1392: note = RE
  misc_feature 1164..1389: note = bridgeRNA
taatgggatggtccgtcgtcttcaactcagatgtggcaggatgaaggcgagcacaggaggattctcccatgaaggtccacgtttgcggcgttgatatcggtaagacggtctttcacctggttggcctgagtaaggaaggccacatcgtcaccaagaagcgtttcagccgcaagcagctgctcacgcacacggtgaacatgccggcctgcttgattggcatcgaggcttgtccgggtgcccacttcctcgcccgtgctcttctgcagcaaggccacgacgtgaagctcatgccggccgagtatgtcaggcccttcgtcaagtccaacaagaacgactacgtcgacgcggaagcaatcgctgaggccgtgcagcggccgaccatgcgctttgttccggtcaagaacgaggctcagctggatctacaagcgttgcatcgcgtacgagaccgctggatcggccggaagattgccgtgatcaatcagctccgcgggtttctgctggaacacgggattaccgtccgcgtaggcccggcgcacctcaagcggcagatcccttccatcctcgaagacgccgagaacctgctctcgccgcggatgaggatgctgcttctggagcttcgcgacgagtgggtcaagctggaagaacagattgatgcgagtactcgagagcttgccctgtttgcaaagaaagaagacggctgccggcgacttctcacgatcccaggcatcggaccgctgacagctacggcactgactgcagcgatcggcaacggcgcagcttttcgcaagagccgtgatttggcggcttggctcggtcttgttccaagacagcactctacgggcggcaaagccaggttgctcggcattagcaaacgaggcgatccatacttgcgtcggttgttcgtccacggcggccgagccgtgctggcgcaggtcaaacgggaacggcaccagtttggtggttggctggatcggctcgaggctcgatcgccaagaagtgtcgccattgtcgcgatggcgaacaagattgcacggatggcgtgggcagttctgaccagcggccaatcttacaacgctgcgttcagcacgtaagaaaagctggaaatcgcgttgcaagtcccactttcccttaggccggcgacgacgggttcataaagttctcaccaggtttgcaagtagattgttgatggctgaacaggtcgaatcgacccgctctgatcctgctggggtatatggtctgcaacgagaccgctagggtaataaggagagagagggtgcggattccatcatggctcggagcagcaggagcgctccactcagaagccgtatacataggagcagaccgcttccaccatcacacgatcttgcttgcattcaggcgacggaccataca

SEQ ID NO: 1662 - DNA, 1547 bp, unidentified
  source 1..1547: mol_type = unassigned DNA; note = element_22dd421
  misc_feature 1..3: note = core
  misc_feature 4..274: note = LE
  misc_feature 275..1438: note = CDS
  misc_feature 1439..1547: note = RE
  misc_feature 19..266: note = bridgeRNA
cccattacagtttgagacgcggttaatccgaacgtctcgaccccgatcgtcaccgacggattacgattggcgcagtccagatggaccgccgaccggacgcccgcggacggccgtttgcccctgcccctcgagggcccggggggtgttgccgccgcgggcgtcgctggttcaggcgactgataggaacctgccgggccccctcgaaagcgccacggccaagtaatgtgggtgtcgcgcgaccagcatccgatcggccgaacgattggaggataccatgggagggaagatcaggcctcgcggcgacgtcctgggcctcgacgtcggcaagagctcgcactgggcgtgcctcgtcgcgagggacggagaggtggccgccaacgggccggtcccgaacacggaggccgaccttgacgcgctgttcgcgcaggtcggaggggacacgctcgtcgtcgtcgaccaggtgcgcaacatcgggtcgctcgcgataagcagggccaggctggccgggctcgaggtcgcctacctgcccggcaccgcagcccacggcgcggcgaggctgttcgccggcgacgccaagaccgacgagcgcgacgcgatggtgatcgcgaagacggcgctcgggatccccgacgcgctgctgccggcccccagggaggacgacggcctccgcgcggcgaggtccatggccgcccagcgggactacatggtggcgagctccacgcgcgacaagaacaggttgaggagcgtcctgctggagtcctgccccgccttcgaggcgctctgcgatctctcggaccccagctggctcaagatgctcgagaagctcggaggcccgtgggggatcgccgatgccgggaaggccgccatgggggccgtcaccaggggcgccgaccgcgcctcgatggacgcggcgtggcgtgcgatcacgacgtcgacgaggccggccgagtgcgtcgtgcgcgcggagaacccgcaggtcaagatgctcgcgaggaggatatccgagtccgtcgcggaagcgcgctccctcgacgggctcatcgcggaggcgctctccggagacgccacctacgagtgcctgctcaccgtgcccggcatcgggccgaggaccgcgtcggagctcgtgatcggcatcgacatatccgagttccccgaccacgaccacctggcatcctactgcggagtcgcgccgaggaaccgccgctcgggcacctcgatatcgtcggtaagcgcgtccaggcagggcaacaagaggctcaagaacctgctcatattctcgtgcaactcgctcgtcaggagcagaagcaggttcggggagtactacagagcgtgccgcggccgcggcatgtgccacggcgaggcgctgaaggccgtcgccaggaagagggtcaaggtgatctacgcgatcatgagggacaaggtcccgtacgcggcctagcgagccgtgccgaaccaactagagaacaggcccctcgcggggcctgcgtcagcattgccttctcacggcccgtcagctggaaaaaccagttgacaaaactataggaaca

SEQ ID NO: 1663 - DNA, 1414 bp, unidentified
  source 1..1414: mol_type = unassigned DNA; note = element_22e612c
  misc_feature 1..3: note = core
  misc_feature 4..80: note = LE
  misc_feature 81..1130: note = CDS
  misc_feature 1131..1414: note = RE
  misc_feature 1133..1401: note = bridgeRNA
tgatgtcgtggatggcgccctccaccagcgtcagacgtgccaagatgggcatgtccaagaaccggagaggatccacgtccatgcctgagattgccacgatcggccttgatatcgcaaagaacgtctttcaggtccacggggtggacaggagtggaaagatcgtcctgcgcaggacgctgcgtcgcagccaggttccgggtttcttcaaaacccttccaccttgcctgatcgggctggaggcatgcgcgaccgctcaccactgggcgcgcacgctcatggcctttggccacgatgtccgcttgatccctcccgcctatgtcaaaccccatctgcgccggcagaagaatgatgcggcggacgcggcggcgatctgtgaggcggtcacacggccgtcgatgcggttcgttccggtcaagaccccgcaacaacagagtaccttgatgctgcacggcgcccgcgatctcctgattgggcagcggacggccctgatcaatgccttgcgtggtcacttcgcagagctgggcatcgtggtggtgcagggtgctcgcaacacgcgccagttgattgccgatcttcaggacgagaccaaccaggatatccttcccacagctcggatggcgctccagcctctggcggcgatgttgcttgggatcgaggcgcaaattgccaagctcgacaaggccattctggcggcccatcgcagcaatccggtgagcctcaggctggccaccatccccggcatcggccccattgtcgcctcctgtctctcggccagtgttccagacgccagcctgttccagggcagtcgagagtttgctgcctatctcggcctcgtgccgcggcagcactcaaccggcggcaaggcgaggctgggctccatctccaagatgggcaaccggcacctgcgcaagctgctggtcgtcggcgcgcacgcggcgctctacagcatgaagtccggcaagaccaggacggccatggctgattgggccaggtcgcttctggccaagaagccgttcaaggtggtcgccgtcgcgctggccaacaagatggcccggatcgcctgggcggtgatggccaggagcacggcttacgagcccgggagcaagggagttgccgcgccggcggcatagacgaccagttcagactattcgcccctcgaggcaacccagttggcacggtgacgatgagatgatgtgaagccaaagcggacatggaccgccggatctggacaacccgtggcatcgtcttgcgccagtcaagcgcgataacttgagagggaccagttccagcgtaaaacatcagggcctgcggtcaggagaagcaccgcatgcaaaggccggagacatgaccgcacccgccccgctaggccaaatgtcatcaacaatcacattgccaaacgggcgccatccagaca

SEQ ID NO: 1664 - DNA, 1367 bp, unidentified
  source 1..1367: mol_type = unassigned DNA; note = element_22e868f
  misc_feature 1..2: note = core
  misc_feature 3..77: note = LE
  misc_feature 78..1103: note = CDS
  misc_feature 1104..1367: note = RE
  misc_feature 1079..1355: note = bridgeRNA
cgatggggtggacgccccctgacggcatcaaagtgccaaagtggaggtgttgagcacaccacttgaaggaggcgtccgtgggtgaagttaacataatcggcctggacctggccaagaccgtgtttcaggcgcacggcgcagacgcgtccggcgccgtggtcttccgcaagaagctgcggcgcgaccagttgctgacgttcttcgccggccaaccgcgatgcctggtcgcgatggaggcttgcgctggcgctcactactgggcgcgcgagataggcccgcttggccatgagaccaagctcatcccgccgtcttacgtgaagccattcgtgaagcggcagaagaacgacatttccgacgcggaagcgatctgcgaggccgctcagcggccgacaatgcggttcgtcgcgcccaagagcgccgacgctcaaggagcagccctgatcttccgcacgcgcgatctgctggtgcgtcagcgcacccaactgatcaacgctctgcgggcccacctagccgagttcggcttcatcgtgcgccaagggcctggacacgtcgatcggctcatcgcgctgatgcaggatcctgcgagcgacctgcctgacatggcgcgcccgatcctggtggtgctcgttcagagcctgcaggcgctacgggaccagatcgccctgcttgatcgcgagatcgcagcgcggtcgaaggccgaccctgtcgccaagcgcctgatgacgattccggggatcggcccgatcgtcgccaccgcgctggtggctctggcgccgccggcgagtaccttccggcgaggccgcgacttcgccgcctgggtcgggctaaccccacgacagcactccagcggcggcaaggagcggttgggtcgcatctccaagatgggcgagcgaagcttgcgacgactgctgatcctgggcgccagctcggcggccaaagtcgccgcgcgagagccatcgcgggccaatccgtggctgaccggcatgctggccaggaagccgcgcatgctggtcaccgtggcgctggccaacaagatcgcgaggatcgtctgggcgctgatggcgcacggcggaacctacagagctccggccgcggcagcttaggcgctgtgacggtctgaggcgtcaggaggaaggcaggaaggtcagacgagggtatggcgcaacggtccatgagacggcgccgggaaaaccagaaatgtccgatgcgcttcaaagcgcgcaaaagcgacgtggacccggtgcgcgaactccatacaggccagcggcgtgtgaaaagccgcactcacaggccggacacacggaagcacctgaacctgcgcgcactaccctcgaaaaaccgcttgcttcctaaggggcgtccacaca

SEQ ID NO: 1665 - DNA, 1398 bp, unidentified
  source 1..1398: mol_type = unassigned DNA; note = element_2300364
  misc_feature 1..2: note = core
  misc_feature 3..79: note = LE
  misc_feature 80..1117: note = CDS
  misc_feature 1118..1398: note = RE
  misc_feature 1115..1385: note = bridgeRNA
tgatggtgtggacggcccccgacggcatcgattgtgccagaatgaggtcgttacagatctcagacaatggagaccgcccgtggaacagattagccgaattggcatggacacgtcgaagcattttttccagctccatggagtgaacgccgccgagaaggtggttttgcgcaagaaattacgccgcaaggagatggtggcgttcttcaaggcgcttgcaccgacggtgatcggaatcgaagcctgcggcgcagcccactatttggcgcggcttttggggtcgttcggccacgaggtgaaactaatagcaccccagttggtcaagccgtatgtgaagcgcggtaagaatgacggcgctgacgccgaggcactttgcgaggcgatgagtcggccgtcgatgcgtttcgtgccggtgaagactgccgagcaacaagcggccctgatgatggtcggtttgcgcgaccgactgatccgcaattgcacgcagctatcgaacgccattcgcggctatgcggccgagttcggtttctccgccgccaagggcaaagctcacttggttccactgctcgaacgtattcaagccgatgagagcgtgcccgtcctcgctcgagagctgttcacggcccaagctgaagaatatgcgcggctgcaggcgcaaatcgacgcagtcgacgccaagctcctggcctggcacaaggccgatgaaagcagtcgccgccttgttaagatccccggcgtcggtccgatcggcgcagttctgctgatgctgaagaccccggcgcctgagctattccgatcgggccgacagttcgccgcctggataggtttgacgccgaaggaccattcgacggcgggcaaggtcaggctaggtggcatcactcgggctggcgacgaggccttgcgcagcgtgttggtcgttggcgccacttccgttatccaacacgttcgacgtggcgggcgcggatcgccctggatcgtcaaccttcttaagcgcaagccgccgaagttggccgccgtggcgctagccaacaaaatggcccgcgtcgcctggaagctgatggtcacaggcgagcgctacgccgccaaatccgcgcccgccgctctggcgaacgcgacatagagatcagccagacacggggagcaacttaactgcaaccgtgctgagccgatgccagaacttgctagcaaatgagcagatggtgtgatcgatcgatccaagacacgaggcactccgcttcatccatcggccgtcaaaggtcgcagcaatgattggaacttgtgtcgcggaaaccatcttggccagcgttcacgtgcgagcgcgacaacaggccgaacatatggacgcaagcgatctgatcagagcactgcccaaaagcttgcggggagcgggccgtccacata

SEQ ID NO: 1666 - DNA, 1425 bp, unidentified
  source 1..1425: mol_type = unassigned DNA; note = element_2301037
  misc_feature 1: note = core
  misc_feature 2..219: note = LE
  misc_feature 220..1242: note = CDS
  misc_feature 1243..1425: note = RE
  misc_feature 16..228: note = bridgeRNA
ctggttgagatttcctggcagatgctgcggcttgttcgtagcgtttagaggtccggacggggtagctcgacttgtgcctgctgttggtttcggccgactggcttgcgatcgaagagcttcctgtccggtccttgccgcgagtggctcgaaagaggaatgtgcaccagatccgaaccaggagtgccctcgcggtcctacccgaccacgaaggaggaactcatgacagtgatcatcgggatcgacccccacaaggcattccacacggcagtggccatcggctgcgacgaacggcagctggccgagattcgagtgcgagctacgtgccaacagacgacgaagttgttggtctgggcggagctgctcggcccacgcacctgggctgtcgagtcagccggtggcctgggctacctgttgtcccaacagctggtaagggcgggcgaagaagtcctcgacgtgccggcgacgttggcctcgagagtgcgggtgcttggcaccgggcgttcgaacaagaacgaccccaacgacgcgctggcggtggccatcgcagtcctccgctcttcgggacttcgttcggttgagccggccaaccacagtgaggtgctccgcctcctcgccaagaggaaccacgagatcgggcggctccgcaacatcgttgtgtcccggcttcatgctgccttggccaacctctccccggggggaatctccaaggaactcaacgcttctgacgctgtccggctgctcaacgacctcgaaccggtcaccgcagtcgaacagacccgctatgacctggcccacgagctgctcgacgacgtggagcgactcgatgtgcagctgaaggagtcccacagacggatcaaggtggcggtgaaggcttcaggaacttcgctcaccgagctctatggcgtcggtcccatcctggcctgtgaactgatcggctacaccggagatgtccggcgcttcaccacccgggacaagttcgcctcctatgccggcgtggccccgatcgagctgtcgtccggtggccgcatcgtccaccgcctcagtcgccggggcaaccgccagctcaaccatgccatccacatggtggccatctgccagatccgccagaaggactcggagggacggatctacttcgagaagaaggtggccgcgggcaagaccaagcgggaggccatccggtcactcaagcgtcacgtcgccaacgccgtctatcgccagctcctcatcgacgcacacaagtaggggtccgggaggacaagcgggaacgactcgtagcctgcgtggtcggctctgcaccctggtggccggctcttcggcgtagtcactcccggacccaccaatccttaggcatctgcgccctcgaaggcacgtggatcaaacgcgcccagaagtcctcgaaattccccacttgactcaaagaggatt

SEQ ID NO: 1667 - DNA, 1627 bp, unidentified
  source 1..1627: mol_type = unassigned DNA; note = element_2305488
  misc_feature 1..2: note = core
  misc_feature 3..267: note = LE
  misc_feature 268..1470: note = CDS
  misc_feature 1471..1627: note = RE
catgtatactttaagatgtaaatcaatgagataaaaccattttgatttatagtataatattttttaatcatttttataaaaatgattaaaaaatatgcgtttgagtaagggcagattatatcaagggtctgtgaatccataaaaatgactgcccatctcttatcttattattagtctagtcttagaaagtggggtcttgtatccatataaccagcatgatgagataattgtaagtattaagagtcaaactaagaaaggaagtattttatgaagtatgttttagtacttgatattgctaaaggcaaaagtatgtttatgttatcttcagatgttggtgaagttttattagaacctacagaatatattcataataaaacaaattttgaatcgatagattcttatattaataaacttgatatcaaagataacttaactgttgttatggaagctactagtatttatcacaaggcaccagaaagattttttaaagaaaataattatcatgttattgtatttaatcctcttattggcaaagaaattactaatactattagaaaaacaaaaactgataaacaagactgcattaaattagctgatttattttggaaaggtagtatacctgatagaaattatactgaagaagaaatttatactaggttaaatgaattatctagacaatattatcatttagatgaaggtttaactagacataagaatcgttataaagaattattacacctttgttttcctgaatttgaattatgttttaaagacgggaaaatatatgatttaactgcgttaaattttattaaagaatttcctcatacttatattataaaagaaaaaagagttgatgctcttgcttataatatggctaatacgaataatagacatcttaattattataaaagaaaagcaaatactatcaaagagtatgctctaaattcttatcctggtgtaaataaaaattctaaagatgttgataatttaaaacaactagtaaaaataattattgatattactaagaaaaaagatgaagtgaaaaatcaaatgattgaaattgccaaacaaactaaatattttaataatattgcatctatttttggtatagctgatttatctgcagctttaataattgctgaattaaaagatattactagattcaataatatcaaacaaattaatgctagttgcggtttagatcctaccatagttcaatcaggtaaaagtataaattatcatggaccaatttccaaaagaggaaatagatatgctagaaaaatattatttaattgtagtcgaaatatagtaacaatatcagcaaaatgtgataaagaaaatccaatatatatttattatcaaaagaaaaaacaggaaggtaaacattactatgcttgtttaactgcctgttctactaaactaattagaattatttatgcgttatgcatgaataactcaacacaaaattagtttatcactttatttaaaatatatcaacttctaaacaccaaaattttaaaaaaatgagctcttttggtgttttaagccatgacttaaactacaattttagataaaagtacaactttttaagattttttcaaaaattacttgtaaaaacttagaaagt

SEQ ID NO: 1668 - DNA, 1397 bp, unidentified
  source 1..1397: mol_type = unassigned DNA; note = element_230a2f0
  misc_feature 1: note = core
  misc_feature 2..87: note = LE
  misc_feature 88..1113: note = CDS
  misc_feature 1114..1397: note = RE
  misc_feature 1170..1392: note = bridgeRNA
caatgggatggacccctcccacctatcggcatcgaggtgctaaattgatatgataatgctatcagataaacagaggaggagtccaagatgaatattaaacgagtcggtatagatttagcaaaagacgtttttcaagtacacggtgtagatagccaagaaaaagtcattttgcgtaaacaatttcgaagagtgcagttgctcgcctattttgaaaaaatagcaccttgtctaattggtatggaagcttgcggtagcgctcactattgggcaagagaattacaaaaactagggcatacggtcaagctaatggcaccgcagtttgtaaagccttacgttaaaagcaataaaaatgatgccaacgatgccgaggctatctgtgaagcagttgcacgcccaactatgcgttttgttgcggttaaaacaatagctcagcaagatattcaagctattcaccgtgttcgtagtgaattagtcagccatcgaacagccaaggttaatcaaatcagaggtcttctcgctgaatatggacttgctgttggccgacgaatagaggtgcttcgaacggctttgccgttattgcttgaagatgccgaaaatggcttaacacttgattttagaatactgcttgatgaattacggcaagacctcatcaatctagatgagcgtgttcaagtcatggataaaaaaattaaaacactggcgaatagtcatggtgaagctaaacgcttattagcaataccaggcataggaccgattaccgctactgcgataattagcgccattggtaatggtaaacaatttaaacgtggcagagactttgccgcatggttaggtttaacgcctaggcagtacagcagtggtggcaaagaacgtttattaggcatcagtaaacggggtgatagttatttacgcacattgctgatacagggtgcaagagcagtattacgagtagttggtcaaaaagacgatccacggagtcgctggctacaaaacttgtgcagtcgtcgcaataaaaatattgctgcagtggctttggccaacaagaatgcacgtattatatgggcgttactaacaaaagaaacagattttctgccggatagcgaacctgcttaggtttaaaagcaagctttcaatcctaagcaggttaatatagaaagtaggaagtcactcacgattgtaaagcaacaagtactgatggcaaacaggtcgaaccggcgtttgcaaaacctgtccgattcaaagtgttttaaacacgccaggacgattaggagtaaacgcgcgaatagcccattatggcccgagctgatacgctcaactttgaggtcggatatacgtgtgcagtcgtaacctaaaaccagaaggtctaaattgcttgcaaaacgggaggtgtccatata

SEQ ID NO: 1669 - DNA, 1383 bp, unidentified
  source 1..1383: mol_type = unassigned DNA; note = element_230ea1b
  misc_feature 1: note = core
  misc_feature 2..69: note = LE
  misc_feature 70..1101: note = CDS
  misc_feature 1102..1383: note = RE
  misc_feature 1141..1378: note = bridgeRNA
caatggtatggaccccgcccgtccagccggtcgaatgtcggacgtgaactgcagcgagggagaatcatcatgcaggtcgttcggataggcttggacttagcaaagtacgtgtttgaagttcatggcgttgacgggcaagggaatgttgtcattcgcaaaaccttgcgtcgtggatcgatgtcgacgttttttgccaatctgccgccttgcttggttgggatggaagcttctaacggtgctcactattgggcacgcgtgcttacagagcttggtcacaaggtgcgtctgataagccctcagtttgtggcgccgtatgtgaagtcgaacaaaaatgatcggaatgatgcagaggctatctgtgaggcagtcggccgacctacgatgcgctttgttccgccgaagtcacccgaacagcttgcgatccaagccctccatcggattcgccaacgcctggtgcaaagccgcacgaggcttgtgaatcagatacgtggcatcctcgccgagcaaggcatcgtcatcgctcgcgacatctggaggctgcgacgggctcttgccgagatcacaggacatgcaacggatgatctcaacaagctggtccgagtgctgattttggagacccaagctgaattgatggagctcgatcgccggatcgcatcctgtgatcggcggatccgagagctgtaccgcactagcgagctgtgccaaaggcttggggaaattgaaggcatcggactggtgaccgctaccgctcttgttgccgccgtcggggatcggagctgcttcaagaatggtcgtcagttcgctgcatggctggggcttgtaccgaagcagcggtcaagtggcggacgacaccgattgttcggcattagcaaacgcggcgatcgctatctacgcacgttgatgatccacggcgctcgcgctgctcttggcaaagctaggggcaagcaggatccgcgaagccgttggcttgctagccttcgccagcgtcggcatgcgaacgtcgcggccgtggcgctcgccaacaagaatgctcgtatcgtctgggccatgctcgccgggaatgtctcttacgaacccgagcgatccgttcaggcggcttgatgcgaggcactcgacgaaggacatgaggagctcttacctggcaattgcaatcagatgacaggagatggtgaaacggtcactccgttgcttcccgaacctggtgtgtggaccggcatggcataggccaatgtctgggcgccgttgaggtggaagcacgcgaaaatccatcggggctcgcggcgccgaattctcgggccgcatcaagaagccggatatacgtcagcagttgtgactgttgcacccgatccagtcagcctgttgcaatcgggcggggtccatata

SEQ ID NO: 1670 - DNA, 1390 bp, unidentified
  source 1..1390: mol_type = unassigned DNA; note = element_230efe5
  misc_feature 1..2: note = core
  misc_feature 3..85: note = LE
  misc_feature 86..1117: note = CDS
  misc_feature 1118..1390: note = RE
  misc_feature 1088..1377: note = bridgeRNA
agatggcgtggttgccgctctacccacccggcacgttctatcagaggatggtcgggttaaatccaacgggtggaaggatggcagcatgacatacgacacgatgattgggatcgatctggcgaagaacgttttccaggttgatggagctttgctttccggagaggtgaagttccggcggaaactatcccggcagcattttcgaagatttatggccgggcaaggcgcttcgatcgtcgtgatggaggcatgcgggagtgctcattactggtcacgcgagatgacgaaactcggccatgaagtacggctgatagcgccacagtacgttcgtccattcgtgaagcgtcagaagaacgatgccgcggatgccgaagcgattgtcacagccgcacagcgacctgggatgcgcttcgttacgccgaaactggaggaacagcaggcacaggcgcttctttttcgcgggagagaacgacttgtacgtcagcgtaccgagctggtgaacgcactacgatcagtcctctacgagtttgggcatccgattcctccgggcattgggcagcttacgcggattgaggcgatggtcgaggctgagaacagcgatttgccagaactggttcgtgacgaatgccgtgatcttctgctgcagatcgccgagaagacgcaacggatcgagtggaagacaaaacagatcggcgctctggcatcactgactgacacagcacgccgtttgcaaacaatgccgggcattggaccaatgagcgcgttggccgttgaagcgtttgctccacccatggaaagctttcggcgtgggcgagacttcgcggcctggctgggcctggtcccgcggcagcattcgtcgggcggaaaagagcggctcggacgaatatcaaaggccggacaagcggatatacgccggctcttgatcatgggagcgatgtcgcgcttgaactggctcggccggaggacgatcccggagaggtcctggctatctggaatgttagcgaggaaacccaggatgcttgtggccattgcgctggcgaacaagatggcgcgagcgatctgggccatgctgacaacgggaaaggactaccaaaatccgacacagactgccgctgcatgaaagaggtgtggcgtaaggtagttcagcgtcggtgacggaggtgtgagaaagtcgacaacccatatgggcaaaatgatcgaacagatctggatcaggaaaaccagttcggggcatagagcccttcagctcgctgaatagatttggacctgatccgctgatcaccatatcgaccagcggcttccaaagtgccgcatttaaaggcctgacagaagaccgcactcgatcacacccaatggatcagaaacttcttgcattacgggcggcaaccacaga

SEQ ID NO: 1671 - DNA, 1539 bp, unidentified
  source 1..1539: mol_type = unassigned DNA; note = element_2325626
  misc_feature 1..5: note = core
  misc_feature 6..255: note = LE
  misc_feature 256..1395: note = CDS
  misc_feature 1396..1539: note = RE
  misc_feature 57..239: note = bridgeRNA
aaaaacattcatgagtttttaacacccaaccccggcatgaaaataagtaccttcggttcataatggtaatgacacaaacaggatgtaagacgtgggtttttttggtggctttgaccctgtaataaaaactgtttgagtgagtttggtgttcaaccctttgttagctccacttgatagtaggatgactacgtacagaaaaatgcttatgttcaaattcactcactgtttgtgatcattatatattggagtggttttatggaggtatttattgaaaagtgtgcaggtttagatgtacattctgaaacgattgtagcctgtgttattaaagggagtcgtgaggacgacgtgtatacagaaactgaaactttccctacactcacaaaagatttatttcgactattaaaatggttagagaatcatgaagttacacacatcgcaatggagagtacgggtgtttattggaaacctgtttttaacattttagaagacttctttgatatcacattagcgaatgctcagcgaattaaaaacgtacctggaagaaaaacagatgtttctgatgcagaatggattgcgaagttattacgacatggtttaatcgagaaaagctttgttccaccggtagatattcgtgaactgagagatttaacaagacttcgtaagaagtggattggtcatttaacctcagaaaaaaatcgaattcaaaaggtattagaaagttccaatgtaaaactaagtaccgttatctcagatgtatttggtgtttcaggtagaaaactattaaatcgtttaattgaacaaggttatgtggacgaagcggatgtagaaaaagatattcatggtaagttggttccgaagaaacaacggattacggattcattatttgggacaattaatgaacatcaaatattccttatccgccaatcctggcaacacatagaatacttagaatccttgattttagaaatcgaagaacgtgtagaccaattattaattaattatcacgatgaactacaattgttaatcacgataccaggtataagtaaagatactgctgctgtaattatcgcggaaataggcgtagatatggggcaatttccaacttcacaacatcttgcatcatgggcaggcgtttcacctggtaatcatgaaagtgcaggaaaacggaaaagtacacgtacagtaaaaggtaatcctcatattaaatcagcaatgtgtgaagcagcttgggctgtatcgagaagtcgaaatcgttggttagctaacaaatattggtcacttgccgcacgaagaggcaagaaaaaagcactcgttgcgatctcgcatcgaatgctccgggttatttactccatgttattaaacaaggagccttataaagaaccccaattagtttaatataaccataaccaaataattttatacaaagttacctccgaacaggtagctctgctttcttattggcttttttaggtcacttaaagaattacctaatgtaaaaaagattattcaaaataccgaaaggttaaattattttcacag

SEQ ID NO: 1672 - DNA, 1471 bp, unidentified
  source 1..1471: mol_type = unassigned DNA; note = element_2326bdf
  misc_feature 1: note = core
  misc_feature 2..227: note = LE
  misc_feature 228..1451: note = CDS
  misc_feature 1452..1471: note = RE
  misc_feature 11..239: note = bridgeRNA
ctaattgttcctgagggcgctgcggtagtgccgtagcgttcgtgaggtccgacgggctggctcccgaaccgcctgccgaccgcgtgcggtctggcttaataacgaggtgccagcctgtcggttctcgccgtggcgtggctcgaaagaggtgcgagcgctagcagatccgtaattaggcatgcccgccacgttctccattccccgggacgaacgacttggagcgtgtcatgacagcagtgatgatcggcgtggacccgcataaggccacgcacacggcggtggtgatcggcgcagcggaggagccgctgggcgagttgcgggtccgcgcatcggccggtcaggcggagaagctggtggcgtgggcagcggactggccggagcggacctgggcggtggaaggcgccgccgggctgggccggctgctggcccagcagctcgtcgccgccggtgagcgggtcctggacgttcagccgaagctggcgtcccgggtgcggctgctgcaggccggggacacgaataagaacgacccgaacgacgccctgtcggtggcggtcgcggcgctgcggtccaaggcggcgcggccggtgatggccgaggactacccggcggtgctgaaagtgtggtccaagcggcaccgtgacctggcacggctgcgtaaccaggccgcctgccggctgcacgccgtgctctgcgacctggtccccggcggccacccgaaggagatctccgcagctcaggccgccaggatcctggagcaggcctcgccatcaggagctgttgaccaggcccgcgccgaactggccgccgagttcctcgaggacatgcgccacctggacgcccagctgcgcggcacccgtaagaaactcgccgccgcggtcagggcctccgggaccaccctcaccgaggtgttcggcgtcggcccggtcatcgccggcaccatcatcggcgacatcgccgacgtgtcccgcttccccggccgcgaccacttcgccgcctacaacggcaccgccccggtcgaggtgtcctccggtaaccgcaagacccaccgcctgtcgctgcgcggcaaccgccgcatcaaccacgcgatccacatggccgcgatcacccagatccggcacaagcacagcgacggccgcgcttactacgacaagaaagtagccgagggcaagacgcacaaagaggcgctccggtccctcaagcggcagatcagcaacgccatctacgcctgcctcctagccgacgcccggcgagccggccagcagccagcgcaaagggcccgggagggcaaccggggaacgactctgactccagcgcggccggctcacaccccgaacgccggatcttcggacaagccactcccggacccgggcaccacgatacggcccggcaccagggcagccacaccctcgctgccgaagccgacttcaaagaaaaccccggcaaccacttgacagcagccgcaaagaggact

SEQ ID NO: 1673 - DNA, 1386 bp, unidentified
  source 1..1386: mol_type = unassigned DNA; note = element_23298da
  misc_feature 1: note = core
  misc_feature 2..89: note = LE
  misc_feature 90..1121: note = CDS
  misc_feature 1122..1386: note = RE
  misc_feature 1153..1378: note = bridgeRNA
caatgggatggagtcctcctcaccctcggcatcttggagtgccagactgaaggtgcgaaccgcagtcaccagtgagaaggagtccacacatgaagcttatgcgcattggggtcgacttggccaagaacgtgttccaaatccacggcgtggatcgccacgagaagccgatctggcggcagcgtttgtcgcgagatcgctggctgcaaaaggtgctcgagaagatcgagccggactgcgagatcggcatggaaagttgcggcggcgcgcatcactgggcgcggcaactgcaggcacgcggttatcgagtgaaactgatcgcgccacagttcgtgaagccctacgtcaagagcaacaagaacgatgccaatgatgccgaagcgatttgcgaggcgatgagccgaccaagcatgcgctttgtcagcgtgaagacggtcgagcaacaggacatccaggcgacccatcgcattcgtgccggattgatcgagcagcgcaccgcgaagggcaatcagatccgtgggttggtgtcggagtacggattagttgcgcccaaagaattgctggcccttcgtcgcgcgataccgtgctggctggaggatggtgacaacggcttgaccgcacgtttccgtcgcttgctcgacggcgtgcggagcgatcttcgtacactcgatgcgcgtgttgccgaactggatagcgagatcgcggcgatcgcgccaagcgagccggcggcggtacggctgcaacagctacggggcgttggcccgatcacggccactgccctggtggcgacggttggtgatgccagccagttcgctaatggccgccagctgtccgcgtcgcttggcctgaccccacgtcaacacagctccggtggcaagaatcgcttgctcggcatcagcaagcgtggcgattcgtatctgcgaacgttgctcgtgcacggcgcgcgctcgacgctacgtaccgccaaatccaaagaggatcgactcagtcagtgggcggctcgtctggccgagcgatcccattacaacgtcgcggcgatagcactggccaataagaccgcacgcatggcctgggcgatgctgcggcatgacaccgactatcaaccggagcgggcggcggcctgaaatactacgcaccaactcaacaaattaaccctcaatccacgattgcgaagcaacctgagcgatggcaaaccggtcgaaccggcgtcggcaaaaccctctaacgtccaggtgcgaaaagcacgaaaaagcgaatgggagccggcgcgcgaatagcccatcatggtccagcatcccaacgatgccgcggttagagaccggatatacgtgtgcagtcggcacggggcgccagagcaaagggggcttgcaatggggaggagtccatata

SEQ ID NO: 1674 - DNA, 1318 bp, unidentified
  source 1..1318: mol_type = unassigned DNA; note = element_232a33e
  misc_feature 1: note = core
  misc_feature 2..63: note = LE
  misc_feature 64..1086: note = CDS
  misc_feature 1087..1318: note = RE
  misc_feature 1082..1312: note = bridgeRNA
taataagatggtccgcctcccctaatctacacttagggagattattaaatgaggagaatcatcatgtctactattaacgttattggaattgatataggaaaatctacctttcatcttgttggtcatgattcatcgggtcgagaagtttgccgtaaaaaattaagccgccctaaactaattcagtttctcgctaagacagaacgaacaactgttgccatggagtcttgcggcggctctcattggttagcaagaaagtgtcaagagtttgggcataaagcactactgatcccaccacagtatgttaaaccttatgtcaaaacaaacaaaaatgatttcattgatgctgatgccatagctgaagcagctacacgaccttctatgcgttttgtaagtattaaaactgaatcacctcaagtggtatcagttattcaacgcatacgttcaagttatctaaaagacagaacggcctgtatgtcgcgtatcggatcaatattattagagtttggtatgagctttccaaagtctcacgcaaaaatgaaagcattattccaatggatagctgattttggtgagccaataccagctatgttgcttttagaattaagagaccatcatgagtattacttgaaacttaatcagcttattttgactcaagataaaaaactaaaagagatagttgaccatgacgaacgtgctcaactactcaaaacaatacctggagtgggaaacctaaccgctagtcgttgcttatcagatattagtaacgcctctgacttcaaaaatggaaggcacttagccgcatggattggcttggttccacgtcagttttcaacaggaggaaagccaaggttgctcggtataagcaaacgagggagtaaaggattacgagagttattcattcacggtgcaagagctgttcttgcaagacccgaaaatgctatagcaaccttcgggaattggatattagaattactatcacgaaaaccatataacgtcgtcgtagttgcgttagccaataaactagcacgtatcgcgtggtcggtactgtcaaccaaacaagcattcgaagttagagtgcaagcctgatttgcaaatgatgataaagatgacacaacggttagaccactagtttgaagacctgtggggcactacagcaactttttaagtatgctttggcgcttttgaggacaatctagcgcggatctcatcgtggagctgggactaatatatttggtaacccaaaaagactccgaatacattagcgcaaaccacccaagttatcgatattattacttgcaatatcgaggcggaccataca

SEQ ID NO: 1675 - DNA, 1612 bp, unidentified
  source 1..1612: mol_type = unassigned DNA; note = element_232ede8
  misc_feature 1..2: note = core
  misc_feature 3..499: note = LE
  misc_feature 500..1498: note = CDS
  misc_feature 1499..1612: note = RE
  misc_feature 15..305: note = bridgeRNA
ctcctaatatataagtgtagggtttcagtacccaacagccagttgggacttaatcctctcattgtttaagctgtataatgattaggcattggtatgacgacacctcctaggaccactttaggtgtccgcaagaaagccagtcagccagcctatcatttgcagccgttcgatttatgcaggttggactgtccttgtacatgtccgtttgataccccaggagattgaataagcagtgaggaatgctggataccatgcaaattcattttcaggaggtacattaggatgtacaacgctgtcggtattgatgtctcaaagggcaagagcaccatcgcagtcctgcagcccggaggcgtcattgtcaggaaaccctttgatgtttttcacacttcccaatccttaaaagaactatcaaattatctggcttcacttgaaggggatacaaggattgtaatggagtgtactggcagataccatgagtccatggctaactccctctctaatgccgggtttttttgtaactgtcgtcaatccgcatctgattaaaaactttggtaacaatacgttgcgcaaggtcaaatctgaccctgctgatgctaaaaagatagcacgctatacccttgacaactgggctgaactgcggcagtattcatgtatggacaatacacgtaaccaattgaaaaccttaaattcacaattcagcttctttatgaagcaaaaggttgccgcaaaggcaaacctgattgcactgttggataatacataccccggtgtaaataaactgttcaacagccctgcccgtgaagatggcagtgaaaaatgggtcgattacgcttactcattctggcatgtggactgtgtccgtaaaaccggcttgaaagcttttacagtgcgctatgaagctttctgcaggaaacaccattatatttatcagccttccaaaccagaagaactgtttaacgcctctaaagagcttgttgccgtgttcccaaaggagacgtcctataagcttctgatccagcagagtatccagcagctcaatcttgcctctgcccatatcgaacagctccgcagggagatgaatgcacttgcttccacgctcccagaatacgaggttgtcatgggcatgtatggcgtgggcaaaacttacggtccccagctcattgctgagattggcgatgtttcaagatttacccatcgggaggcaatcactgcttttgcaggtgtcgatcccggtgtggagcagtcagggcagcacaactcaaagagcaacaaagcttccaaatgtggaaccggcaggctccgtaagaccctgttccaggtcatgaccaccctgctccagaatgccccggagaatgaacctgtctaccagtttctgaaccggaagcgttccgaaggaaaaccttactatgtgtacatgactgctggtgcgaataagttcctccgcatctactacggcaaggtaaaagcacatctgcgcagtctggaacaaaacgaataatcattccgtctattacggctttctttttgaccggctgatgaggcggtcttagagttgtgccataaaatcacttcacaaaaattttcaaaaagtgcttgactttttattagcagg

SEQ ID NO: 1676 - DNA, 1362 bp, unidentified
  source 1..1362: mol_type = unassigned DNA; note = element_2333df3
  misc_feature 1: note = core
  misc_feature 2..72: note = LE
  misc_feature 73..1095: note = CDS
  misc_feature 1096..1362: note = RE
  misc_feature 1141..1359: note = bridgeRNA
caatggtatggactccccacctttgtcaaaatcgactaaggtgacagtgacaaacaaaaaggagcccataccatgacacagtctagcactataacgattgatttagccaaaacggtctttcaagtcgctttctttaataagttcggtgttttaaagtcgaatgagaaaatgactgaacgcaagatgctttcatttatagtgaaccatccagaagcgattatatgtatggaagcttgtagcagcgctcactattatggtcgtaaatttgaaggacaaggacacaaagttaagttaatccctcctcacatagttgccaagtaccgagcaggtaataaaaacgatgcaaatgatgctttggcaatttatgaggcacttaaacggccaaatatttattctgttgcggtaaaatcaatcagccaacaagaccttgcatcattacttaagcttcgcaaagggtatataaaacagcgaacacaggtgtcgaacagagcgcgtggtttaggtgcagaatacggtgttaagctgcctgaaggtattacgtcactcaaaaagcgtttaccagatatccttgaagatgatggtaatcaattaacgccagcaagtcgtttcattttagctgatctgcttgaagaggttcatcggttagatagtaaaataaagcatgcgacagcgcagctagttgaattggctaaatctatcccggagtgtgaattactgacaagtttaccaggagttcagtggataacagcaagtgctctttatgcacgtttaggtaatggctcagagtataaatatggtcgcaatgcgagtgcgtcggtaggacttgtgccaagtcatagtggttcaggaggaaagaataagttatatgggatcacgaagcgcggagataagtacctacgttctttggtcacacatggagcgcgtgcggtggtatcaaacatacgcgataaacaagataagctgagttgctggatcagagcattatcaagcaaacatcactttaataagatcacgatagcagtagccaataaactagtacgaatggcattagccatgctgaaaagcgcaacgccttatagagctgatttagcttagtcacagctataaggtgaataacactgctagagtaagccgagtaaaggtaagtagaaaacgaatgtaatgtgatgacaagcacgcaaggtgaaacctgagagttgcgatggtacgtggataccttaacctcgataaggagccttgaatacagtggattaagccattcaggtctcggggtagctccccacaataaggccgaatatacgtgaacttgctattatcaaattacactttgaattttcttgccttacagggggagtccatata

SEQ ID NO: 1677 - DNA, 1449 bp, unidentified
  source 1..1449: mol_type = unassigned DNA; note = element_2338a53
  misc_feature 1: note = core
  misc_feature 2..62: note = LE
  misc_feature 63..1127: note = CDS
  misc_feature 1128..1449: note = RE
  misc_feature 1226..1443: note = bridgeRNA
taatggaatggtctgccgccttcgggaactttcgcattataagagatacacaggaggcagtcatggacatcgacacaatcggcatcgaccttggaaagacagtcttccaccttgtggggctcaacacaaaaggggacatcgttgttcgaaagaaatgttcgcggaaacagttgctgcattttacagcgaatctacgcgcgagactgatcggcatggagtcctgcggaggtgcgcatttcctagcccgcgtcttacgggaacagggccatgatgtgcgcatgatgccggcccaatacgtcaagccttatgtgaagacgaacaaaaacgactacatcgatgcggaagcaatcgctgaagccgtgggaaggccgaagatgcgctttgtaccgatcaagagtgacgatcagctggatatgcagtcgatccacagagtgcgggattgctgggtgggacggcgcacagcgttgatcaaccagattcgcggcttgttgttggagcgtggcattaccatccgccaggggcgccgccatgccgaagctgcgttgcccggcatcctagaagatccagatgcgcgcttgtccgggccgctgcgcatgttgcttgcacaactgcagagggagttgagagcattgcaggctcaaatcgaagaggtggatggggtaattgtcagggctacggatgaacatgaagcatgtcaacggctagtagctattcccggcatcggacccctcacggccacagccgtcgtcgcggctattggcaatggggccggatttattaaaggacggaatttcgccgcctggttgggattggttccgggacaatattcgactggcggcaaacagaaactgctgggcatcagcaagcggggaaacggctatttgcgacgactcttcgtgcacggggcgcgcgcggtgttgcagcgcagagataagcagtcctcaggtctccgagcctggctcgcccagctcgcggaacgcgcccaccataatgtcgttgcggtggctctagccaacaagctagcccgcattgcatgggcggtgctggccagaggagaatcctatcggcccttcctgctgagtgccgacgttaccatcagtccaacacccgaactggcctgcaattgacgcctggccaagtacgccaggcttggaaatcgccttcgcgattcccacaatttcagaccagcgacggcggctgattgatctgaaattcaaaagctccaccaggtttgctcgcgaaccatgagatggcaaaatggtcgaacccagcgcttttgaaaacctgttgaaccagacaggccttagaggctgtagatctaaataggacgagagcgcagcgcattccatcgaggtcatgagctcacttgctcaaacgaagaccggatacatttgcgcagaccacaccgtcttttcatctttcgcttgcaacaaggcggcggaccataca

SEQ ID NO: 1678 - DNA, 1603 bp, unidentified
  source 1..1603: mol_type = unassigned DNA; note = element_233ac0a
  misc_feature 1..2: note = core
  misc_feature 3..277: note = LE
  misc_feature 278..1474: note = CDS
  misc_feature 1475..1603: note = RE
  misc_feature 14..297: note = bridgeRNA
ctcctacaataaaaacatggatatataaacggttagctaccgttcatatccaccttattgtctaagctggtaaaatagtgaggtaatggcttgacggttttctcctaggacatacatgtccgtacgaaagtctgtctgccagcctcccatttccagctgttcgatttatgcaggttgggctatctttccagatgcgtccgtgtcaacccacaggagattgaatcggcaatgaggagtatggttcgccattgcaattctatcttaaggagcgatgtacatgaacgcagtagggattgatgtctcaaaaggcagaagcaccgttgccgtagtaaagacttttggtgatacagtagccaaatcttttgaggtgcgccacaccaaaagcggtatgaacgacctcgtgaattatttaaatgccttagacggcgaatgccgcgttgtcttggagcacacaggccgctactacgaaccaatggttcgctggctttctggtgccggcctgtttttcagtgccgtgaaccccaagctgatcaaggacttcgataacaactccctgcgccgtatcaaaacagataaggcagagattgcccgctacgcccttgacaaatggcctgagctgcgtcagtatacagctatggataaaatacgtacacagctcaaactcatgaaccgtcagatgagcttctaccagaagcagcagacggcctacaaaaacaatttaatagccttgatggatgaaacctatccaggagccaataaattcttcaccagtcccaagcgaccagatggcagcgaaaagtggatagactttattgaaaaattttggcatgtggattgtgtttgcaatatcagtctgtcttcctttacgggtaagtaccagaaatggtgcaaaaagcacggctataatttccagcctgacaagccaaaggaaatacgcgatgcttcactggagctgattgctatactacctaaagatgatataacgaagatgtttatccatcaggccgtagaacagctcaatgcgatctctaaagcagtagaagaactgcgtcatacaatggatagcttagcgtcccaactgcctgaataccctgtcgtcatgtccatgtttggtgtaggcccaacctttggaccgcagctcattgccgaaattggcgatgtacagaaattcagcaaacgcagccaactgaccgcttttgcaggtgtagaccctggtgtcaatgaatctggtaactatgcccaaaaaagtgtccacactactaaacacggctctccatatctaagaaaaaccttgttccttataatgaatacgctaatccaaaatcaaccagaagatgaccccgtatacagattcatggccaagaaacgcgatgaaggtaagctttactacgtctacatgacagctggagccaacaaattcttacgcatatattttggcaaagttaagcagtatctagccgaacaaaacaaataaatgtaacagaaatgaacagaatattctataagttgacgtatatacggcaacttatttgttatgtccaaaaatcatttagcataaaaatattcgattatctcatttttctattgactttttatttgcagg

SEQ ID NO: 1679 - DNA, 1587 bp, unidentified
  source 1..1587: mol_type = unassigned DNA; note = element_233bd7f
  misc_feature 1..2: note = core
  misc_feature 3..289: note = LE
  misc_feature 290..1465: note = CDS
  misc_feature 1466..1587: note = RE
  misc_feature 10..268: note = bridgeRNA
gtataatatatttaggttgataaaggtaacccataaaccctttgttagctgtataattatacaaatattaattgtataattgctgtattggatagaggacatcgttttctccttgaggagtacagaatgtgctacctcgtgattgaaagagtgatgcctctttctgatagacagaatacgaataagttggatgttggcagcgtttcgctgtacttcgcatatagaacaaggcagtatcgtttatcagaacagaggaactatccaaaatatttatttttacaggtgaaaaatgttgtatttaggaattgatattggaaagaacacccatgtagctactctgcttaatgaaactgataaaccgttattcaaggcattttcatttgccaacactaccgatggcggaaacagcctgatagataaactccatcatcatgccaagtccgtttccgaagtcgaaatcggactggaagctacaggtcactactggctgtcagtctactcatatctcattgaacgcggttataccgtttacgttatcaatccaattcaaactgacggttggcgcaaaggcgcagaaatcagaaaccgtaaaactgacgcgattgattctgtgctgattgccgaccttatcagatacggcaggtttgtagaaacaactcttgctgatgaaaatatcatatctttacgcaacctgtcacgtttcagaaattaccttgtttcttccatcggcgacttaaagcgcaaagtcatttgtgtgttagaccaagttttccccgaatatcaatcagttttttctgatgtgttcggcaaaacatctaaagagttgctactgcattttcaaacagcagatgattttgaaagcattactgccactcaactcgaaaatgctctgaaaaacgttgctttgaaagggtttgctaaaaacaagctttctcaaatatctgaacttgccgccaagagtttcggcttagatttctgccgtgatagctttgcattgcagttgaaactactcattgaacaaatcaagtttattgaggcacaagtcgatgatgttgaaactcaaatcaatcaaatccttgctaaaattaattctcccataactactattcctggtatcggcgctgttttagctgctgttattctcggtgaaatcggtgatattagcagattttccaatccctctaaacttgctgcttatgccggcattgatgtgaatgtcaatcagtcaggcgaatctaagtcacaaaatggcaagatgagcaagcgaggttcgccttatctacgcaaagctctttttcaagccgcttttgttgctgcttttaatgaccctactttttctgctttttaccagaagaaacgttccgaaggcaaacatcacttaactgccgttggagctgtggctcgcaagctctgcaatattattcatgctgtcattaagaataattctgactatcaagttcagtaattttccttttttatttttttgacgtggaaaataccatgtctttttcgtcttgcatttttattaataatcttgcataaatttatttttatttttttcaaaaaacacttgacaaatcatagttg

SEQ ID NO: 1680 - DNA, 1452 bp, unidentified
  source 1..1452: mol_type = unassigned DNA; note = element_233db5c
  misc_feature 1..4: note = core
  misc_feature 5..223: note = LE
  misc_feature 224..1438: note = CDS
  misc_feature 1439..1452: note = RE
  misc_feature 10..216: note = bridgeRNA
gtccctaagtttgtggtgtctggggtttgatgccctggatgcccagagcggtggggtgtagctgatcgtggtttgccgttgtcgaggctcgaaaggactggctgccccaccgcgctggacgctccggctgctgattgagagcttgttgcgggtcgtcgctgtttagggatctgtcggcgggttgtccacgggcgcaacaacttcgacggtcaggagcaggtgagtgacaactcgccctcagatttgggtcgggatcgacgtcggcaagcagtcgcatcacgcgtgcgcggtcgacgagaccggcaaaacggtgttcagccagaaactcggcaacgaccaggccgcgatcgaggcattgatcgcccgcgccggccgggctgccgatcgggtgcggtgggcgatcgatctgaccagcccgttggcgttgctgctgatcactgccctgttggccgccgaccagacagtgacctatgtgccgggccgggtggtcaacacgatgacccacggcttccgcggtgaggccaagacccacgccaaggatgcgaaggtgatcgccgaaaccgctcgcatgcgccgtgacctggggcaggtcaccatgcccgacgagctggtcgtcgggttgacccagctgacccgctatcgcaccgatctcatggcggactgggtcgccggaatcaatcggttgcgtgacctgctcggatcgatctttcccgcgctggaagccgcgttcgactactcgaaccggaccccattgatcctggtcgccgggatgcgcactcccggcgagatccgcgtggccggaatcgacggggtcaccacccatctcaccgagaacggggcctggaaacccggaatcggcaagactgctgcggccgcggtcgatgctgccggccgccaaaccctcgccctgcccggcgaggccgacaccgcgatgctggtcaaacgcatcgcggccaagctcctcgacctcgatcgagagatcaaggacaccgacaaactcatcaccacccgattccggcaacacccctgggcgcgcatcatcgaatcgctgcccggcatgggaccgggcctgggggcggagttcctggttagcaccggcggtgacctgtccacattcgccagcgcaggccggttggcgtcgtatgccgggctcgttcccgtccctcgggattcgggccgggtctcgggcaatctgcaccgccccaagcgctacaaccggcgcctgcgcagggcgttctacatggcggccctgtcgagcctgcgtaacccggacggcctctcgcgacggttctacgaccgcaaacgcagcgaacgacagatccacacccaggctctgctggcactggcccgccgtttggtcgacgtgctctgggctttgctgcgtgacggacgccaattcaccctcgagccgccgaacccggtcgctgctgcggcttgacacggtcattgaga

SEQ ID NO: 1681 - DNA, 1606 bp, unidentified
  source 1..1606: mol_type = unassigned DNA; note = element_2344dba
  misc_feature 1..5: note = core
  misc_feature 6..204: note = LE
  misc_feature 205..1446: note = CDS
  misc_feature 1447..1606: note = RE
ctcctacattaaatacgttgcatttctcagccttctattgaatgcttttaggtgcaatgcagtgactggtgggcagggatgccggcatggcgtgtgagagctttcgcatctcggcaaggaggatggcatcctgccccgttcaggcgaggccgcggattagctggatgaaggggcgggtgcccacttcgggtctcttttgggaggttgcggtcctggacggacaaggcagaagcccgccatggcaaccttgggaaggagacccggcccatgatctacgcaggtgtggacatcgcgaaggtagaccacgtcgtcggcgcgatagacgaaacaggcgacgaagtcgcaaagcccatgcccttcaagaactccaaggagggcttcgagaggtgcgtcgcatggctcgagggcgtcgccgagacgcaagacgacgtggtcatcggcatggaggccaccggccactactggcaggcctgcttctcgtacctgacgtcttgcggctaccgcgtggccgtgataaaccccatgcaggtgaaggcggtgcgcaagctcaagagcctctccaaggttaagaacgaccgcatcgacagcgtcgtcatcgccgagacgctgcgaatcgggaacttcgacgagaccgcgctcgccacagacgagctgcagtcgctgaagaccctcacgcgctaccggcagtcgctaaaggagcagatcgcggccgtgaagacccacgtcgtatgcctcatggacacctactttcccgagtacggcggcatcttctccaacatgttcgggaaggcgtcgcttgcggtgcttgccaagtgcccgcttccggacgagatagcgcacgttcgcgaatccacgttggaaaagatcatcaccgaggcgtcccacggaaggtctggggccaggcaggccgccaaggtcaaggcgagagccaaggagtcgataggcttcacgctgggctctgccgccgcatccttcgaggtcaagtcctacgtcgcgcagatcgagttccttctcgcccgcgttgccgaggcggaggcaaggatcgccgcgctgctggagtccatcgagcctttgatccttacggtgcccggtatatccaccacaacaggcgcccagatagtcgccgagattggcgacgtctcaaggttcaggaacgccgccgccatcgtaagctatgcgggcatcaactcatctgtcaaccagtctggcaagttcgagctggaaggcgggtcgatcacgaagagcgggtccccctacctgcggcgcgcgctctaccttgcggcccaaggcgcctaccgcaacgactcggggcttcgcgccttctacgacaagaagcgaagcgagggcaagtgccacagggtggccgtcatggcggtggccagaaagctttgccacatcatatacgcgatccttcgcgaccgggtcccgttcgaatcgaggggataagcctcgttggaatttcctttcccaaagcctcaaaaggctttggctcattgcgcctaaaaacattcaatgttcggctgtcaaagtgcaaattccaataaaacttacttacctaaacctctttgaaaaatgcctaatctggtcttgacttcatatagctggt

SEQ ID NO: 1682 - DNA, 1475 bp, unidentified
  source 1..1475: mol_type = unassigned DNA; note = element_2349268
  misc_feature 1: note = core
  misc_feature 2..173: note = LE
  misc_feature 174..1220: note = CDS
  misc_feature 1221..1475: note = RE
  misc_feature 1246..1474: note = bridgeRNA
gaatgaaatggacgcctcccatctctgccttgcgagcgacgtgagccatggaagcgatggatagcgggaacgtgtgaagggaaagtggaaggtggaccctcgcgggccaacggcgtcagagcgcctaaagtgaaagtttcagagctttcaaggctaaccggaggatccacaccatgaatgctactcccaattcggtggtcggtgtcgacacggccaagagcgtattccagctgtacacggtagacaaggaaacgggcgaagtgatcaaccagcaaatcaagcgtgcgcagttcctgcagtggttcgccaaccgcgcaccttgcctgatcgggatggaggcatgtggtggctcgcagcattgggcgcgcaagctccaggcaatggggcacgaggtcaagctgatgagcggaaagatggtcaaggctttcgtttgcggaaacaagaacgatgcggccgatgcgcgcgcgatctacatggcagcgcagcagccggaagtgaagaccgtggcggtcaagagcgagggccagcaggccgtgctggcgatgcaccggatccgccaacagctggtgaaggtacgcacggcacagatgaacgagctgcgcggcctgctgggggagtacggcgaagtgttcggacggggcaggaaggcgtttgacgccggcatgaaagcatcgctcgaacgactggccgagcgcttgcccgcaccgttgatcgacacgctgcgtgaccagtggaacgaactggggaggctggacgaacgtatcgcccgtatcgaagcatcgctgctggcctggttgcgccaggatggcgccgccaaagccatctccgcgattcctggcgtcggcctgctgaccgcgaccgcggcggtggccacgatggggcaacccaaagcgttccgctcgggccgggagttcgcggcgtggatcgggctcgttccagcgcagaccggcagcggcggcaaggtacggctactgggcatgagcaagcgcggcgacacgtacttacgtaccttgctgatccatggtgcccgggcggtgctgcaacatgccaaggcccccagcccgtggttgcagcaaatcagccagcgccggccacccaacgtggtgatcgtcgcgctggccaacaaaatcgcgcgcacgatctgggcagtattggcccatgaccgcgcgtatgacaagggacacgtcagccagcggccgctcgcggcgccagcggcgtgaagataaacctacggaaaagaaaggatggcacgtcaccagttgcataggtatcgaagcgatgacagacaggtcagaccgggatccaccaaacctgaatatgtcctggggctcacagcccgtcaggagaatgaggagtgggtcagcggatttcatcggggccagcggcgttgccgcgtacaaggccggatatagaactgcgactttcctcgtctgaacaaagctggaaataccttgcaaaagggaggcgtccatata

SEQ ID NO: 1683 - DNA, 1377 bp, unidentified
  source 1..1377: mol_type = unassigned DNA; note = element_23580da
  misc_feature 1: note = core
  misc_feature 2..69: note = LE
  misc_feature 70..1101: note = CDS
  misc_feature 1102..1377: note = RE
  misc_feature 1137..1372: note = bridgeRNA
caatggtatggaccccgccctcgcggcgaggtggaatctcgaacgtcaactgcgatgaaggaggatgtcatgcaggtcgttcggataggtctcgatttggcgaagtatgtcttcgaggttcacggcgtcgacaagcacgggaatgtcgttgtgcgaaagaggctgcgtcgcgatgcggtggcccgcttcttcgccaatttgccggcgtgtctggtcggcatggaggcttcgaacggggcgcattattgggctcgcgtgctcaccgcgcttggccatcaggtgcggctgatcagccctcagttcgtgacgccatacgtcaagtcgaacaagaacgaccgcaacgatgcagaagccatctgtgaagcggtcggccggccgtccatgcgcttcgtgccgccgaaatccgttgaacagttggccgtgcaggccgtccatcgcgttcgccgtcgcctggtatcggatcgggtcaagctggtgaaccaagtgcgcggccttcttgccgagcacggcatcgtcatcccgagggacatcacccagttgcgacgtggcctcgccgagatcatggcaggctgcgatgacggcctcagcgagctggtgcgttctctcatgagggatctgcgggaggaattggcagagctggatcggcgaattgcatcctatgatcgccggatacgggaaatcttccgcaacagcgagccgtgccaacgcctcggcaagatcgaaggcatcgggccgataacggcgacggcattgattgcagctgtcggtgacagaacctgcttcaagaacggccgccagttcgcggcctggctgggccttgtgccgaagcagcgatcgagtggaggacggatccgacttttcggcatcagcaaacgcggcgaccggtatttgcgcacgctgatgatatacggcgctcgcgccgctctgggtcgcgccggcggcaaacaggatccgcggagcctctggctcggcaagttgcggcaacggcggcaccccaatgtcgcggcggtcgcgctcgccaacaaaaatgcgaggatcgtctggtcgatgctctcgggtaatgccgcctatcaaccggatctgtcggtgaaggcagcctgacggtcccgtcgagagcgagaaggaggtcccacctcggcaattgcagcaaaatggcaggagatggcgaaacggtcaccccgtcgcttcccgaacctggtgtgtggaccggcacggcttcggccgatgtctgggggccgttgaggtggaagcgggcgaaaacccatcgaggctcgcggcgctgaacatcgagccgcatgaagaagccggatatacgtcagcagttgtgaccatcaaccggattcagccaacctgttgcaatcgggcggggtccatata

SEQ ID NO: 1684 - DNA, 1477 bp, unidentified
  source 1..1477: mol_type = unassigned DNA; note = element_23630c4
  misc_feature 1..4: note = core
  misc_feature 5..251: note = LE
  misc_feature 252..1460: note = CDS
  misc_feature 1461..1477: note = RE
  misc_feature 44..225: note = bridgeRNA
ccccgttactttgttcgtgcctgccgttaggtgattgtggtgggtgttggcctgctgggtccggcatgatcgttgccccctgtcgctgttgatgatctggggggtgttgtcaccgggcctggttggcggcgtgtgatcgctgatagggacagggtccagcctggctgagggccgttcgtaacgtggatgtcgggactcgccgctactggttcgggccgacgacagcaggttcgagcggaagggaaacggggatgggtgcgagcatcgtcggacacggtgacgtcgatgtgttcatcggcgttgatgtcggcaagggagaacatcacgcggtcgcggtcgaccgggccgggaagcggctattcgacaaggcgttgcccaatgatgagggcaggcttcgcgaactgatcggcgggctcaagagccgcggccgggtgttgttcgtggtcgatcagcccgccacgatcggtgctctgcctctcgcggtggcgcaggccgaggatgtgatgatcgggtatctgccgggcctggcgatgcgtcgcatcgccgacctccatgccggtgaggcgaagaccgatgctcgggatgccgcgatcatcgccgaggccgcgaggtcgctgccgcatgcgttgcggtcgttggagctcgcggacgagcaggtcgcggaactgtcgatgctctgcggtttcgatgatgatctcgcgcagcagatcaccgcgaccagcaaccgtgttcgtgggcttctcactcagatccatcccgcactggagagggtgatcggaccgcggcttgatcacccggccgtgctggacctgctgcagcgttacccgtcgccggccagtctcaaagcagccggcgagaagcggatcggtgatcgcctggccaagctggcaccaaggatcgggagacggatcgcggccgagatcacccaggccctgaccgagcagactgtcgtcgtggtcggcacgaacgccgcgacattggtactgcccaaactggccaagcagctcgagggtttgcgccagcaacgggccgagatcgcggtcgaggtcgaacgcctcgtggaggcccaccctcttcatcccgtcctgacgagcatgcccggagtcggcgtcaggacagcagcacggctcctcacagaggtctccggcaaacacttcgccaccgccggtcatctcgcctcctacgccggcctcgcccccgtgacccgcaggtcagggtcctcgatccgcggcgaacacgcctcccggcgcgggaacaagatcctgaaacgggccctgttcctctcggcgttcgccgctctccgcgacccggtctcccgcgcctactacgaccgcaagatcgcccagggcaaacaacacaaccaggccctcatcgccctcgcccgccgccgctgcgacgttctccacgccatgctccgcgacggcaccctccaccaagccccaacccccatcgcagcttgaccagaaccatagggaca

SEQ ID NO: 1685 - DNA, 1482 bp, unidentified
  source 1..1482: mol_type = unassigned DNA; note = element_2371467
  misc_feature 1..2: note = core
  misc_feature 3..241: note = LE
  misc_feature 242..1462: note = CDS
  misc_feature 1463..1482: note = RE
  misc_feature 7..238: note = bridgeRNA
ctaatgagagttaccgggtcagccgctggcagactcggtgcccggtagccgtcggcaggtgagcactctcggagccaggacatgaagtcctattgacagatcgtgcccctgccggtggtcgggaggatggaccgctgatgggatgtcgtgcccgccgtcgtgtggcgtgagcacttgatcattaggttgcggaggttctcccgcgggctgctgatggtggctgtcgaggacgggagaacaggtgctgttcgtcggggacgactgggctgaggatcatcacgacgtcgaattgcaggacgtgcaggggcgagggctggccaaggcccggctggaggagggcattgctgggatcgcacggctgcacgagttgatcgggcggcagttggatgagaacgccgaggccgaccaggtcgtgatcgggatcgagaccgacaggggcccgtgggtgcaggcgctgatcgcggccggctaccgggtttatgcgatcaacccgctgcaggttgcccggttccgggagagtacgtcggtgtcgggggccaagagcgatcccgccgatgcccacaccatcgccgacatggtgcgcctgcagcatcaccagctacggccggttgccggggacaccgctgaggccgaggcgatcaaggtggtcgcccgggcgcacaagacgttgatctgggaacgtaaccgtcacatgctgcggctgcggcacgcgctgcgggagttctttccctctgccctggccgcgttcggtgatctggccggagctgatgctctcgaactgctggccaaggcgcccgacccggactcggcggcccggttgacgaccgcccagatcaccgcggcgctcaagcgggcccgtcgccaccatgtggccgacaaggcccagaagatccgggcggcgctgcgcgccgagcagctcggtcagccggccatcgtgacgtcggcctactcagccaccgtccgcgcccaagcggccatcctgaccacgctgaatgagcagatcaagagcatgcaggagcaggtggaagcacattttgggcggcacccggacgctgagatcatcgtgtctcagcccggtctgggcatgatcctcggtgcccgggtgcttgccgagttcggtgacgaccccgaccgctacgccagcgccaaagcccgcaagaactacgccgggaccagcccgatcacccgcgcctccggcaggaagcatgtcgtcacggccagatacgtccacaacgaccgcctcatcgacgcgctcggccgccaggcctacgccgcgatgatctgctcgcccggttcccgcgcctactacgaccagcagcgagcccgcggcctcggccaccacgccgccgtccgccagctcgccaaccggctggtcggcatcctgcacggctgcctcaggaccggcaccacgtacgacgaagcgaccgcatggtcacatcgcacggaacaagtcgctgcttgacaactttcgacttgggatgt

SEQ ID NO: 1686 - DNA, 1537 bp, unidentified
  source 1..1537: mol_type = unassigned DNA; note = element_2371d6d
  misc_feature 1..3: note = core
  misc_feature 4..457: note = LE
  misc_feature 458..1423: note = CDS
  misc_feature 1424..1537: note = RE
  misc_feature 8..224: note = bridgeRNA
tttcgtattattaggtcagccagaatattctggttggcctattttaataggcatcttacgatggtggtagccgggagaacgtggcggctttaggggcatagatcccgtgcaaaaaactgttctctcactgccctccaatgaccatgtttgagctggtagaggcattgacctcgcatcacaagcgaagctatgggtttggaagccatggtgggattgccggtgaatccgaataaaggagttgtatatgcagcctgttgtaggtgtggatgtagcgaaagggttcagcgtaatacaggcatttctaagacgtaatgaaccatttgggaggatggaaaacctccagcatgatgaggcaggctttgagcggttaggggagctgttagagagataaaaaaaagagagcgacgttgagcctgtcgttgttcttgaagcaacaggtcattatcatcgaggacttgtgggatatttaaaacgcagcggatggacacactttatcgtaaaccctttgcaatcgaaacgttccaaaggaacgcagctgcgtaaggtgaagagcgatgcagcagatgccaggcatttagctgaaatgtattacagaggagacgtaaagccgcaccgtgaatggaaagagtcccacagtgagcttcagcatttgacgaggcagcatgagtttgtaacagcgatgtatgtacaggcgaaactgaatagcagagctttgcttgagcaggtatttccgagttttatcggtctgtttcataacctgaatgcggtaacgtctttaagagtattgcagcgctgtttagataatcaaaccgaagatgtgggcgaactaatcagtgaatgtgtgggtaagtctcattcaaagcgctgggcagcagagaaaacagatcagttgagggaacgactgctaagttggaactcacactataaaagcccagcccagagtgtagcgctgagcagcatgatctcgttgctgttggagtttgacaaacagttaagtcaactggaaagggaaatggatgaattggccgacgcgttacctgaagtggaattggtcaagagcatcccaggcgtaggagacaagctggccgctgcgatcgtggcggaacttggagatgcgagccaatttagtgatgcgaagcagcttgtagcgtacgcaggactggatcctggaatctacagttcgggaaagtttgcagctacgagtaaccggatcacgaaacggggctccaagaggcttcggcgagcgctgtatctcgctgtacagtgtggaattcgaagaggtgttaaccagcgaataacggaatattatagccggaaaaggaaagagggcaagccttacaaggtggtcgtgatcgcctgcgccaacaagcttctccatcacgtctacgccatccttagtaaaggccagccctataagttgtaatatccatatttaaccataaccttcacgccaatgaaggttatttgtgctgcacaaaaaagtataacatcaaatttaaccacatccaagttgaaatgcttgacaaacattagctgg

SEQ ID NO: 1687 - DNA, 1352 bp, unidentified
  source 1..1352: mol_type = unassigned DNA; note = element_2382586
  misc_feature 1..2: note = core
  misc_feature 3..75: note = LE
  misc_feature 76..1101: note = CDS
  misc_feature 1102..1352: note = RE
  misc_feature 1077..1340: note = bridgeRNA
tgatggggtggacgccccccgacggcatctgggtgccaaggtggcggtgtcgaccgaccacaagaggaggcgtccgtgggacaggctagcacgatcgggctggatatcgcgaagcgggttttccaggcgcacggcgccgatgcggccgggcgcgtggtgtttcgcaagcggctgatgcgcgccaaggtgctcgagttcttcgcagggcaggcgccgtgtgtggtggcgctggaggcctgcggcggggcgcaccactgggcgcgggagatcggcaagctgggccacacggtgcggctgatcccgcccgcctgcgtcaaaccgtttgtgaagcggcagaagaacgatgtgtccgatgccgaggcgatctgcgaagcggcgcaacggccgggcatgcgcttcgtgcccgtgaagggcgaggcgcagcaggcgaacgcggtcgtgttccgtgcccgcgacctgctggtgcggcagcggacgcagtgcatcaacgccctgcgcgggcacctggccgagtacgggcatgtggtgccgcaaggtcccgcgcacgtcgacagtctggtggcgctggtcgaggacccggaggcgtccgtgcccgagagcgcgcgcgggatcttgcaggtgctgatcagggcgctcgaggcactggaagagcagctcaaggagctggacggtgagatcacccggcgtgccaaggccgaccccgtcgcgcgtcggctcatgacgatcccgggcatcggcccgaacgcggcgactgcgatcaccgctctcgtgcccgcgctggagggcttccgcgccgggcgggacttcgcggcctggctggggctgacgccgctgcagaagtcgaccggtggcaagcaaaggctcggggccatctcgaagatgggtgagcggaccatccggcggctgctgatcctcggtgccagcgccgtggtccggtgggccagtcagcgcggcgcggcggaggggtcgtggctggcgcggatgctctcgcgcaagccgaggatgctggtcaccgtcgccctggccaacaagacggcccgcatcgtctgggccctgctggtcaaaggcggcacgtacaaggctccggctgtggcggcgtaagcccgccgcggccaccgaggcgtagggcgagcggaaggagagcatggcgcaacattcggcgagacgggatcgggaaaaccagcctgcaacaccgtacctcgagtacgccgccttgatctggacccggtccgcgaactcccatgcaggccagcggctcttggccgcatcgaaggccggacagatggcagcatccgactacgcgtcacggcaatcctgatgttttcccttgccctgatgggggcgtccacaga

SEQ ID NO: 1688 - DNA, 1216 bp, unidentified
  source 1..1216: mol_type = unassigned DNA; note = element_238a0c1
  misc_feature 1: note = core
  misc_feature 2..213: note = LE
  misc_feature 214..1188: note = CDS
  misc_feature 1189..1216: note = RE
  misc_feature 35..202: note = bridgeRNA
tcttaagtttacaatctcttatatttattaattaatcagaaagaacaaaagagaggattaaggttataatacacgtagagactttagatctcgtcaacattgaaaatcccctctcttttctactcatatttcgtacagttctgtgagactctagatctcgattttaagtagttgaaacaaaagtagattgtcctttcgtaaactaattttcttatgaataaagatatgatttattttggaatagatatttcaaaagatgtattcgatgtaatggattcaaacggtaattattttcaatttgagaatgatttcaaaggctttaaaaaatttatagagttattgagtagcaagagtcattgtgtgatggaagctacaggttattatcattacaagctggcttattatcttttagaaaataacattagagtttcagtagaaaatcctttgtctgtaaaacgatttatccagatgcgattatcaaagattaaaaccgacaagagtgatgcaaaaatgatttgtttatatgctcaacatgtagatttaaagctttggaaaggtcaaactaaaaatcagattgaatgtttacaaatcactagactactgagtctttacttcaaacaaactaccgcaataaaaaataagatacacggagaagatgttttaggtaatccaagttcaatagttgttaggtctttaaaaagaagcctaaaatttaaacaaaaagagattaaattaatagagaaaaagctgactgaaattgtaaaacaagaccatcaagaattattaaccagaatagaaagtatacctggtttaggcagaaaaacatccattatgttaatagtactcacagacggatttgaacgtttcactagcgcatcagaactatgttcctattcaggattaacacccatcattagacagtctggatccagcgtaaagggtcgtcctcgaataagcaaaatgggaaacaaaaagttaagaaatttactgtttatgtgtagttttactgcttgtaaaaataacaaagcttgtaaggctctttatgataggattgtagccaaagggaaaagtaaaaaactagccttaattgcggtttgcaataaactattaaaacaagcttttgcaatcgctaaatcaggactaatttatgatgaaacttatagaagtactttaactaaaaatttatgaaatattagttgttttttaccacagttct

SEQ ID NO: 1689 - DNA, 1137 bp, unidentified
  source 1..1137: mol_type = unassigned DNA; note = element_238e6b3
  misc_feature 1..4: note = core
  misc_feature 5..185: note = LE
  misc_feature 186..1124: note = CDS
  misc_feature 1125..1137: note = RE
  misc_feature 26..191: note = bridgeRNA
cttgtgtggacgtaatatggtttactggagcattggccgggatgcgcatcccggccaatgcaggcaggaggccgtatttccggactggttgaaacagccgagatcaagcaaggccctgcctgctccctttgaccccgaacggttgctcgggctttcgcccgcaccacaagcctgggagcaaggccatgatacaggaacttctcttcgtcggcatcgatgtttccaaagcccgcttcgatatcgttgtgcatccttccggcaagtgctggagtataggcagttcacctgcacagatcgcggctctcattgagcgccttcaggcgcttggacaggtcatcgttgggctggaggcatctggcggttacgagcgcaggctggctgacagtctgcatgcggcaggcctgaaggtttatatcctgccgcccgcaagggttcgcaactttgccagggccatgggccagctggcaaagaccgataggatcgacgccgccgtgatcgcccgctatctggcgacggtacacaatagtctcacgccctatgagccagacgctgcccgcagcagcctcagcgctctggcggctcatagacgcaggctggtcgccgaaaagagcggcctgacgagccagctcgataccatcgaagagccgctggtgcgtgagatgctggaggtgcgtctgcgtaccatcgccactgatatcgccaccctcgaccgcgccatgcgcgacctgctgaaggcgacacccgccctgcgaaaacgtcacgacaggatgtgtgaggtcaccggtgtcggcccgatgctagccaccgcgctccttgccgatctgcccgaacttggcaccgtttcgtcaaaggtcatcgctgccctggtcggcgtcgcaccgcatgcgcgccaatccggatcctccaaccgccagggcaaatgctccggcggccgcaagcatctgcgcgacatcgcctacatggccgccctcagtgccatcaagataaaagacccggtcctcggcgctttctaccagcgcctgcgcagcaaaggaaaacccttcaagctggccatagtcgcaacaatccgaaaactcgtcacgatcctcaacgccatcgccagaacagaccccgcgtttaactgagcatccacggttg

SEQ ID NO: 1690 - DNA, 1447 bp, unidentified
  source 1..1447: mol_type = unassigned DNA; note = element_23a029f
  misc_feature 1: note = core
  misc_feature 2..221: note = LE
  misc_feature 222..1250: note = CDS
  misc_feature 1251..1447: note = RE
  misc_feature 13..230: note = bridgeRNA
ctgattgagactggtggtgcgttgcggcggttgtcgtagcgttcgggatgccggtcgacgggctcttactagggcctgtcgctttcgggttgacctcagtacgaattgtccgtcggctggtgttctgatcgaggtgtggctcgaaagaggcgcgagctcaacgaacacgaatcaggagtgcccacctcggtttccatcaccgagacaaggagacattccagatgaccatcacgattggcatcgatccgcacaaggcgtcgcacaccgccgtcgcgatcgacagcaccgagtgtgtgctcgacgagatccgtgttcgagcttgcactgcgcagaccgatcagttgcggtgctgggcggcgccgttcccggatcgggtgtgggcaatcgagtccgcccgcgggctcggctacctcctcgctcagcagctcgtcgcggccggcgagaccgtcgtcgacgtgccggcggtgttgtcgacacggacccgattgttgggatcaggtcgggcccagaagaacgacccgaacgacgcccgctcggttgcgatcacggcgttgcgcaatgacgcgctgagccgcgtccgcgtcgacaaccacgctcaagtgctgaagttgttggtgaagcggcatcgcgatctcggccgactcaggaacaaggcggcctgccggctgcacgtgctgctgatggagctgcaccccggcgggatggccaaggaaatgacggtgaccagggcaaatgacctcctcgaccgggcggcgatcgcagatgcgatgaccgagcatcgcgtcgcggtcggccgcgagttcgtggccgacatcgaccgctacgacgaacagatgaaggcatcacgcaaacgactccgcaccgcagtggcagcgtctggcaccaccctcaccgagatccgcggtgttggtgtcgtggtcgctgcgatgatcatcggtcacgtcggcaacatcgaacggttcaagtcggcggcacacttcgcgagctacaacggcaccgccccgatcgaagcgtcctcaggtgagcatcgccggcaccggctcaacaagcgcggcaaccggcaactcaactgggcgatccacgtcgtcgccatcacccagctccgccagccctgcccaggacgcgactactacgcccgcaaacgcgccgagggcaagaacaccaaagaagccatccgagccttgaagcgtcagctctccaacgtgatctaccgagcgctcgtcgccgacgcgcgtcgcgcctcgagctgattggtgggcccgggaggacactcaggcacgacacgaaatccagcgtgaccggctcaacatcctgaacggccggctcttcggataagtcactcccgaacccgaacacgatcctacgacgccacctctggccgcgccagaggcgcccttcgacgcgcccagaccgacaccaaaatcaggggttgacaacaaagaggctt

SEQ ID NO: 1691 - DNA, 1925 bp, unidentified
  source 1..1925: mol_type = unassigned DNA; note = element_23a6b14
  misc_feature 1..2: note = core
  misc_feature 3..266: note = LE
  misc_feature 267..1466: note = CDS
  misc_feature 1467..1925: note = RE
  misc_feature 33..286: note = bridgeRNA
ctgatacaatataattgaccgagaaagtgcggtatttggaatggcactttccaagttccgttacctaagctataatggaaaggtatttaaggtctgacgggtgcctccttgtgcttgcacgcacgtatttaagactgtcagccgactttccattatagcgttcggtttctgcaggttgggcttcgcgtccgtgtaacaaatcagattgaatcagtaatggctcttgtcggtcacctttttacaaatccaaatcagagaggtcacttatgaacgctgtcggcatcgatgtttccaaaggcaaatctaccgttgccatcctgcgccccggcggagaagttatcgtttccccgttcgaggtttctcacaatccaagggaacttaatgagctcgtcactctcattaaaaacttggatggtgatacaaagatcgttatggagtacacaggtaactactatcttcccgttgccctgtttctccaaaagtccgggttgtttgtttccgttgtcaaccccattctcgtaaaagactacagcaataaatctttaactgtccgcaaaggcaagacggataaaaaggattccataaagcttgccgcctttgccttagaccgttggaacgagctgccgcttttctcctctcaatccgacacgagaacattgctcaaatcctttaacaggcaatacaaccaatacaacaaactcaaagtcatgctcaaaaataatctcatctccattctcgaccagactttccccggagctaatactctgttcaatactcccgcaagaaaagcagacggacacgaaaaatggatcgattttgtcctaaaattcccgcattgcgagtgcatttcgagaaaaacatactccgttttttccaaatgttatctttcatggtgcagaaaatacggctatcgtttctccgacgcaaaagcgaaagaaatttactcgtttgcctgcaactgcgttccctccttagccgattcagaggctgctcatgcgcttgtttccgtcgcaattttacagctgaatactctcaatgaaacgcttgcctctctacagagagaaatggatcggttggcaagttcattgccagagtatgatactgtgatgagtttctttggcgttggatctgtcctcggctcgcagcttattgcagaaatcggcgatgtttcccgcttccccaataagaaagctctcgttggttttgcaggcattgacgctccgcctttccagtccggcaactttgatcccaagtcccgctccatctccaaacgcggttctgccgccttacgtaaaactttgttccaaatcatgtccgtcatccttcaaaatgctccggccgatgatcccgtctttctgtttatgaacaaaaaacgttccgagggaaaacatttcttcgtctacatgatcgccggcgccaataagttcctgcgcatctacttcgcccgcgtttccgcttccgtctgactgtcattttttgggattgttgcctttttttggaatgttagaatatttacacatcttttcacaaaggagtaaatattccatgcaatccatccgcaccatctcgttccgcatcattcaactcctgaatgaacgcaactggtctgcttacaaactctcctttgaatgcggcctcccgcattccaccctctccaatatcatcctcggcaaatgcagatcttgcaatttcgataccctcctcaacatttgcagaggcttccgcatccagccagaagaattcatccgttccgatctcttcctcctggaaaacctcgacgataacgattaactaattacctacatctcgtgtcagtttctctttttttgccgtcctttcgcaaacggcttttttccatgcacttttttacttctacaaaatcttatatttttttgcttattttcccttgacttttatttgcaggt

SEQ ID NO: 1692 - DNA, 1241 bp, unidentified
  source 1..1241: mol_type = unassigned DNA; note = element_23a8e03
  misc_feature 1..3: note = core
  misc_feature 4..213: note = LE
  misc_feature 214..1143: note = CDS
  misc_feature 1144..1241: note = RE
  misc_feature 15..196: note = bridgeRNA
gcttgtgtctggcgtcagggttagactggtggtgagagcggtgagtggcaagctgaatgccggcagtgcttaaagcacgtgtaggagctcatgctgccactcacccctccgccctggttattgagcccgaacagttgaacgagcccacctcgaacagttacaagcgtgggcccagccagagcgctctcaccttgagtgtaagaggatttggccatgcttacctgtgccggcatcgatgtttctaaagacgtcctgcagatcgaacttgatccacaagggatgggggcggttttccccaatgacatcaatgacttctcgaagatggttgattggctgaagtgccatcaagtcagtcgcgcattgctggaggcgaccggcggctacgagcgaagagccatgaaagcactccaggcggcaggtttcgaagtcctgcgggtcaacccttgccgagctaaaagcttttccaaggccatggggctgcatgccaaaactgatccgatagatgcgcgtcttctcgcgcagtttgcagcggttatccaatctcccgaaagccgaatcacaaatgccgagcaggacaacctgcgtgcattggtacaacagcgggaaaattttgttcagcagagagatgacgacaaacggcgactgaaaacgaccgtttctgagatcgtgaaacccgcgttgcagagccatatcgactatttacgcaaggccataaagtcgatagaaaaactgatgggacaaagtgctgaacagctggacggcgagaaagtggcccgtctgtgctcggtcaaaggcatagggctcgttacggcagccagcctaatgtcctacctccccgagttgggcgaggtgggcaggcacgagatcgccgcattagcaggtgtagccccctacaacgacgacagcggcaagcataaaggtaagcgtcacatcagcggtggacggtttgctgtgaggcgctcgttgtacatggccagctggatcgtcattcggtatcagccggaatttaatgcccgatacaaggcgttacgcgacaaaggcaaatgcgccaaagtggcactcatcgcctgcatgcgagtcttgctgatccgcttgaacgcgatgatccgtgacggttctgaatggaaagaacacatcgcctaatgtggctgcggttgtttccctaagaaactgcatggcctagagctgtgggagcttgaccgtcctttgaaatgattttcaaaaaaacggtcaagacagtt

SEQ ID NO: 1693 - DNA, 1303 bp, unidentified
  source 1..1303: mol_type = unassigned DNA; note = element_23ac6c3
  misc_feature 1..2: note = core
  misc_feature 3..191: note = LE
  misc_feature 192..1151: note = CDS
  misc_feature 1152..1303: note = RE
  misc_feature 28..201: note = bridgeRNA
cttgtgtccagaaaatttggcagaatgtgcgaacgggcggttggatcaaaaccgcccgttgctggagctgagcccgctgcgcccgaaggcgacagagcctgtaacagagcgagggacagctccggtgtcttcctcaacccgaacagttggaagggcttagagcccgtaccgagcaaggaagggagtggatgatggcacaaaatgatctcgttgtcgtcggcatcgatgtggccaaggatcaggtggatgcgtgcattcgttcgctgtcgctgcgacagacgtgtccgagcacagcgcaaggtcaccgcaaactgattgcctggcttcgcaagcacaaggtgaacaaggcggtcatggaggcgagtggcggctatgagcgtggttgggccagggtggtgcgcgaggccggaatcgaggtgcgggttgtcgatcccaagcgggtccgcagcttcgcgcgatcggccggacgcctggccaagaacgatacgatcgacgcggagatgatcgcctggttcgccgagacattcagcgaggcaccgagccagacacacgacgccgcgcatgaggagttactggcactggtgaaggcacggataggtctggttgatcttaagatgcgattgcagagccaaagcgaacatgctgcgccagtgccggctcagaaagcgcatgccggtgtcttgaagaccttggccgatgaaattgccaagcttgaggccgtaatctcggccaggatcaagagcgcgccacaccttgcggaacgtgccgagatcattgagagcgtgcctggcttcgcccaaacgacctcggcgaacctcgttgcaggaatgccggaactggggcaggtgagcaataagatcgccgcagcgttgttgggcgccgccccctacgacgacgacagtggaaagcgctacggcgagcgtcacatcaaggggggccgccgctgggtccgtaacgccatctacatgccctgtgtcggcgcagccactcaaaacaactcgatgctcaaggcctactatgaccggctgatagccaagggaaagaagccgaaagttgcgctcgtagcttgcatgcgcaagctcatcgtcatcctcaacaccctgatcgcacgacggcagaaatgggaccaaagccgctacgtgctgaactgagcgcatctgatcgcgctcggtctccgatcgagcgcttgcaaggccaacagaccggtgagcggacggggtcaaggccgtcagccgccgaaggcgggggcgcgccagcgtcagccttgagcccggcagatcaccggtctattccagcacagttg

SEQ ID NO: 1694 - DNA, 1481 bp, unidentified
  source 1..1481: mol_type = unassigned DNA; note = element_23ad36f
  misc_feature 1: note = core
  misc_feature 2..263: note = LE
  misc_feature 264..1466: note = CDS
  misc_feature 1467..1481: note = RE
  misc_feature 9..237: note = bridgeRNA
cgttatgttttctgcggtcctgcaagagggccgctggcctccgggcccggcatgtctgttgccccctgtcgaacggatgacctggggggtggtgtcaccgggcccgggaggcgccgttggagacgctgatgagaggtccgactaccgcctggcctggcgcaatgcccggccgcttgcgggcggcaggtctgcataacgtggatgcgcgcatacgacgccaacgccctggccagcaccacacgaaccccgctcgggaggatggattggacgacatcgacgacgtgggcgtcttcctcggcctggacgtcggcaagagcacccaccacgggcacgggctcaccccggccggcaagaaggtcttcgacaagcagctgcccaacagcgagccgaagctgcgggccctcttcgataagctggccacgaagttcggcaccgtgctggttatcgtggaccagcccgcctccatcggagctctgcccctgaccgtcgcccgggaggccggctgcaaggtcgcctacctgcccggcctgtccatgcggcggatcgccgacctctacccaggcgaggccaagaccgacgccaaggacgccgcagtgatcgcggacgccgcccggaccatgccgcacaccctgcgctcgcttcagctgaccgacgagatcaccgctgagctgaccgtcctggtcggcttcgaccaggacctggcagccgaggccacccgcacctccaaccgcatccggggcctgctcacccagttccaccccagcctggaacgcgtccttggcccacgcctggaccaccccgccgtgacctggatgctggaacgctacgggtccccagccagcttgcggaaggctggtcgccgcaggctcgtcgaagtgatccggcccaaggccccacgcctggccgcccgactgatcgacgaggtcttcgacgcgctcgacgaacagaccgtcgtcgtcccgggcacggaggcggcggcgctgatcgtccccagcctggcccagtccctgaccgccgtgcttgaccagcggcgcctgctggagaaacgactcgacgagctgctggaggcacaccctctttccgccgtcctgacgtcgatgcccggcatcggcgtcaggaccgcggcccgcctcctcatcgacgtcggggacggcaccaagttcccctccgctgcccacctcaccgcctatgcgggcctcgccccgacgacccgcagttcaggctcttcgatccgcggcgaacagccctctcacagaggaaacaaacagctcaagcgcgccttcttcctctccgcgttcgcagccctccacgaccccgactcccgcgcctactacgacatgaagatcaaggagggcaagcaccacactcaggccctgctcggcctcgcccgacgccgagccgacgtgctgttcgcgatgctccgcgacggcaccctctacgaacccagaaccccacgcctcgcttgacgaaagacatagagg

SEQ ID NO: 1695 - DNA, 1458 bp, unidentified
  source 1..1458: mol_type = unassigned DNA; note = element_23aefb4
  misc_feature 1: note = core
  misc_feature 2..221: note = LE
  misc_feature 222..1256: note = CDS
  misc_feature 1257..1458: note = RE
  misc_feature 12..224: note = bridgeRNA
ctgattgagtcgagggtgcgttgcggcggttgtcgtagcgtcgatggtgccggtcggttgactctctaagtgcctgccgcctgctgggttggctttgtatcgaactgccagccggccggtgtccatcggctggggtgtggctcgaaagaggcgcgatcagatcgactcgaatcaggagtgcccacctcggtccccatcaccgagagaaaggcgtttctgccatgtccatcaccatcgggatcgaccctcacaaggcatcgcacaccgcagtcgcggtcgacggtttcgagaccgtcatcgacgagatctgcatccattcctgcccaacccaagccgtcctgctacgcgactgggctgacggtttccgcgacgatcgaacgtgggcggtcgagtccgcacaagggctcggctacctcctcgcccagcaactcatcgcagccggcgaaaccgtcgtcgatgtgccggccgtgcgggcgtcgcgggtgcgcaccttgtccacgggccggtctcagaagaacgatcccaacgacgcccgatcggtcgcgatcgcagcactgcgagcgaacgatctggctgcggtgttacccgacgatcacacgcgcatcttgcggttgttgggcaagcgtcatcgtgacctcgggcgccagaagaacctcgagtgcaaccggctccacgccctgttgttggagatgttccccggcggcgccgacttcaagatgtcgtcgatgaccagggtcaacacgctcctcgaccggttcatcgcgaccgattcgatgggacgccagcgtctcgacctcgcccacgacctcgtcgactcgatcaacgcattgtcggcgcagatgaagacctcgaaacggcgcatcactgcagccgtgaaagcgtcaggaacatcgttgaccgacatcgtcggcctcggaccgatcaccgctgcgctgatcattggccacaccggcaacatcgaccggttcgccagccgacaccagtacgccagctacaacgccaccgccccgatcgaggcatcgtcgggcgacaaggtccgacaccggttgaaccctcgcggcaaccgacaactgaactgggcaatccaggtcatcgcgatcagccagctccgccacgacagcatcgggcgtcgctactacgaccgcaaacgcgacgaaggcaagacctccaaagaagcgctccgagcgctcaagcgccgcatctccgacagcgtctaccggcacctcaccaacgacgcccgccaactccgcggctgacgttcaagtgggcccgggaggacacccaggaacgactctgtctccagcgtgaccggcctcgcatcctgaacagccggctcttcggacaagccacttcccggacccgaccacgaccctacgaccagccccgaccgccaggcaacgggcctccaccaacgcgccccgacaccaccgaagagccccttgacaaccaaagaggctt

SEQ ID NO: 1696 - DNA, 1670 bp, unidentified
  source 1..1670: mol_type = unassigned DNA; note = element_23b8915
  misc_feature 1..5: note = core
  misc_feature 6..275: note = LE
  misc_feature 276..1532: note = CDS
  misc_feature 1533..1670: note = RE
  misc_feature 13..310: note = bridgeRNA
ttgctacaattgtgttggttctgagaagttcacagccagtgagctatacagatgcccaaacctaagctacaatgaagatgtgctgagagaacgaagcattgcttgagctgaacgctcgtacgcgcaaactgttctccgccatctccattgcagcgttcgattgacgcaggttgagttatcagcagataaaaatgttgctgtacattcgtgtcacaaagcaagctgaatcggtgatgggcatcaggcggaacaagcacaaaaaggaggccggaaaaatgaagtcaatggaaatcacagccgtaggtattgatgtttctaagagcaaaagcacagttgctattcgcaggccaggtggagtaattgttgcacgtccatttgacatatctcattctaaccatgatcttgagaaactggtctccatactgaaaacgacaggaggagatatccgcgttgtaatggaacacacaagcaactattggaagccaattgcattaacgctgaaggaagcaggcttttacgtttctgttgtaaatgccatgttgattcacgatttcagtgacaattccatccgaaaattgaaaacagaccgtgcggactccttgaaaatcgccaactatgcactgacgttttggaatgagctcccacccttcaatgatgaggacgaaaccagacttgtgttgagagagcagtcacgaatgtatgaaagattggcttcgacagcaacatcccttcgcaatggcctgattgcactggcagatcagacgttcccttcgattgaccaggcttttggacacgcaatcaagaatgcggatagtcatgaaaagtgggtcgatttcttttcaatttattggcacagagactgtgtactcagactttccattgaaaaattcacagaatcttaccgcaaatggtgtttgcggagaaattataaatttcgtacgaatacagcgcacaagttgtatgctctggcacaggatgccgttcctactctcccgaaaaacaacggaacaaaggctttagtattgcaggcttgcaagagcctgaatgctgtatgcgaggcgaaacagtctactcaagaagaaatgaaccgattggcttcgctgcttcctgaatatgaagttgtcatgcagatggagggcacaggacccattacaggccctgctctaatggctgagattggtgatgtcagacgtttcaaaaacaagaaagctctcgttgcctttgccggcattgatgccccaccgttccaatctggaaactttgaatccaagtcacgccacgtttccaagcgcggctcacctcatttgaggcgtgctgtattccttgtagcaaatattattctaaccttatcccacaaagataacagcgtcttttgctttatggacaaaaagcgcgctgaaggaaagcactactacgtctacacgattgctggcagtgcgaaatttctgcgaatctactacgcacgggtcactgaatatttgcgcacccaagagatacctgttgctgccagctgtctaaacggtaacagctaacgctattctttagtttgaaaattctgctgacaggctacacttgtcggcttattaaagttgccggatgctcactgcacccggcaacaattatttttgtttaaattttctgcttttacctcttgacacactttagcaggt

SEQ ID NO: 1697 - DNA, 1403 bp, unidentified
  source 1..1403: mol_type = unassigned DNA; note = element_23ba56a
  misc_feature 1..2: note = core
  misc_feature 3..78: note = LE
  misc_feature 79..1122: note = CDS
  misc_feature 1123..1403: note = RE
  misc_feature 1120..1390: note = bridgeRNA
tgatggggtggacggcccccgaacggcatcgctgtgccaagctgaggtcgttgcagatctcatgcgaggaggccgtccgtggatcagattagccgcatcggtatggatacgtccaagcacatcttccagctgcacggcgtgaacgcggctgaagagcccattttgcgccgaaaactccgtcgcaaggacatgatcgcgttctttgagcggctcaccccgacgcgcgtcgccattgaggcctgtggcgcttcacatcactgggcgcgccgactgcgcagttttgggcatgacgttcagcttatcgcgccgcagctcgtaaagccctacgtcaaacgcggcaagaatgacgccgccgacgcagaaggcctgtgcgaagccatgagccgaccgaccatgaggttcgttccggtcaaaaccgccgagcagcaggccgcgctcatgatgatcggcctacgggacaggctgatccgcaaccgcacgcagatcgtcaacgcgatccgcggctatgctgctgaatttggtatcacggcggctcaggggatcgcgcacgtcgcgccacttctcgtgcgtattcaggccgatcaagccctgccaaagctcgcgcgcgagctgtttgcgctgcaggccatcgagtacgaacaggtccaggcaaaaatcgttgccatcgatgtcaagctggccgcgtggcagcgtgccgacgcctgtagcacgcgcttggtgcggatccccggcatcgggccgatcggggccgcgatgctgatgttgaagacccctgcgcctgaggcgttccgatccggtcggcagttcgccgcgtggatcgggctgacccccaaggaccattcgacagccggcaaggtccggctcggcgtcatcacgcgggctggggacgaggctttgcgccgtgtcctcgttgctggagccacggccctcgtgcggcgcgtccgtgaaggtcgatgcggatgggggttggccctctggatcaaagagcttcttcagcgcaaggcgccgaagctggtcgcggtggcggtggccaacaagctggcccggatcgcctggaagatgatgaggacgggcgaagcctacgcgggagcgcgagctcctgctacgacgtgcgccgtgtagggatcggcagagcacggatcgccggaaattggcgaccgagccgagctgatgcggaagcttgcaggaggacggacaggtggcgtgatcgatcgatccgagacgtcagcgaacccgaatgtgacagtggccgatcaaggtcgcagcgttgattggggctgacgtcgcggagcccatcttggccagcgttcatgtgtgaacgcgtcaataggccggacatatgaacgcaagcgatccgatcatccaagctgacttcatcttgcgagctgggggccgtccacata

SEQ ID NO: 1698 - DNA, 1520 bp, unidentified
  source 1..1520: mol_type = unassigned DNA; note = element_23babaf
  misc_feature 1..2: note = core
  misc_feature 3..227: note = LE
  misc_feature 228..1499: note = CDS
  misc_feature 1500..1520: note = RE
  misc_feature 7..248: note = bridgeRNA
ctaataggggctaaccgggttcgatgctggtagagcaaactcggtggcaagccgccgctggcgggtgagcactgtgcggcgctggattggttgagtcctccgcgcagatcgtgcccctgttggtggtcgggagaccggatcgctagtggatgtcgtgcccaccccacggggtgtgagcactgtgtctattaggccgcgtaggtcttccgccggcggagaattgttgtgtgtctatagtggacgatggaggcgggaaggtgttgctgttcctcgggaatgactggtccgaagaccaccatgatgtcgaattgcaagacgctgcaggtacggtgctggcgcgggcgaagctggccgaggggatggccggcatgacgcggctgcacgccatgatcggtgagcacgtcggcgagcatgtaggtgatggccaggagcccaccgtgctggtgggcatcgaaaccgagcgtgggccgtgggtgcgggcgctggtcgcggccggctacctggtgtatgcggtcaatccgttgcaggtagcccgatatcgcgagcgtcgcggtgtgtccggcgccaagtccgatccggccgatgcgcatgtgctggccgatatgatccgcaccgatcatacgcagctgcggccgatcgctggggacagtgagctggccgaggcggtcaaggtcctgacccgaacacataagaccctcatttgggaacggtcgcggcacacgctgcggctgcggcaagccctgctggacttcttccccgccgcgatcgaggccttcgctgacctgaccgggccggacacgctgcagatgctggccgccgcgccggatccagccagcgcggccgcgttgaccattgagcagatcaccgccgcgctggccgtcgcgcagcgccgcaaccgcgccgtgaaggccacgcagatcgctgcggcgttgcaggccgctcatctggggcaaccggtccaggtagtggccgcgtacgcggcgaccgtgcgggcgcaggtggcgatcctgggtgtgctcaacacccagatcaaaacgttggacaagcaggtgcggacccattttcttaagcacccggacgcgcagatctatttgagccagcccggtctggggttcgtactcggcgcccgggtgctggccgagttcggcgacgacccttggcgctacgccaatgccaaggcgcgcaagaactatgccggtaccagcccgatcacccgccagtccggcaaacgcaaagccgtcatcgcccgctgggtccacaacaaccggctcatcgacgcccttgggcagcaagcgttctgctcgctgtgcgactcgccaggcgcccgcgcctactacgaccggctgcgcgcccgcggcgccggccaccgcgccgcgctacgccagctgggcaaccgcctggtcggcatcctgcacggctgcctgaaaaccggcaccatctacgacgaaacaactgcctggtcacaccggccagaaacaaatcttgccaccgtagcttgacaacttaacgccgtgggatgt

SEQ ID NO: 1699 - DNA, 1540 bp, unidentified
  source 1..1540: mol_type = unassigned DNA; note = element_23cd9f7
  misc_feature 1..2: note = core
  misc_feature 3..159: note = LE
  misc_feature 160..1419: note = CDS
  misc_feature 1420..1540: note = RE
ctcgtattatagagtcataccccttctttaccttttctacagattagggtatgctgttaaagatgctgtggattggttctgctctcctaccgcatagacggtttttgaaaggctccaaccacagcctctttgtctcaatgttaatcagttagataccgcatgacggtttatgtagaacgaggttacatccggcagagagccctgtggatcaacaacagcatcagtacactctatggaggattttttatgatctacgttggtatcgatgttgccaaggacaagcatgattgctgcatcctcggctcgaatggagatgttttattcccaccgttcacctttccgaactccttgcaaggattcgacctgctctatgagaggatcgggtctttgacctccgacctgtccaaaataaaagtaggtcttgaggctaccgggcattatcatctcaatcttctgcgctcgctccttgataacggcctggccagctatgttatcaacccgctacatacaaatcttttcagaaaaggtctaagccttagaaagacgaaaacggataaagtcgacgcttcttcgatcgctatgatgctgttaaccgataggacactcaagccctacacggacacatcataccacaacgaagaactaaagtcattaaccagatatcgttttgataaggttcgtgaacgatctaaactaaaggcgtctgtctccagacttgtcagtatcctgtttccggaactggaaaccctcgtcccaacgattcatttggtttccgtttatgctttgctgtcagagtttcccggggcttcgttcgttgcctccgcccatctgacgcgtcttactcatctcctcaaagagtcttcaaaaggacgctacggacgggaaacggccatctcctttcgtgccgcagcggtttcctcaatcggttccgtctttccggctaaatccctggaacttaaacacaccatccatctcattgaagttcttaccgaggagattgatgagattgaagctgccattaatgacatcatggatacgttgaattctccaatcacaacgattcccggcatcaagaaccggatgggtgccataatccttgcagagattggtgacttctccaaatttgaaaatgcggaccaaatcttagcgtatgccggattatctccctcaacctatcagtccggtcagatgacatcctcccatgcccggatggagaagcggggctcccgctacttgcgatacgctttattcaacgcaacgcagtatgtctgtatttgggaccctgctttcaaagcttatctcgccaagaaacgggcagaagggaagcattatttcgttgccacctcccacgcctgtaagaaactcgttcggttgatttatcggatgcagttaaccggcgaagcttaccgaatcgcctagcatgaactctggccttttcttatcgagcacccacaaggatgctctgttcgtcatgcagttttcaaggtgctgatttaatgaagtataaacttcattttagacttgacttttaatagttagt

SEQ ID NO: 1700 - DNA, 1571 bp, unidentified
  source 1..1571: mol_type = unassigned DNA; note = element_23ce3fb
  misc_feature 1..3: note = core
  misc_feature 4..248: note = LE
  misc_feature 249..1418: note = CDS
  misc_feature 1419..1571: note = RE
  misc_feature 10..233: note = bridgeRNA
tcttgtatgatacaaatgtaccttgtcgtaacatttatatcacttttcctttctaacctttacaatgtagatagaaccttcatactcttatttttatttgtggtttatctacttaatggagagtgaatctgtaggatcttatctcatctgtttatggctggataggttctgatatcttcatgtcacgcaagtttacactggtaagaccgctacagaaatgacaaggtttctagaaaggcggtctttttatgacgaaactgttttgcggcatcgacgttgccaaattcgaacacgtcgcaagtatctatgatccttcctctggtgaaataatacttgattcacttcactttgataataatgacaaaggttttcaatcattactatcccatttatccaaattgaataaagataatgaactattcgttgcttttgaatcaacctctcattatcatcaagctctattcaattatctaactgccaggaaatataagtgttatttgatcaacccttatatgaccagcaagttcagatccatttctttgcgagacgtcaaaaccgatgatatcgattctaagtcaatcgctcaattcttatcgtttgattattgtaacctggtgaacgaagagttcctgatcaacgagctcaaagacctggctgtccaaagacattctctgatgaccgattcttccagaatgaagatcaagttgaaatcttaccttgatcgagtctttccggaattggaatccctggtcgatatcgatgtattggctgtgagagcgattctaaaaaaatatccaacagccagatcgatttcttctgtaaggatagacaggcttaagaacctggctagagaagcttctaaaggaaaatattctccatccaaagttgaatccatcaaagaagccgcaaaggcttccattgggatccattctccaagcatagccctaaacattgtccagtgtatcgagactctagaactaaaagaaaggcagatagatacagtcgataaagagattaagaaacaccccactgtacttaattctcctttacatcagttgactgggatcaacgatatcgaaatcgcttatatcatgtctgccattatcagtataactcgtttcagctccccaggaaagcttgtggcctttgcaggcctggacccaaaaatcagacaatccggtacatggaaagccagtacagcacgaatgtcgaaaagaggaaacaaactattaagatatgccttgatatggacggcgtacaatatgacccgtaaatccggtcctatgaaagactactatgattcgaagaaatcacagggcaagtctcattacaacgcattggggcactgtgcatccaagttatgcagatatattttctggatattaaaccatccagacaaagagtttaaataccaataatctcaaacgataatttcaaagatcaaaaaattcattaattttatacgctttggttatttaaatactgtaaataacctggttttcatatacccaaaattaatcttcttaaattttttaattttactaacttttacttgacatattcatagctgg

SEQ ID NO: 1701 - DNA, 1415 bp, unidentified
  source 1..1415: mol_type = unassigned DNA; note = element_23cfad1
  misc_feature 1: note = core
  misc_feature 2..91: note = LE
  misc_feature 92..1123: note = CDS
  misc_feature 1124..1415: note = RE
  misc_feature 1184..1410: note = bridgeRNA
caatgggatggactcctcctcacctaagcggcatcgatgtgccagactggaaatgtcattaaccagtcgatagagcgagaaggagtccaagatgaagattatccgcgttggagtagatttggccaagaacgtgtttcaagtgcatggggtggattgcaacgagaagccggtgtggcggcggaagctcaatcgggcggaatggctgagggtattgctggagaagatcgagcctgactgcgagatcggaatggaagcctgtgggggtgcgcaccattgggcgcgccagctgcaggccaaaggctttacggtaaggctgatggctccacggtttgtgaagccctatgtgaagagcaacaagaacgacgccaacgatgcagaagcgatttgtgaggcgatgagccggccgcacatgcggtttgtgccggtgaagacagtcgaacagcaggatattcaggccctgcatcgggtgcgcgccgccctgatggatcagcgcaaggccaaggccaatcaggtgcggggtctggcagcggaatatggcatcgtcgctcctaaagaatggttgcacttgcgccaagctatcccctgctggctggaagatgcggagaacggcttgagcagccggtttcgcaggcttcttgccggcttgtggcaggatctgcagcagctgaatgatcgggtgacagagctggatcaggaggtggcactgattgcggcatccgatccgatggccaagcgtctgcagcaactgcgcggcgtggggccgatgattgccacggctttgctggcgagtgtcggcgatgcccatccgtttgccaacggccggcagatggcggcgtccctcggcctgacgccgaagcaagtgagctcaggaggcaaagaccgcctgttaggcatcagcaagcgcggcgatgcctatgtacgatcgttattggttcacggcgcccgcgccatgattcgaaccgccaagaccaaggatgaccggttaagccagtggggcacccgcattgcgacacgccgccacccgaacattgcggcagtggccatggccaacaagaccgcacgcatcgcctgggcgatgatgacaagcggcaaggattaccagccagagctggcggcaggctgagccaaagagcaaatcatctgtagcagggaaacgtaaccctagttagaggagtgcttccatcgcgattgcgtagcaagccatttgatggcaaaccggtcgaaccggcgttggtaaaacccgcaattgtccgaggcctcagagcccgtcaaagcaatggggaaccgacgcgcgaatagcccatcatggcccatgcatcagtgaattgatgctccagttagaggccggatatacgtgagcagtcgtaccgaacgcctaaaaacggagtgcttgcaaacgaggaggagtccatata

SEQ ID NO: 1702 - DNA, 1383 bp, unidentified
  source 1..1383: mol_type = unassigned DNA; note = element_23d6b5f
  misc_feature 1: note = core
  misc_feature 2..84: note = LE
  misc_feature 85..1110: note = CDS
  misc_feature 1111..1383: note = RE
  misc_feature 1154..1375: note = bridgeRNA
caatggaatggacgcccccacctttcggcatcgatgtgccagagtggaagtgcgatcaaccactcacagacgagggcgtccaccatgaagattacgacagtcgggattgatttggcgaaaagcgttttccaagtgcacggcgttgatgagcacggcaagaccgttatgaggaaacagctcaagcgcgctcaatttgctctgttcttctcgaatctgccgccctgcctgatcggcatggaagcctgcggcagcgcccatcattgggcgcgcaagctgcaatcattcggccacaccgtgaagctgatcgccccgcagtttgttaagccctacgtgaagagcaacaaacacgatgtcgctgatgctgaagccatctgcgaggcggtgggccgacccaacatgcgcttcgtcgcggtcaagaacgtggagcaacaagccgtgctatcgctgcatcgggcgcgccagggatttgtcaaagcccgcaccgctcaggccaaccagatccgcagtctgctggctgaattcggttgggtaattccgaaggggattacccacatccccaagcaggtgccgctgatcctgacagaggctgacaacgaactgcccggcctattccgccaactcatcgacggattgctcaatcattttcgcgaactgcattgccagatcgtggagctggaagcgaagattaaagcttggcaccgagacagtccggccagtcgcaagctggccgagatgcccggcatcggtccactgggtgccaccgcgctggtggccagcatcggtgacgccaaagccttcaagatcggacggcagctggcggcttggctgggtctggtgccacgacagcattccaccggtggcaagcagaatcttctgggcatcagcaaacgcggcgacgtctacctgcgaacactgctgattcacggggctcgctcggccatcttggcggcccagcggcgtggcgacaacaccagttggctggccaagttgttggagcggcgacacgccaatgtggccgcggcggctctggccaacaagaatgctcgagtcgtgtgggcgctgctggctcatgacagggagtaccagcctggatacgccgaagcggcgtaacgagcccccaccttttagatattaaacagcaagagaccgattcactgattgctcaggcactcacgcagtgatggcaagacaggtaagaccgtggttggaaaagcccagaatgaccgcagcaccttcgagtgcgaaaaagcgatcggggacccaaccagcgcattccatcagggacagcggcaatgccgcatctaaagtccggatgtacgactgcaatctacgccttcaagtcgtcacaaactgggtgcttggcaaaccgggggcgtccatgta

SEQ ID NO: 1703 - DNA, 1393 bp, unidentified
  source 1..1393: mol_type = unassigned DNA; note = element_23dfcb2
  misc_feature 1..3: note = core
  misc_feature 4..87: note = LE
  misc_feature 88..1116: note = CDS
  misc_feature 1117..1393: note = RE
  misc_feature 1087..1380: note = bridgeRNA
agatgggatggttgccgccctccccagacggcatcgcgatgtgccaaggtcgtggtgttcaacgccacgaaaaggagaggacggcaaatgaaggatacaatgatcggtgtggacctggcaaagagcgtcttccagcttcacggcgccagcttggccgggcacttgaagtttcgcaagaaggtgacgcgggtccaattgcggcatttcatggcgaagcacgaacctgccgtcgtggtgatggaggcgtgtggcagcgcgagctactgggcgcgagaaatggttaagctgggccatgaggtccggttgatcgcgccgcaatatgtccgacctttcgtgaaacgacagaaaaacgatgctgctgacgccgaggcgatcgtcgtcgcggcacagcgccccgagatgcgttttgtcgagccgaagtcggaggatcagcaagcctgcgcggtgcttttccgcgctcgtgagcggcttctccatcagcgcaccgaacgcgtgaacgccctgcgttcggtgctctatgaatatggtcatgtctttccgaaaggtatcgcccacctcaggcggatcgaagctgtcctcaccgatcctgccagcgacttgcccgctctggtgcgggatgagtgccatgatctgcttgaacagatatccgagcagacggcccggatcgaagccaagacagcaaagacccggggtcttgccgggacaaatgatacagcgcggcggctgcagacgatgcccggcgtggggccgcagaccgcgttggccatcagcggcttcgctccacccatggacagcttcaagcgggggcgcgattttgcggcctggctcggccttgtgccgcgccaatacagctctggcgggaaggaacgccttgggcgcatctcgaaagctggccagactgacatccgatatctgctgatcatcggggccatgtcgcgcctgacagtgttggcccgaaagtcgatccaggaggggtcatggctggcacgcatgctgcaccgcaagcccctcatgctggtcgccatcgcattggccaacaaaatggcacgggccatctgggcaatgatgacaaaaaaggaggactatcgagatccggcgcgagctgtttctacatgagggctgaagaccccatgtgaactggcgtcggtgaaggaggtgtgagaagtcgatgacctgaatgggcgcaatgatcgaaaagatctggaccgggaaaaccagacgtcgttctcgagcagaaaagctcttgcagaagatatggacccgatccgcagatcaccatcccggccagcggcttcttgaacggccgcactcgaaaaggcctgagagaagaacgcattcgatcaccaaccacgacaggtcaaaagcgacttgcaccaagggcggcaaccagaga

SEQ ID NO: 1704 - DNA, 1508 bp, unidentified
  source 1..1508: mol_type = unassigned DNA; note = element_23e3f87
  misc_feature 1..4: note = core
  misc_feature 5..352: note = LE
  misc_feature 353..1483: note = CDS
  misc_feature 1484..1508: note = RE
ctcactggtgcaccatcctcaggtcggtggttccagatggactgctgatgcacccctggtccccaccgggccatcgccaacggcgctcgaccttcgaggtccagcatgagttctccgaggtccggtggcccaggacacccagactggctacagggctgtgcgccatcgagcgccgatcagtgagcgaccggctgcggggtcccgggaccaccgggtgttctctcactgctccaacagcgaggaaacaactatgagtgtcacccctgaaggcatcccggcgcgagtgtgcgcgggcgtggactgggcttaggacgaccacgcggtctgcatcatcgaccccgagggcgaggtcgtgggccggttcgccgtcacccacaccgcggccgggctggggaccctggtccgacgcctgctcgccgcgggcgtggccgaggtcggtatcgaacgcggcgacgggtcggtggtcgaggcactgctgcaagccgagctgaccgtgctggtgatcagcccgaaccaggtcaagaacctgcgcagccgctacgggtcggccggcaacaaggacgaccggttcgacgcctacctgctggccgacgtggtccgcaccgaccggcgccggctgaccccgctgacccgctccgcacccgcgaccgtcacgctgcgctcgagcgtgccggcccgccgtgacctggtcgagcaccgggtcgccgcagccaaccagctgcgcgcccacctgcaggtcgtattccccgccgcggagggcttgttcgccgcgctcgactccgcagtcagcctgtccttcctggaacgcttccccacccaggccaaggccgactggctctccccgaaacgcctggccgactgggtgagcaaggtctcctactccggacgcgtcgcccctgaggtactgcaccaccggctcctggccgcaccccgcggcaccaccggcgctgacgcccaggcccacgccgccaccacgctcgcgttcgtcgctgtactgcgtaccctgggcacccagatcgaccagctcgaagacaacatcgccggccaactcgacatccaccctgaccggcacatcatgacctccctgcctcgctcggggatgctgcgcgccgcccgcctgctcgccgagatcggcgacgcccgcggccggttccccaccccggactccctggccggagtcgcaccctcgacccgccagtccggcaaggtcaaagcggtcaccttccgctggcccgccgaccaccaactgcgcgacgcgctctgtgacttcgccggcgactcccgacacgccaacccctgggccgccgacctctacaaccgcgccagagctcgaggccacgaccacccccacgccgtccgcatcctcggccgagcctgggccaacatcatctggcgctgctggcaagaccacaccagctaccaacccgaccagcaccgcgccctccaacgagtcctcaaccgggccaccgaacaggccgcctgaaacgtcgacggttgacacagggcaa

SEQ ID NO: 1705 - DNA, 1618 bp, unidentified
  source 1..1618: mol_type = unassigned DNA; note = element_23e6ff1
  misc_feature 1..2: note = core
  misc_feature 3..282: note = LE
  misc_feature 283..1455: note = CDS
  misc_feature 1456..1618: note = RE
  misc_feature 34..264: note = bridgeRNA
ctggtatatctttattgacccatccaagtggtctgatggatataccttttcctttctatccgaccggtatccgtcggagtaaaacctttgttagaatcgaaatcgtgaatgtgtacttgagtcctttccctgaagcctgacttcatagctaagaaacttgccgcttctgaatatcctgaattgagatcagttggatgggccatcagctcttataaattgccaggatccacgcggatacctgtaagcggattgcatattcaccttatagaaacggaggtttttatgttttacttcatcggcatcgatattgccaagttcaaacacaccgcctgcgtccttgatcagaatggggagtcttgtgttgaaccttttgatttctctaacgatttgatcggatacaacatactctgggaagtcatcaagccttatgtcgggaaagaacatcgtgtcggtatggaagacaccggtcactacgctgacaatctgcggatgtttcttctggacaaaggttgcacagtctgtatgatcaatcccctgacatcaacacatctgcgcaaagcagaaggtcttgccaagaatgatcgactggacagtactgtcattgccggaatactgatgaacccaagactcttccgttcagtcactaaggaaaattttaactacttgacgctacggcagtatacgcgcctgcatcacaaacgcacggaagagatgagccgctataaagttcagctacagaaggacattgatcacgtctttcccgaatacaacagtatctttccgaccgcttactccaagacttatatagccgttctgaaagagtttcagagtgctgcgacaattgcccatacagacatccgccgccttcgctctgtaatgaatcctaagagcagaggaaagatgatttcattgtctgccgaagatctgaaagcagctgcgcagaagtctgtcggaagacccgatgttgccattgaaatggagatcgtgcacctgatttccttcattgaactgatcgagagttctttggcggaagtggataaaaaaatagaagaattcagcaaaactctgaactctcctatcctagccatttccgggatctctgacttctcggcaatgtctatcatttccgaacttggggacatctccaggttccgcaatgagaagtgtgtcatcaagttcgccggcgtaaaccctacggtttatgaatccggtacgtatagtatgacacacacacgtctcgaaaagaaaggttcaaaatatcttcgaaggacgctctatcagatcatcgactctgtgattcgatgtaacacggttttcaaagcattctacgataagaagatcagtcagggtaaatcgtaccgatgtgctcaaggtcattgcgtacgtaagctattacgcgtgttatataagattctgtcaacgaactgcaggtttgatccggcacttcttcgctgatccaatatctccgtaatcgtttcaaccgttaaccaagctatccgggatagttgttttcagtgtacaaacattcatgatttcaaagaacttattgacaactattacaccaagggaatattttcaaactatttcatcatttacccttgacttactacatagttgt

SEQ ID NO: 1706 - DNA, 1382 bp, unidentified
  source 1..1382: mol_type = unassigned DNA; note = element_23efca8
  misc_feature 1..2: note = core
  misc_feature 3..86: note = LE
  misc_feature 87..839: note = CDS
  misc_feature 840..1382: note = RE
  misc_feature 1089..1368: note = bridgeRNA
agatggggtggttgccgccctcccccaacggcatcgcagtatgccaaagtgatgtggtctaagccacaaaagagagaggtcggcagatgaacgatatgatcggggtggatctggcaaagaatgttttccagctgcacggggcgtcgatgacaggcgatgtgaagtaccgcaagaaactgtctcgcgtgcagtttttccgttttatgtcagagcaatcaccggcacttgttgttatggaggcctgcggcagcgcccattactgggcgcgtgagttggtgaagctgggccacgcagtcaagctaattgcgccgcagtacgtgcgcccgttcgtgaagcggcagaaaaacgacgcagtcgatgctgaggcaatcgtcatcgctgctcgtcaacctgaaatgcgctttgtcgagccaaagaccgctgatcagcaagctcgggcggttttgttccgggcgcgcgagcgcattgttcgtcagcggacggaattagtgaacgctctgcgcgccgttctctacgaatatggacaggtggttccgcagggaattggtcacatcaagcgcattgaggagatcctcgagaatactgagatcgacgtgcccgagatggtgcaagaggaatgccgcgaccttctggctcagattagcgagaagacggcccggatcgaagcaaaggccaggaagctcgcggagctgtctcggcgaagtggagccgcgcgccggcttcagaccatgccgggtgtggggccgttaaccgctttggccgtcgaagcttttgcgccggcgatgcagagcttccgatgcggtcgtgactttgccgcttggctcggcctcgttccttgacaattctcttctggcggaaaagaaaggcttggccgggtgtcaaaggcaggtcaggccgacatccgcaggctcctgatcatcggggcaatggcgcgcctgagttgggcgggtcgaaaaccacccgtacaaggctcatggctttcgcggatgctcgcgaagaagccgcgcatgctggtggcgatcgcactggcgaacaaggtggctcgaacaatatgggccatgctgacgaagcaggaagattatcgagacccagctctggcaatggcggcgtgaaaggaaactgccggggatagccgggactcgaaagaggtgtgagaagtcgacgacctgaatgggcgcatgatcgaaccgatcgggaacgggaaaaccagtttggcactttgagcctgaagctcgcggttaagatttggacccgctccgcagatcaccataccggccggcggcctttgcaagcgccgcaacgaaaggcctgacagaagaccgcactcgatcacacgtcaaagaaggtcagaaacttcttgccaaacgggcggcaaccacaga

SEQ ID NO: 1707 - DNA, 1387 bp, unidentified
  source 1..1387: mol_type = unassigned DNA; note = element_23f4a91
  misc_feature 1..2: note = core
  misc_feature 3..88: note = LE
  misc_feature 89..1117: note = CDS
  misc_feature 1118..1387: note = RE
  misc_feature 1088..1374: note = bridgeRNA
agatggagtggttgccgccctccccagacggcatcgcaatgtgccaaggtagtggtgttcaaggccacacaaaagagaggacggcgagatgaaggatatgatgatcggggttgatctggcaaagaatgtttttcaggcccacggcgcgctgctgacgggggaggttcagttccgcaagaagcttacgcgacagcatttcaccgcgttcatggcccagcaggctccctgcctggtcattttcgaagcctgtggtggggctcactactgggcgcgtgagatggaagcgcttggccacgaggtgaagctgattgcgccacagtacgttcgcccgttcgtcaagcgccagaaaaatgatgctgccgacgctgaggcgatcgtgatcgcggcccgccagccagagatgcgcttcgtggagcctaagtcggttgagcagcagtcttgcgcggcggtgttccgcggccgggagcggctggtccatcagcgcaccgcggatgtaaacgccttgcgggccctgctgtacgagcatggccacgtgtttcccgtcggaatgcgttacctcgatcgcattacagcgcttgtggacgaagagacctccggcttgcccgcgctgatccgggaggagtgccaggacctgctggcgcagattgcagagaaaacggcgcgtgtcaccgagcgcacagcgaaactcaaggcgctggcctcccagtcggaccgggcgcgtcggctgcagaccatgccgggtgttggaccgatgactgccgtcgcggtggaagcgttcggacctgatatggcgcagttcaagacagggcgcgactatgcagcttggttggggcttgtgcccaggcagcattcctctggaggcaaggagcgcttggggcggatgaccaaggccggccaggccgacatccgacgcctgctgatcattggtgcaatgtcgcgattgggttggcttgggcggcgcacaattgcagagggcagctggctgtcacgcatgttggcgcgcaaacccaagatgttggccgcgatcgcgctggccaacaagatggcccggcagatgtgggcgatgctgacgaagaacgaggactacagggatccggcgctggcagtcgcggcatgatgcgcatgtcgaaccgctagcaacggtgccaagggggtgtgagaagacgacgacctgaatgggcgaaatgatcgaacagatccggattaggaaaaccagtagcaggctacgagccaacagctcgcgtccgagatttggacccgatccgctgatcaccatcccggcccgcggcttctggaaatgccgcatcaagaggcctcacagaagaccgcactcgatcacgcgcctataggatcaaaaacttcttgcaccacgggcggcaaccacaga

SEQ ID NO: 1708 - DNA, 1282 bp, unidentified
  source 1..1282: mol_type = unassigned DNA; note = element_23f87d7
  misc_feature 1..3: note = core
  misc_feature 4..215: note = LE
  misc_feature 216..1166: note = CDS
  misc_feature 1167..1282: note = RE
  misc_feature 1..176: note = bridgeRNA
gcttgtgtcttcaggacctcttaaaatcaaggtgtgagagcggtggatggcagactggatgccggcggtgccctagagcacgagtgggagcatagtcgccatccacctctcactctgacccgaagcccgaacagttgaatgagcctgcaactcggaatcacaagcccgggataggtcagagcgctctcactttcgaagtgtaagagggtctgaccatgatttcctgcttcgttggtatcgatgtttccaaagccaccctggacgtggctttctggcctgaacgctccaagccgtttcagctcaagaatgatcctgaaggcattgctcaaatgctggtatgcctgaatgagattgaacctgagcgggtcgtactggaggccacgggtggctacgagaacgccgtattcaaagcgttgcgcgtagctggattgaacgccacccgcgtgaatcccaagcgttcacgtgcctacgcggatgccgtcgggcaaatagccaagacggacagaatcgatgcccagatactggcgaagtttgctcagcacctcgaaaccaagacgctggttgaacccaaccaggcgcgcgatgaactggcagaactggtcaagctcagggaccagatcatagggcatcgggacgatgatcggcgccgcgccaaacaagctacttcggcgatagcgcttgcctttttcgccagtcacatcgcctctctggaggctgaactgaagtcactgaacaagcacattgatatcgccacgaaggcactggaccgcaacaaggtcgagcgcttgcaggcaataaagggtatcgggcgggtcacgactgccaagctgttggcctacttgcctgagctgggcctgttgacggggcgtgagatcacagccttggtgggactggcgccgtacaacaatgacagcggcagcaagagtagccccaggcacattgaaggtgggcgctacaaggtacgtggagccttgtacatggctgcctgggtaatgatcaggcataccgctgacttcaaggctcgctacaacgccctgatagctcgcggcaaatgctccaagaaggctgtagtcgcgtgcatgcgtgtgttgctggtacgtctgaatgccatgatgcgagatggtgtgtcgtggaaggaacatcaacaccaggcgcccgctgcctgaaaaagcaccaggactgaaatattgagcggggctttcgccagcagcactggaaagctgtgttgctggcgaagctatgtctggaggaatcgtttttaaaaaagtcctcgaagacagtt

SEQ ID NO: 1709 - DNA, 1477 bp, unidentified
  source 1..1477: mol_type = unassigned DNA; note = element_24004a8
  misc_feature 1..2: note = core
  misc_feature 3..112: note = LE
  misc_feature 113..1207: note = CDS
  misc_feature 1208..1477: note = RE
  misc_feature 1212..1406: note = bridgeRNA
agacggtatggggcggtgttgatgccgccggtgtgtggagtaggtgtcgacgctcccgtgcttcgtatggcgcgggctggttaccgcatcgaagggggaagggagtgtcgacgtgtcggacggtatctgtttcgcggggctggatgtccatgcccggaagaccgcggcggccgcgatccagctgggatcgggtgaggtctggaaggcgcagctggccggttcgccgagcgcggcgatcgagtggttgcagacgttgcccgggccggtgcgggcggtctatgaagccgggccgaccgggttcgggttggcccgggccgcgcgggcggcgggtcttgaggtcatggtctgcgcccgcggggcgatcccgcgccagcccggtgcccggatcaagaccgacgtgcgcgacgcgctgaagctcgcgcgtctgcatgcggccgggcagctgcgggcggtcaccgttcccagtgtgccgctcgaggcgctgcgcgacctcgttcgcgcgcgcgaggacctgcgcggcgatctgatggccgcgcgtcaccggatcggcaagctgttgctgcgccgcggcctgatctacgacggaccgggccatccctgggagtctccccgtcacgccgcgtggctgagcgcgatcgacgtcggcgatccgctggcccgggtcgtcctcggcgaatacctggcctgccacgacgggctgctcgcgcgccgcgcccggctcgacgcgctgatcggcgagctggccgacgatccgcgttgggcggcgttggtcggccggctgcgctgcatgcgcggcgtcgacaccctgaccgcggtcgggctgatcgccgagatcggcgacttcgccgcgttcgcgcacgccaagcagctggccagcttcctcggcctcgttccgaccgagagctcaagcggtgagaagcgcaagcagggctcgatcaccaaagccggatcaagccacgcgcggcgactgctgatcgaggcggcctggcactatcgccggcgtccggccgtgtcgctgacgctgcgccgccgccaggacggccaaccgcccgccgcgatcgaggccgcgtggcgcgcacagctgcggctgtccgcgcgctgggcgcacctggacgcccgccgcgccaagcgccgcaccaccgtcgcggtcgccgtcgctcgcgagctggcctgcttcgtgtgggagatcgcccgacagccagactgacccgcccgttcgaggcgccggtgacggccggcgcgcgccccacgggacccgcgatcgcgttatgagcaccgaccacggccggcgcgctcgattctagaacgcggccccggcgcagcgaacagccgtctctgaggtatccagccctcgcatatcagcccgaagcgccctcgccgctccggccgtcacccgcgccccgaaccacacaccccccgccacacacgccaaccggcccgctcaccactgccaacttgacaaaccaccgcccatatc

SEQ ID NO: 1710 - DNA, 1486 bp, unidentified
  source 1..1486: mol_type = unassigned DNA; note = element_241594e
  misc_feature 1..2: note = core
  misc_feature 3..242: note = LE
  misc_feature 243..1466: note = CDS
  misc_feature 1467..1486: note = RE
  misc_feature 15..241: note = bridgeRNA
ctaatgatgtcgtgggagccagccgtccggcagactcccgatcggtagccgctggcaggtgagcactcgtgggtcctggacttcgagtcctgttgaaagaccgtgcccctgccggttggccgggagagttgatcgctgatgggatgtcgtgcccgcccctacggcgtgagcactgtgttcattaggtcgctgactgttctcccgcgggctgctcacggtgatcgacacagagggcgggagacgtgttgcgactgttcgtgggagacgactgggcggaagatcaccatgatgtggaggtgatggacgcctcgggccgtcggctggtcaaggcacggctgcccgaaggcgtggacgggatcgcccgcctgcacgccatgatcggcgagcattccggggacgatcccgacggcatcgaggtgctggtcgggatcgagaccgaccgcggcccgtgggtggcggcgctggtcgccgccgggtacacggtgttcgcgatcaacccgctgcaggcgtcccggttccgggcccggcacgcggtgtcgggcgccaagagcgacgccgccgacgcgcacatgctcgcggacatggtccgcaccgacgcccaccagctgcgcccggtggccggggacacggccaccgccgaggcggtcaaggtcgtgacccgcactcacaagacgctgatctgggaacggacccgtcatacccagcggctgcggcacgcgctgcgggactacttccccgccgcgctggtcgccttcgacgacctcgacgccgccgacactctggagctgctggccaaggcgcccacccccgcgcaggccacccggctgacgatcagccagatcagtgccgcgctgcgccgtgcccgccgccgcgacatcccggcgaaggcggccgcgatccaggccgtgctgcgcgcggagcatctcggccagcccgacgtcgtgaccggcgcctacgcggtctcggtccgcgccctggtcgcggtcctgaccgtgctcgacgggcaggtcaaggccctgcaagggcaggtggaggagcattttggccggcacccggccgctgagatcatccggtcccagcccgggctcggaccggttctcggtgcccgggtgctcgcggagttcggcgacgaccccgaccgctacaccaccgccaaggcccgcaagaactacgccggcaccagcccgatcacccgcgcctccggcaagaagagaaccgtcgcggcccgctatgtccacaacgaccggctcgtcgacgccctcatgacccaggcgttctccagcctccaggcatccccgggcgcccgcgcctactacgaccggcaacgagcccgcggagccagccacaacgccgccctgcgccagctcgccaaccgcctcgtcggcatcctccacggctgcatcaagaccggcagcccctacgacgagacgaccgcctggccctccgccgaacagatcgcggcttgacatgtcagctcctgggatgt

SEQ ID NO: 1711 - DNA, 1564 bp, unidentified
  source 1..1564: mol_type = unassigned DNA; note = element_24250bb
  misc_feature 1..2: note = core
  misc_feature 3..248: note = LE
  misc_feature 249..1415: note = CDS
  misc_feature 1416..1564: note = RE
  misc_feature 3..226: note = bridgeRNA
ctcgtattataaagtagtagtgtttatagtccctctccaaggacttaatgctataattttcacagacgctgtggattagtacaattctcctaacgcttgacgttttcagaaaggccataaccacagccgtttgtttaattggtaattagtttgataacgcatgacgtttcatttagcacgaggttacattcgacaaaccggcctgtggaataaaacagtgtcaaatataacacaaaggagccccgattatgatttacgcaggaattgatgttgcaaaggacaagcatgattgtcttattgttgattccaatgggaaggttcttaccaaagtattcacaatcaccaataacaagcagggttttgatgaattgttcacgaatcttagaactcactcaaaagacttatcagaattaaaagtagggctggaagccaccggtcactatagcgataatcttttagagttcttgatcgccaatgatttacccacgacggtgatcaatccgttgcatactaatctttacagaaaaggtctaagccttagaaagacgaaaacggataaggtcgatgctcactctattgtgactatgcttaggacagaagacttaaagccctactcacagtcatcttaccatgtccgtgagcttaagtcactaacgagataccgtttttctttggtacaggactgtgcaagacttaaatcctcttttgcaaggctctgtgtcattctcttccctgagttagagaagttggttccatcgctgcacatggcttctgtatacgccctattggctgaattcccaaatgcaaaggccatatccgaaagtcacctaaccaggctgacaaatctgctttctgaagcttctaaaggccgctacagcaaggataaggccatcgagattcgtaatgcagccaaggcctccatcggctcatacagcgaagtgaaatcccttgaattacagcaaaccattcaactcattcaaatgatggaggagcagattgcacaggctgaagcaagaatcaatccgattgtggatagtcttcatagccccattatgaccatacccggcattggctaccgtatggctgccatcataattgcagaaacgggtaatttcgctaattttgataaagccgaaaaagtacttgcctttgcagggctagagccttctgtataccagtcagggcagctgacctccacacatgcaaaaatggttaagcgcggctcaaaatacctacgctacgcgctatttaatgctgcaaagtatgtctgccattgggacgatggctttcgtcagtatctagctaaaaaacgtgctgagggtaaaccatacaacatagctgtttctcatgcggccaagaagctaacacgagtaatctttcatctggtcaaaactaatcagtctttttccagataggatttaatcagacttcataatgattttttgagcagctccttggggtgctctatttgtcatgcaattatcaaggttcaattttttctgaaatacacttctgcagtccattcaaaataattcattttagggcttgacttttaatagttagt

SEQ ID NO: 1712 - DNA, 1445 bp, unidentified
  source 1..1445: mol_type = unassigned DNA; note = element_2425265
  misc_feature 1..2: note = core
  misc_feature 3..463: note = LE
  misc_feature 464..1429: note = CDS
  misc_feature 1430..1445: note = RE
ctgatataacaccctgcggaggtcataattcgaccgacctctgcggggagaccggcagtccgctatccggcaagagaccgacgcgactagtacccggccctcgcgcttcgcctttgagcggtgattgggatccgacggcaaagaccggtgatggagcatcagcccacgcggcggcgaagaccggcgagtacctcctggggtcgcaacaaccaactgggaggtggccatgagcgtcgcggtggggattgatattggtgcgtacaagcacgcagtcgccgtctgtcgcgcgggacagcgggaagccgatcggtggacgatgcagatctcggccaaccgcgctggctttcggcagctggccggatggatgcagacgctgtccgaaccggtgtcggtggtggtgatggagtcgagcggccattattggtaaaacctggccagccacctgcaccgcgccggcatcccagtgtcggtggtcaacccgctggaaagcaagtactttggcaagcgccggctgcagcgcagcaaaagcgacaaggcggatgcgcgcacactggcagcattgggcatgcatgatcagccacgggcgcaaacgccgctggcgcagagcgagctgcgagaggccgcccgcttcagcatgcgcctggtgcgcgagcaggctgaggtctgtcagcggatccagcgcctgatcgacctcgggtttcccgaactgcgcgaggtctgggacgatcccacctgcgtgagtgcgttggccgtcttgcgcaaggcgcccacggcggcggcggtcggtcgcctccggctcgacaccctggccgccctcaagcgcccaggcgagagaggtcgggccatcggctctgccaaggccgaacagctccatgccctggccaaggcatcggtggcggcgccggaaatggaggcgcaagtcaggtttgagatgcagctgctgatcgagcaacacgactttttggatcggcagatcgccgtggcagacgctcggttggccacgctgctggatggcgacacggcgcgccggttgttgacgattcctggcgtggggccggcgacggcgggcactctgctcgccgagatcggggacatttggcgctttaccgatgtggaccagttgttggcttacgccggcgtgcatcccaaagaacaaagctcgggcaagaagggggaacggcccgagaccagttggacgatggccaaaacgggcaacgcccatctccgggcggccgcctaccgtatggcggtcgtcggcatcacccacaacccagtcatccgcagccactacgcccggaagcgagcggccggcaaatccccgatgaacgcggtgggccactgcatgagcaaagccctcgcgctcgtctggggcgtctggcgcagcggtcaggactttgatccgcggcatggggagcggcggtccgcttgacaagacaatatgggat

SEQ ID NO: 1713 - DNA, 1587 bp, unidentified
  source 1..1587: mol_type = unassigned DNA; note = element_2437058
  misc_feature 1..2: note = core
  misc_feature 3..248: note = LE
  misc_feature 249..1418: note = CDS
  misc_feature 1419..1587: note = RE
  misc_feature 6..226: note = bridgeRNA
ctcgtattatatagtcatatccattctttaccttctctataggtataggatatgctgttgaagatgctgtggattggttcgttcctcctaccgcatagacggtttcaaaaaggctccaaccacagcctctttgtcacaatgttaatcagttagataccgcatgacggtttatgtagaacgaggttacatcggcagagagccctgtggatccaatacagcgtcaaatacttttaaggaggatcacatgtatgatctacgttggtatcgatgttgcaaaggataagcatgattgctgcatcctgggatcagaagccgataatctctatccggtgtttactatcccgaataacaagacaggctttgatgagttgtatgaaaagattttctcagtgactgatgataggaccgaaataaaagtaggtcttgaagctaccggtcactactcactcaatcttctcggatcgctcattgataaaggtctacccacctgtgttatcaacccgctacacacaaatctttacagaaaaggtttaagccttagaaagacgaaaacggataaagtcgatgccggttcgattgctatgatgttaatgactgataagactctcaagccctactcagacacatcatatcacagcgaagaactcaagtcattaacccgctaccgttttgacaaggttcaagagcgagccaagcttaaatcgtctgtggctcggcttattaatatcctgtttccggaactggaaaagctcgttcctaatcttcatatggcttctgtgtacgccttactttctgagtttcccggtgcttcttacattgctgaaagtcaccttacacatctaagaaatgtccttgaaacagcttctaagggacgctacggacgaaatatggctgtcaccataagagatgctgcaaaggattcaatcggttctgttatgccggcaaaatcaatggagttgaagcacaccatccatctgatcgaggtgatgacggatgagattgatgaaatcgaagcttcaatcaaatccattatggatacttgcgactctccgattatgacaatccctggtattagctaccgtatgggagccatgattcttgcagagattggcgatttcaaccgcttcagcaatgccgatcagatacttgcatttgcagggttatcgccatctacataccaatcaggacaacttgattcttgcttttcccacatggaaaaacggggctctcgttacctacggtatgctttgttcaatgccacaaaatatgtctgccactgggatgagagtttcggcgcttacctctctaaaaagataagtgaaggcaagcactacaatgttgctatcggtcatgcggcgaaaaagctgatacgcaccatctatcggatggaacttacaggcgaagcctaccgaaaataaagagtctttaacttacatccttttcttagagcacctgttcagatgctctgtttgtcatgcagttttcaaggtactgattgaggcttaatcctgcctccaggctatctaaaacacttaacgatgttttattcaaaaatcttcattttcttgttgacttttaatagttagt

SEQ ID NO: 1714 - DNA, 1738 bp, unidentified
  source 1..1738: mol_type = unassigned DNA; note = element_243c761
  misc_feature 1..2: note = core
  misc_feature 3..278: note = LE
  misc_feature 279..1454: note = CDS
  misc_feature 1455..1738: note = RE
  misc_feature 27..250: note = bridgeRNA
cttgtataatataatcagttcttatttaaaggactgaatgtattatatcctttcttttaatttttaaaatttttgatataatatgttccgacactgtggacttttttgactcaccttatagcttgactattctatttgagactaatgccacagttttatttttaattggttataagttggataaggcttagactttttatctccaacaaggttacaagaaataaaactacgtggaacacagttgtcaaaaatttcattttaagattggagttgattttatgtactatattggttttgatatagccaaagaaaatcattatgcatctattgccaattcaaatggtgaagtaattcaagaagcatttttagttaaaaactctataaatggttttaacttctttatggacaagttgaaagagaaaaacatttatatttctgactgcttagtaggtatggaatctactggtcattatggagaaaatctaattcaatttcttcataacaaggggtttaatattggaattattaatcctattcaaaccgatgctcttagaaatagtaatattagaaaaactaaaactgataagattgatacatatttaataattcaatctcttatgttaaaacactatactcctttcgtttctaaagatattaaaattttagaacttagaagtttatgtagacatagagatgatgttcttaaatatcgtacaaaattaaaagttcgtttagtttcttttgttgaccaactttttccggaattaaatttaatttttagttctattcatttaaaaagttgttatgcattactctctaaatatcctagtccaaaagacattgcttctacacgtgttgatgccattgctaatcttttatcaacagcttctaaaggccacttttctttagataaagctcaaaaattaaaagaactagcgaaatcttctatcggtgtcaacaactcctcactttcaattcaaatcaaacattctctaaaacaaattgaattacttgatagtcaaattaaggaaattgatttaaaaatcaaagaaataatggatgagttaaactctgtcattttaactgttccaggtatttcatacaccttaggtgctatcattttaagtgagattggtaacatagacaaatttgctagtcctactaaattacttgcatttgaaggtttagatccttctgtcaaacagtctggtaattttaatgcaactatcattaaaatgtccaaacgtggttctaaacttcttcgttatgcaatgcttcgagcttctggaataataatttggaattcagaaacttacaatgcctattatagcagaaaactctctcaaggtaaatctcataataatgctgtttgtcacgttgctcataaactcactagagtaatatttcatatgcttaaagaaaatgttgaattcaaagaacaattagaaaattaattttatgccgagaaaactttttacaagcaaagaaatattttttaccttaatggagtttaatgattattattttcattttttgaaaataataatcagttaaacgactataaataattaaaaatatttctgcttgtcaaaaggaaattggaataaatttaattttcgtgttttgaccgaattttttaaaaaattatcgacgttcggtcttttcgtcgtgccaacttttcactatttcatacatatttcaaaaatgttcaattttctattgacacattatagttggt

SEQ ID NO: 1715 - DNA, 1499 bp, unidentified
  source 1..1499: mol_type = unassigned DNA; note = element_244236b
  misc_feature 1..2: note = core
  misc_feature 3..243: note = LE
  misc_feature 244..1479: note = CDS
  misc_feature 1480..1499: note = RE
  misc_feature 15..239: note = bridgeRNA
ctaatgagtctcagggagccggccgtctggcagactccggatgtggtggccgccggcaggtgagcacttcgtgctcctgggctttgagccctgaagaaagaccgtgcccgtgccggtgaccgggagagttgatcgctgctgggatgtcgtgcccgcctgctggcgtgagcacagtttcattaggtcgctgatagttctcccgctggctgccgccggttttcggcatttcggacgggagagcggatgcggttgttcgtgggcgatgactgggctgaggaccatcacgacgtggaggtgatgaacgaggccgggaaggtgctggcgcgcaagcggctgcccgagggcgcggccgggatggccgggctgcacgaggtgatcgggcggcgcctgggtgaggacgcggacggcgcggaggtggcggtcgggatcgagaccgaccgcggcctgtgggtcgcggcgctggtcgcggccgggtacgcggtgttcggggtgaacccgctgcaggcgtcgcggtaccgggagcggcacggggtgtcgggggccaagagcgactccggcgacgcgcgcatgctcgcggacatggtccgcaccgactcccgccagctgcgggcggtggcgggcgacagcgcggaggccgagggcctgaaggtgctggcccgcacgcacaagacgatgatctgggagcgcacccggcaggtgcagcggctgcggcaccagctgctggcgtacttccccgccgcgctggaggccttcgacgacctggacgcccccgacgccctggagctgctgggcaaggccccggacccggcccgggccgcgaggctgacccgcgcgcaggtgtccgccgcgctcaagcgggccggccgccggaacatcacggacaaggcgacggcgatcctggcggcgctgcgcagcccgcagctcggccagccgccggccgtcaccgccgcctacgccgcgaccgtgcggtcgctgatcgcggtgatcacggtcctgaacgagcaggtaaaggccctgcaagggcaggtggaggcggattttggccggcacccggacgctgagatctaccggtcccagcccggcctcggcgcggttctcggcgcccgggtgctcgcagagttcggcgacgaccccggccgctacgccgacggcaagtgccggcggaactacgccgggaccagccccctcacccgcgcgtcggggaagaagaaggtcgtcgccgcccggttcatccacaacgaccggctcgtcgacgcgctcaacgcgcaggccttcgcgtccctgaaaaactcgcccggcgcccgcgccctctacgacgagctccgcgcccgcgggatcgagcacaacgacgccctgcggcggctggcgaacaggctcgtcgggatcctgcacggatgcctgaagacccgcaccctctacgacgaggcaacggcctggggacaccggcaaaacctctctcaatcttccgtagcggcttgacacttaagctcctgggatgt

SEQ ID NO: 1716 - DNA, 1414 bp, unidentified
  source 1..1414: mol_type = unassigned DNA; note = element_2444310
  misc_feature 1: note = core
  misc_feature 2..97: note = LE
  misc_feature 98..1141: note = CDS
  misc_feature 1142..1414: note = RE
  misc_feature 1183..1409: note = bridgeRNA
caatgggatggactcctcctcaccctatcatttcggcgtcgatgcgccagaatggtaagtgggaaccaaccattcagacaatgaggagaagcccaatatgaacattacacgagtaggtgtggatatcgcaaaatctgttttccatgtgcatgctgttgatcgtcgcgaaaacactcagtggcaggccaaactcaagcgcagtcagtggcttgaatcactgtgtgaacacgttgatcccggtgcggaaattggtatggaagcatgtgcatcagcacaccattgggggcgagagctgcagaagcggggatatcgcgttaagctgatcgctgctcaattcgtcaagccgtacgtaaaaagcaacaaaaatgaccgcgttgatgctgaggccatctgcgaggcgatgagtcggcccggaatgcggtttgtcgcagtcaagagcgtcgaacagcaggatacgcaggcggcgcaccgcatccgggaagaacttgtcggccatcgcacggcaaaggcgaatcagatacgtggccttgtcggcgaatacggtattgtcgcgccagttggcatccagaaacttcggtttgcattgcctcaatggctcgaggatgcagagaatggcctgactgatgaatttcgagttctactcgctgagctagcggaagatctgcgtcatctggacggacggataagcggtcttgatgagcggatcgcgcagtgtgttaagaacgacccggtagcgcggcgattgttggaactgcgtggtgttggaccgctcacagccagcgctctcgccggtgccctgggtgatggcaagggattcaggaaagggcgtgattttgcagcctccctggggctcacaccacgtcagcatagtacgggagggaaagaccgattgctgggcatcagtaaacgtggcgacagctacctgaggaaattgctggtgcatggcgccagggccgtgctccgacatgcgaaggctcgagacgatggtcttagccaatggctgaacgagttggcagcgcgcaagcatgtgaatgttgctacggtcgctctggcaaacaagacggcgcggattgcctgggcgattgtgcacaacgagacggcctacgacccgatgctttcggcaaccaaacaagccggttaatgattgattggattcacgttttaccgaggagggcctaccaccacgattgcagagcataatgtttgatggcgaacaggttgaacggacgttgaaaaaccctgacgcaccgccgagcggaaaagctcgtgtaagcgatgaggagtcaacgtgcgaatagcccatcagggtccgatgcctacgagaacggcatcatcaatgagaccggatacacgtaggcagtcgtaccttgacgcattcgaacaaaatgcttgcaaaagaggaggagtccataca

SEQ ID NO: 1717 - DNA, 1506 bp, unidentified
  source 1..1506: mol_type = unassigned DNA; note = element_24520ad
  misc_feature 1..3: note = core
  misc_feature 4..254: note = LE
  misc_feature 255..1169: note = CDS
  misc_feature 1170..1506: note = RE
  misc_feature 1207..1380: note = bridgeRNA
aacatggggtaatcgcggcgcaattcgccccaggccagttttataagagtaatggctagcgggagtggttgctcccgatacgatgagaaaacgggctcacgattggaaccgggcccaagcatcgaacggagagcaaccatggaccaatatatcggccttgacgtttccttgaaagacaccggatctcgatccgagaggacgggaagcggatctggcggggtaattgtccttcggatccaaaggttcttgcgcaagtgatccgcaagcgcgccccgcacgccaagcgcgtcgtattcgagacggggccgctgtcgacctggttctttcatgcgctgacgagcgagggcgtgccggcgatctgcatcgaagcgcggcatgcgcaaaagatattgaacgagacgctcaacaagaccgatgccaatgatgcggatggcttggcccagctggccgaagccggcttctacaaggcggtccgagtcaaatccttcgacgccatgctggcacgtacgctggttgccgcccgcaatcagctcctaagcatctcaacccaacttagcaatcagatccgcggcttgatgaagacgttcggtcttatcgtccccaaaggaacaggtcgggtgttcgataacaatgtgagggagcttttggatgagaatgatgggctggcacggatcatatcgcctctgcttgaggcgtggcgcgacatacgcaagcgcgcggccgatcttggtcgccagttgctcgtagcggcgcggaagagccaggctacgcgcctgctgatgacgatcccgggtgttggcgccgtcacggccgtttcctacgtcgcagcaattgaagatccagacaacttccgaacatcgcgcgcagtcggcgcctggctcgggctgacaacgcgccgctatcagtctggcgagatcgattatggcggccacatctcgcgaaaaggcgacaaccgtctgcgaggactgctttatgaaacggcgacggtgatcctcacgagaaccagtgccaggaacgagagcagtctcagaagctgggggctcaagctgcgtgagcgggtaggcttcaagcgcgctgcggtggcggttgcccgaaaggttgccgtgatcatgcacagcatgctcaagacaggagaggtcttcaacacatcggccggcgcgaccgtatagatgaagcgtcagcctttttccctcagcgcatcaatctgatttgaagcactgagcgtccctgctgtggacgtgggttggatcattccgtgccgaggaggctgcagctcgttcgagactgcgggctaaacagaggaagatccacctgcgaagaaccattatgcggcgactacttgtcgaccgcggagacaaccttgctccccagcaccggacagctctgacaaaaacatggccgctgaggcccgatccaaacaactgattcgtgccgcgtcgcctttttccgcaacgcggtgagacgccgaatgcccagaccaccttgacgggagaaacgcgactagac

SEQ ID NO: 1718 - DNA, 1493 bp, unidentified
  source 1..1493: mol_type = unassigned DNA; note = element_246ad7d
  misc_feature 1..2: note = core
  misc_feature 3..202: note = LE
  misc_feature 203..1471: note = CDS
  misc_feature 1472..1493: note = RE
  misc_feature 5..202: note = bridgeRNA
ctgatgggactaccttccccggtcatagggtctccccctgggaacgcttgcggcgcttgtccctcgaggactgaggtgagacggcgtcccagggggagggcactggaggcccgacgcccacaagggtgtcgtcccgcgaggactggtccatcagcacggcgccgcgcctccgaccggatcgggttcgacgcagggaggcgcagtgcttggtgttgggatcgattgggccgaggagttccacctcgtggccttgggacgaccggccgagggggtggtcgaggtcgtccgggtcgagcacaccccggccgcggtcgaccggctggtccaacggatcgccgggttggaaccggacccggcggaggtccgggtggtgatcgagacccgccacgggctgctggtcgaacgactgctggatgccggctatggggtgctgccggtcaaccccgacctggtcgcccggcgccgtgggccggcccgcaagaaggacgacgccgaggatgcccggatcgcctgcctgctcgccctggaccgccacgcgggcttgcgcatcctggtcccgcacggcgagctggccggggagctgcgcgcgatcgcccgtgacgacgaccgttgcgcccgtgaccagcgccggctgctcaaccggctgcgccaagacctcatcagcacgttccccgccgcgctgcagctcgctggggaggacctgggcgcacctaccgtcctgcggctgctggagcgctggccgacccgccaagcgctggccgccgccagccaccaggagctggtcgacttcgcccgcgccagccggcacggctggcccgaccgcttcgccgaccgggtcgaggtggcgctggccggcgaccacttcacgccccgggactacctggtgcgggccaaggccgacaccatccgcctggccgcgacccagctgctgaccatcgccacccaacgcaagcgctgggagcggcgcatgggcacgctgctgctgggcgccccacgctatggacgcgccaagcagccacgggagcaacggccggggcaggcggtccctggcggcaaggtctacctgagctttcccggcctcggtgaccgcctcgccgccagggtcgccggcgagatcggcgaccaccccgcacagttcgggtcgccgaacgcgctggcatgctacgccggcaaggcccccgtcacccgccgttcgggcaagtccgagctggtcgtggcgacccggctggcctgcaaccgctacctcgccgatgccgtgcagcagtgggccttctgcagcctgcgctgctcgggctgggcgcgggagttctacgacgcccagcgcgcccgcggcaaaggccaccacgccgccctgcgggcgctcggcaaccgctggctggaggtcctgtggcactgccttatacgcggccagctctacgacgaagccacccacgtcgccaaccgcaaccgcgccctcggcaaggccgcctgaccccgaggttgacaaagggtgt

SEQ ID NO: 1719 - DNA, 1328 bp, unidentified
  source 1..1328: mol_type = unassigned DNA; note = element_246b3fc
  misc_feature 1..2: note = core
  misc_feature 3..70: note = LE
  misc_feature 71..1108: note = CDS
  misc_feature 1109..1328: note = RE
  misc_feature 1083..1313: note = bridgeRNA
agataattggactcccctcctcataagtcgtagcctctattggctgctagaaaaatattcggagttcaacatgatgaagacaattgctggtgtagatttggccaagaaagtggttcaagtttgcgtttatgcgaacaaaaaagtgcattccaacacagaaatgacaccgaacgagtttacttgctggttagctaactcagagtcagcgaccgtcatatttgaagcctgtggtacttcgaactactggaagcagcttgcagtctccctggggcatgatgctcgattaatttcccctaaattagtcgcttcagtgaggcaaaatcagaaaacagacaaaaatgatgctttagccattattcaagcgtcgttgctacctgatgttgccttcatttcagggaaaacaatggatcagcaacaattacaatcagtcatgcgactgagggaactaagcgtcaggcaaaaaacagcagcaaagaatcaattaacagccctgttgaccgagttcaatattaaagtgtcccacaagcatggtggtttgaggggaagtattgagtcaaccttagaagatgcagagaatggattgtcgagtgagtttctcatggctctttctgttgcatgggagcagtatttatcgcttgttaatgctgtagatacttatgacacatgcctggaaaaatcattacagtctcagtctgactgtaaaaagctgctaaaaattgaaggcgtaggaatgttaaatgctgttagcttgtacattgcgctagggtgtgcggatattggtacgtttacgaaagggaaagatgctgcggcctgtataggtctaacccccatccaacactccactggtggcaaagtgaaattaggctctataggcagacgtgtaaagaataatattttaagaagtcagttaatcacaggggcaatggctgttgtaagccacttagctaacaggccagccagaactaaaaaagagctatggctaaaagcgttaatagaacgccgtggcaaaaagtgtgctgctgtggcattggcaaacaaaaatgtaagaacggctttcgccatactgacacaaggtacagaatataaagctgagcctattgtggcttgatttgaaaagtgtcaaaacagtaaaaatgcataaagtaagatgaaaaatcagctagtcaaagcagccgacaacgaagagtctcgaactcgcaggatagaattgccactagctcgcgtaaatatcactgagtctgagttagctactcactagaactcgtacataagtgcgcatttatttcttattttgaatttcttgctgttgacaacggggagtccacata

SEQ ID NO: 1720 - DNA, 1544 bp, unidentified
  source 1..1544: mol_type = unassigned DNA; note = element_248160f
  misc_feature 1: note = core
  misc_feature 2..275: note = LE
  misc_feature 276..1439: note = CDS
  misc_feature 1440..1544: note = RE
  misc_feature 43..258: note = bridgeRNA
acgtataataaaaaccatcctgaaagggtggtttttactatgtctcctttctttgaaaaagttatagagcgggagtagctacccgggatataatcagcacaagcactgcggatttgtacataaaatctacagccagactgtttggaggtgactcagaccgcagcggcttgtctgaaatggtgattagatagttaacgcttgacgtttgaatttgcgtgagtacaggggcaagtcaggtgcggaaacagcagtgcagacaagaaaaggaggaaaccatgtactttgtaggaatcgacatttccaagttcaagcacgactgcgccgttatagacgagattggtgacaccatccagccctcgtggtcgttcggaaatgaccgcgagggcttttccttgctgaaggagcggctcgacagtctgccgggagacaaaaagatagggcttgaggctaccggtcactatgggcagaatctgaagctgttcctggaagcaaacggcttcgcgttcatggagttcaaccctctgctggtatcccgattcgttcgcggcaaatctctcaggaatacaaagacagaccccattgacgctcgtaatgtcgcccaatacctgatgacggtagagtacaagccctatccgccctcattttaccacctggatcagctaaagtcactgacaagatttcgcagcagcctcgtccgccagcgttcccgccaactggtgcatctgacgaatgtactggataagatgtttcccgagttcaaaccctttttcaagggaaagttttctgccacagcattgtacatccttgaccactaccaatcaccggaacggattgccaacatgaacgcacgctcttatgagtcccttcgcaaaatctcacggggccacttctctttgaatgactttgtcaacctcaaggcgctggcaaagaataccgttggctgcacgaccgacttccttctccaagaaatgtccatcctgctggagctttacacgcagctggacgccaaggtggaggaattggatgcccagatcgaagaatgtgtccgtggtattgacccgcctatgctctccatccccggcgttggcgcctcttccaccgctgtcatcctctctgagtatggcgacttcagcaagtttaagaatcctgccaagatgctcgctttcgccggtctggagcccggatatttccagtccggccagtcggaatctactggccatatggtcaagcatggttctcctcatctgcgctgcgccatcctcaactgctgtcttccacttgtttctaatgaacctgttttcgctgaattttacgccaagaagcgagctgagggaaagacccatcaggttgccatgacccatgttgctaagaagctgctgcgggtaatctacacactgcaaactaagaacatcccctacgatccgacgctgatccgttaatttaatattctctttttttgaagtcctccttgagggcttggttcagtgcgccttttttctaaaagctaattttttcatttggggcttgacattctatagatagtc

SEQ ID NO: 1721 - DNA, 1499 bp, unidentified
  source 1..1499: mol_type = unassigned DNA; note = element_248280d
  misc_feature 1..2: note = core
  misc_feature 3..252: note = LE
  misc_feature 253..1479: note = CDS
  misc_feature 1480..1499: note = RE
  misc_feature 6..247: note = bridgeRNA
ctaatgagagctaccggctccgccgttgaggcagactcggtactcggtagccgccggcaggtgagcactcgcgcgccccggaccccctctgggagtcctacaagcagatcgtgcccccttgccggtggtcggaagagtcgaccgctgatgggatgtcgtgcccgccgccggcgtgagcacttgatcattagggtgctggtggttcttccgcggctgctggatcgaccttgatcgccacggaagaagggagacgtggggttgctgttcatcggagacgactgggccgaggaccaccacgatatcgaggtgcaggacccgacgggccggcgactggccaaggcccgcctcccggagggcctggccggtgtcgcccagctacacgagctggtcgcccaacaccacgacgacgataacggtgccgaccaggtcgcgatcggcatcgagaccgaccgtggcccgtgggtgaccgccttgatcgccgcgggctaccgggtgttcgcgatcaatccgctgcaggtggctcggtaccgcgagcggcagagcgtgtccggggccaagagcgacgccggggacgcgcacaccctcgccgacatggtgcgcacggactcccaccagctgcgtccggtcgccggcgacagcgaccaggccgaggcggtcaaggtggtggctcgagcccacaagacgctgatctgggagcgcacccggcacgcgcaccggcttcgcaatgcgctgcgggaattcttccccgcggcgctgcaggccttcgacgacctcagcgccgctgacacactcgagctgctggccaaggcccccgatcccgatgcggcagctcggctcacgaccgcgcagatcactgcggcgctcaaacgtgcccggcggcaccacgccagcgacaaggcccgggcgatccaggcggcgctgcgcacccagcagctgcgccagccggccgcggtcaccagcgcctacgcggccacggtccgtgcccaggtcgccctcatcggtgccctcaacgcgcagatcaagacgatgggggcccaggtcgaagagcattttggccggcacccggacgctgagatctacctcagccagcccggcatgggcgccatcctcggcgcccgggtgcttgccgaattcggcgatgacgaccaccgctacgccgacgccagctcacgcaagaactacgccggcaccagcccgatcacccgtgcctcgggcaagaagaagacagttctcgcgcgatacgtccacaacaacaggctcatcgacgcgctcggccagcaggcattcagcgccctgtccgcctcccccggggcccgcgcctactacaacgaactgcgccggcgcggcacaggacaccgggccgcgctgcgtcaactcgccaaccggctcgtcggcatcctgcacggctgtctcaagaccggcacccgctacgacgagacgacggcctggtcccaccacatccgcaccgccgccgcttgacgaagctcgccatgggatgt

SEQ ID NO: 1722 - DNA, 1224 bp, unidentified
  source 1..1224: mol_type = unassigned DNA; note = element_24873a9
  misc_feature 1..3: note = core
  misc_feature 4..228: note = LE
  misc_feature 229..1209: note = CDS
  misc_feature 1210..1224: note = RE
  misc_feature 12..213: note = bridgeRNA
cttgtatcttggttttggtcgtagaatcggccgggtgggcgcggcagaccggctccggccctggtccaccaaaagagcaaaagaccgcgaagaagtcgaaaggtcgtcgcgccttcctttttatgagaggagagcccgaacagttgcctgggccccttcctaaagcacgcgaagggagctcgtatctgcaaggacgggccaaatgggaaaagaggagggagctctaccttggagcctatgacaacggcgcagctttacgcgggcgtggacgtctccaaagaccgcctcgacgtctgcctacgatggagcgaacacgaaagacgcgacggcgacgtcttcttcgtcacccatgacgacgccgggatcgacaccctgatctctggcctcctcgaggagcaccctgtgctggtgattctagaggccaccggtggcttcgagcgagcagtagttggggctttggccgccgagggattaccggtagcggtggtcaaccctcgccaggtgcgcgacttcgcccgggccacgggtcagctcgctaagaccgacacactggacgccagggttctggcgcgcttcgctgaggctgtacggccagctcccaagcctctccctgatgaagagatccgcgctttgcaggagatactcgctaggcgcaggcagctattgggcatgctcaccgccgagaacaaccgcctgcattcggcaagcaaaccggtggccaagcgtatcgccgctcacgtcgggtggctcgagaaagagctggagcgcaccaaccgtgacctcgacggggcgatcaagggtagccccaccttacgtgaaaacgaggcactcttgaggagcgtacctggcgtgggtccagtactggctcggacgctgttggccgaggtgcctgagctagggacgctcacccacaagcggcttgctgctttggtaggagtcgctccgctaaaccgcgactcgggcaccctccgtggccgtcgtagtgtctggggtggtagagctgaggttcgagcggcactgtacatgggcgctctggtcgccgcacgccgcaacccggccatcaactgggagttctacgagcggctactagcggctggtaaaccgaagaaggtggcactggtggcctgcatgcgcaagctgctctctatcctcaacgcggtcctcaaacaccgtactccttggaggtctcctcactatattccctcttgacttcgaagacagttg

SEQ ID NO: 1723 - DNA, 1193 bp, unidentified
  source 1..1193: mol_type = unassigned DNA; note = element_2493997
  misc_feature 1..4: note = core
  misc_feature 5..210: note = LE
  misc_feature 211..1191: note = CDS
  misc_feature 1192..1193: note = RE
  misc_feature 23..189: note = bridgeRNA
atccattaggtttgttttatatttaaagatatcgcaattcagaggtgatccaactgcaatcctaggtgtgaagacctatttagggatacggtcctttgactttgctatgcttcgggcttaaatagaaattcaggcattgagggcctattattatggatataagctgtaagcataactgcgatactttctaacaactcaaaattaaacattatggaacagttttcattttttacaggtatcgatgtgtctaaactatggttggatattgcagtattcagtcctactaacgggcttgtttatcaaacaaagatcaacaacaatataaaagacattagatgtttttttaaggcactaaagaagtatttaagtgtcgatgtgtctgaacacttattctgtatggagcacactggcaagtatggtcatacttttcttaatgcatcgattcttgagaaggcgaaagtatgggtagaattaccgattcaaatcaaaagaagccaaggacttgtcagaggaaaaacagacaaatgggatgctattagaatcgctcaatacgcacatcggttcgcagataaggctgttttttggaagcctgctgataagtctcttcaggacattaaagatcttcaggtgaaaagaagcttgctggtaaaagcacattcacagcttattcaggaagacaaggacgacccgcttttcaaaaagccattattagctttaaaacaggccatacaaactatcgagctaaagatggaaaaactactggaacaaaatgaaataacctgtcatcaatataatctgcttaaaacagtaccaggcattggtaaacaaacagcaatggctttgatcatcgtgacgaacggttttaccaggctaacagaaagccgaaagttaagttgctatgcgggccttgctccattcccttatagttcaggtagctctattaaaggcaggactaaagtctcaaaaatgggtgacatgaaactcaaagtattacttaatctttcagcttggaatgctatcagatctataaccgcttttaaggattatttcaagagaaaagttagcgaaggaaaacataaaatgtccgttattaatgccgtaaggaacaaactacttgctttggctttagccgtgatcaaaagaaatagcccttatgaaaaaaactatactctttccttgattatgccatagaa

SEQ ID NO: 1724 - DNA, 1413 bp, unidentified
  source 1..1413: mol_type = unassigned DNA; note = element_2496618
  misc_feature 1..4: note = core
  misc_feature 5..80: note = LE
  misc_feature 81..1127: note = CDS
  misc_feature 1128..1413: note = RE
  misc_feature 1150..1400: note = bridgeRNA
atgatggggtggacggctcctgtcccggcatcgaagtgccataaggtggtcgtgcgaaacgccacagataggagccgcccatggagaaggttagcacaattggtctggatatcgccaagtcggtttttcaggtcgagggcacgaacgaggcaggcgaggtcagcgttcgccgtcagctcaggcggccacatttgttgaagttttttgcaaagctaccaccctgcttggtgggcatggaggcgtgtgcctcggcgcatcattgggcgcgcgagctcacggctctcgggcatgaggttcgcttgatgccaccgcgacgagtaaaggcctacgtgaagtggggagccaagaacgatcaggcggatgccgcggcctgcaacgaggccgtgacgcgaccaagcatgcagtttgttccgatcaagtcgatcgagcagcaggcggtcttgatgctgcatcgtgcgcgaagcttattggacaagcaatgcacgcaactcagcaacgccattcgcggtcacttggccgagttcggcatcgtcgctgccaaggggaatagcggtttcgccagccttttggcaaaaatcggcaaggataacgatcctcaaatcccgccgatgatccgcccgattgtcgtcgtgctggccgagcaatggcgcagcacgtgcgagcagatggataagctcgaacgacagatcattgcttggcacaagagcaatagtgagagtcaacggttggccacgatcccccagttcgggccgatcatctcgagcgccgtggtagccagcatgggtaacgccagccgcttcaagagcggacgtgcttacggagcttcccttggcctcgtcccgcgccaagactcgacaggtggcaagccgcatttagggccgatcaccaaggccggtgatcactacatacgccggctcttggtgaacgcggccgccggcatggtccgtcgggtcagggcaaaccccgatctgatgccctggttcgccaaactgctggctcgcaaaccggcgaaagaggcgatcgtggcgcttgccaacaaactggcgcgtatcgcctgggcgatcctagccaaaggcggggtctatcgagcgtcgatgaccaccacagtctcggtagaaatgccctgatcgtcgcagatccatcaaggaccaaggttcacaaaagcaacggcttagagaattgcgagggcaatgaagcgtgatgagtacgaccggtcgagccacggaacggcaaaacccgacccggccatcgggcctcgagcccgcgtggatgatttgggagccgatccgcgtctctcatcagggccccagcggccatcgcgtgccgcgcacaaaggccggacacatgaccgcacccgcaaccaggttgtcacatcactccaatttttccttgcaatgcaggagccgtccacac

SEQ ID NO: 1725 - DNA, 1419 bp, unidentified
  source 1..1419: mol_type = unassigned DNA; note = element_249839d
  misc_feature 1..4: note = core
  misc_feature 5..199: note = LE
  misc_feature 200..1405: note = CDS
  misc_feature 1406..1419: note = RE
  misc_feature 1..190: note = bridgeRNA
ctccgtaagttgttcggcggtccgggagggtcgggtgtggctttaaagccgcttgccttcggtggctccggtggagtggccgcccggctctccgggacgcctgcctgctgattgagatgtgcgaaccggtcgctgcttacggagctgacagcgggtgttcctcggaccgacaccacgtcgccgagccgaggagacgctcatggcaaagcagttgacccagatctgggtcggcattgatgccggcaaggcccaccactggatgaccgcggtcgacgacgccggtgccgcagtgtggaaccagaaagtccccaacgacgagagtgcgatcctcgacgccctcggcagcgtccttgcccttgccgatcacgtgcactgggccatcgacattgccggcactgcctccgcgcttctgctggcgctgcttgcatcccactgccaggaggccgtctacgtgcctggtcggacagtcaaccgcatgtccggcgcctatccaggtgaggccaagaccgatgcccgcgacgcctatgtcatcgcagaaaccgcccgtgtccgacgggacttcaccagcatcggtgtcagcgctcaactggccgccgaccttgccctcctcactgcacaccggtccgacctgatcaccgaccgggtccgcatggtcaaccggctccgcgacgtgctcaccgggatcttccccgcactggaggctgccttcgactactccgaccacaaaggtgccctcaccctgctcaccggctaccagactccgacggccatccgccgccgcggcctcactcgtcttacgacgtggctgacccgccggaacgtgcgcaatcctgcaaccgtcgcgcacaccgccgtccaggccgcagatgctcaacacaccacgttgcccggccagcaggtcgccgcggacatcgtggccgacatcgcccagcagatcctcgacctcgatgaacgcctcaatcgcatcgacaagcagatccgctgcacctttcgcagccaccctcaggctgccgtcatcgaatcgctgcccggcatgggacccatcctcggcgccgagttcatcgtggctgccggggacctgacctcttacgcgaacgaaggccacctcgcctccgcggccggcctggtccccgtcccccgcgactccggacgccgcaccggcaacctgcaccggccccagcgctacagccgacgccttcgccgcgtcttctacctctcagcccagaccagcatcatccgcgaagggcccaaccgcgactactacctcaagaaacgagccgagggcgcacagcacgtccaagccgtcatcgctctcgcccgccgacgagtcgcagtcctctgggcactcctacgcgacaaccggcccttcactgcgatgccaccacaagcggctgcgacagcttgactcgctcattgaga

SEQ ID NO: 1726 - DNA, 1370 bp, unidentified
  source 1..1370: mol_type = unassigned DNA; note = element_249a6da
  misc_feature 1..2: note = core
  misc_feature 3..78: note = LE
  misc_feature 79..1107: note = CDS
  misc_feature 1108..1370: note = RE
  misc_feature 1081..1357: note = bridgeRNA
cgatggggtggacgccccccgacggcatcgatgtgccaaggtagcgggtgttgaacgaccactatgagggaggcgtccatggtcgaggttagcatcatcgggttggatctggcgaagaacgtgttccaggcccatgggtcggcagcagacgggtcggtggtgttccgccgcaagctctcgcggctccaggtgttgaagtttctcgccgagcaaccgcgctgcacggtggcgatggaggcctgcgcgagcgcgcatcattgggcgcgggccatcgcggagctgggtcatgccgtgaagctgatcccggcggcctatgtgaagccgttcgtgaagcggcagaagaacgacatggctgatgccgaggcgatcgccgaggcagctgcccggccgacgatgcggttcgttgcaccaaaatcggcggcgcagcaggcggctgcgatggcattccgcacgcgagagcttctggtgcgccagcgcacccagaccatcaatgcgttgcgcgggcacctcgcggagtacggtgtcatcgcgccgaccggtccttcgcatgtgggccgtcttgctgcgatgattgagtgcgagcaatccgcgctgcctgcccccgtcgtgacgctggcgcgcatcctgctggcgcagatcgctgggttgagcgcgcagatagatgctttggaaaaggaggtgcgccagcgcgccgcgcaagacgagacgacgcgacggctgatgaccattcccggcgtcggcgccattgtggccactgcgctgaccaccttcgcgccgcccccggagacgttctccaaggggcgcgacttcgcagcctgggccggcctcacgccgcgtcagcattcgagtggcggcaaggagcggctgggcaagacgtcgaagatggggcagcgcgacatccgtcggctgctcatcatcggggctgtgggctgcgtgcgatgggctgcgcgcaaaggcgcgccggaaggcacgtggctggcgcggatgatggcgagaaaaccccggatgctggtcgccgtggcgctagccaaccgcatggcgcgcatcgcctgggcgttgatgcacaagggtgaggactaccgaaatccggcgacggtcgccgcctgatggcgccgccgtcggcttgacgtcggggatgtgagcagggcgagggaaacgtaagggcaaacggtcatgagaccggatcggagagccaggcctaagcgcagcgcctcgagcgcgggtaagcgaaatggaaccgatctgcatatctccatacgggcccgcggcgcgtgacgagccgcaactcagaggccggacacacgaccgcacctgaccacatgcccaaccgtgacccagaaactgcttgcatccgaaggggcgtccacaca

SEQ ID NO: 1727 - DNA, 1593 bp, unidentified
  source 1..1593: mol_type = unassigned DNA; note = element_249b225
  misc_feature 1..3: note = core
  misc_feature 4..266: note = LE
  misc_feature 267..1469: note = CDS
  misc_feature 1470..1593: note = RE
  misc_feature 9..286: note = bridgeRNA
tttgctactatttatttggaagcagactttcatctcttccatgtgttgcctaagctacaataaaagggtattgagtaactaacgtttcctcctttggacttccacgtccgtataagaaactgttagtccgcctttttattgtagcgttcgttttaagcaggttgaaccactggttctccagggcgttcgtgtcaccaagcaaattgaatcggcaatgcaaataggtaggatcctcattacatcattttttgatcggaggtacttttatgaacgctgttggaattgatgtctctaaagggaaaagcatgatttctgttatgcgtcctttaggagaaatcgtggctaacccatttgaaatttttcacacacctagtgaactagataatttggctaattatcttaaaagtctagacggtgaaacaaaaatcgtcatggaatacactggtaagtatcaccagcctatttcgcaatttttaattgaacaaggtttctttgtttcaattattcatgcaaaacttatccatgattttgggaataactctatccgcaaagtcaaaacagataaagcggatgccattaaaatcgctaactatggattagctaattggcaagttttgagcccacaatcaagagaggatgaaatacgcactcttttgaagggttataaccgtcaatacaatcaatactcaaaaacaaaggtcgctttaaaaaacaatttgaatgccattctggatcaaacctttatgcactgtaactctttgttttctagccctagaaagcccgacgggcatgaaaaatggctagattttaccaatagattctggcattgtgagtgtgttacgaaatactcattaaatgcttttattaaaatttataactcttggtgcagaaaaaataattattatcaaagttctaaaaaagcaactgagatttacgaactagcacagtcgtgcttaccaactttaccgtacaataaatttacaaaggaactcgttcaacttgcgattaggcaagtaaatgaactagcttttaccctcgcttttttacaaaaagaaatgaatctactcgcttcaactttacctgaatattctattgttttaaacatgggcggagttggtgaaacacttggaccacaactaatggctgaaattggtgatattcagcgattcgctaaaaagcaatctctagtcgctttttctggagtggacgcacctcctcatcaatctggtaaatttgaagcgaaaagtcgaagaatctctaaacgaggttcaggtaatttaaggaaaactcttttccaagtcatgatatgtttacttcaaaactccttacacgaggaccctgtctatcaatttcttgaccgcaagcgtcaagaaggaaagcattattatgtttatatggtcgctggctgtaataaatttttacgaatttattatgcccgagtgaaggaatacttactatctaaagagtaagcactcatcataggaataaccctattcaagccgttaaaaattttttatttaattggcttttatttgatgtgccattattctttattaaaataactaaattttctcattgacttttattagcagg

SEQ ID NO: 1728 - DNA, 1503 bp, unidentified
  source 1..1503: mol_type = unassigned DNA; note = element_24a0886
  misc_feature 1..2: note = core
  misc_feature 3..236: note = LE
  misc_feature 237..1397: note = CDS
  misc_feature 1398..1503: note = RE
  misc_feature 3..218: note = bridgeRNA
cttgtataatgaactaagtcaactatagttcattgttttttatgttttatatataataaacataatgttgtggattggtttttactcctatagttcgactatttaattaagtctccaaccacatatctatgttttattgtttattagttagataacgctagacgttttatctagaacaaggatacacaacatagcctatgtggaaaacacaacaaatttaattgaggtgattttttatgatatatgttggtatcgatgtttctaaaaataagcatgattgttttattgttcattctgatggtactgttatcaaggatgtttttactattcctaattctattgaaggttttaagtatctaattgattctattccttctactgatgaaattgtaaaagtggggcttgaagccactggacattatagcattaatatcgctaattttcttaacagcaatggttacccacccattatcctcaatccgcttcaaactagtcttttcagaaaagctctaacgcttagaaagactaaaaccgataaggttgatgctaagtgtattgcttctatgctaagtaatcctgacttaaaaccccactctaatctagattatcagattttggagttaaagtcattaactagacatagaaaacgtcttagggaacaatcttctaagctaaaggtttctttaaaccgccttgttgaaattatgtttcctgagattactgattgtctgtattctattaatcaaaaatctactatggctattctttatgagtttccatctcttaaattaatagctgatgctcaccttactaagtttactaatatccttaagaaaaattctaagggcaagtattccaaggctaaagcaattgatatcaaaaactctgctaaaaactctattggttctgatagtagagctttaagttttgaacttaagcaaactatccgtctaatcaatgatatcgaagaggagcttatattacttgataatgagataaaatcaattatggagaatgttcaaagtcctattttgactatacctggtatctcatataatctaggttctattatcttatcggagataggtgatatccatagattttcttcttcttcaaagcttgtagcttttgcagggctcgatccttctacctaccaatccggtaattttagagccagtaatgtttctatggtaaagcgaggttcaccttacttaagatgggctttattacaagccgctaggctaatttctatgagagataacaactttaaaaactattaccaaaagaaacgcagtgaaggtaagtgtcataatgttgctattactcatgttgctaaaaaacttattagagttcttcactatttgttaattaacgatttagagtttgttccacaatagtgtttttataatttctattgttgataacttattttttgtgtgcctatttttagatatttaattgtctgcgtaatttatcttttttacttgacttcatatagttagt

SEQ ID NO: 1729 - DNA, 1363 bp, unidentified
  source 1..1363: mol_type = unassigned DNA; note = element_24ad066
  misc_feature 1..2: note = core
  misc_feature 3..74: note = LE
  misc_feature 75..1121: note = CDS
  misc_feature 1122..1363: note = RE
  misc_feature 1100..1350: note = bridgeRNA
tgttggggtggacggccccgcggcatcttgtgccaaggttggttgtcaacattccaacctgaaggaccgtccggatgaaccttaagcgcattggcctcgacacgtccaaggctgttttcacgctgcatggcgtcgatcaggatgagcaagtcgtcctgcgccgcaatgtccgacgggcggagttggaatccttctttgccaagctggcaccgacgcttgttgccttggaggcgtgcggcggctcgcaccattggggtcgtcggctggtcgcccttggccacacggtgcatctcatcccgccgcagtacgtcaagccgttcgtccggcgcgggaagaacgatcgcaatgatgccgaggcgatttgcgatgcggcgtcgcggccggcgatgccgaccgtgccggtaaaagcggcggagcagcaggccgacgcgatcctgctctcggtgcgcgagttgctggttcggcaacgcacgcaattggtcaatgccgtgcgcggccacgccgccgagttcggcatcgtggcggccaagaagatcagtcatctcccagaactgcttgcagccgtcgccgacgatcgagcggtacccgatgccgccaaggtgatgttggcgtttattggcgctcaggtggcgcaactcgacgatcagatcgcggagctggatcgccgaatgaagcagcagcacaaggcgaacccggtcagccagatgctggccaaggtccccggcatcggcccgatcggcgcgctgagcctggcgctcacgatcgaccctgggcgtttccagtccgggcgccacttcgcggcctggctcggcttgacgcccaaggaacattcgacgggagggcgcccacgcttgggagggatcagccgggctggcaacgagcggctacgacagttgctggtcgtcggcgcgatggcggtcattcgcttcgccaagccggggagcaagtccgcctcggcttggctattagcattgctggaacgcaagccgcgcaagctcgcggcggtggctctggccaacaagatggcccgcatcgcgtgggccatgatggcgacgggagaagcgtatcgcggcgtcagaccaactgccatgcaggcggacggagctgctgcgatcgcctgacccgctcgccggtgccagggtgcaagaaagctgcaggagatgatgatcggtcgacccgacgaacgagtgaacccgaggcgcgcaacggccaccacaggccgtatgattgttgcggtctcgttcgcggaacccatctgggccagcggtcatcgtgccgcgtcaaaggccggacacatgaccgccgtcgcaccgcccgtcaaatccagcagaatacctcttgcactccaggggccgtccacaca

SEQ ID NO: 1730 - DNA, 1838 bp, unidentified
  source 1..1838: mol_type = unassigned DNA; note = element_24af800
  misc_feature 1: note = core
  misc_feature 2..396: note = LE
  misc_feature 397..1710: note = CDS
  misc_feature 1711..1838: note = RE
  misc_feature 139..311: note = bridgeRNA
tagtataataatggtgtagtcaagaatgaccactggttaatagttacaaagtccaatctaataaatctatatagatataacagaaggaggagttccccttccatcagaagttataaggcaacattatttaccctgtctgaggtttccttaatgcaccagacaaaacatagaggtataatcactggaggcaggatcattgacgacgcctccttgggaactggccttccggctggtgaaacctcttagaaagtctgtcagtccattcggtggtgatttatgttttggctggttgggaagccccaggctatacctgtataaaccgctaggttgtgtatccgccctctggaaatggatacctgcctgaaaggataaaaccatgaaataccaaaagtacttatgatgcttgaaagcatcccttatctctcagtcgggcttgatgtcggcgcagacttcacctggatgtccatcatgctgcccaatggcattctctctggaaaaccttttaagatcattcattctgatccgcagtcccgtgagcaagctgtcgcaaaaataaaggaagcacaagagatgtattccctcgaaagccgctgcttccttgagtccaccgggatctaccacatcccgctcctgtacttccttcgtgataaggggtttgactgctcagtcattaatcctatcatcactaagaatagcacaaatatgaacgttaggaaactgcataatgataaatttgattcaaaaaaagctgccaaagtcggcctggatgcttccctgaagacttccatcataccagatgatgaggtcattgacctgcgcaacctggtacgggactactattacttcaaggacctgcagtccgctgtcgtactgaagctcacggcggaactgaaagtgtcctttcccgcataccggaaagtgtttagcaaggtcactacccaaacttccttaaagctcctggaagcttacccccttgccgcagacatgcttgccgccccaaaagacatacttgtggaaaccatacgcaaaaccgcacgtttcggtgaaaaatatgccgtttccaaatatgatgccatacgtgctgccgcaaaggacgccgctgttttcggacgtgcgcttcaaagcagtgcactccggatccggctgtatatcaaaacctaccgggaataccaggagcatctggacaatatacttgaggacctgcataaggctgttgataagctggaagggacgccggtttatgaccgtatcttccttctccagtccctgcgtggtgtcggttttctcagtgcagccgtcctgatcgctgaaatgggctcctttgacctgttttcttccccaaagaagctttatgcttacttcggcttggatcctgccgtgaagcaatccggcaagttcaatggggataaagtccacatgtccaagaggggttctagccttgccaggcgtatcctgcatatggtggctatcaataatcttaaggtggataaagggacaaaaacaccagtaaatccagttatccacggctattataccgacaaatgcaaaagcaagaagaaaaacgtggctgtcggggctgtcatgcataaaatctgcaatatcatttttgccatgctccgggataataaaccatttgagatcatcactcctcaggaacactgtgagcggtatctggcagcgcagcctgacaaggtacggaacgcagcctaacaggtcttatgaattttaaatagttccacatgggtgggcttattaaagttaccctttttacatcaaatgcttctgaaaaacttttttaacatttttcattttagctattgacatttcttagctggact

SEQ ID NO: 1731 - DNA, 1461 bp, unidentified
  source 1..1461: mol_type = unassigned DNA; note = element_24b7c11
  misc_feature 1..3: note = core
  misc_feature 4..243: note = LE
  misc_feature 244..1446: note = CDS
  misc_feature 1447..1461: note = RE
  misc_feature 23..231: note = bridgeRNA
tccttaagttcgtaggtgcagttacttcgtgagagttacgttgagctgtaacccgggcgggccgggcgaggctgcataaggtttgcccactctcgagtggggcttgaaaggactggccacccgacctgtctggacacctcggaccgctgattgagatctgcgaatgatcgcttgtttaaggaaatgccggcggaggcgtccatcggggccaggccggaacacaagcgaaaacgaggaaatccgatgaccggttcgcaactgtgggcaggagtcgacgtcggcaaagaacaccactggatatgcgtactcgacacctccgggacggtggtgctgtcgcggcgatgcgacaacgacgaagcaacgatccgtgcggtgatcaccgagatcgacgcactcgccgagacggtgtcgtggacggtggatctgaccaccgcctacgtcaccttgttgctgactgtgctggccgacgccgggaaaccggtgcgctacctgtccggacgttcggtgtggcaggcatcgtcggtctaccgcggcggcgaagccaagaccgacgcccgcgacgcccgggtgatcgccgaccagtcccggatgcggtcggacctgcccgttctgcgtcccgacgacgagttgatccgtgagctgcagatgctcaccggccaccgcaccgatctggtcgccgaccgtacccggaccatcaaccggctgcgtcaacaactcgtcgcgatctgccccggcctcgaacgcctcgcgcagatctcctcggacaggggctgggtggtgctgctggcccgctaccagcgaccgaaagcgatccgccgcgtcggtgcggcccgactggccgcgatgctcaccggggccggggtgcgccacgccgaatcgatcgcccgggccgcggtcaccgccgcgaaggcgcagaccgtgcggttgccgggggaagatgtcgctgccgagctggtcgccgaattggcgcaggcggtgatcgacctcgacgcacgtatcagggccgtggacgcggagatcgaggcccgatttcgccgtcaccctctggccgaagtgatcctgagcttgccgggtatgggattccggctcggagccgaattccttgccgcaataggtgaccccgccctgatcggatcggccgatcagctcgctgcctggaccgggttggcgccgcgacccagggattcgggtaaacgcaccgggcgtctgcacacccctcagcgctacagcaggcgcctccgccgggtgatgtacatgtcggcgttgaccgcggtccgttgcgatcccgcctctcgcgtctactatcagcgcaaacgtgccgaaggtaagcgtcccgtccaggccacgatctgcctggctcggcggcgcgtggacgttctctacgctctgctccgcgaccaccgcacctggcaaccgactgtgccggtcaccgcggtggcggcttgacaggatcattgagag

SEQ ID NO: 1732 - DNA, 1502 bp, unidentified
  source 1..1502: mol_type = unassigned DNA; note = element_24bb925
  misc_feature 1..3: note = core
  misc_feature 4..135: note = LE
  misc_feature 136..1167: note = CDS
  misc_feature 1168..1502: note = RE
  misc_feature 1204..1377: note = bridgeRNA
aacatggggtaatcgcggcgcgatcgtccctggccattttataaaatgactgctggcgagggtggttgcccccgataagatggaaaaacgggctctcgattggaaccgggcccaaacatcgaacggagagcaaccatgtatcagtatatcggcctggacgtttcattgaaagatactgcgatctcgatccgacaggatgggaagcggatctggcgtggaaaatccccctcggatcccaagcttttggcgcagctgatccgcaagcacgccccgaacgccagacgcgtcgtattcgagacgggaccgctgtcgacctggttctatcacgccctgacggccgaggggatgccagcgatctgcattgaagcgcggcacgcgcaaaaggtattggacgagacgctcaacaagacagatgccaatgatacggatggcttggcgcaactggccgaaaccggcttctacaaggccgtccgggtaaaggcgttcgacagcatgctgacacgcacgctggttgcggctcgcaatcagctcctgagcatctcgactcaacttagcaaccagatccgcggcctgatgaagaccttcggtcttatcatctccaacggaagaggtcgggtgttcgatggcaatgtgagggaactcctggacggaaatgagggtctggccaagatcatattgcctctgcttgatgcgtggcgcgacatacgcaagcgcgcggccgaacttgatcgccggctgctcgccgtggcccgcgagagccagactacgcagctgttgatgacgattccgggcatcggcgccgtcaccgccgtctcctacgtcgcagcgattgaagatccagaaaacttcaaaacgtcgcgctcagttggtgcccggctcgggctgacaaggcggcgctaccagtcaggtgaggtcgactatgacggtcacatctcgcgacgaggcgacaatcacctgcgtggactgttgtacgaagcagcgaccgtggtcctcacgagaacgaattccaagagcgagagcagactcaaaagctgggggcttaaactgcgtgagcggttgggcttcaagcgcgccgcggtggcggttgcccgaaagcttgcggtcatcatgcacagcatgctcaagaccggagaagtgttcaacccattggctggcgccacagcataaacaaagcgccagccttcttcctcagcgcatcaaatttgatttgaggcactgagcgtccctgctgcggacgtgggttagatcattccgttctgggggctgcagctcattcgagactgcgcataaaacataggaagatctgcctgcgaaacccatcatgcggcggccacgtgtcgaccgcggagacaaccctgctcccggcacaggatcgctctgaagacgacatcgccgctgaggagggcgatccaaacaatcatttgcaccgagctgcctgttccgcaacccggcacggatgccgaatggccagtgccgtcttgacgaatgggctgcgattagac

SEQ ID NO: 1733 - DNA, 1346 bp, unidentified
  source 1..1346: mol_type = unassigned DNA; note = element_24c7d51
  misc_feature 1..2: note = core
  misc_feature 3..86: note = LE
  misc_feature 87..1094: note = CDS
  misc_feature 1095..1346: note = RE
  misc_feature 1114..1332: note = bridgeRNA
gatggggtggatagctcctgctccacccggcgtcgcaatgcgccatactgcagttgttatagactgcttatgagaggagctacccaatgcaggttacaacagtcggcctcgatttggccaaaaacatctttcaggtccacggcatcagcgagaatggcgatgttgttttcaaccaagctctgcgacgagcgcaattgatcgcattctttgagaaacttccaccctgcctggtcggaatggaagcttgcggttccagccaccactgggcacggcaactgagcaagctgggccatgatgtgcgtctgataccagcgatgtatgtgaagtggggtaaatccgatgcggttgatgctgcagccatctgcgaagcggtgacgcgtccgacaatacgttttgtcgcaataaaatctgaagagcagcaaggcgtcttgtttctccaccgcgcccgtgatctgatcgtcaagcatagaacgcagctcagcaatatgctgcgaggtttgctgtccgagtttggcatagtgattgcacaaggggttggcagcgcgatcaagttcgcgaagggcgttctggatggcgacaagccaggcattcccgatgttgcaattgatgtgcttgccaatctgagcaaccaacttgtcgctttgcaccttcgcgtccgttggtacgagatgcacatgcggcttcaggccaagcaagacccgcgcgtgatgttgctgcgcacgatcccgggcgttggtccagtgactgcgtcagcaatcgttgcaacagcaggtgatgccagccagttcaggaacggtcgcgaatttgcagcctggctgggtctgaccccactcaaccgctcaagcggtggcaaggaaaggctgggccgtatctcaaagatgggggaccgatacatcagacggctgctggtcacgggaatgacctcgcgattgaggcagatgaagacacatccggaacgtgctgacccgtgggcgcaagccctgattgatagaaagcccgttcgtcttgccactgtagcaatggcgaacaagacagcgcggatcatttgggcagtcttgaccaagaatgaatattacagaccgcgcactgcataactaagggagaacagaacacacgagacagcaagaccatttaaatgatggagtacagtcagcccgtcagccgagacaccccgtcgaatttcaggggcaaccaatagtccgagaaccggtttgggacttggtttgcggaaaccatcagggccagcggccgtgtgcgccgcgcaaacaggccggacacacgtctgcttctgaccagtgctaaattaggttcaaaaatgtcttgctatgcaggagctatccacacaa

SEQ ID NO: 1734 - DNA, 1380 bp, unidentified
  source 1..1380: mol_type = unassigned DNA; note = element_24ca97d
  misc_feature 1..2: note = core
  misc_feature 3..78: note = LE
  misc_feature 79..1119: note = CDS
  misc_feature 1120..1380: note = RE
  misc_feature 1119..1367: note = bridgeRNA
tgatggtgtggacggccccctacggcatcagttgtgccagaatgaggttgttgcaaatctcagacaagggagccgtccgtggaccagattatccgaattggaatggatacgtcgaagaatttttttcagctgcatggggttgataccgccgagcgggcggtattgcgcaggaaacttcggcgcaacgaggtgctgacgttttttgccgagcaaccaccgacggtgatcggaatggaggcctgcggtgccggacattactgggcgcgggagctgggcaagctcggacacgaggtgaagctgatcgcgccgcagcatgtgaaggcttacgtcaaacgcaacaagaacgacgggcgcgatgccgaagggctgtgcgaggcgatgagccggccgacgatgcagttcgtggcggtgaagagcgaggagcaacaggctgcgctgatgctgataggcgttcgccagcaactgatgaccagacgaacccaactcagcaacgcaatccggggttatgcggcggagttcggcgtgatcacagtaaaggggctggtcaaggtagagccgctgctggcgcagatcgcccgggatgagagcctgccggcgctggcgcgtgagatgtttgcgctgcaggggcgcgactacgcccggttgcaggtcgaactgaaggcggtcgaggcccggctgatggcctggcaccgtgcaaataccgacagttgccgcttggcaaagattccaagtatcgggctgatcggcgccacggcattggtcatgaaagctcccgatccccgactgttcccgtcgggccggcactttgcggcctggatcgggctgacgccgaaagatcattccaccgccggcaagacccggatcggcaagatcacccgcgccggagatgagatgctgcgcagcgtgctggtggcgggagccacctccgtgatccagcaggcgaagaagggccgcggtcgtccgtcgccctggctcgttgcgctgctggcgcgcaagccgccgaagcttgcagcggtggcactcgccaacaagactgcccgcattgcctggaagctgctgacgacgggcgagagttacgatggcgcgcggatgcctgtggcatcgaagctagctgcctaagagatcagccggtcggccaagtcgccaaccggttgagccggagctgcaaaaggagacagatggaaggatcgatcgatccgagctgcgagacaatccgtgggacccattggcctgtaaaggtcgctggcgtgtttggaactcgcgtcgcggaaaaccatcttggccagcggcctaacaaccgcaccagcaggccggacatatggatgcaagcgatccgatcagaccatcgaaaactcttgcagcacgggggccgtccacata

SEQ ID NO: 1735 - DNA, 1621 bp, unidentified
  source 1..1621: mol_type = unassigned DNA; note = element_24cd1db
  misc_feature 1..3: note = core
  misc_feature 4..119: note = LE
  misc_feature 120..1301: note = CDS
  misc_feature 1302..1621: note = RE
agtaattatgtaagaaaagcatagcgcagagtatgcggtcatcctcttttggagggccgaaatttaatttagaggcgataactttaagtttcgcaaaataacaattaaataaccgcgctatgccaaaaacaaaattgcaaaatgggaatgactttagtggtcagaaattttatgttggacttgatgttcacaaaaaatcatgggcagtaacgatccggagccttgggattgaggtatcccattttagccaggatccgggagcagagcgattggatgcttatttacagcgggagtttcccggaggggattattattcagcgtatgaagcgggcttttgtggcacggaagcccacgggcaactatgtaagctcggaataaagaacatcattgtacacgcagcggatattcccacaacagacaagcaaaagaagaataaaacagatcttcacgacagccgggcacttgcagaccatttggagcggggcaatttaaaagggatctatgtactcaaccaggatcaacaggaattaaggagcctgtttcggatgacggaaagcaaggttattgacgtaaccagggcaaacaacaggctcaaaagctttttgatgtattatagtataaagctacccgagaccatctcaaaaaacgagtttttatcgggtaaggcgctggcctggctgaacattgagctgggtagttcgcctggcacgtttaccttacagcaatatatagaagagttaaaatatcagcggaagcaattattccaaataacgaaatccctgcggttgcagattcagtccttgcataaggaaacttatacgaacctgttgacagttccgggcatcggtgcaattacagcaatgggattactggtagagatagctgatttcagtcgtttcgaagcgccggacaaatacgccagctttcttggtttatgcccatgggaggatagttcaggtccggttattaaaaccaaaggtgtgcagccacgctgcaatggtcacttgcgtccattactggtagaagcatcatggaaagcgatagctaaatcccgctcattgtttgcttattacagcaaacatgcaaacaaaagtggtaaaaaggcgatcattaaagtagcacgtaaactggctatgatagccaaaggggttgccacaagcggacagccctacaaagaagattatttaaagaataaacaaaacgaaaagggcctgaaagctgaaaggttttctttaggcatgacagaacagcatataaacaaacagccaggcagtggactacgaatagaaatgcctggctgatatgctttatccggctgtaatatccctggcaggttgctcctcagcagagcccgcttccgtttcttacagcatactaaatttattaaaaaagagtttcagtaacaaaaagcatctcagatcaacattaaagaggaaaacgcacatttgaaaactgtatttaattacattacgaagtattcgtacctcttttaaattcacacaattactggcggcattgatcgcacatagcagtttgagtctttttaattactgaaaataaaactataactttatgtgaatcgaaaaatctcatacatctttgctatgcttttctacatagc

SEQ ID NO: 1736 - DNA, 1477 bp, unidentified
  source 1..1477: mol_type = unassigned DNA; note = element_24d9a31
  misc_feature 1..2: note = core
  misc_feature 3..227: note = LE
  misc_feature 228..1250: note = CDS
  misc_feature 1251..1477: note = RE
  misc_feature 7..228: note = bridgeRNA
ctaatggggggcgaacggtctgatatgtcgggctgggggctgagccgccggccggtgaacactgccgggttcctggggcgttgattcctggcgctagatcgtgtcccggccggttggtgagggaagccttggagcgctcatggggtgtcgtgccgaccgagcactgatccattaggttgccgccgggttcccttcggctctggggtatcggacgatggagggagcggatggtgacgatctttgtgggtgatgattgggctgaggcccatcacgatgtccatgtgatggattccgacggtgtccggttggccagccggcgatttcctgaaggcctcgacggggtgggggcgttccatggcctgttggccgaccatgcttcggatcctttcggggtggtggtggggatcgagacggatcggggcttgtgggttgaggcgctggtggctgcggggtatcgggtgtatgcgatcaacccgatgtcggtagcccgttaccgggaccggcacactgtctcaggggcgaagtcggatgccggggacgccaaggtcctggccgatgtggtccgcaccgactgtcataaccaccgtccggttgcgggtgacagcgacctcgctgagggggtcaaggtcctggcgagggctcatcagagtctgatctgggcccgggggcgtcacaccaacatgttgcgtaacgggttgcgggagtactaccccgcagcactcgaagcgttcgacaatctggccgatcgggacacgctggctgtgttgggtcgggcaccgacccccgaggttggtgcccgtctcaccgtccctcagatccgggcggtgctcaaacgtggcggccggcaacgcaacctcgaacaccgtgcagccgagatctaccaggcgctacacactgaacagctcaccgccccggcccaggttgctgccgcgttcggggccaccaccacagccgcggtggggatcatcaccgaactcaacacccagatcgccaccctcgagaccgaaatgggtgcggcttttgagcagcacccggacgccgacatctacctctccgtaccaggactcggtgatgtactcggcgcccgggtgctcggcgagttcggggacgacccgaaccgctatgccgacggtaagtctcgccgaaactacgccgggacgtcgccagtcacccgggcatccggtaagaaacgggccgtcctggcccgccacgtccgtaaccgtcgcctctatgacgccatcgaccaataggccttctgctcactgtcgaccagcccaggctgccgggtgttctacgaccaacaccgggccaaaggcgaccgccaccaccaggccctacgggccctcgggaaccgtctcgtcgggatcctccacggatgcctcaaacaccacacccactatgacgaacacaccgcctgggcacaccgccaacccgccaacaacagcatcgccgcttgacagttccgcccccggggtgt

SEQ ID NO: 1737 - DNA, 1394 bp, unidentified
  source 1..1394: mol_type = unassigned DNA; note = element_24df675
  misc_feature 1..3: note = core
  misc_feature 4..86: note = LE
  misc_feature 87..1118: note = CDS
  misc_feature 1119..1394: note = RE
  misc_feature 1140..1380: note = bridgeRNA
tgatgaggtggacggcgcccgctcccggcatcgaagtgccatagggtggtcgttgtcgaacgaatcaccatgagggagccgtccacatgcaggttagcacgatcggtttggatctcgccaagaacgtgtttcaggcgcacggcgtcagtgccgaggggaaggtggtgttgaagaagcaattgcggcgcggccaggtgctctccaccttcgccaagctgccgccgtgcctggtcgggatggaagcgtgcgcgggggcgcattactgggcgcgcgagctcaggaagctcggtcacgacgttcggctgatgccagcgcgggacgtgaaggcctatgtgaagcgcgacaagaccgatgcggcggacgcggtggcgatctgcgaggcggtgagccgtccttcgatgcgctttgtggcgctcaagacgcccgagcagcaagggcgactgatgcagcaccgggtgcgcgatctgctgctgcggcagcgcacgcagaccatcaacgcgctgcgggcacacatggccgagttggggctcgtggcggcgacggggaggcaaggtctctgcctgctgttggcgatcctcgccgatgccaaggatgagcgcttgccacaggatgcgcgcgcgagcctgaagctgctggcaagccagatcaccgccttgcaggcgcagatcgacagcctcgacaagcgcctgcatgcccagcaccgccaatgcccggccagtcgacggctggagaccatccccggcatcggcgtcatcggggcgacagcacttgccgcaaccatcaccgatcccaaggcgttcaagtcggggcgcgatctggccgccttcatcggcctggttccgcgcaacaactcgagcggtggcaagcagcgcctgggtcccatctccaagcagggcgaccgctatctgcggcgcatcctggtcgtgggagcgcattccatcctcaagcaggcgcgcacccgtcccgacaagcatccctggctggcgcggctcatggcgcgcaagcccggcaagttggcggcggtggctctcgccaacaagactgcgcgcatcgcctgggccgtcctggcacgcggcgagagctaccgagcgccgacggcgcccgctgcagcgggctagaaggggcttggcgagagggtgagtgaggagatggtgcgtccgttcttcgaactgcgagggtgatgatggcgtgacgtgaagcggtcgagcgtggggtagggaaaacccgtgacaggctctgcgcccatcagcgcgctgccctgattgggacccgatcctgcggatcacatcatggccagcggtcttcaatgccgcagcaacaggccgaatacatgacttgcaccccacttcgcatcaacgccaaattcctcttgcaccgcgggcgccgtccataca

SEQ ID NO: 1738 - DNA, 1372 bp, unidentified
  source 1..1372: mol_type = unassigned DNA; note = element_24e4c04
  misc_feature 1..2: note = core
  misc_feature 3..80: note = LE
  misc_feature 81..1100: note = CDS
  misc_feature 1101..1372: note = RE
  misc_feature 1141..1362: note = bridgeRNA
tgatggtgtggatggccccatcaaacggcatcgcaatgtgcgaaggtgggtttgattacatcccccgaaaggaaccatctatggaacagcctatcacgatcggcctcgatctggccaagaatgtctttcaggttcatggcgtcagcgcgactgggacggtggtgtgccgtcgccaggtgcggcgggcacagcttctgctgtttttctcgcgcctggagccttgtctggttggcatggaagcctgtgccggtgcgcatcactgggggcgggagatcgccgcgttggggcatgaggtccgtctcatgccgccagcttacgtcaaaccttacgtgaaacggggcaagacagatgcggtcgacgcggaagccatctgcgaagcggttacgcgcccgaccatgcgctttgtaccggtgaaatcggcagagacccaggcagctctgctcgatcacaagacgcgggatttccttgtccggcaacggacgcagatcatcaatgcaatccgggcacatatgggcgagttcggcgtcgtggtggcgaaaggcatccagaacatcgagcgtctgatcgccgccgctcggaacgtgcccgacgccgcacgagctgccgtggatatgctggctgatcagcttcaggacacgcagaaccggatcgatgcggtcacagcacggattgccgagagccaggccgatgatccgttggctcggcgtttggcaacggtgcccggggtaggcgcgatctcctcaagcgcctttgctgcaacgacgccggacgtgagtgccttccgcagcggccgtgactatgcggcctggcttggcctgaccccgcgcgcctattctagcggcggcaaggaacggctcgggcggatatcgaaggccggcaatcggtatctgcgacggttactctatctgggtgccatggccagaatcagcgcgcggcggagccgccggacggcagcctcggacgccgcgcccgactggctcgaccgaatgcttgagcgcaagccggtgaaggtggtcgcaatcgcactggcgaaccgcatggcgcggacggtctgggcgctgatcagaggcggcgagagctaccgggcggccttggcatgaagtgatcgagatcggccaccagcgctgaactggcaggccaggagatggtgaggcgcagcgtgaggtgatggcatagagacggtaaaagcggaacggaacacccagttcggaccgaagcgcctttgagcgcgtgccattgatcgggatccgtccgccggctgatttcatcaaggcgcgcagccatgatgctgcaaattgacgccgtatacatggccgcgaccgaccggaatgtcagacccaaacaaagcacttgccaaggggccatccataca

SEQ ID NO: 1739 - DNA, 1532 bp, unidentified
  source 1..1532: mol_type = unassigned DNA; note = element_24f6b81
  misc_feature 1..3: note = core
  misc_feature 4..246: note = LE
  misc_feature 247..1284: note = CDS
  misc_feature 1285..1532: note = RE
  misc_feature 3..220: note = bridgeRNA
cttatattatatttaacgcagttagctactgccaaagcccaagtggtatacttggaataagccactgtggattagttcatttcctccaatcgcttgacgatttccgaaagggtctaaccacagctttttgtttcaattggtaatgagtttgataacgcatagacgttttatctcgtctaaggtaacaaggcaaaaagttcgtggataaccaagtagacttgaaatactatatctggaggtactcccatgctttatgtgggcattgatgtcgctaaaaataaacacgatgttacagccttgaatgttccaggaaaaactgttcttaaaccactcactttttcaaataataaagctggttttgaactcttagatctgtcttttcgacagctcaaccaagactgtctcatcgctcttgaagatactggacattatgcctttaatctactgaacttcctgcatgaacaaggatataaagtttacacctacactcctttgctcatcaaggaatttgccaaatcattatcacttcgcaagactaaaacggataagaaagacgctcatggcatcgctcttaaacttctttctgaccccaatcgtgaacaatttcaacacgataatcggcaagtagaactaaaaatactggctagacatattcatcgtctcaagaaaaaacagtctgattggaaagtacaatacactcgttgtcttgatatcatctttcctgagttggataaaatcgttggaaagcattcagaatatacctaccaactcttgacatgctaccctaatcctcagaaaaggcttgaggcaggatttgataagctgatagaaattaagcgattgaccgcttctaaaattcaggatatcctctcagtcgcacctcgttctatcggaacaacatctcctgctcgtgaattcgaaatcatcgaaatcatcgaaatcatcaaacattacaagaggctcattgacaaggcggaaacatgtgtcaatgacttgatggctgagttcaactcggtcatcacgacggttactgggattgggggtcgtttaggggcggtcattttagccgagattcgaaatattcatgcctttgataatcctgctcaattacaagctttcgctggactggattcttctatttatcagtcaggtcagattgatttagctggaagaatgatcaaacggggttcccctcatctgcggtgggcactcatacaagctgccaaagcatgcgctcgcttttcacctgcttttaaggcctatcttaagactaagttagaataaggaaaacattacaatgtagccatcatccaccttgcaaaaaaacttatccgaaccctgttttatatcctaaaaaagagctgccatttgacgaacaaaaagtgatgtaatttctgaaattaacacaggattacctttgaaaaaatggactttttcaagggctttttgccgtgctctaaaatcatcgccaaatcatcaaattgaaataagaaatagtttagataaaactattgacttttcttatagtttgt

SEQ ID NO: 1740 - DNA, 1555 bp, unidentified
  source 1..1555: mol_type = unassigned DNA; note = element_250426d
  misc_feature 1..2: note = core
  misc_feature 3..251: note = LE
  misc_feature 252..1430: note = CDS
  misc_feature 1431..1555: note = RE
  misc_feature 3..231: note = bridgeRNA
cttgtataatgaacatatagtaaaaattcattatacttttcctttcttagagatttttactataattatcataagacgctgtggattagttttatcacctatagctggactattttaattgaggatctaaccactgtcttatgcttatctgttaattagttagataacgcatgacgttttatatatagcaaggatacatttgcatgagatttgtggaacatggcgtataatactataaaggagttgttcttatgatttatattggtatagatatagcaaaaaacaaacatgattgctgtattatagattcagatggtgttgtttataatgattctttacgtatatccaattcccgtcaaggctttgaattactttattcttcaatactttccattctgcctgacaaggatatttccaacgtaaaaataggacttgaatcaacaggtcattacagcaccgatctccaaaactttttgtatgctaaaggcttcaagctctccattctcaaccctttagctacaaatctcttccgtaaagcccagtctcttagaaaaactaagactgataaaacggatgcattggttattgctaaaatgctcttttctgatgatacaaaatcctattctcctgtatcataccagattcaagagctaaagtcattaaccaggcatagatatcgcttaattggatataggtctaagttgaaaacatctgtcaatagattggtagatattatatttcccgagctgcccgatcttttttggtcaattcatcaatcttcttcctatgcccttttatccatacttccaagcccaaaagatatagctggctgccacctgaccaagctaacaaacatactaaatacagcttccaggggcaagtatggaaaagataaagctatttctctaaaggagtctgctgcaaattctattggcactaactcaaggtctctaagttttgaactcaagcaaaccattaggttaatacagtcagtacaacacgagattgattccttagagcttctcataaaagaaatcgttgttgagatcaattccccacttattagtattccaggaatttcatataccctggcagctataatattggcagaaatcggcgatattaaaagattcaccactccctgtaaactcctggcctttgccggattagatccctccacctatcaatctggaaagtacactgcatcccatacacccatggtcaaacggggttctgcctaccttagatgggccatacttatggctgggagaactgtttcaatgagagatgccactttctctgcatatttgtcgaagaaacgctctgaaggcaagcactattatgttgccatgagccatgttgctaaaaaattgatacgtataatatttcatcttctaaagaccaatgcaacttttgctccacaaatataaacttatccataaaaattaatatttttcaaaaagcaattttccattgctctttttgtcatgctttcttttttaaattaaataactataaaaatcttttaatttttacttgacttcatatagttagt

SEQ ID NO: 1741 - DNA, 1365 bp, unidentified
  source 1..1365: mol_type = unassigned DNA; note = element_250fc27
  misc_feature 1..2: note = core
  misc_feature 3..75: note = LE
  misc_feature 76..1101: note = CDS
  misc_feature 1102..1365: note = RE
  misc_feature 1077..1353: note = bridgeRNA
cgttggggtggacgccccctgacggcatctatgtgccatattggaggtgttgaatcaccagagcaggaggcgtccatggttgaggttagcacagttggtattgatctggcgaagtcagttttccaggtccacggttcggatcgcagcggtgtggttctattccgcaagaagctacgtcgggatcagcttttaccgttcatggcaacattgccgcgatccttggtcgcgatggaggcctgttcgagcgctcattactgggcgcgcgagatcgccgcggtcgggcacgacacaaagcttatcccgccggcatatgtgaagccgttcgtcaaacggcagaagaacgacatggccgacgcagaagcgatctgcgaggcggcccaacgcccgacgatgcggttcgttcagggcaagagcgcgcaggcgcaggcgtcagcggtggtgtttcgcacccgcgatctcctcgtgcgccagcgcacccagctcatcaacgcgatccgtggccacctgactgagttcggttacgtggttcgtcagggtgccgggcacgtcggcaagctggttgaaattatcgccgatccacaatccgacatcccggccgaagctcgaccggtgctggcgatcatcgcgcaaagcctcgaggggcttcaggcgcagatcgcacagcttgatcgggaaatcgccagtcgtgcaaaggctgatccagtagccaagcagctgatgacaatccccggtgtcggacctgtcatcgcgactgcgctggtagcgctagcgcctgctgctgggactttccgtcgtgggcgcgactttgctgcctggctcggcttggtgcccagacagcactccagtggcgggaaggaacggctagggcgcacgaccaagatgggtgagcgcagcctacgtcggttgctgatccttggtgccagttcggcaacgaaggttgcagcgcgcaatcccgaaaaggccagcgcttggctggtcggcatgctggcgcgcaagccacgaatgttggtgaccgtcgcgttggcgaacaagatggcgaggatcgtctgggcgctgatggcgcacggaggaacctacagagctccggccgcggcggtgtgatcgccacggcttgaggcgtcagggacgcaagggaaggtcagtagagaggtatggcgcaacggtcagaagacgggatcgggataaccagtgtatggtccaagcgcctaaagcgcgcaaaagcggtttggacccgatccgcgatctccatacaggccagcagccccacaataaggctgcgtcaacaggccggacacacggaagcacctgaacctgagcgcaaaaaatctctcagcacccccttgaatccgatggggcgtccacaca

SEQ ID NO: 1742 - DNA, 1431 bp, unidentified
  source 1..1431: mol_type = unassigned DNA; note = element_2515e0e
  misc_feature 1: note = core
  misc_feature 2..224: note = LE
  misc_feature 225..1244: note = CDS
  misc_feature 1245..1431: note = RE
  misc_feature 15..236: note = bridgeRNA
ctgattgagactttgggcagacggtacgactgattcgtagcgtttagaggtcctgacgggctggctcccttaagtgcctgccgccggtccaaccggctggctttcttacgagatgccactcgtctggaccttgaccgcgaagtggctcaaaagaggagtgtgtgcaccagatccaaatcaggagtgccctcgcggttgcccaaccaacccaagaggaggtgctcatgtcggtgatcatcggggtcgatccccacaaggcgagccacacggcggtggctatcggtggcgatgaacgcgaggtggccaaggtcaccgtgcgggcaacgtgtcagcagacgcccaagttgctggcctgggccgagccctttgcggagcgcacgtgggccatcgagtccgccggtgggctcggttacctgttggctcaacaactcgtcgatgccggcgaagtggtgctcgacgttccacccaccttggcctcgagggtccgggtgctcagcaccgggcgatcggagaagaacgaccccaacgacgcgttctcggtcgccatcgccgccttgcgctcgaagaatcttcgttgggtcgagcgggccgaccacaccgagatcatgcgactgctggccaagcgcaatcacgatctggggaggctgcgggccaagctcatctgcaggctccacaacgcgctggccgagctctcacccggcggaatcgccaaggaactctacgtttctgatgccaaccggctcctcggctccttcgagccggccacacccatcgagcacatgcgccaccagctcgcgctcgagctcgtcgatgacgtggcgcgcctcgacgagcagatcaaagagtcgcatcggcgcatccgcaccgcagtgcgggcgtcgaagacctcgctcaccgatctcttcggtgtgggcccggtcctcgcctgctcggtgatcggttacagcggcgacgttgggcgattcgccaaccgggacagcttcgccgcctatgcggggaccgctccggtcgagcactcctcggggggtcgggtgttccatcgtctctcactgcggggtcatcgtcgtctcaacaacgccatccacatggtggcgatctgccagatccgtcaaccacattcggaaggtcgggcctacttcgagcgcaaggtcgccgagggcaagaccaagcgagaggcgctgcgctcgctcaagcgccacgtgagcaacgccctctatcgccagctcgttctcgacgtccgatagggggtccgggaggacactcagggacgactccatgcctgcgtgaccggctcttcaccctgtgcgaccggctcttcggcgaagtcactcccgaacccagaaaaatcctacgccgtcgtgcccctgtgtgacgggtcgattcgtcgcgccctgaagctctggaaataggggtcttgactcaaagaggatt

SEQ ID NO: 1743 - DNA, 1849 bp, unidentified
  source 1..1849: mol_type = unassigned DNA; note = element_2519b7a
  misc_feature 1..3: note = core
  misc_feature 4..245: note = LE
  misc_feature 246..1463: note = CDS
  misc_feature 1464..1849: note = RE
cttatatgttactattttcccagaccctctcgacgaagggtccgcagggaaatcctgctggataagcactgccggggaaagactccttgctccacacggcttgaccgatagggaaagatcgttcttcctctggcagctttcctgggccaatcgatgattggagggacgtgcttcgagcacccggtatagaaggacccgatccccccaggagttgctctcgaatcgctagaaaaggaagccaccgcatgtggtacgttggactggactgggctgacacccatcatgacgtggaggtgccctatctcgcgggcaagcgcgtgggagtacggcgctttgcccatagccatgacggcttgaacgagctgcaagcgtttctgctcggcatcgcggcttcgcccgaggacctggcgtgcattgtcgaaaccaaccacggcttgctgatcacgttcctgctggaagcgggcatcccggtctatccggtgaacccgaagacggccaatcagctgcgcaaagccgccggagcgaagaccgatcaaattgatgcccatttgttggccaaactggggcgcttggagctggcggaactgcgtcgcttggagcccgatagtgcgctcgtgcaggaattgaaaacgctcacccgtgatcaggatgcgctgatccagacacaaacgcgcctggtgaaccagttgacggcgtgcctgaaggagtactatcccgccgcattgcagctgtttgccaaagggaagcctcgctccacgctggtgtttttgcagacctatcccacaccgcaagccgcgcaggccgcctcgctcgcggagctcacggccaccttgcgcgcaggcaagcaccccaacccgaccaaggctgcgccgaagatctttgcggaactgcaccgtcctcagttggtggcaagcgaggtcatggtgcgcgccaagtcgcgcttgctgctgtcgctggtcaaacaactgctggtcgtcatcgaggagatcgaaagcctcgacaaggccatccgccccctttttttgcgccatgacgatcaggagctgtggaggtcgctgccgcgcgcgggcaagcacctggctccccggaggctttctgaatggggcgatgatcgcggtcgctacgccgatgccgcaagtgttcagacgttggccggaaccgcacccgtgccgttccagagcggccattacgccaaagcgcacaaacgcttcgcctgtgtgaagccactgcgcaacgtcctgtaccagtttgcctggcaatcgacgcggcaagaagcctgggcgttggcctactaccaacgcaagcgagcgagatgcgggaaaagccacagcatggccgtgcgcgccctggccaacgtgtgggtgcgcatcatctatcgcatgtggcagagcaagaccaactatcagaccgtgacgtttgaagcggcgcggctggctcatgcacctcggcaacacgtcgcctgagtccaggtctcgcctgcccatcacgccccagtgggtacgctcagcactgcgaggtccctcgccagtgcggggggagtgtgcgccaacggagtcgcccaagcggttcccgatgcgtctgctctgccgaccgtgaaccgttcctgctgaggtccttgtcactccaacgtctgccgcagcccgacaccgcgttcccgactcccggtgtgggttgctgctctcagaccacgccgagtcaaggccgcgcaggaggtgggcaggtcgggggcgggcgcgctcgtcttggccttgaccggtgtggtagacttgcaccaccacacgggaggcagctttactcacgctcaccttgcttctccctttctcggtttttgactcttgacatagagggt

SEQ ID NO: 1744 - DNA, 1476 bp, unidentified
  source 1..1476: mol_type = unassigned DNA; note = element_253007f
  misc_feature 1..4: note = core
  misc_feature 5..253: note = LE
  misc_feature 254..1459: note = CDS
  misc_feature 1460..1476: note = RE
  misc_feature 1..227: note = bridgeRNA
ccccgttaccttcttcgtgccctcgatgatgggggtgctggtcaccaggtccggtatgactctctgcccctgtcgttgatgatccggggggtgttgtcgccgggcctggtggcgtcggtgtgaccgctgatagggacacggcccgccttcggtgaggtctcttcgtaacgtggctgccggctgctgacgcccgacccgtcctgtgcggggtggccagcggattatgagtccgtcggtcaacgaggaggacaggatgcacgggctacccgaccgcacctacgcggtctacctggggctggacgtcggcaaggagaaccaccacgccaccgccctggccccggacggaaaacgcttgcacgacaagcccttaccgcaggacgaggacaagctccgggccttgtacgagcacctggccacgcacgggcctgtcctggtcgtggtcgaccaacccgcctcgatcggggccctgcccgtcgcggtcgcccgcgccgcgggcgttgccatcgcctacctgccgggcctagcgatgcgccgcatcgccgacctgcaccccggcaacgccaagaccgacgcccgcgacgcctacgtcatcgccgaggccgcccggaccatgccgcacaccctgcgccgggtcgacatgaacgacgatgccctggccgacttggaagtcatcgtcgggttcgacgacgacctcgccggtgaggtcacccgcgtgaccaaccgcctgcacggcctgctcacccagatccaccccgccctcgaacgagccctcggcccccgcctgcaccacaaagccgtcctcgagctcctcaccaggttcggcggcccgtccgggctccgggccgctgggcggcggcgcctgaccaccatcgccaagccccgagccccacgctcctacgaacggatcatcgacgcgatcatgaccgccctggacgcccagaccgtcacggtgcccggcaccaaagccgccgaggtcgtcatccccaagctcgccgcacagctcgccaacctgctcgagcaacgcgctgccgtggccgagcaagtagaggagatcctcgatgcacaccctcttgccccggtcctgacctcgatgcccggcgtcggcgtcaggaccgcagcaaggatcctgctcgaagtcggcgacggaagcgccttccccaccgccgggcacctcgccgcgtactcaggtctggcccctgtcacccgcaggtcagggtccagcatccgcggcgagcaccccagcaggtcaggcaacaagaacctcaaacgagccttcttcctgtccgcctttgcgtccctgtccgaccccaccagccgtgcctactacgaccgcaaacgagcccaaggcaagaagcacaacgccgccctcatctgcctagcccgccgacgctgcgacgtcctgttcgccatgctccgagacggcaccacctaccaggcgcgagccgctaccgcggcttgacgaaccccatagggaca

SEQ ID NO: 1745 - DNA, 1440 bp, unidentified
  source 1..1440: mol_type = unassigned DNA; note = element_2537ca6
  misc_feature 1..2: note = core
  misc_feature 3..125: note = LE
  misc_feature 126..1157: note = CDS
  misc_feature 1158..1440: note = RE
  misc_feature 1193..1393: note = bridgeRNA
agatggggtaatcggccggaccagcttgtggatagctgaagatttatgggtgctgcgcttcaggctgatggtgaaacgaggtccgttggtatgacggcctcaagcatcagaaggagaagcgcagcatggaccattttgctggattagacgtatcggtcaaggagaccagcatctgcattgtggatgacacgggcaggatcgtgagggaagtgaaggtagcgagcgaacctgaagctctgctgaaggttctggggaacccggcctaccgcttcaagcggatcggactggaagccggaccgctgtcgcaatggctgttcagcgcgctggccgaagcaggcttgccagtgatctgtgtcgagacgcggcacatgcgggcggtattgcaagcgcagatcaacaagaccgaccgcaacgatgcgcgcggcatggcgcagatgatgcgagcgggactgtatcgcccggtgcatgtgaagacgctacgcagccagaaactgcggatgctgctgacccatcgcaaactgctgcagtccaaggctatcgccatcgataacgacctgcgcgggactttgcgtaacttcggcctcaaagtgggcgtggtgggaacggtgaagttcgaggcccgcatcaaggagcttgtcgaaaacctccctgatctggctgagttagtcgaaccgctgctcattgtccggcggacgcttcgcgagcagatcggcattcttcatcgccgcttgctggccatcgtgcgggacgatgaggtgtgccggcgcctgatgacggtgcctggtgtcggccctgtagtggcgctgacctaccgcgctaccgtcgatgtgcccgcacgcttccgaaactccaaggcggtcggggcggtgtttggactgacgccctccaagtatcagtcaggcgagatcaaccgaaccggtgcgatatcaaagtgcggggacgagatgatgcgggtgatgctctacgaagcggctcagatcatgctggtgcgttcggcgaagtggtcctggctcaaggcttgggccatgaagatcgtcaggcaccgcgggatgaagaaggcaatcgtggcgctggcgcgccggttggcggtgatcatgcaccgcatctgggttgacggcaccgagttccggtggacccgggaagttgcagcagcgtgagagccgcgcaggatcaaacccgataggaggaaacccgagatccacccagcggtggaaggatgtccctcgcgggacgatggatgaggtgagttcgtacttccgcttgaacctgccgtcacactgacggcaaggtcgcccaaaagattgttccgcctcgtcttcgaatcccatgatggaagggccttggtgccgattccgaagagaagcgcgagcccgtgagagacatcgacactgcagcggtggatagcctgaaagtgcttgacctcaaccggccgattagaga

SEQ ID NO: 1746 - DNA, 1326 bp, unidentified
  source 1..1326: mol_type = unassigned DNA; note = element_25399f5
  misc_feature 1..2: note = core
  misc_feature 3..190: note = LE
  misc_feature 191..1168: note = CDS
  misc_feature 1169..1326: note = RE
  misc_feature 30..200: note = bridgeRNA
cttgtgtctggaatttccattataggctccgctggcgggcggctgtagcaagcaaccgcccgccgcggaggtgagaccgatttgccccaaggtcacgagaccgcggatgagcctggtcccctgcgcgtcttcctgaacccgaacagttgcatgggccttgagcccgcacgagcaaggaagggattggaggatggcacattctcacgacgttgtcggcatcgacgtttccaaagggaatctcgatgtttatgtcctggtgcatcagcagcttcgcacggttaccaacacggcggccaaacacgccgagttggcgagctggctcaagtcgcttggcgtacgggtggctgtgatggaggcttcgggcggctacgagcaggccgtcgccggcgctctgcggcgcgcaggtttcgaggtgcgcgttgttgatcccaaacgcgttcgccatttcgccaaggcggccggccggctggccaagaacgatcggatcgatgcccgcatgatcgccgagtttggcgcggttttcgcggtcgttgagcaatgcgaggtccccaccgatccggcacgggagcacttggcgagcctggtcggtgcccgacaagctctgatcgagcatgagattgggctgcggaaccagatctccgctgcccccgcgggcgcggcgcggctcgcgctggctgcggtcttgaagccgatcgccggtgcgatcaagaagttggaccggttgatcgccgcgacgatcgccgcgcacccgccctttgccgcgctggccgcccggctcgacacggtgccgggcctcggcccggtggcgatcgcgggcctcattgcctggcttcccgagctcggccggcttgaccgtcgcgcgctcgcggccctggtgggggttgcgccgttcgacgacgacagcggcaagcgcactggccgacgctccatccaaggcggccgacgcaagctgcgcaatatcgtctacatggcagggatgggcgccgcgacgcggcacaatccggtgctcaatgcctattacacggcactcatcaaccgcggaaagccgcccaaggtcgcgatcgttgcgtgcctgcgcaaattgctcacgatggtcaacgctatggtggcacagcagaaggattgggagccgaggctcgcgaccggtccttcggcgtgcgccgtatgatctgatcgcatcacgttggtcggcgctcttggcgccgaccacttgccagtccaaacgaactggcggcgcggccgggtcaaggccgaagccggcggagccgggcgcgcgccagcgcgagccttgacgcggccgggctgccagttcactcaagacagttg

SEQ ID NO: 1747 - DNA, 1400 bp, unidentified
  source 1..1400: mol_type = unassigned DNA; note = element_25440c0
  misc_feature 1..2: note = core
  misc_feature 3..85: note = LE
  misc_feature 86..1126: note = CDS
  misc_feature 1127..1400: note = RE
  misc_feature 1143..1387: note = bridgeRNA
tgatgaggtggaacggcccgctaccgcagcatcagagtgctaaaacgtggtcgtttattcaacgccacaaaataggagccgttccgtgaagcatattaccactatcgggctggatttggccaagcaggtttttcagatccacggcgctgacgtcgaggggactccaatcgtcagccggaagctccgccgttccgaggtgttgcggttcttcgagaagcagccaatgtgtctggtcggcatcgaggcctgcgggggtgcacattactgggcgcgcgagatcgcggcacttggtcatgaagtgcggttgatcccgccggcctatgtcaaaccgtttgtgaaacgcggcaagacagatgcggccgacgctgaggcgatcagcgaggcggtgacccgcaagaccatgcgcttcgttcagatcaaatcggccgaacagcaggctgccgcgatggtgttgaagacgcgtgggcttctggttcgccagcaaacacaggcaatcaatgctcttcgtgcgcatctgtcggaattgggcatcgtcgccggtataggcacggcgaagattgctggcctgatcgagatcgtgcgcgacgagaccgacgcccgcctgccgaaggcggctcgcttggccctgtcggccctcgccgatcagatcgaggcgctgaaggagcaggtcgacaagatcgagcgggaaatcgttgccgaggcgaaacgagacgaggatatgcgacgactggctacgataccgggtgttggcgccatcacggctgcaaccatcaaggcgcttgttccggaccccggcgggttcaagtccgggcggcactttgcggcctggctcggcctaacgccgaaatctcattcgagcgggggcaaggagcggctgggaggtatatcgaagatgggcaacccggagcttcgttccctgctggtgctcggcgcgactaccgtcctgcgatacgcgcggggcaacgacaaggcgccgaaatggcttgccgcgcttctggcgcgacggccgttcaaggtcgtcgctgtcgcgctcgccaacaagatggcgcggattatctgggcgctgctgaacaagggcgggacatatcggaggctgacggaggcgagcagcgtggcaagcgcttgagccgaaaacgacccggacgagctgaccggcgcggtagccggcagaggcgaggtgcacgaaacagacgatgattccatgggacgaatcccgaggcgagagaggccgaaacgcccgatgcgcacacagcgcgccgtaatgatcagccactcgcatcgcggacttcatcgaggccagcggttacatgaccgcgctgaaaggccgaacatatgaccgcaccgttcccgcgtgatcagccgtctgaaaaatgcacttgcctaaagggccgttccacata

SEQ ID NO: 1748 - DNA, 1495 bp, unidentified
  source 1..1495: mol_type = unassigned DNA; note = element_25454f5
  misc_feature 1..2: note = core
  misc_feature 3..454: note = LE
  misc_feature 455..1474: note = CDS
  misc_feature 1475..1495: note = RE
  misc_feature 7..241: note = bridgeRNA
ctaatggggctgcatccggtgatctccagcaggatccgggtgtccgagccgccggcgggtgagcactgcgtgtcctgggtccgatctttgaggcccacgcttagaccgtgcccccgccgccgttgcgcgaggagaagcggatggccggtgggatggcgtgccacacgagcactgatccattaggtagccgcagccttctcctccagtgttcggactggtgatgccccggaccggaggaggccgctgacggtgctgttcatccggaacgactgggccgaggcccatcacgacatcgagctcgtcgacgaggacggcaggcggctggcccgccggcggctgcccgaaggagtcgaggggctggcggcgatgcacgccctgatcgccgatcacctcgccgaggacgccgacgctgaccaggtcatcgtcggcgtcgagaccgaccggggtcggtgcgttggtcgccgccggctacacggtctatgcgatcaatccgctgcaggtcgctcgctatcgggaacggcacggcacctccggcgccaagagcgaccccggcgacgcgcacgtgttggccgagctcgtccgcctggaccgggcccatcaccggccggtggccggcgattccgcgctggccgagcacgtcaaggtgctcacccgcgcccaccagtcgctgatctggtcgaggcagcggcagactaatgcgctgcgatcgatgctgcgcgagttttatcccggcgcgctggcggccttcggcgacgaactggctggtcgggacgcgctggccatcctggcgatcgcccccgcaccggaggccggtcgccgtctctcgcagagcaagatcgcggcctcgctgcggcgggccgggcggcagcgcaacctcgagcccaccgccgagcgcatccagaccgcgctgcgcgctccgcaactggaagcccatcccggcgtggtcggcgcctacgccgccgcggtgcgctcgctggtcaccgtgatcaccgcgctggtcatccagaccgctgtgctgcagggcgaggtggaggcgggttttggccagcacccggacgctgagatctacctgagccagcccgggctcgggccgatcctcggcgctcgggtgctcgccgagttcggagacgacccgcaccgctacgccgatcccaaggcccgcaagaactactccgggatggcttcgatcacccgcgcctcgggcaccaagcggctggttctggcgcgctacacgcgcaaccgccggctcgccgacgccctctaccgccaggcgttcaccgcactcggcgtctcacccggagcgcgggcctactacgaccgccagcgcgaccgcggcgcctcccaccaccaggccttgcgggccctggccaaccggctcgtcagcatcctgcacggctgcctgcgccaccacgcccgctacgacgaggcaactgcctggcacaccaataccggcgcagccatcgccgccgcttgacgacttgcgaccgtgggatgt

SEQ ID NO: 1749 - DNA, 1560 bp, unidentified
  source 1..1560: mol_type = unassigned DNA; note = element_2554cda
  misc_feature 1..2: note = core
  misc_feature 3..262: note = LE
  misc_feature 263..1438: note = CDS
  misc_feature 1439..1560: note = RE
  misc_feature 17..239: note = bridgeRNA
ctcgtataataatgttgtagttaataagtaactacataatatatttttttaatctcatattttatgagataattaacctaacagatagaggttgtagttgacctccttgaagttttatcttccttagtaagactgacacctcttctttacttcaaatatgcgtatgagctggatagtacttgttactgtatatctaacgaggttgcatgatttaaagtttgaggtttcctctatctgaattttatctaagataggtgattttatgtattacattggtattgacatcgcaaaacgcaatcatgaagtttccatcattgatgctgatggtaaaattttaagtaaaagtatctctattgctaattctcaaaaaggtttagatacttttaataactaccttagttcttttaatgttacttctgaaaactccataataggtatggaatctactggacattattggcttaatctttactcatctttagttaatttaaatttcaatgtcttcgtcatcaatcctattcaaacagatgcctttagaaaaatgtatattagaaagactaaaaatgattctaaagattcatacattattgctcaaattatgcgctttggcgaattttcatcttctagtatctctgatgagaatatatttgctataagacaactgtcaagataccgttcatctcttgttgatgaatgttctaactggaaaagaaaagttatcaccatattagatcaagtatttccagaatattcagatttgttttctgacacatttggagttacttctaaagaagttttatcaaaataccctttacctgaaaatatgctagaagtatcaacaaaagaattgacttcacttttaaataaagcaagtaaaggtagatttggaattggaaaagcgcaagaaattaaagaatatgctactaaatcttttggaatatcttttgcaaaagaaactttttcattccaaataaaacagataattaatcaaatttctttcatagaatctcaattgaaagaacttgaaaaagaaataacaaatatcttaaaaactttaaattcagagataactactatcacaggtataggagatattttaggtgcatctatacttggtgaaattggagatatctcaagatttgaaaaagcatctcaattagttgcttttgcaggattagatgtagccattaatcaatctggagaatttacagggacagaaatgaaaataactaagcgaggttccccatatttaagaagatcaatatggatagctgcaacaattgcttgtttcaaagatccagctctatcagtttactataaaaaactaattgatagagggaaaaaacatctaacagcagtaggtgcagtagcaagaaaaatgtgtaacattattttttctgtacttaagaataagaaaccatatactccaaatatttagcaaaagcaaaatatagaaactttttaagcctaatcttatttaggttattttgtgctacaaaattaaataagttaaaaaattttaaattttttaaaaaaattacttgacatttaatagctggt

SEQ ID NO: 1750 - DNA, 1537 bp, unidentified
  source 1..1537: mol_type = unassigned DNA; note = element_255c9e6
  misc_feature 1..3: note = core
  misc_feature 4..242: note = LE
  misc_feature 243..1421: note = CDS
  misc_feature 1422..1537: note = RE
  misc_feature 8..223: note = bridgeRNA
tttcgtattattaggtcagccagaaacttctggttggcctatttttgtagttgttttaagatggcggtagccgggagaacgtggatgtccttggggagcataccccgtcaaaaaaactgttctcctactgcctccaatgaccatgtttgagctggtaggggcaatggaccccgcatcacaagcgaagctatggggttggaaccatcgtaggattgccggtaaataataatcaggaggttgttatggaacccgtagtgggagtggatgtagcaaagggattcagtgtggtacaagcatttctaaaacggaatgagccttgcgggaaagcgatgagcatctcgcatgaggaaggcggatttgagcaattgggggagattctagcagagctgcagacaaagacaatgcatcccccggtcgttattcttgaagcgacaggccactaccaccgtggacttgtcgcctatctagagcgcagcggatggacgtacttcattgtcaacccgttacaagcaaaacgagcgaaaggcacacagttgcgcaaggtaaagacggatgctgcagatgcatggcacttagccgaaatgtattaccggggagatgttacaccgcatcggacttgggatgaggggtttacggagctccaacatgtaaccagacaacatgagtttgtgacggggatgtttgtgcaagcgaagttaaacatgagggccttgctggatcaggtgtttccgacatacgagaaggtctttcgcaatctattctccgtgacgtctttacacgtattggcctgttgtctggaaggtcaaatcgagaatcttcatgcagtcatccaaaaatgtacaaggagttcacattctcagaagtggacggaagccaagatggagcaaatgaaagaagcattatcttactggaaagaacagtcaaggagtcgtgctcaaacctccgttttacgtggtatggtcaacttagtccttgctttttcagaccaactgagcgaactagaaaagcagatggatgagctggcaacgtgtcttccagaggtcgaattagtgaagagtataccgggaatcggggataagcttgcagctgcaattgtcgcagagatcggtgatgctcggcagtttaaagaagcaaaacaacttgtggcttttgcaggtttagaccctggaatattcagctccggcaaatttacggcgactagctcccgaattacaaaacgtggctccaagagacttcgtcgagcgttatatttagccgtacagtgcgggattcgaggaagaaccaatcctagaatccgagactattacgataaaaaaagaaaagagggcaagccctacaaggtggttgtgatcgcctgcgccaacaagctactccatcacgtatacgccatcctccgtaaaaagcagcccttccaaccataatacccataattatccataaccttcacgccaatgaaggttctttgtcatgctttaaaaatagtataccaagaagaacgcaaatcaccaatacaaaatccttgacaagtattagctgg

SEQ ID NO: 1751 - DNA, 1381 bp, unidentified
  source 1..1381: mol_type = unassigned DNA; note = element_255f5be
  misc_feature 1..2: note = core
  misc_feature 3..81: note = LE
  misc_feature 82..1113: note = CDS
  misc_feature 1114..1381: note = RE
ggtttatcataaggcggtctcctcctgcgggtgtagaaaaggcgctcgtggcgcagacaccggcagcaggaggagaccaagatgatctacgtaggcttggacgtgcaccagggtttttcgcgggtaggcgtgtttaatcctgccacgggggagctggcggacctggggaagatgagcaacgagccgagtcaggtagccgcgcagctggcgcggatagcggggcccaagacggtggtgctggaggcgggtcgcagcagccaccacatggccgccctgctggagccgttggccgaggaggtgtggatggtggacccgggggcggtgcgcaagctgcagcggcgggtggccaagacggatcggcgggacgcggccgccctggcctattgggcggccaaaggagccctgcagcccttgtggcgaccggatgctcagacgctggacctgcgcgaactgacccggggcaaaaccggcctgacgcggctggtggtgcgggtgcgggtgatgattcgcgccttgttggcccggcacgggtacgagtgcccctaccgggatctgctgggcctcaaagcgcaggcctggctgggggaagtgcagttgcccgactacgcggggctgatgctgaccacgctgcgggagttgctgcccctgctgcaggcccgggcccagcagttcgaggcgttggtggagcaggaagcgccagcctacgacccggcccggcggcttatgactatccctggcatcggcccctttctgggcctgagcctggcggcggagatcggggaggcccggcgcttccccacggccaatcatctgcggggctactcgggcctgaccccgcgggtgcaccagagcggggaaaaggaaagccggggcccgctgaccaagcgcggcaaccgctggctgcgctacgcggcggtgctggccgcgcagcgcatggcggccatgcgccaggccgacccccggctcaaacgcactttcctgtcggtggcttttcgccatggccacaacccagggaaagtggcctgtgcccgtcgcttgctggacctgatccatcatctgctctgtaaaggcgaagactaccgcccgcccgctgcgcgcggggtgaaggtttgagggggcactctccagagcctgcctgctcgacgctagagcctccttcggtttgagaggcccccagcgaccaacgacatcgtgtgcgtcgtcagcaccaatagaggcctgtctgctcaagacctgatgcggtggttggtcgtgtcactatggcaccgccgggcggctcgcccgcgccctgcctaagaaggggcgacgcgcggctcgccgcccgcaccgacaacgaacaacggcccgcacctgcgggagcccttgacgcccgtcttataga

SEQ ID NO: 1752 - DNA, 1312 bp, unidentified
  source 1..1312: mol_type = unassigned DNA; note = element_256071b
  misc_feature 1..3: note = core
  misc_feature 4..216: note = LE
  misc_feature 217..1182: note = CDS
  misc_feature 1183..1312: note = RE
  misc_feature 36..202: note = bridgeRNA
cattgtatattatttattcgttataaatttgcataaactttcaacatcagagtgtggaataaggccgagtttccattagtcatagaaactgttgattatgttccgtccccacactttgtacatcagaaaccggatagttcaatgggcttttaagaccccgtattcgcaatgatggctcacgatgtatagatagatgttatttaaacttatatgactatgacttacgttggaattgatgtcagcaagacgacttttgtagttgcttattcatcagataaagcaagtaggacaaaaacattcaagaacaccgtaaaaggtgtccatgagttcatccaaactctttcagcagccgaacatcattgcgtgctggaagccacaggcaattatagcgcgctactcgtttacctgctttccgaagccagtattaccgttagccttgaaaatccgttgaagataaagaacttcgcccgcgtgatgctttccgttaccaagacggatgaaacggatgcgcgcctgatagccttgtatggcgagaagatgcaacccgctccttataaactccgcagcgactccattctcaccttgaagcagaagcggacggtcatacgccaactcaagaaacagctcatagccacccgcaacctgaaaggttctatggaggcacttccgttctttgacccaaagtgcaggaaggccattgaaaagacaatcgctttccttgaaaagcaaatcaaggggctggaagaggaactggcttctttggtgcaaagcgaatacaagaagcagatggacttgcttacctcaatcaaaggtatcggcgttacgctggcagccgcacttatcgtagccaccggcgggttcacctactttgataacgccaaacaatttacccgttatctgggtctgtcacctacttaccaacaatccggtacgtcagtcaatgtcaaaggtcacatcaaccgaaacggggattcaagcctaagaagccaactttatgtagcggcattctcatcactcaggtgcaattctgaatgtaaggcgtgtttcgaccgtttgcggtctaacggcaaacccggtaaggtggcggtcattgctgtcgccaacaaactcgtcaggcaagccttcgcggtggtcacgcatggaaagccgtatgtcgatgggttcaagtccgaaagactataaatactcatctgcggagggaacgccatgcggcaaggggctgagcagtcagccccgacgagctttccatgcacgataaattgcataactatgctaattatcgttaaccatattcgattttcttattatagtt

SEQ ID NO: 1753 - DNA, 1405 bp, unidentified
  source 1..1405: mol_type = unassigned DNA; note = element_256ee3b
  misc_feature 1: note = core
  misc_feature 2..80: note = LE
  misc_feature 81..1118: note = CDS
  misc_feature 1119..1405: note = RE
  misc_feature 1116..1393: note = bridgeRNA
atgttggtgtggacggcccccgaacggcatcgaaacgtgccagagtgagtcgttaagatctcaaacaaaggaagccgcccatggaaaagattattcgcatcggcatggatacgtcaaagcatgtttttcagctgcatggcgtggatgccgctgagaaaccggtcttgcgcaaaaagctgcgccgcaaggaaatgatcgacttcttcaggatctgtccgccaaccgtgatcgccatcgaagcctgtggcggctcccatcactgggctcggctgctgaccgacctcgggcatgaggtgaagttgatcgcgccgcaactcgtgaagccttatgtcaagcggagcaagaacgacgctgcggacgctgaggcgttatgcgaggcgatgagccgcccgacgatgcggttcgtaccggtcaaggcagccgatgagcaggccgccaccatgttggtcggcgtcagggatcgcttgatccgcaatcgcacccaactcgctaatgcaatccgaggttacgccgctgaattcggcatttccgtcgccaagggactggcgcatattcccttgctgcttgaacgaacacagtccgacgagaccgtgccggagctggcacgggcattgttcgcgagccaggcggaggaatacgcccagttgcaagaaaagattacggatgtggatgccaggctcatggcgtggcagcgagctgacgaacgctgcaaatgtctcaatactattcctggcattggtccgatcggcgcagcgcttctgatcatgaagacaccggcgccagaactcttccgatccggccgccaattcgcggcgtggattgggctgacgccaaaggatcactcgaccggcggcaagctgcgactcggacgcatcacgaaggcaggcgatgaggcattgagagcggtgctggtggccggggcgacgactgtcattcagcatgctcgccgacacggcaagacttctccgtggctggccgaattgctcaaccgcaagccgtcgaagctggcagccgtcgccctcgccaacaagatggcgcgtatcgcctggaagctcatggtgaccggggaaagttacaacgcaaaatatgcgtcagccctgatggttggcgccacatgaaaatcagcacgatacggaaagttctaacttaagattcacgttgggttgctgacaaccgaacttgcaagataggagattagatggtgtgatcgatcgatccaagacgtgagacactccgtcctatcctttggccttctgcaaggtcgtagagatgtttggaactcacgctgcggaaaccatcttggccagcgctcatgtgcgagcacaacaaaaggccggacatatgggcgcaagcgatcggatcaaatccgtctcagaatatcttgcgagcagggggccgtccacat

SEQ ID NO: 1754 - DNA, 1651 bp, unidentified
  source 1..1651: mol_type = unassigned DNA; note = element_2573ae7
  misc_feature 1..3: note = core
  misc_feature 4..120: note = LE
  misc_feature 121..1311: note = CDS
  misc_feature 1312..1651: note = RE
agtaattatgtaataaagcatagcgcagtatgaggcggtcatccaaaagtggagccgcaattttaatttagtagcgataactgaaggtttcgcaattattaacaattaaaagactgcactatgcttagtacaaatctgcaaaatccaatcgactttaagggtcaaaagttttatgtgggacttgatgtccacaaaaaatcatgggctgtaactatccggagcctgggtattcaggtcggtcattttacgcagccgccgggcgctgatacgttgttgaagtatttacaaaggaattttccgggaggccagtatcattcagcctacgaagctggtttttgtggtaccggtattcacgaacagctttgtgaactgggaataaaaaacattgtcgttcatgcggcagatataccggccacagataaacagaagaagaataaaaccgacctgcatgacagccgttcgattgccgattacctggaaaaaggaaatctgaagggcattcatgtattcacgcgggatcagcaggaattacgaagtttgtttcgtcttcgcgaagctaaagtcaaagaagtgaccagatccaataacaggctcaaaagcttcctgatgtattttgatattcaaatacctgaaacggtttctaaaaaagagcaattatcgctcaaagcattagcatggttaaattttgaactggaaagcgcagctggtacaattgcgttgcagcaacatgttgaagaactgaaataccagcgtaaacgactctctgaaataacaaaacagctgcgtaggcagatacaggagtttcatgccaaatcctatgaatgtttactttcagttcccggtatcggagcggttacggctatggggctgattgcagaaattgccgactttggccgctttgaagatcctgatgaatactgtagtttgctgggtctatgtccatgggaagatagttcaggcaatacaattaagaccaaaggcatgcagccacgatgtaacaagcatttgcgtccgctgctcgtcgaagcatcctggaccgcgatcagaagatcaccggtcttgtttgcttattatagcaagcacgctgttaaagacagtaaaaaggctattgttaaggtagcccgcaaactggccctggccgcacgcggagttgtgttgaagcaacagctttatcaggaagattatttacaaaaaaagagggccgaacaagccactcaaaaggaggcctcaaagagaaggttttcttcaggcatcacggaacagcatattaacaagcagccaggcaatgtacttgcgtcacagcctggctgatatgctttatccggctgtaatatccctggcaggttgctcctaagcagagcccgcttccgtttcttacagcatcataaatataaaaacaaacattaaacagttcggtataaaaaagacaacaatctcaaaaaaattaaagaggaaaacgcacaatctcggacggtggctaactacacccggaagtattcgtacctcttttgactccacacaattactggcggctcctgtttagggatgaccgcatatagcagtcggagattatttttgtttcaccgaattaaaaaatataactttatgtgatcaaaaaatctcatacctgtccctttgctttatacatagc

SEQ ID NO: 1755 - DNA, 1388 bp, unidentified
  source 1..1388: mol_type = unassigned DNA; note = element_2575610
  misc_feature 1..2: note = core
  misc_feature 3..128: note = LE
  misc_feature 129..1151: note = CDS
  misc_feature 1152..1388: note = RE
  misc_feature 1167..1351: note = bridgeRNA
acatggtgtaatcgcgggcacgaggcccctctggatccgatcgcgatcttggaaggtggctgctccccgatatgatgagatacgggctctcgactggacgccgggcccaacatcaatggagaacagccatgacagagtatatcggtctcgacgtgtcaatgaaagagacggcaatttcgatccgttgcgcgggtaagcggatctggcgcgggaagtgcgcctctgatcccgccgccatagccgaacttatccgcatgcgagcgccaaatgcggagcgcgtggtgttcgaaacgggccctctctcggtatggttctatcatgctctgcgcgctgagggattgcctgccatttgcgtcgatgctcgtcacgccaaagcggcgctcgacatggccgccaacaaaaccgatgccaatgacgccgatgggctcgcgcatctggcggaggtcggtttctttcgcgaagtccgggtaaagggcttcaacagcatgctctctcggacattggtcgcggctcgaacgaaacttatgcgcacgacactggacgtggcaaatcagattcgaggagtgatgaagacgtttggtcttattgttccatgcagcatgggtggcaaatttgaggtgcatgttcgctctctgctggccgacaatgtcggcctttcgcagataattctgccgctacttgaagcctggcgtaacctgcgcctccaggcgacaaggttggggcgacaactcctcgccgaagcgcgtagaaaccagcaatgtcagttgttgatgtcgatccccggcgttggagcgatcacagccaccgcctatataaccgccgtcgaggatccagcgaacttcaagcgatcgcgctcggtgggcgcctggctggggttgacgacgcggcgctatcagtccggcgaggtagactatgatggccatatctcccgacgtggagacacccatgtgcgttcccttctctatgaagccgcggtcgtgatcctgacacgcagccgggcggacagcgatttgcgcagttggggcataaaactacgcgagaagatcggcttcaaacgttccgctgtcgctgtcgcccgcaaactcgccgtcatcatgcatgcgatgcttcgctccggtgagctcttcaacagggcgacagccgccacctaactttccagctctgtagcgtccacggcgtgaagaggcgtccctgccgggaccgaggctggtccattccgttaagaccgttgcaccgcgagtttgctcggagcgtgcgagacatacattggaaggactgtcccgcgaagcaccataatgcggcgacctatgtcgaccgcgtagacgaccatgctcccggcaaacaacctcccgcacctaaaaggcgcttgcaaatctcgctattagacg

SEQ ID NO: 1756 - DNA, 1343 bp, unidentified
  source 1..1343: mol_type = unassigned DNA; note = element_25799bd
  misc_feature 1..3: note = core
  misc_feature 4..78: note = LE
  misc_feature 79..930: note = CDS
  misc_feature 931..1343: note = RE
  misc_feature 1084..1332: note = bridgeRNA
tgatgatgtggacgcccccgcactgaccggcgctatgctgtcggtcggtcacccgaagcaggaacaggagcgtttacgatgacgatcacaacggttgggctggatctggctaagagcgtctttcaagcacatggcatcgatgagaccggcactgcggtgctggtgaagaagttgcacaggaagcagatgttgcctttcttctcgaagctgccgccatgtctgattggcgtggaggcgtgcggaacggcgcattactgggcacggacactcgccgccatggggcacgaagttcgcctgattccgccttcgtacgtgaaggcctacgtcaagcgcggcaagagtgatgcgctggatgcagaggccatatgcgaagctgtacagcgcccgacgatgcggttcgtgccgacaaaaacggtcgagcagcaagcgatattgatggcccatcgcgcccggtcgctgctggtgcggcaacggactatggcagcgaacgcgctgcgggcgcatctggcagagttcggtcttgtcgcaaatcccgggcttgcacatcttgcgaccttggccgagcaggcgctgtccgatcgtgacggattaccgccctatgcccgcaccgcgctggaaacgctggtccgccagatcacggcgctgacgggtgagattgcgctgctcgaccagcaaatcgccaaatggcatgccgagagcgaagccagccgcaggctcgccgccatccccggccttggtatcatcacagcgaccgctatcgccgcgaccgtctccgatcccgatcagttcacctcgggcaggcagttcgccgcgtggctggggctgaccccgcagcaacattcgaccggcggcaaagctcggctgggcggcatatcgaagcaaggcgatcgatacttgcgtcgattgctcgttgtaggcgccactgcgtgatgcgtcacgtcaaggacaagcccacgcccatggcaaactggatcaggaagctgagcgagaagaagccattcagggtggtgtccgtagcgcttgccaacaaactggcccggatcgcctgggtcgtgctgacaaggaaggaagcctatcagccctacgcgcatttggcctgatcaaatcaggtcacccgaattggtaatggcagtcgatgatgagtaacgatcgagccaatggtgaaaccaacccgtctgattcaatgcgcctcaaaagcgcgccaacttgatcagggacttcaccggcggatttccatcagggccagcggtcaaatcacgcccgcacaaataggccggacatatgaaagcaaccgatcaaacccgtcccgacaaaaagcccttgccatagggggcgtccacata

SEQ ID NO: 1757 - DNA, 1401 bp, unidentified
  source 1..1401: mol_type = unassigned DNA; note = element_257ec1a
  misc_feature 1..3: note = core
  misc_feature 4..131: note = LE
  misc_feature 132..1157: note = CDS
  misc_feature 1158..1401: note = RE
  misc_feature 1183..1369: note = bridgeRNA
acatggggtaatcgtgggatcgagtcgccctaaagccaatccaattattggaaggcagctgttctccgatatgatggaaatgcaggctcacgattgaacaccgggcccaagcagctgaggggagaacagccatgaaagattatataggacttgacgtttcgcagaaagagacagcaatttctattcggcgcgaaggcaaacgaatatggcgcgggaaatgcttatctgatcccaaaaccattgctgaaattgttcgcaaacatgcgccattcgtggaacgagtggttttcgaaaccggcccgttgtccgtatggttttatcatgctttaaaagaagaggggctgcctgcaatttgcatcgatgctcgtcatgcgaaggcagcactggacatggcggcgaacaagacggatgcaaatgatgcggacggccttgcgcacttggcagaagttggtttctttcgcgaagttcgaattaaaggctttgacagcatgctcacgcgtacgctcgttgcagcccgtacccggttggtcagcatcaccattgaactctcgaaccaaatccgcggggttatgaaaacgtttggactgatcgttcccccgggcaagggaagcatcttcgacacgaatgtccgtcaaatgcttgccgatcaggatgctctggcttccatagtgttgccgcttttggaggtgtggcgcagcgtacggctgaaggcctctgcacttgaaagacgcatgctagcccatgcgagacaaaggcaagagtgccggattttgatgtctatccctggtatcggagtgattactgctaccagcttcctgtctgccatagaggatccagacaacttcaagaagtcgcgctctgtgggcgcgtggcttgggttgacgacccggcgttaccaatctggggaagtggattatgatggccacatatcccgtcgaggcgaccgtcatttacgcggtcttctctttgaggctgctacggtcattctaacgcggacttcagctgaaagcagccttcgagcatggggcgtgacattaagagagagggtaggctttaaacgcgccgcagttgctgttgcacgaaaactcgccgtcacaatgcacgcgatgcttaaaactgttgaattcttcgataggaaggtcggagcggcagcataaaagctgaagtataattgcagatcgcgttcggtatctgagcgccaagatgtccctgccgggacgtgggtagagccattccgctgatggtgttgcacggctggttcagtcgagtgcgttgtccacatttgaaggcttctcctgcgaaaccctatgatgcggcggcaaatgtcgaccgcgaagacaaccatgcaccggcagtgtcatcagacagaaagatacttgacgggacgaatgcgattagaca

SEQ ID NO: 1758 - DNA, 1568 bp, unidentified
  source 1..1568: mol_type = unassigned DNA; note = element_2594669
  misc_feature 1..3: note = core
  misc_feature 4..465: note = LE
  misc_feature 466..1374: note = CDS
  misc_feature 1375..1568: note = RE
  misc_feature 8..223: note = bridgeRNA
gttcgtattataaggttagccagtttttactggttgacctttttttaatagaatctattatatcagtagccagggtagaacgtacgggtgcgtgggacttgatcccgtgaactaaactgttcgccccctacttgtagaaacatgtttgaggctggttgggacgtagatctcgtataacaagtgaagctatgacactacatggaggactaggggtactggttagtaagtagatgaggaaaaaacgatgaatccagttgttggtctggatgtggcaaaaggagagagtcaagttcaggcattcttagatcaatctaaaccgtatgggaagagcttttcaatgaagcatatcaaagaggagttagagcattttttagaatttctaaaagaaattgaagaggtgacagggcagatgcctatggtcattttagaatctacaggtattaccatactcctgttattcaatacttggaggaacaagggattctatatatcttactaaatccgattatttcttatcaggcaaagaagtccagtttacgaaaggtaaaaacggacgcaatcgatgcgtaccagttgtgtgtgctgtattacaaggaggattttgaacctcataaaataagaggaattcagcttttagaccttcgtaatttgtcaagacaacaggaaatcgtaacgaatatgtatgtggaggctaaacttcagtttcacaccattttagatcaagtgtttcctgaataccggaaggtttttggggatctatattcgatggtttctttattgatgttaaaggaatatcctacttcagaggcggtattaacggccggagaaagtagactagcagagcgtgtaatagagttctgttctagccgatcgggtgaatgggcatgggaaaaagcaaaaaaaataatggattccgcatctcgaaatccatttcaaaaaaacgtgtatgaaagtcacgtaatcaatcttcgtatgtatatcgagttgctttttcattaccagggacacctttccgatttggaagatcatatagtggccctggcaaatgaactggaagaatataagatcatccaatcgattccgggtatcggagaaaaaatcgcagccacgattatctctgaaattggtgaaatcgatcggtttaatcatccgaaaaaactggttgccttcgctggagtagatccaagtgttcactcatcgggtaagtttacggcaaccattaatcgtattacaaaaagaggttcgagcagactacgtcattctctgtatcttgccgtgctatgcggcataaggagttcaaggaacaaaaagctttctttgataagaaaaaatcggaaggaaagccagccaaagtgccgatcgttgcctgtatgaataaacttcttcattggatttacgatttattaaagagaaaagaagcattcctagatttatcttgattaacggttttatgaaacagagaaaaatccttccaaaagggttttggagggttatttgtcatgaacaaaaatagtatatcataagggaaatgaaaattttagagaaagatattgacatcctattagctg

SEQ ID NO: 1759 - DNA, 1645 bp, unidentified
  source 1..1645: mol_type = unassigned DNA; note = element_25968f8
  misc_feature 1..2: note = core
  misc_feature 3..100: note = LE
  misc_feature 101..1213: note = CDS
  misc_feature 1214..1645: note = RE
  misc_feature 1376..1571: note = bridgeRNA
agactgtatgtccctccacaaatgaggcgactcaccctcgatgtaatgtcgagggttgcccggatgggccgggcagagcctcatacaaggagggcgagtcgtggggcatcttagcgaagctttcgtcggaattgatacgtcgaaattgcgtaatgcagtggcgatcgccgaaggcggccgtggcggcgaggtgcgctatcttggtgagtttcctgccacggaggcggcaatgcgcaagctcgttgccaagcttgcggcaaaataccgtagactgacattttgctacgaagctggtccgacgggctacgggctctaccggttgatcaagagcctcggccacgagtgcctggtggtggctccctcgctaatccctaagaagcccggcgagcgggtaaagacaaatcgacgcgacgggttgaacctggccaaactcctgcgggccggtgaactcaccgccgtttgggttcccgacgatcggcacgaggcgatgcgcgatctctctcgcgcccgcttggctgcgcataaggatctcaggggcaagcgccagcagatcatctcgatgatgctccgtctcgggaggatctaccccggcaagaagacatgggggccggcccacatggattggttgatgcgacagaagctcgagcaccgtgagcagcgtattgcgttcgaggagcttatggaggcggtgaggcaggagagcgagcgcgttgcgcgtctggagcaggcgatccgcgaggcggtgccggaatggtcgctcgccgaagtggtcacggctttgcaggcggcgcgcgggattgatttgatagccgcggtgacgctgctggccgagaccggcgacctgtcacggtttcgcaatccacgtgagctgatggggtatctcggtatcgtaccttctgaacgatcaacgggtgacacggtcaagcgcggcggcatcaccaaggccggtaatgggcgggcccgacgcatcctggtggaggctgcctgggcctatcgccatccaccacgcgttggccgcgagaagcaggcaaaggtggcggccgcaccgaagtcggtgcgtgagattgcctggaaggcgcaagtgaggttgtgcgggcgctaccggtcattatcgagaaagggcaagcacccggccatcgtcgttacggcgatcgcccgcgagctgtccgccttcatctgggcgatcaatcgcgaggtcatggcacgtcgctaggcataacgcggcccggggctgtggaccgctcgagctattatgggctcaaccggcccacagcccctgcgttgctttccagatcaattaaggacagctaacggatcaaattaagcaggtaacggatcaacggatcaaagaaggacagccaacggaggacatcaaaataatcgtgcagcagtgagggcggggccacggcaggggaactcccgaggaatctacgtggccgatcatctgatcgacgcccgatcttagacagggacagccccagacgaacaaacggaaatgcggtacccaacccgcgcatcagagcttgttcaccgacgtcttcaggtcccgccctctcctctgcacgatacatcctgtaccccaacttctcgccagtacgcgtggagatgaattatcgcgtgcgttgtgcttgacttgggacatcag

SEQ ID NO: 1760 - DNA, 1396 bp, unidentified
  source 1..1396: mol_type = unassigned DNA; note = element_259a3d2
  misc_feature 1..2: note = core
  misc_feature 3..57: note = LE
  misc_feature 58..1125: note = CDS
  misc_feature 1126..1396: note = RE
  misc_feature 1143..1381: note = bridgeRNA
gatgcggtggacggcccctacttcgcggcatcgatgtgccaggatcgcggtcgttggttgaacgccacggatgaaggggccgcccacatgcaggttaccaccatcggcttggacatcgccaagcgcgtgttccaggcccacggggtcgatgagacaggcaaggcggtgctgcggcgcaagctgcagcggccggaggtgctggcgttcttcaaaggcctgtcgccctgcctggtcggcatcgaagcctgtggcacggcgcaccactgggcacgcgagatccaggctttgggtcacgaggtccgcctgatgccggcgtcttacgtgaagccctatgtgaaacggggcaagacggatgcggccgacgccgaggcaatctgtgaggcggtgacgcggccgacgatgcgcttcgtgccggtcaaaacgcccgagcagcaggcagtgctgatgttgcaccggacgcgggacctgatggtgcggcaacggaccatgttggtgaacgctttgcgcgggcacatggctgagttgggcatggtcgcgccgcaggggatcagccgggtagcagacctcgtggctgtgctcctgggtgaggatgagaccacgatgccgaagctggcccggcaggcgctgcgggggctggcggctgagctggagagcttgggcgagcggatcgaagcgatcgaggcagccatcctcacgtggcacagggggaacgaggccagccgccggctggccagcatccccggtgtgggaccgatcaccgcctcggcaatcgtggccagcatcactgaccctacgctgttccgctccggccgacacctcgccgcctggatcgggttggtacccaagcagaactccagcggcggcaaggagcgccagggtggcatctccaagcaaggagaccgcaccctgcggcggctgcttgtgctgggcgccactgcggtgatccgccacaccagaaccaaagccgccagcgaggccagctggctcaaggggctgctggaacgccgcccagccaagctcgccgccgtggcgcaggccaacaaaacggcccgtatcgtttgggccttgctggtcagaggcggagcctatcgcgccccggccacggcccaggccgccacggcatgacgcagtaacagacctcccccggccatcgccgcagccggtggagtagcgagggtgatggcgacgtgatggcacaccggtcgaagccggggcccggcacagcccgtttagagtcttgcgctcagagcgcgacaaactgattgggagccgggccgcggattgcatcagggccagcggtcatgagggccgcaccagtaggccgaacacatgaccgcacccgaccgcggcgccaaaacgtcatatcgctcttgcgtcgtgggggccgtccacacaa

SEQ ID NO: 1761 - DNA, 1562 bp, unidentified
  source 1..1562: mol_type = unassigned DNA; note = element_259dbd9
  misc_feature 1..3: note = core
  misc_feature 4..439: note = LE
  misc_feature 440..1444: note = CDS
  misc_feature 1445..1562: note = RE
  misc_feature 13..255: note = bridgeRNA
cttatataatatatttaagttgatagaggcaacttataccttttttaacttaagattatgcaattattgttgtattaatatatttaattagatagagtgacaccgattccccttgagacatagatctcatactaaaagagtggtgcctctttctgttaaacggtttacgaattagttagatgttgaccactttctggtacttcggatctcatacaaggtagtaacgtttttcagagaagaggatttatctaaaattttacctttgaggtgattgaatgtactatttaggtattgatattggtaagaatacacatgttgcttctcttattgatgattccaaaaaagttattttaaagctttttctttttctaattctgttgatggtgccaattctttgttagttaaaatttcacctttcattgactctttaaaaattggaatggaagctactggtcattattggctttctctctattcttttcttcttgaaaaagacctttctattcatgtaattaatcctatccaaactgatggatggagaaacggtattgaaattagaaagagaaaaacggatattattgattctattttaattgctgatcttcttagatatggtaattttgttgaaacttcacttgctcctgaagattatttttctcttaagtttttgactcgttttagaagttatcttgtttcatctattggggatcttaagagaaagacaattgctgttttagatcaagttcttcctgaatatactgactcttttactgatatatttggaacaacttctaaaaaaattctaaattctttatcaactcctgaagaatttgataagatcacatctaatgatctcaatgaaattttaaaagaaattagattaaaaaagtttgctattaagaaaattgatgaactttctgaaaaggctaaaaaattatttggtattaagtttgctataaactctttttctattcaaattaaacatttgattaaccagattgattttattgaatcgcaaatctctgatattgaaggtgaaattggtttgttaatgaaaaaaatcaattctccaataacttctataccaggtgtcggacctattacaggagcaactattctgggtgaaataggggatataagcaaattttctgatccttcaaaacttgttgcatactctggactagctgcaattgtttcccaatttggtgaatataaatctagttccacaagaatcagtaaacgaggctcttcagctcttagaaaagcattacttcaagccgctttgagagcggaattttatgatcccgtctttagtaattattataaaagtaaaattgtccaaggaaaacatcattcagtagcgaccaatgctgttgcaagaaaactgtgccatactatatttgctgctcttactaaaaacgaatgctataaaattcaaaattaaattgttatgtatctcaacattttatcgactgctatgccagtcaattttatgtcgcctaaattataagaaatctcaactataattttttttattttttacttgacttttaatagttagt

SEQ ID NO: 1762 - DNA, 1513 bp, unidentified
  source 1..1513: mol_type = unassigned DNA; note = element_25a16a6
  misc_feature 1..2: note = core
  misc_feature 3..238: note = LE
  misc_feature 239..1300: note = CDS
  misc_feature 1301..1513: note = RE
  misc_feature 26..188: note = bridgeRNA
cttgtatcttgcgaattgaggcgtaacgtggagttacgtttcggcggagaggccgtcccccccttaggccagcgcaagttgagcctgtcaaaaagatcggccgccgtccctctctttgtatgccgtggagaatcgaaggccttttgagcctgcatgttcaaggtcggcggaaagagcaagtccgttcacagcggacgcgggacggtgccgaggctcagattaacgccggaggatgttcatgagcaagcggaacgtttcagcagtcaagcccactgcttcagtcaaccaatcggcccatggcgatcccgcgagggtattttgcggcgtcgacgtgagcgcggagacgttagccgtggctgttctcacgcgggaaggcgcccctcggcagcgggagttttccaacaccgccagcggtcatagggcgctgattggctggcttacgaagggccagggccgggcacgggtttctttggaggcgaccggcatctattcgatggacctggcgctggcactggacgaggctgaggggattgaagttgcggtgctgaaccccaagcgtattcacgattttgcgcgaaccatccggcggtcgaagacggacaaggccgacgctcaggtgctggccgaattcagcttgcggatggacttcgttgcctggcagcggcccagccgcagcgcgcttgagctgcgggcgatcagccgccatattgaggcgctgggggtggatcggacgcgtgcccataaccggctgcaggcggcgcggggctcggggagcacgccgcgctgcgttcttgacgacctgaaacgttcgctggagcgtctggccgagcgcatcctgaagctgcggcgggcggcgcaggcgctgatcgaggccgacgagcggatgcgggagcagttccggctgctgaccgggatgcccgggatcgcccagatcagcgcggtgcagattctaggcgagctggtgctgcttgccccagacctgaaggcgcggcagtgggtggccagaagcggcctggacccggtgcaacaggactccggcacatcggtgcacaagccggcccggatcagccgccaaggcagccgccacctgcgccgcgcgctctacatgccggcgctgacggcggtacgctgggacccgcacctgaaagcgttttatcagtccctgctggcacggcacaagagaaagcttcaggccctgatggcggtggcgcggaaaatgctgcacgccatctacggcatcttcaaaaccaaaaccgcctacgacggaggcaaactcttcccgcagttgaagatcgcataagcgctaaaattgcctcgccaggcgaaacggaagctggctctgctgggaagcaaccatgccgagggataacctggcgggctcatcccgacgatgaaccgaaagccgggtgaggatatcctcacccggccccaatgacatcggagggatagaccccctatgcctcgaaaatccaaagccggccccacaaaaaatgcttgacctgcaagagagaat

SEQ ID NO: 1763 - DNA, 1449 bp, unidentified
  source 1..1449: mol_type = unassigned DNA; note = element_25a6fd2
  misc_feature 1..5: note = core
  misc_feature 6..499: note = LE
  misc_feature 500..1432: note = CDS
  misc_feature 1433..1449: note = RE
  misc_feature 1..239: note = bridgeRNA
cccccgttaccttattcacggtccttcacagaagggctacggtcgccagacccggtatgactccttgcccctgtctctcgcatgatccggggggtggtgtcgccgggtgtggtggcgtcgacggaccgctgatagggacacggccaaccgaaattgggtaggtctctttgtaacgtgggtgccgggcgtcgatgccggatcggcgaccggccgaccgagacacaagggacgacccctgaatggactcgaactatgcggtgtactgcggcatcgacgtcggcaaaggcgaacaccacgccgtcggactgaccgccgccggaaagaagatctacgacaaggcgttgccgaacgacgaagcgaagctgcgggcggtcttcgaccgcctggccagccacggatcggtgctggtggtcgtcgaccaacccaatacgatcggcgccctgccggtcaccgtagccgcgtaggcggccacgaggtcggctacctgcccggactggcgatgcgccgcatcgccgacctgtaccccggacaggcgaaaacagacgcccgagacgcgttcatcatcgccgataccgcccgcacgatgccgcacaccctgcgccgggtcgataccggcgacgagaccctcgccgagcttgaggtcctcgtcggattcgacgacgaccttgccggtgaggccacccgggtcagcaaccgcatccgaggcctgctcacctccatccaccccgccctcgagcgggtcctcggcccccgcataacccatccggcggtgctcgagatcctctcccgctgcggcgggccggccggaatccggccggccggcaagcgcaagctcaccgcgatcgcggtcaagcacgcaccccgaatgggcgccaggttggccaccgacatccttgccgccctcgacgagcaggccgtggtggtgcccggcaccgcggccgccgaaaccgttctccccaaactcgcggattcactgaaagagaccctgttacaacgcaaagcggtcgccgcggacgtggagagggccctcgatgaccaccctctttccccagtcctgacctcgatgcccggcatcggcgtcaggacagcagctcggatcctgatcgaggtcggcgacggctccgccttcccctccgccgcgcacctggcggcctatgcccgcatcgcaccggtcacccgaaaatcgggatcctccatccgtggcgagcaccccgcccgctccggcaacaagaaactcaaacgcgccctgttcctgtccgccttcgccgccctccacgaccccaccagtcgcgcctactacgacaagaaacgggacgagaagaagaaacacaacgcggccctgatctgcctcgcccgacgccgctgcgacgtcctctacgccatgctcaagaacaaggaactctaccggaatccaaccccctcagcggcttgacgaaaaccatagggaca

SEQ ID NO: 1764 - DNA, 1539 bp, unidentified
  source 1..1539: mol_type = unassigned DNA; note = element_25ae482
  misc_feature 1: note = core
  misc_feature 2..262: note = LE
  misc_feature 263..1477: note = CDS
  misc_feature 1478..1539: note = RE
  misc_feature 10..260: note = bridgeRNA
ccgttaccttttctgtggctccgcaatggggctcctggcccccgggcccggcatgactgtctccccctgccgtacggatggcccggggggtggtgtcaccgggtctggggcaccgcttgaccgctgatgaggggcctgatggccaccccggcccggcgcaacgcacggccttgaacgggtggacctctgcgtaacgtggttgccggtttgtggtgccgaagggatggccaggacggatgctcaacccaccagggggaagcggatgttcgacaccagcgggacaggcgtgttcctcggtatggacgtcggcaagggcgaacaccacgcccacggcctgacaccggccggcaagaccgtccacgacaagcggatgcccaacagcgaaccgaaactgcgggccctgttcgacaagctcagtgcgaagttcggcaccgtcctggtcatcgtcgaccagatcgccaacatcggcgccctgcccctcgcggtcgcccgcgatgccggctgccaggtcgcctacctgcccggactcgccatgcgccgggccgccgatctttaccccggcgaggccaagaccgacgcacgcgacgcgttcgtcatcgccgacatcgcccgctcgatgccccacaccctgcgctccatcgaactgaccgacgaaaccagcgcggaactggccatgctggtcggcttcgacgacgacctcgcaggtgaggccacccgcgtctccaaccggctgcgcggaatgctcactcagatccaccctgccctggaacgcgtgctcggcccgcgcatccaccatccggcggtgctctggctgctggagcgctacggcacccctgcccagatccgcagggcgggacgccgggcgctggccgaacgcctcagacctcacgcgccccgcatgcatgaacgcctggtcaacgacatcttcaccgccctggacgagcagaccgtggtggtgaccggaacaaacgccgccgcgaccatcgtgcccaagctcgccaagaacctcggcaccgtcctggaccagcgccgcgaactcgaagcgcagatcagcaccctgctggaggcccaccctctttcccagctcctgatgtcgctgcccggcgtgggcatcaggaccggcgccgccctgctcatcaccatcggcgacggcagcaccttcgccaccgccgggcacctcgcctcctacgccggactcgcccccgtcacgcgctcctccggcagcagcatccgaggcgagcacgcaccccaccgcggcaaccgccagctcaagcgcgcgatgttcctctccgccttcgcagccctgcacgatgacgcctcccgcagctactacgacaagcaacgagccacgggcaagtcccacacccaagcgctcctccgcctcgccagacagcgcatcaacgtcatccacgccatgctccgcaacggcaccttctacgaggcccgccaacccaaaaccgtcgagttggccgcatgaaccccacacggacgaagcacctgaagaacggccgcgcggggttgacgaagaacataggggca

SEQ ID NO: 1765 - DNA, 1123 bp, unidentified
  source 1..1123: mol_type = unassigned DNA; note = element_25b6955
  misc_feature 1..2: note = core
  misc_feature 3..169: note = LE
  misc_feature 170..1105: note = CDS
  misc_feature 1106..1123: note = RE
  misc_feature 1..168: note = bridgeRNA
cctgtgtattggatttgtgctatgtagagtgcgggcggaaggccgtcggaatcctggtcgttagagaccggctgctggcttttggacctccgcccgctctgatgatcccaacctgaacagttgatggaggccgtgagcgcggacctcgtagcacaggatgaggcttgccatggtacaccctgtttacatcggatgcgacgtctcaaaggcacatctggatcttttcgatgccgcgacacaaaaaaccgtccgcatcgccaataccggcaccgccatcgatgaatggcttgccacccttgatggacgcgaggcgcagatcattctggaggcgaccggacgttatgaccggctgttgtgctcggcgctcgagagatggcggcggccctattgccgggtcaatccggcgagagcccgcgactttgcaagagccaccggccagcttgccaaaaccgataccatcgatgcgcgacttttggcgcgcatgggcgaaacactttcaccacccgttacgacaccacccgacccggcccgtcagcagctggaaagcctgcacacgcgccgtgatcagcttgttgccatgcgccagcaggaacgtgcgcgccttcatacagccgagccgtcggagcgcgacagcatcgcgcgccacctcggctggctcgatacggaaatcgccgcgatcgaacaacaatgccagtcgcatgtgcggacaaatgtgacgctgaacgagcaaaacatcagacttcgctcgatccccggcattggccagatcacggcgttcattttgatggcccacatgccggaactgggcgacagttcgccaggcagcatggcggcgcttgcaggccttgcccccttcaatgccgatagcggcattcatcgcggccagcgccatatccgcgccggacgaaagcgcgtgcgcgatgccctctatatggcggcgctggtggcctaccggctaaagtcgcccttcgcccgcatggttcaagccatgcaggccaaaggcaaaccgttcaaggtcatgatcatcgccatcgcccgcaaactgctcgtcattgcaaatgccaatctcaggaataaaaccaccttcagggcacgctgggaataatatccaccaataccgttg

SEQ ID NO: 1766 - DNA, 1384 bp, unidentified
  source 1..1384: mol_type = unassigned DNA; note = element_25bb604
  misc_feature 1: note = core
  misc_feature 2..85: note = LE
  misc_feature 86..1108: note = CDS
  misc_feature 1109..1384: note = RE
  misc_feature 1154..1379: note = bridgeRNA
caatgggatggacgcccctcccgaaacggcatcgatgtgccaaagtggaagtgtcaactgaccacgacatcgagggggcgtcatcatgaagattacgacaattggcattgacctggcaaaggatgcgttccaagtccacggtatagatgagcgaggcgaggttcggatcaagcggtcactcaagcgtagggaaatgatggagttcttcacgcgtatcgagccctgcctgatcggcatggaaagttgtggcggtgctcactattgggcacggcggcttcgtgacgtaggccatacggtaaggttgatggcgccgcagttcgtaaagccttacgtcaaggggaacaagcatgatgcggctgatgccgaggccatctgcgaggccgtccgtcggccaacgatgcgatttgttccgatcaagacggtcgaccagcagagcattttggcagtacaccgggtacggcagggaatgatcaaagccaggactgcgcaagctaatcagattcgcggactgcttgccgagttcggactgattgttccgatagggatctcgcacttgtatttgaaggtgccgacactgctcgatgaagccaaagacaccgtgcctggcgtgttccgggagctcatccagcgcctgttggcgcacatgaaggagctgacgcgtcaggtcgatgagctagagattcaaattcatcagtggcaccgcgccagtgagacgtcccggaacttggaacagattcccggagtcggcccaatcaccgctactgcgctagtggcatcgattggcgatgcaggcaacttcaagaacggtcggcagctcgccgcatggatcggattggtccccaaacagcactccagcggcggtaagaccaagctgcaaggcattagtaagagaggcgacaattacctgcgcaccttgctgatacatggagcgcgagcggttgtgaaaagcgccgagcgaaagccagagcgctatgtttggcttagcaaattgatgggccgtacccacatcaacattgcgacagtagcgctggcgaacaagaacgcacgggtcgtctgggccttgatggcacatgatcagaaattccgatcagattacgtcgcaacgtaatctaatcggtcgaaaaatagttgagtagtgcagcagtaagcagattccaccagttgcgaggacgcttcagacgttgatggcaaacaggttagaccgtggtcgacatagcccgatgacagcgtagtacttcgagtacgttaaggcgactggggcgttggccagcggaacccatcagggacagggttaaaagcccaaacaaagtccgaatgtacgcttgcagacttacctacttgcctttagcgactgatgtacttgcaaacagggggcgtccatgta

SEQ ID NO: 1767 - DNA, 1562 bp, unidentified
  source 1..1562: mol_type = unassigned DNA; note = element_25bc9ba
  misc_feature 1..2: note = core
  misc_feature 3..531: note = LE
  misc_feature 532..1431: note = CDS
  misc_feature 1432..1562: note = RE
  misc_feature 3..245: note = bridgeRNA
cttgtatgatatatttaataacttaaataaccatacactcctttctttaaaattttattcatatttagtataatctaaatgtggtaactgtggactttttatgatacctatagctttgactatttattggagtgtattgccacagtttcgtttttaattatttattggttggataagtctttgaacttttatgtctagcaaggatatgaggacgaatacttgtggaagttgtcacagttattaatttatttgaaaggtggtacttttatgttttacgttggaattgatattgcaaaaaatactcactgggcttctataatgtcctctgatggagaaattattaaggaacctttttcgttttctaatgataacaatggattttaaaaatttatttctattttagaatctttagacaaaacaaagatactaattggtttagaatctactgctcattacggcgaaaatatcatttcttatttattcaatctggactacaaaattggacttattaatccaatccaaactgctaacttgcgtaaatccaatattagaaagactaagaatgataaagttgatacttttataattatcaaagcattaactttgggtaattattctctcatcacttctagagacatcaacaatttaaaactcaaaggcttatgccgttcacgtcgtaacttagttactatgagaagtaaagctaaaattcaattagtatcttatttagatcagattttccctgaacttgcacagttctttaaaggaaatcctcatctaaatgtatcttatcagttattaaaagaatattcaagtcctaaacaaatttcttctttacatttaactaaacttactaatattcttcatgataactctcgcggtagatatggtaaacaagatgctattcgattacgtgaattggctaaatcttctgttggtattgataatcctagtttatctttacagattaaacatgctattctacaaatcgaactttatactgagcaaatcactgaagttgaaattctttacaagtctatacttgatgaaattaattcgcctattttaactattcctggtatgtcttacaatcaatctgctgttattgtgggctgtattggtgacattaatcgttttgaacattcttgtcagttacttgcatatgctggattagacccatctgttgtacaatctggtaactttcaagcaaggtctactagaatgtctaagcgtggttctggaatgcttagatactcgcttatttatgctgctcacaatgttgttttaaacaacaaaacatttaaagaatactatgaacttaaacgttctcaaggcaaatctcattattgtgctttaggacatgttgctcataaattagttcgagtcatatttaaaatgttaaaagataatgttgcttttaacttagattaactaaatatttaattttcaatgtgttcagccgttttaaaaaaattgtataaaaacggttgttaaagttgacctttttatatgaaaaaatttttaaaaaattttcatttttctattgacttttcatagttggt

SEQ ID NO: 1768 - DNA, 1122 bp, unidentified
  source 1..1122: mol_type = unassigned DNA; note = element_25bd72c
  misc_feature 1: note = core
  misc_feature 2..90: note = LE
  misc_feature 91..864: note = CDS
  misc_feature 865..1122: note = RE
  misc_feature 886..1114: note = bridgeRNA
caatggtatggactcctcctcccctaaacggcatctaagtgccacactggtaaacgtaatcaaccagtcaacggaaaagaggagtccaccatgaagcttagtagagttggaatcgatttggcaaagaacgtttatcagttacacggtgttgatcgatctggcaagacgctatggaaacgccgcctgaagcgtcatcaatggctcaaggtgttgctggataaaacggagccaggttgcgtaattggcatggaagcctgtgccagtgcgcatcactggggtcgggagctgcagccacgaggctacacggtcaagttgattccaccacagtttgtgaagccgtatgtgaagagcaacaagaacgatgccagggatgccgaggcgatctgcgaggcgatgagccggccgaacatgcgtttcgtgacggtgaaaacggtagagcaacaggatatacaggcgacgcaccgtatccgtgaagagcttaaggttaggcgtactgccaaggccaaccagatccggggcctggtggccacggtcggagatgcccggcagtatcacaagagtcggcaaatggctgctggcataggaatcaccccgaaacagcatagctcgggcgacaagcatcgcctgcttggtattagtaagcgcggtgatgtttacctgcgaatgctgatgatccacggcgccagatcggtggtgacacgagccaaacataaagatgacccgctcagtcactgggttaccgagatcgcgacacggcggcatccgaacgtggctgcggtggcattggccaacaagaacgcacgcatagcctgggctatgctgcgtcacaaaactgattacgatcctgagtatgcgattcgctgagacaggattaataaggagaccctccaagacgattgctaagcaaactgcataatggcaaacaggtcgaaccgacgtcagggaaacccgggaatttccacgtacttaaaagtacgtcaaagcgattgggactgacgcgcgaataaaccattatggcccggcatcaatgaatgtatgccaacttaagaggccggatatacgtatgcagtcgtaccatgtctgccagaatagattgcttgcaaatgagggggagtccatata

SEQ ID NO: 1769 - DNA, 1187 bp, unidentified
  source 1..1187: mol_type = unassigned DNA; note = element_25c3f8f
  misc_feature 1: note = core
  misc_feature 2..433: note = LE
  misc_feature 434..1156: note = CDS
  misc_feature 1157..1187: note = RE
  misc_feature 1..183: note = bridgeRNA
cttgcatgttcaaactgcatccgttgatgatgggtgcgacccctgggggatggccatcccccaggggtcggacgggcgggaccgtaacccccttggcgtgaaccggggatgagcctggtccgcccgtccttcgcgtttgtcctgaacagatagtggggagcaggtcccgtatgcaaggcaaggtatcgtccgaacgcaccgcgatggcgacagtttatgtcggcatcgatgtctgtaaagagtggctggacattcatctgcatcctctcggccgcagttttcgggtgaccaacgacacggccggcctgcgccgcctcaagcgggagctcgatgcgcttgaccagatgccgcgctcggcgctgcgtatcgtcatggaagcgaccggcaagtggcatcgcgccgtccagcgctcgctgcatgcgatggcttttacgtgtcgatcgtcgatccgctgcgcgcccggctgtttgccaaagcctgcggctttctcgccaagaccgatcggctcgatgcgcggtttctggccatcatgggagaagccctcaagcccgcacagaccccaccgccggaccaagcgctggaagccctgcaggaactggtcaatgcccgatctgccgccaatggcgaacgcaccgccctgtccaaccggatgaagacggccgtgaccgccttcctgcgcaaggaactgacgcgccggcttgccgcgctcgacacccatatcgcaagactggacgccgagatcgagcgcagcatctgcgccgatcccgagatgcgccgccgcctcgacatactcatctccattcccggcatcggagccgtcaccgccgcaagcctgatcgctggcctttgcgaacttggcgcctgctccggcaagcaggccgccatgctgaccggccttgcgccgattgcctgcgaaagtggcgagcgggccggacatcgctccatcaggggcggacgcccagcacccaggaacgccatctacatggccgccctgtccgcctcccgtcacaacccggacctcgcacgcttcgccgcaaggctgaagaaagtcggaaaacccaataaggtagtcctcgtcgccgtcatgagaaagctcatcgtcctggcaaacaccctcatcaccaaaaaccgcatctggacaccaaatccaccttgacaccaaacacagatgctcatccgcctgccgg

SEQ ID NO: 1770 - DNA, 1357 bp, unidentified
  source 1..1357: mol_type = unassigned DNA; note = element_25d2eb3
  misc_feature 1: note = core
  misc_feature 2..66: note = LE
  misc_feature 67..1119: note = CDS
  misc_feature 1120..1357: note = RE
  misc_feature 1132..1351: note = bridgeRNA
taatgagatgacccgccctgtcacccaggtccaaaatagcggagcaacttcaaaggaggtcatcacatgaaggaacgcaacaaaccaaagcaagctcccgtctttggcatcgacatcggaaagaacatcttccatgtggtcggtgttggtgtcagcgggcagcccgtccagaaggtgaggttcaggcgggagacattgctacagttcttcgaaagagcagcaccagctttgataggcatggaatcgtgcccaggttcgcagtggttggcccgcaagcttatcgccatgggccatgaggtgaggatcatgcctgcgcagttcgtcaaaccctatgtgaagacgaacaaaaatgacctgattgatgctgaggccatcgcagaagctgtaacccggccgaccatgcgctttgctgccgtccgcaacgtggaacaagtcgacctgcaggctttgcaccgcctgcgctcgcagctcgtgagctccaaaacacgactgatcaaccaaatgcgcgccttttgcctggaatacggcatcgccatgcggcagggtgccggcgtcttcaagctggatatcggccgtgtcattgctgatgaggctaatgacctcacacggacaatgcgcaggctgcttaatgatatgagcgctgatctccgacacatggagatgcggatcaaggcagtgacaactgagattgaagccctggccgccaaggatgatgtcgcccggcgactgatgaccattccagggattggcacgctgggagcaaccgctctcctgtctgccatgggcaatgcacaaaggttccgcaaggcgcgcgatctggccgcatggctggggcttgttccacatcagcactcaactggtggccgatcaaatcttctcagcatcagtaagcgaggaaatggctatctcaggcgattgatcatcgccggtgcacgctcctgctacgcacatcttgaccgcaagcgagaccggctggggaactggatgaatgccctggaagcgcgaatgcatccaaacaaggccatcgtcgcggtcgctgccaaaatcgcccgcatcgcgtgggtgatcattaccaaacccggtgctctctatgaaaggaaggatccacgcttcgcatagagaccatccagcccagattgcgaggccggagagcatgatgacgaaacagacgatcagcgccgcgtaagccctgtgcaaaaaaatgggcaccatgcccgtaccatttattgggaacgctgcgtgcgaatctcatcatggcctggccgcaacagcggtccacttgcgagaggccggatacatttatgcaactgtccgacatcggcacgaaggcccttgcaaaggcagggcgggtcataca

SEQ ID NO: 1771 - DNA, 1494 bp, unidentified
  source 1..1494: mol_type = unassigned DNA; note = element_25d410f
  misc_feature 1..2: note = core
  misc_feature 3..229: note = LE
  misc_feature 230..1474: note = CDS
  misc_feature 1475..1494: note = RE
ctaatcagagttagcgagttgccatccggcagactcggtggtggtggccgccggcaggtgagcgctctgttgttcccgggctgtgagccctgacgaaagatcgcgcccctgccggctggccgggagagttgatcacttctgggatgccgtgcccaccgtgatggtgtgagcactgcttgattaggtcgctgatagttctcccgctggctgccgctggtgaccggtatcgatgacgggagtggggttgcggcttttcgtgggtgatgactgggctcaggaccaccacgatgttgaggtggtggacagctcgggggtgacgctggccagggcgcggctgccagagggcgtggccgggatggcccggctgcacgcgatgatcggcggcctggccggtgaccgggccgaggaacaggacgtgcaggtgctggtcgggatcgaaaccgaccgggggccgtgggttcaggcgctgtccgccgccggctacctggtgttcggggtgaatccgctgcaggcggcccggtaccgggaacggcatggggtgtcgggggctaagagcgatgctggtgatgcgcatgtgctggccgacatggtccgtactgattcccatcagctgcgtccggtggccggggacagcgcggaggccggcgcggtcaaggtggtgacccggatgcacaagacgctgatctgggagcgcacccggcacgtccagcggctgcggcacgcgctgcacgactacttccccgcagcgctcgaggcgttcgaggacctcgacgcccccgacaccctggagctgctggcgcgggccccggcgccggacgaggcggcccggctgaccatcgcccagatcagtgccgccctcaagcgcgcccgccgccgcaagatcggtgagaaggccgcggcgatccaggcggcgctgcgcgctgagcatctggggcagcccgctgtgatcaccgccgcctacgctgcctcggtccgtgccctggtcgcggtgctgggcacgctgaacgagcaagtgaaagccctggaagggcaggttgaggcccattttggggcgcacccggccgctgagatcatcctcagccagcccggcttgggaccggtcctcggtgcccgggtgctcgcagaattcggtgacggccccggccgctacgcgtccgccaaggccaggaagaactacgccgccaccagccccatcacccgtgcctccggcaagaggaagatcgccctggcccggtacgtgcacaacgaccggcttatcgacgccctcctgacccaggcgttcgcctcgctccggacctcccccggcgcccgcgcctactacggcaagcagcgagcccgcggctccgactacaacgccgccctccgccagctcgccaaccggctcgtcggcatcctgcacggctgcctcaagaccggcaccctctacgacgaggaaaccgcctggcctcatcactccggaggcgttgctgcttgacatctaagctcctgggatgt

SEQ ID NO: 1772 - DNA, 1226 bp, unidentified
  source 1..1226: mol_type = unassigned DNA; note = element_25d5bda
  misc_feature 1..2: note = core
  misc_feature 3..215: note = LE
  misc_feature 216..1211: note = CDS
  misc_feature 1212..1226: note = RE
  misc_feature 12..190: note = bridgeRNA
cttgtatctttctttctgtagtggttagctcccactacacgagaagaagtgagcctgtgtccgacctgaagcatccagtttgttctgtagataaggcccttcttctcaccttccacacctgatctgacactgaacggtagccaagggcgctgaccctgcatgtacaaggtgagtgggtgtgatggtttaatcgttgttatcggaagatattgctcatgtcctgtcgtttctatctcggtatcgatgttgccaaggccaagctcgattgtctgttgcttgatatgagcaacgccaaacgcaagtccaagtcgatcgtcaattcgcccgatggcgtagccgcgttgttaagctggctgaacaagcaggaggtcgccattcaagatgtccaggtgatcatggaacccaccggggtgtatcacgaacgcgcgctatttgccctggcccaagccggcttggcggtgtcgctggtcaatccggcgcaattgcgcaaattcgcgcaaggcattggcgtcaaaaccaagaccgatgccgccgacagcgccgtactcgcgcgttatggtgccgccaatcatccccctgcctggcagccgccatcggcgtctgcacgcgaactccgtgctttgcttgctcgccgtgatgcggtggcggaagacctgcaacgggaacgcaatcggacggagaaagcggccacagccatcgatacgccggagcgggtaaaacagtcgctgaacgaggccatcacctttctgcagaaggaactggccgagctgcaacgtgccattgatcaacatataaacaacgatccggaattacgccggatctggacgctgctacacagcattcccggtgtcggtgagcgggtggcggaccacatgaccgctttgctggcggcgcggcagtttcaaacggccgaacagctggcggcctatctcggcctggtaccggtcgaatggcaatccggttcctccatccacggtcgagcacgcatgtccaaagccggaccggctcatttacgtgcgttgctgtatatgccggcggtcgtcgccaaaacctacaatcctcatattcgcgctttatacgagcggctactggccaaggggaaaccgaaaatgtccgccatcggtgccgcgatgcgtaaactcgcgcatctgtgctttggcgtcgtgcattccggtcagccgtatgatgcaaattgggccatcaaggcttgacgggagagacggtat

SEQ ID NO: 1773 - DNA, 1453 bp, unidentified
  source 1..1453: mol_type = unassigned DNA; note = element_25e8a61
  misc_feature 1..3: note = core
  misc_feature 4..332: note = LE
  misc_feature 333..1157: note = CDS
  misc_feature 1158..1453: note = RE
  misc_feature 1204..1404: note = bridgeRNA
agatgggatattcggccggccgtcgtagtcccaactcttggttgaggtgctgcgcttcaggctgatgataggcgtggtctgcgttggggcagccacaagcatcagagggagaagcgcagcatgaaacattatgccggactggacgtctcggtcaaagagaccgccgtgtgcatcgtggacgaagcgggcaagatcctccgtgagttgaaggtcccgagccatcctgaggatttggtcgtggcgctcagcgatcccgcgtggcggctcgaacggatcggcttggaggcgggccccttgtcgcaatggctgttcagcggcatggctgggctggattgccggtggtctgcattgagacccggcatacgaaagcgttcctcaaagcgcaggtgaacaagagcgaccgaaacgacgcgcgcggcattgcgcagatgatgcgcgtcaatttgttccggcccgtgcacgtgaagacgctgaccagccagaagcgccgtgctcttctgaccgcccgcaagattctgcaggacaaggccctcgccattgagaacgacatccgcggcctgctgcgcaacttcggtctcaaggtcggcatcgtcggcgtgggcaagttcgacgaacggatccgcgagcttgtcgaacgcatgcccgaactcgtcgagatcatggaacctttgctcaccgcccggcagaagttgcgcgagacgttcacggcgctccaccgcaaattgcttgcgatcgttcgcgacgatggcgtgtgcaggcgcctgatgacaatccccggggttggacctgtcgtgtctttggcgttctgcgccaccatcgatgttcccgcccgcttcaagaactcgaaagccgtgggcccctcgctaggattgacgccggtgctcaatcaatcgggagaaagcctccgggtcggacgggtctcgttgtcgggagacgaaatgatgcgagcgcttctctatgaggctgcgcaagtcatgataacccgcgtgcagaaatggtcttggctgaaagcctgggcggtgaacgtcgccaaacgacgagggctaaagaaggccattgtcgcgttggctcgccgattggcggtcatcatgcatcgcatttggatcgacggaaccgtcttccgttggacgaaagaagccgcgccggcgaccgcctagcgcgaattccaatcaacgagctatcagcaaggagagtttgcaaaacagagttctgccgcaaggtggaaagatgtccttcgcgggacgatggatgaggcgagttcgcttgggctcttgtgcggatcgcgccaggcgcgatcacgacgcgagtcagattgggccgcctcattctctgatcccatgatgggagagcccaacggctcatcccgaagagaagcgcggacccgcgaggaacatcaaaccagcaagcagtgcagaagccgaaaagcgcttgacctcgacaggccgaatagaga

SEQ ID NO: 1774 - DNA, 1504 bp, unidentified
  source 1..1504: mol_type = unassigned DNA; note = element_25e93ee
  misc_feature 1..2: note = core
  misc_feature 3..213: note = LE
  misc_feature 214..1482: note = CDS
  misc_feature 1483..1504: note = RE
  misc_feature 5..210: note = bridgeRNA
ctgatggctctaccttcccttcacacgatggagcccggcagggagcgcttgcgaggcttgtcccttgaggactgacgtgagacggcgccccggccgggttccgggcagggcctgacgtccaggagggtgtcgtccttcgaggactggtccatcagcacggcgccgcgcctttcccgctcctcgtgcagcacggccgcgacggaaggagaaggtgtgctgggtgtcggtatcgactgggcggaggagttccacgacgtcgctctcggaaggcatgaggaaggagtcatcgagcagttccggatcgcgcacgacccggacggcgtcgcccggctgatcgggcggtgcctggcgcacgagccggacccggccgaggtgcgggtggtgctggagacccggcacggcctgctggtcgaggcgctggtcgacgcggggttcagcgtcatcccggtcaacccggatctggtcgcacggcgccgcgggccggccaagaagaaggacgacccggaggacgcccggatctgctgcctgctcgcgctggaccggcacgttgcactcaagcagctgatcccgcacagcgcgcaggccgccgaactgcgggcgattagccgcgacgacgagcgggccgcccgtgaccagcgccggctgctcaaccggctgcgtgctgatctgcaggtcacctacccggccgcgctcaccctggccggcgacgatctgggttccccgacgatgctgcggctgctcagcacctggccaaccaacgagcagctcgccgctgccacccgcgacgaactcgtcgcattcgcccgcgccggtaagcacggctggcccacccggttcgccgaccaggtcgccgccgcgttggccgccgagcacctgccggtccgggactacctggtgcgcgccaaagccggcggcatccggctggcagcggtgcagctgctggccgtgctcgagcagcgccgcgcctgggaacgtcgcatgaccgagctgctgctcggcgggccgcggaccggccgggacaagaccgtcaaggactccgacccggggaacgccatccctggcggcgagatctacctgagcatgcccggcctgggtgatcgtctcgccgccagggtcgcgggcgaggtcggcgaccacatcgagcagttcgcgacgccgaacgcgctgcaatgctacgcaggagccgcgcccgtcaccagacgctccggcaagagcgacttcgtcgtcgcccgacgcttggcgcacaaccgctacctcggcgccgccgttcaccagtgggcgttctgcagcttgagcagaagcgcctgggcgcgggagttctacgacgcgaaaatcaaagccggcaagagccaccacgccgcgctgcgcgccctgggcaaccgctggctcgaagtcctctggcactgcctgcacaagaacgtccgctacgacgaggccgtccaccggaccaaccgcaccaaagccgtcgcacccgccgcataaccgggtggttgacagagggtgt

SEQ ID NO: 1775 - DNA, 1168 bp, unidentified
  source 1..1168: mol_type = unassigned DNA; note = element_25ee7f6
  misc_feature 1..2: note = core
  misc_feature 3..179: note = LE
  misc_feature 180..1148: note = CDS
  misc_feature 1149..1168: note = RE
  misc_feature 33..200: note = bridgeRNA
cttgtatctcaaaagtggattactatgaactggcttagatttggcaaagcttgtgtagtccgattcctcccggggttattcaagcccgcagcatagggactgacgcacaagctgagccgttcatctgaagcccgaacagttgtccgaacttcaaatcgtatttgcaaggaggggtatagatgagcgggttaaatccacattgcgcaggcattgatgtttcgaaaggaaccctggatattgcaattagcggtactgccagccaatttgctgttccaaatgatatcgacagttttaatcagatactcaaagagctaaagcgaaatggcacacgattgattctgatggaggcaacaggaggtctcgagtcaggagttgcgtgctatcttcagtcagaaggctttgatgtggtcgtcattaacccccgacaggcgagagattttgcccgtgcaatgggttatctggctaagaccgaccgaattgatgccagagttctgcttcagatggcggaagttattaacctgcacccggagcgggaaaaatatattcgtcccatgcctgatactcacaggcaattgctggcagcgatggtggtcagacgcagacaattaacgatcatgctgaccgctgaacggaaccggttgcatccgtctaatccccttagtcataggagcatcagatccattattaaggcgttgaaagatgaaatagcccgcatcgaaggtgaaatggcaaaccatatcgcgaagaatttcagtgatatatcagcactgctgagcgctgttaaaggtgttggtgcggcaactgtcgccgtgctactggcagaagttccagaacttggttctctgtcacgtcgtgaaatcagcgcgctaattggtgtggcgccggtaaacagagactccggaacaatgcgtggtcgacgaacgatctttggaggccgagcttcagtccgcacagctctttacatgtcagctctggtaggaacaagacacaatcctgtaatcaaagagttttacgaacgtctggttgctgccggaaagcctaaaaaggtcgcattaaccgcctgcatcagaaaactactgaccattctgaatgcaatgctgaaaaagaatgaagcatgggactcttcgtttcatcgccatgcttcgtaatgagtgactaaagacagttg

SEQ ID NO: 1776 - DNA, 1400 bp, unidentified
  source 1..1400: mol_type = unassigned DNA; note = element_25f3ece
  misc_feature 1..2: note = core
  misc_feature 3..125: note = LE
  misc_feature 126..992: note = CDS
  misc_feature 993..1400: note = RE
  misc_feature 1171..1362: note = bridgeRNA
acatggggtaatcgcgggagcgagtttcccaagtcttagctatggaagtgggtggctgttccccgacaggatggaatacgggctcacgattcgcaccgggcccaggcatctcagggagaacagccatggaagactatatcggcctcgatgtttcgatgaaagagacagcggtttccattcgacgtgaaggcaagcgcgtctggcgtaggaggtgcgcctctgatccaaaggtcattgccgagcttgtccgcaagcgggcgccggccgcaaagcgcgtcgtgttcgagactggccctctatcggtgtggttctatcatgcgctgcgcgcagagggtttgccggcgatctgcatcgatgctcgtcatgccaaagcagcgctcgacatggccgcgaacaaaaccgacgcgaacgatgccgacggtttggcgcatcttgcagaagtagggttctttcgtgaagtgcgagtgaaaggcttcgacagcatgctgacgcgcacgctcgtggcggcacgcaccaggctggtcaggatcacgaccgaactctcaaaccagatccgagggctcattaagacattcggactgcttgttcccgccggcaaaggaagcacgttcgagaggaatgtccgcaatctccttgtcgaccaggacgggctcactcctatcgtgctgccgatgctggaagcctggcgcagcatgcgcgttcgggccgctgaactcgggcgtcagcttgtcgctggtgcgcgtcaaagccgagcgtgtcaaatactcgtgtcgatccccggtgtcggcgtaatcaccgcgacttcgttcgtgaccgccattgaggagccggacaacttcaagaaatctcgctccgtcggcgcctggcttggcctgactacccgacgataccaatataccaatcgggagaggtcgactatgatggccacatatcccggcggggcgatcgtcatttgcgagggcttctctacgaagctgcgacggtcatcctgacccgcagctgcgccgacaacagcctgcgaacatggggtctaaaactccgggagaggataggcttcaaacgagccgccgttgccgtagcccgcaaactggcggtgacaatgcatgcgatgctcaagaccggcgagttcttcgacaggaccgctggcgcgacagcgtgacggctttgagaatcgcgttcagtctctgagcgcgccgagacgtccctgccggggcgtggacagagccattccgctagatggggtcgcaccgctggctcagctgagtgcgtcgaatacattgaaggctctcccagcgaagctccatcatgcggcaaccgatgttgaccgcgaagacaaccctgcacccggcacacgcgtcttaagacgtgcagatacttgacgtcaacattgcgattagaca

SEQ ID NO: 1777 - DNA, 1374 bp, unidentified
  source 1..1374: mol_type = unassigned DNA; note = element_25fe88e
  misc_feature 1..2: note = core
  misc_feature 3..261: note = LE
  misc_feature 262..1305: note = CDS
  misc_feature 1306..1374: note = RE
  misc_feature 36..212: note = bridgeRNA
cttgtatgttgctgccgctaccccgatcaaggcctcgctgtgttatcgggagactggatcgggtttcggcgggaggccgttcgcaacctgaggcgcagaccgcaaggtgtgcagcctggattatagataggccccccgccctcctttctcaagccgcggagaatctcaggccataagagcctgcatacaaggtcggccagagaggttcaacagggtcggggagccgaaactcagtctaatccaaaattccctggagttgatatgccttaccatgctcaggaagaggtccaagttttcgcagggatagacgttagcgcaagagagttgaatgtcgcttggcgtcgaccagagaaagataaagaaacgactgcgacattcaccaacaccagatccggccacaaagcacttctcgctttcctgctacgtggaaatcagcgtgtccgcgtctgcctggaagtgacgggtaattacagtcttgatctggctttagcattgcaggcccacggccaggttgagatcaacgtcgtgaatccacgccgagcaagacgctttgcggaatctctgggcgaacggagcaagacggatcctgtggatgcacatgtactctgcgaatacgcactgcgcatgccctgggttccctggcagccgcctagttccacggcgctgcacctgcgtgccgtgatgcgggcagtggaggatctaacctccatcttgactcaggagaagaatcgggaacatgccttggcagccagccatgccttgccttcccttgtgctcacagagctaaagcgtcaccagcgctatctgcagaaccgcctcacacgcctgcgccgcgaagctctgcagctggtagcccgcgattcccaactaagtcgccgttttcagctgatgcaaactacgcccggcatcggcgaaaacagcgccttacagatactgggagagctggcggtgctacccgatacgctcgacgcacggcagtgggtagccttcagtgggctcgatccacgccgctttaagtccggtacttccgtagagcagcgaccgcgcatcagcagagctggcagtcgtcacttgcgccgtgctctctacatgccagcgctggtcgccttgcgtcacgatccccatctcggaagcttttaccaacacctgctaaagcacggcaaagcccgtctccaagcggttgtcgctgtcatgcggaagcttctgcacgccttcttcgccatgttcagatccgaccaaccgtacgatggctcccggttgtgtcccttcgagcttgcaaacaaacctgttgattcttgcggctgaagcaaaaagagaaagggttctccataccactcccaaagagaaaaaggcggttgccaacgaagagagaat

SEQ ID NO: 1778 - DNA, 1533 bp, unidentified
  source 1..1533: mol_type = unassigned DNA; note = element_2602c89
  misc_feature 1..2: note = core
  misc_feature 3..240: note = LE
  misc_feature 241..1416: note = CDS
  misc_feature 1417..1533: note = RE
  misc_feature 3..217: note = bridgeRNA
cttgtattatagagtagtagttattagagcccctctccaagggctgtgctacactgtaagggatgctgtggattggtcaatcgctcctaccacaagatggttaaggaaaggctccacccacagccctttgccgtattgttaatcagttagataccgccagacggtttatttagagcaaggttacagagcaaagcgccatgtggatacagcatcaaattattactgtcggaggtatcacctatggtttatgtcggaattgacgtggcgaaggacaagcatgactgtttcatcctcaattcggagggagaagtcctcgcggatgtctttaccattcccaacaacatggaaggcttcaattgcctgctgcaaaaaattcgactctgctccgttcctcaagacaaaataaaagtagggtttgaggctaccggacattacagctacaacattcttgggtttcttcttgacaacggtcttcccacctatgtcttgaacccattgcacaccaacctgtaccggaaaagccttagccttagaaagacgaagaccgaccgggtcgatgcacgaacgattgcggctatgcccatgtctgatgtgggcctcaagccctacacagactcagcttaccacaatgaggagctaaagtcacttaccagatatagattcgacaaagtgaaggaaagggctaagctgaaatcctccatagccaggctggtgtgcatcctgttcccagagttggagaagctggtgccgacacttcacatggcatctgtctacgccttgttggttgagttcccgggtgctgagcagatcgcggcggcgcatctgacacacttgaaagccaccttaggaaccgcttcaaaaggccgttacaatcgggacaaggccattgagatccgcgagaccgcacgagtatccatcggctctgtgatgccggcaaagtcgctggaacttcgtcacacgatccgtctcatccgcgaactggacaccgaaattgaggaaattgaagaaaccatccaaagcatcatggatgagctgaattcacccattacaaccattcccggtatcggtttccgcatgggggctatgatacttgccgaggtgggcgacttctcccgctttgattccccggacaaggtgctggcctatgccggactgtcgccatctacataccaatccgggcagcttacaaactgctatgctcacatggagaagcgcggttccagatacctgcggtttgccatcttcaacgccgccaagtatgtctgccattgggacccaacttttgctgcctatcttgctaagaaacgagccgagggcaagcactacaatgttgctgtctcccacgccgccaagaaactggtgcggctcatttgtgcattggagaaatccggagagccttaccgtccggcagcatgatttcctcacgatagcctgcgcggcgtcttaacagacgtctgctttgctatgccttttttgaactatctgtttttttgcatccctcctcattttagggcttgacttttaatagttagt

SEQ ID NO: 1779 - DNA, 1413 bp, unidentified
  source 1..1413: mol_type = unassigned DNA; note = element_2609c74
  misc_feature 1: note = core
  misc_feature 2..91: note = LE
  misc_feature 92..1123: note = CDS
  misc_feature 1124..1413: note = RE
  misc_feature 1177..1405: note = bridgeRNA
caatgggatggactcctcctcacctaatcggcatcgatgtgccaaaatggtgagtagacaacaaaccatctaacgatgaggagaagcccatatgactattatccgtgttggtgttgatattgcaaagtctgttttccatgttcatggtgctgaccgtcaaggtaaaacctgctggcaaggaaaatattcacgcagtaaatggcttgatgcgatcagcaagaaagtgcccgctaatgctgaaatcggtatggaggcctgtgcttcctctcatcactgggcgcgagaactccaaaagcgtggttaccgagttcgtttgattgccgcgcagttcgttaaaccctatgtcaaaagcaacaagaatgaccgtgttgacgctgaagctatctgcgaagccatgagtcgacctaacatgcgttttgtcacaccaaaatcggttgaacaacaggatatccaagcgatgcatcgagttcgtgaagaactgattgctcaacgtacagccaaggctaaccagattcgaggtttagtcggtgaatacggcatcatcgcgcccgttggcattcaccagttaaggcataatttgccctgctggttagaagatactgagaatggtctcacttatcctttccggcttttgttaagtgaccttgcagaagaccttcgttatcttgatgaccgtattcaaaagctggatgagcagatccttgaaagcgtccaacatgaccctgttgccaagcatttaatgacgttacgtggtgtaggccccttaattgccagtgctttgatcgcagcactaggtgatggaaaagcatttaaaaaaggacgcgatttcgcggcttctctagggcttacgcccaaacaacacagtacaggtggcaaggatcgactgctaggcataagtaaacgcggggatagttatttacgcaaactgctagttcacggtgccagagctgtaatgcgtcacatgaccaacaaggatgatgggctgagtcgctggttaaaaggactagtatctaggaagcatcacaatgtagccgtggttgcattagccaacaaaacagcccgtatggcttgggccttggtttacaacaatgtagattacaacgaaagcttggcagctgcatgagcattcaattgagtagatagatacgtcgaacgataagttaattagaagttaaatctcaccacgattgcgtggcactttgattgatggcgaacaggtcgaaccggcattgaaaaaaccctagaatgaaccggtggtttgagcccgagtaaccgattgggagtcagtgcgcggatagcccattagggtctgatgcctcatagcggcatcattcatgagaccggatacacgtaggcagtcgtaccttagcttcgatcaaacaaagtgcttgcaaaagaggaggagtccataca

SEQ ID NO: 1780 - DNA, 1611 bp, unidentified
  source 1..1611: mol_type = unassigned DNA; note = element_2619c6d
  misc_feature 1..4: note = core
  misc_feature 5..311: note = LE
  misc_feature 312..1475: note = CDS
  misc_feature 1476..1611: note = RE
tcacgtataatcaatcttaaggaaattaatccgatttttgattgattctcctttctaccaacatttgaattattatacaaacaatgtataataattcacgcactgtggatttgttactattttattacagccactttagtggactggtgcaaggtgactcaaaccacagatttttaatttaattgttaattagttagttaacacgttagtttttcctaatcgatgttttattattctacgtgattacataattagaaattctgtgccaaacttacagtgcaaacaaaactaatttaaggaggtgcttatctatgatatattatgttggtattgatatatcaaagtataaacacgatttctgtattatctcaaatacaggcgaaataattgttgaaaatgattcttttgaaaacaacaaaaaaggatttcaattgttattggaccatttgaaaccctataataaatctgatgtccatatttgctttgaagcaaccggacattactctttgaatttggaactgtttttaactgatcaagattattcatttatgaaaatgaatcctcttgtcatacatcagtttttaaaagctcgtagcttacgaagaactaagacagataaggcagatagtataactattgcgaattatctaatgtcagttccatataaaccaaattcagatttattataccacatttatacattaaagtcactttgtagatcaagagaacaattaattaaagaaagaagtaaatttcaagttcttttaacgaatgttttagataaagttttcccagaattaaaacctttctttaataataagatttcggaaactttactttatattttaaataaatataaaaaccctaaacatatatcattaatgaaagattatgattctttaagaaaaatatctcgtggaaagttttcttatgttaaatttgtcaaacttaaagaacttgctaaaattactgttggtcattatgataacaatactgatttacttatttctacctatgtttctcttattcaaacctttaatgacaaaattgatccaatagataaacaaatttcaacaattatcaaagaactaaatccaagaatgttgtctattcctggaatgggcgaaatatctgcggcaactattttatctgaatatgaagatatcaaaaatttttcttctccaagtaagatgttagcttttgccggattagaaccaagtgtcatagaatctggaacattacagtctaatggtaaaatggtcaaacatggctctggacaccttagatattctatcatgaatattgcgatgattattttgagatattcacctactttttatgattattaccttaagaaacgttctgaaggtaaatgtcatcgtgttgctttatctcatgtttgtaaaaaacttattagagttatttactgtttagagaaaaacgacatcgcttttgatccgtctttgcttaaataaaatctttcttaaaattttatttaactccaaaaatttttaaaaattctggtttttggagtcttttggcatgggattctgttccaattattaatttttttcatttatttgaaaaatatggttgacttttaatagttag

SEQ ID NO: 1781 - DNA, 1340 bp, unidentified
  source 1..1340: mol_type = unassigned DNA; note = element_261d759
  misc_feature 1..2: note = core
  misc_feature 3..262: note = LE
  misc_feature 263..1330: note = CDS
  misc_feature 1331..1340: note = RE
  misc_feature 18..248: note = bridgeRNA
tctactggtccaccatggtggtgtcagggagggtttcgacgggagctctccccgatcgcgacgctggggtgactcctacaagatctgtccgagatggctttctcgtgacgtgtccaccagcgctcgcacaccagggccctgcctgtgggagtgacctaatagaagcctgtgcatcccataactcacagtagatctgtcccccacggcagagccctggcagcagtcccgtccctccaccaaaagacaaggacaggacaccaccatggtgacagtgggcatcgatccgcacaagcagatgcacctggccgtcgcactggccgacaacggcacccggctgggccggcccctgaaagtccccaccggccctgaggccctggaacggctgctggcctggatccggcccctggcccagggccggccggtgctgtgggccatcgagggcggccccggcctgggccgggcagtggccgatgcgctgctgctgcacggccagcaagtggtgtgggtcccggtgcgggccatggccgcccagcgccgtatcaccgccacccggggagccaagtccgacgtgatcgatgcggtggcggtggcgcgcgcggccatggccgacccccacctggcccgccaccgcatcgacccccgggtgcggcagatacggctgctggtggacctgcgcgccgacctggtcgagcggcgggtggcggtggccaaccggctggccacgatggtgcatgtggagctcgagcatgcccctggcgggctgtcgagcggggcggcgctggcgcgggtgcgccaggtggtggccgcggcagcggtggaggagacggtgcggtgggtgctgctggccctggtcggtgagctggaggggttgctggcgcggatccgggaggtggagcggcggctgcgggagctggtggagccggtggcgccgcacctactggccattgccggggtgggggtggtttcggcggcggtgctgctgtcgcaggtgggggatgtggagcggttcgcgtcctcggcgaagctggcccgctatgcggggtgcgcgccgattccggtgttttcggctgatcgggagcggcaccggttgcatcggggtggcaatcggcaggtgaaccgggtgttgcacacggtggcgatggtgcaggcgcaaaggttcgggccggcgcgggagtatgtggcggcgcgggtggaggccaagggcaagcggggagcgcagcgggcgttgaagcgtcatctggtggatgtggtgtatcgggcgatggtggctgaccggcagcaatggcgggctgaagaagccttgcaagaggcctgtcagcccgccgcttgacatagaagcg

SEQ ID NO: 1782 - DNA, 1184 bp, unidentified
  source 1..1184: mol_type = unassigned DNA; note = element_2623e4a
  misc_feature 1..2: note = core
  misc_feature 3..203: note = LE
  misc_feature 204..1181: note = CDS
  misc_feature 1182..1184: note = RE
  misc_feature 28..187: note = bridgeRNA
tcctttagatttgttttgattatttttagaatgagaaggaagcagaagtaaactatcctttcgtcagagtttggactcatgtctcgatttagacttctgcctccctttcatcaggaactcaaatagaaattagggctaatgacccattattaaggacttgagccgaactgatgaattctcatttcaattcttaaaacaaatttatgaaaaagatttttattggaatcgacatcagcagcaaaacattagatatctgtttaaagactgatggaaaggttgagtatttcaacattcagaaccagctaaaacccattagattgttctttaaaaagcacacaacagtaggaaccgtagttgctatggagaataccgggcgctacaactggaacctgtttgaggttctagccgagctagaactattcgtttatgtgctctcaccattgcacttgaagaagagccttggtctctcacgaggaaagaacgataagattgattcgcttcggatctgtagctacatcgaaaagaatcagcaaggaactaaacaatggagccagttatcgttatcgataagaaggcttaaagttctgctaaccgagcgggcaactagggtagcaatgaaaagcagttttgtcagacagcaacatgattataagatgatgaagtcaatcgcgttggacaaagaactgctaaaactgaataaaaagctcattgaatcgatcgatgtgcagataaagaagattgaatccgatattgaaatgaacattatgctggatagcgaactcaagtgcaaagcggaacttatacggtctgttccaggagttggaaaggtggtctcatggatgatgattgcaaagaccgagggctttacatcgatcagcgacccacgcaaaatggcatgttactgtggagtggtgccatttgaccatcaatcgggaacctcaataagatataggcccagggtgtcggtatttgcagataaagggatgaaaagcctgctccaccttgcggcaatgagttcgataaggctaaataatgatctggggacatattataaacgaaaagttcaggagggaaagaacaagatgagcgttttaaatgcggtaagaaacaaaatcatccataggatattcgctgtaataaaaaaccaaaccatctataaaaatgatttggttttgtcatagaaa

SEQ ID NO: 1783 - DNA, 1334 bp, unidentified
  source 1..1334: mol_type = unassigned DNA; note = element_262f24e
  misc_feature 1: note = core
  misc_feature 2..198: note = LE
  misc_feature 199..1083: note = CDS
  misc_feature 1084..1334: note = RE
  misc_feature 1114..1328: note = bridgeRNA
taatgagatggtccgccgcgcgacaacactaacatcgcgcatacggaggatcatcgacatgaagattcgctcaatcggcatcgatctcggaaagaccaccttgcacctcgtcgccctcggagaacgcggcaagattctgctgaagaagaaactgtcgcggaagcaacttctggcattgacggccaatctgcggcgtcattgatcggtctggaagcctgttcgggtgcacacttcctggcgcgagcactacgcgaacaggggcacgacgcacggctgatcccggcgcagttcgtgaagccattggtgaagtccaacaagaacgattttctcgatgccgaagcaatcgccgaggcggtggaccgcgagaatatgcattttgtgcccattaagacggacgatcagctggatttgcaggccctgcatcgggtgcgtgagcggctggtttcgcgacgcacgtctgtgatcaatccggtgcgagcgttcctgctagagcgtggcatcactttccgcaaaggcccggcgatgttgcgacggcagatgcccgagatcttggaaaatgccgacgagcaacggtcgacacggattcgcggattactagccatgctgtggcaggagtggaaagagttggagcggcagatcgagtcgcttaacagcgccattgaaggtacgcgccgagacgatgctgcctgtcagcggttgcagcagatccccggagttgggcccttgattgccagcgccgtagtcgccgccatcggcaatggcgcagccttccgcaaggggcgagacttctccgcctggttaggactgattccgaaacagtattccacaggaggcaaggccaagctgcttggcatcagcaaacgtgggaacccctacctgcgaaagatgtttagccatggcggccgagctgccgtgttgcggctgcgacgagaaggaacgctgatcggcaaggggatggatggattggaggccagggcgccacgaaacgtgctgatcgtagccatggccaacaagctggcacggatcacctgggcggtgcggtcgagcggtgaatcctatcgaccggcaaccctcgccgcctaagctgcagtcgctgactttttccaccaaggtctgctgaaggagaaacgacagggacgagagaacagtcaaacggcgtacctgaaaacctgcgttgtgaaatgcgtcggaaagagcgagcgctttaccaggacagggacgcgcgtatctcatcaagcgcccggagacctgatctccactaaggccggatacatttgcggcagactgaatctctcctcgaagttttttcttgcaggcgcgcggcggaccataca

SEQ ID NO: 1784 - DNA, 1384 bp, unidentified
  source 1..1384: mol_type = unassigned DNA; note = element_263e05d
  misc_feature 1..2: note = core
  misc_feature 3..89: note = LE
  misc_feature 90..1097: note = CDS
  misc_feature 1098..1384: note = RE
  misc_feature 1150..1383: note = bridgeRNA
ataatgaaatggacccacccctccttgatcatcggcttcggtgagccaagatgagtttgtaacaacacatctaaaaaggggtgagtcacatgaagattagcgcaattggtcttgatatcgcaaagtctgtttttcatttctacgccgttaaccaagccggtaagcatgttcgcaagaaaatgttaaaacgcagccagctaatgccttattttgccaaaattgagccctgcttggtggcaatggaggcctgcggcagcgcccatcactgggctagagagtttcaaaaactagggcatcaggtgaagctcatcgcgcctcaatatgtaaagccctacgtgaagggcaataaaaacgactataacgatgcggagggcatcgccgaggcggtcttactccctaatatgcgctttgttccgattaaatcgttagagcagcatgatgtgcagatggtacgggagagactgacaaaaagccgtacagcactggcaaatcaaatacgtggcctgttggcagaatatggccttgtgattaacaaaggtctggcggctgtacgcagagaattgccgctgatattagaagatgccgacaatggcttaagcaccatgagcagggagtccttttttacgctgctcgatgagttacatgcgttagatgtccggcacgagcagtgtgagcaaaagatcaaaggaatcaaccggtccaatgacatatgtaggcgtcttaacgacattcagggcatcggccctgtgaccgcaaccgccgttttcgccgcagcggggaatggcaaagacttcagcaatggcaggcacttctccgcctggctcggactggtgccgaggcagcactcaagcggtggcaagaatacattgctgggcataagtaaacggggcaacgcctatttgaggacattatttattcacggtgccagagcggtgctgcgttgtgtggccaacaaaagtgatcgatttagccgctgggctagcgccttaatggagcgtcgcggccacaatcgagcttgtgtagcggttgccaacaagctagcaagaatcgcgtgggtcatcatggcaagaggcgaatcatacagtcccgcgatctagcctcgagacgtaatttaaggcccgtgataagcgggtcaccgagtaggtaaagcctacccagaagttgcttaggcactgagatttgatgttaaaacaggtcagaccggctcattaaaaacctgcttccgccataggcttactaagccgtaaggatgatgaggagaatgagcgcagatattcatcagggccagggagcgtaaaagccttccaccaacaggccgaatatatgggtgcaatgatttcgttttagatcggtcgcatgccttgcaaacggggtgggtccatat

SEQ ID NO: 1785 - DNA, 1236 bp, unidentified
  source 1..1236: mol_type = unassigned DNA; note = element_26402b3
  misc_feature 1..3: note = core
  misc_feature 4..213: note = LE
  misc_feature 214..1137: note = CDS
  misc_feature 1138..1236: note = RE
  misc_feature 16..192: note = bridgeRNA
gcttgtgtcttgcgctgggtttaaactgaggatgagagcggtggatggcaagccgaccgacagcggtgcttaaagcacgtgtgggagcctatgctgccatccacctctccactctggttattgagcccgaacagttgaacgagccgacctcgaacagtacaagcgtgggcccagccagagcgctctcaccattgagtgtaagagggtttggccatgtttgcaggcatcgatgtttctaaagacgatcttgaagctcagctggattccaaagacgccggtataaattgccccaatacagcgaatggcttcccccttttgatcgattggctgaagagtcaccaggtgcgttgcgtgctcctggaggcgacaggcggctacgagcgacaggtcatgaaagcacttcaaaccgatggcttcgaagttatacgggtcaaccccagtcgagccaggagctttgccaaagcgatggggcagcaagcgaaaaccgacccaatagatgcacgacttctcgctcagttcgcagccactatcaagccccccaaaacccagcctacaagccctgatcaagacgatttacgcgccttggttcatcagcgcgagaactttgttcagcagcgaagtgacgacgaacgacgtctcaaaacagccggttcggatgccgtcaaaccgttgctgaaaggtcatatcgattacctgaacaaagtcatcgtgttgctcgatgcacagattcgccagagtgctgaaagccttgatcgaaaaagggttttacggctgtgctcggtgaaagggataggacttattaccgccgccagcttgatggcctatctgcctgaactgggcaaagttgggcgccatgaaatcgcagcactggctggccttgctccgtataacaacgacagcggcaagcagaaaggtaaacgctacatcagcggaggaaggttctcggtccgacgctcgttgtacatggcatgctggtcggttattcgctttcagcctgaattcaatgcccgatataaggctctgttagataaagggaagtgcgcaaaagtagcgcttatcgcctgcatgcgggtgttgttgatacgtctgaacgcaatgatccgagacgattcagagtggagagatcgcgtagcgtaatcagctacgcaatcagcactggagtagtacacggccatcggctgtgggagtttttgtggctgacttgatgatgttttttttaaaggtatcaagacagtt

SEQ ID NO: 1786 - DNA, 1552 bp, unidentified
  source 1..1552: mol_type = unassigned DNA; note = element_264529c
  misc_feature 1..3: note = core
  misc_feature 4..520: note = LE
  misc_feature 521..1423: note = CDS
  misc_feature 1424..1552: note = RE
  misc_feature 8..223: note = bridgeRNA
gttcgtattataaggttagccagtttttactggttgacctttttttaatagaatctattatatcagtagccagggtaggacgtacgggtgcgtgggacttgatcccgtgaactaaactgtccgccccctacttgtagaaacatgtttgaggctggttgggacgcagatctcgaataacaagcgaagctatgacactacatggaggcctaggggtactggttagtaagtagaggaggaaaaaacaatgaatccagttgttggtctggatgtggcaaaaggagagagccaagttcaggcatttttagatcaatctaaaccgtatatcaaagaggagttagatcattttttagaatttctaaaagaaattgaagaggtgacagggcaaatgcctatggtcattttataatctacagggcattaccattctcctgttattcaatacctggaggaacaagggattccatatatcttactaaatccgattatttcttatcaggcaaagaagtccagcttacggaaggtgaaaacggacgctatcgatacgtaccagttgtgtgtgctgtattacaaagaggatttagaacctcataaaattagaggaattcagctattagaccttcggaatttgtccagacaacaggaaatcgtaacgaatatgtatgtggaagctaaacttcagtttcacaccattttagatcaagtgtttcctgaataccggaaggtttttggggatctatatacaagggtttctttattgatattaaaggaatatcccacttcagaggcggtattaacagccggggaaagtaaactagcagagagtgttatagagttctgtcctagccgatcgggtcaatgggcatgggaaaaagcaaaaaaaataatggactccgcatctcgaaatccattcaaaaaaaacgtgtatcaaagtcacgtaatcaatcttcgtatgtatattgagttgctttttcattaccagggacacccctctgatttggaagatcaaatagtggccctggcaaatgaactggaagaatataagatcatccaatcgattcccggtataggagaaaaaatcgcagccacgattatctctgaaattggtgaaatcgatgagtttaatcatccgaaaaaactggttgccttcgctggagtggatccaagtgttcactcatcgggtaagtttacggcaaccattaaccgtattactaaaagaggttcaagtagattacgtcattctctgtatcttgccgtactatgcggcataagaagttcaaggaacaaaaagcttaaagctttctatgataagaaaaaatcagaaggaaaacctgcgaaagtgtcaatcgttgcctgtatgaataagttgcttcaatggatttacgctttattaagcagaaaagaaacgttcctagatttagcctaattaacggttttgtgaaacagagaaaaatccttccaaaatggttttggaggggtatttggcatggccaaaaatggtatatcataagggaaatgaaaatattagagaaagatattgacatcctattagctg

SEQ ID NO: 1787 - DNA, 1830 bp, unidentified
  source 1..1830: mol_type = unassigned DNA; note = element_2650651
  misc_feature 1..2: note = core
  misc_feature 3..439: note = LE
  misc_feature 440..1681: note = CDS
  misc_feature 1682..1830: note = RE
  misc_feature 124..413: note = bridgeRNA
ctcgtataataatttttgtaaggttttgatgatacattttccagttataaaccttacctgaacttatgccatataccataaattaactggaaattttcttgtgtgcttcagagtcatttacgttgtttggctcattgtaccttgataattttattttgcttttatctaatgcctgtgtaacaatagctttaggccattgagagcggttctgctttctcctgtaggatctttatggtcgcttcttgtaaagtcagttcccctggcctggtgttagctttaaaccgctgggtgtttgtccggcatcctttctcctatatggcagttcaaggagccgtgcatggaggattccggagcgtattctaattgcgaggatgttgatgcgccaggtaccacgggcattagttaaattttaatggcctgcaaatttaacaggaaggagatgatttcattgtcaaattcattactggtcggtattgatgtcagtctcaacgacaacaaagtccgtatcctccatcctgatggaaccagtctttcaaagtttgttgttgcaaactccgttcccggtgcaaaaaccctttcccagagggttgctggaattgcggagaagaacagctttgattccattgtaatcggtcttgaatctacttctgtctatggtgatcctcttgtctacttcctaaagcaagatgcctctgtgaatagattcaacactaaaatccatgtgcttaatccaacacaggtaaacaagtttaaaatgatgtaccctgacctcccaaaaaccgatgatatagatgcatgggttattgcagagcatctacgcttcgggcgcattaacaaggaggtttacatggatgaccgttacaaagcacttcaaaagcttacaaaggctagattccatacggttcaaaaccttgcaagggagaaaaactggttcctcaacaaccttttcctgaaattttcttcccttgcacaagagaagatcttctcagacaggtttggagctacgtccagcagcatcattgaagaattcttttctgttgatgaaatctcttatatgccaattgaagagttggccgagttcatcaacaaaaagggtaaaggccgtttcgaaaaccctgatgaaattgcagctgctgtccaaaaggctgccagaagttcctaccgtctcccaaagacggttgcggactctgttaatcaggtacttgccgtatccatggttgccatgaaagcatacaaggaacagcttaaaatctttgataaggctatagaggaacagataaagcttattcctaatcctttgacctctatcaaaggaattggccctgtatattctgctggaatcatagcagaaattggtgatattcatcgtttcaaggatcaagcagcattggccaagtttgcgggtattgcctggaccaagcaccaatcaggcaatttcacggctgcacatactcaattgattaaattcggcaatcgatatttgcgttactacatcatggaagccactaacaaagtgagaatgcacgatcatgagttcaaacgcttctatgacttaaagtacagccaaacccccaaaacgccacacaaacgagcacttgcactaactgccagaaaatttgtccgccttgtctatgctcttctgcatagcaatcggctttatactccgccaaaaggagagtaatttccaattggcattccacttcctaccatatcttacaagtaaattgtggtaggtttattggggagttctttctttatactttttggtgcctatacatcctgttttcataaaacttttttccattcacctcttgacatttaaccgctgga

SEQ ID NO: 1788 - DNA, 1620 bp, unidentified
  source 1..1620: mol_type = unassigned DNA; note = element_26549f1
  misc_feature 1..2: note = core
  misc_feature 3..271: note = LE
  misc_feature 272..1495: note = CDS
  misc_feature 1496..1620: note = RE
  misc_feature 13..291: note = bridgeRNA
ctcctacaatatagttacggtataaggcacggcagccagccgtgtcttttgtcgtctcaaagctgaagctgtagaatgagagaataaatggcctgacacaaaaaatcctgggccaacacgcccgtagtggagtcagtcagccgtctctctcattcgcagcattcgatttgcgcaggtagagccatcattcggtgcgctcgcgtcaaccaggagattgaacaagcggcgagaaacagagacggacgccatatcaatcacacaggaggagatcatgaacgcagtaggaattgacgtatcgaaagggaagagcatgatggcggccctgcggccaatgggtgaagttgctctgccgccaaaggagtatccgcacaccgaggttggcctggagcggatggcgctggacatcctcgcgcttggggaggataccagggcgctcatggaggccacaggccggtatcatgagccagtggcggcggcgctgcatgagtacggtattcgtgtgaccgtgctcaatccactgttcatcaagcagagcggaggcggttccatccgcaaggtcaagaccgacaaggctgatgcgatgaagattgccaaatacgctcttgacaactgggtggatctgcgggaatatacccctatggaagcaattcgagaacaactgaagctgtgttcccgccagtacaatctctacatgaagaatgtggtggtgctgcagaacaatctcatttctctcactgacaaagtctttccgggggtgaacgagctgtttaccagtccggatcgtgcggatggtagccagaagtggattgatttcgtcacgacattctggcattgcgagtgcatctgcctggtcagcgagacagctttcaccgagcgctaccgcaagtggtgcaagcggaaaggctaccagttcagcgcacagaaggcggctgaactgtatatggacagcatgggccatatcacgaccctgccccggaacagcaacaccaagctactcatcacgaccgcagccaaggagctggcctccgctaaggctacactggttgtcctgcgcaccgagatgaccaggttggcccagcagctcccggagtatgagacggttcggagcatgtacggtgtgggggaaaccactgccgtccagttaatagccgagattggcgacgtgcgccggttcccccgccgcagctctatcgtgagctttgccggtgttgatccggcggtggataactccggaaagcacatttccaagagcaatcccacaacgaagcggggctctcctcacctgcgcaagacactgtaccagattgtccgcacctatctccgcaaggctcctgctgacgagcaggtgtaccagtttctggacaagaagcgggccgagggcaagccttatttcgtctacatgaccgccgctgaaaacaagttcctgcgcatctactacgccaggctcaaggagtgtctcattgccgctgattccaaggagccttccgaggattaactggcactaaaatctatggtttatttggtctgcaaaaaaattctcttttgcaggcttggtttgctatacccttttttgccctcttaaaaatttttcattttagggcttgacatttgtttgcagga

SEQ ID NO: 1789 - DNA, 1486 bp, unidentified
  source 1..1486: mol_type = unassigned DNA; note = element_265627a
  misc_feature 1..3: note = core
  misc_feature 4..234: note = LE
  misc_feature 235..1461: note = CDS
  misc_feature 1462..1486: note = RE
  misc_feature 1..216: note = bridgeRNA
cccttaccttgctcgtgagccttgagcgatgctgagggctcgggaagtccggcggtgccggtatggctcatggccccctgtcacttcgatggcctggggggtgttgccgtcggcacggtcgggtgcgtgaacctctgatggggacatgcgactgatcgctggttcgtaaggtggatgacggcgagcgcacccaggacggccttcccggtcacacaccgagtgaagggagccagggtgagcacaccagacgacgtcgatgtctggatcggccttgatgtcggcaaggaagaccacttcgccgacgtcctcgacgacgagggcgagtcgttgttcgctcggtcggtcgcgaacgacgaggccgacctggtcgcactgatcgaggcggctcgacgccacggcacgccggggctggtgatcgatcagccaggttcgatcgcgcagctcgcgatcgctgtcgctgcgcagcaccaggtgccggtcgcgtacgtgcccgggttggtgatgcgacgagctgcggatctctatccgggtgaggcaaagacggaccgccgcgacgcgttcgtgatcgcagacacagcccggactcggcgccgcagcgtgcactggctcgacgccggcagcgacgaactcctcgagcagctgcgggtgttgaacgggttcgacgtcgacctcgccgcggacctgacccggttgacgaaccgtctgcgcgactcgctcgtggcggtgtcgcctgcattggagcgggcggtcggctcccgcctgcaccaagccggcgtccgggacctgctcgccaagcacccgaccccgacagccttgcgtgccgcgggtcgggctcggatcacctcggtcgtgaagaagcgttcgccccgagttgccgtgaaggtcgctgacgcggtgatggcggcattggacgcgcaaaccgtgacgatgcccgccgagcaggctgtcggtcgggtcatcggcgagctcgccgtcgagctcgatcgcatccacacccgccgcgacgcgctggccgctgagatcgaagaggtgttcctggcgcaccctttcggccaggtcctcgtgacccttccggggatcgggccgaggaccggagccaggatcctcgccgagatcggtgacggcacccgattcgccaacgggtcgaagctcgccagctacgccgggctcgccccggtgacccgccagtccggcaccagcatccgcggcgagtcccagtcccggcgaggcaaccaccggctcaagaacgccatgttcctcgccgcgttcgcgtcgcttcgctcgcccgactcgaaggcgttctacgaccgcaaacgcgctgagggcaagaagcacaacgccgcggtcatctgcctcgctcgacgccgctgcgacgtcatcctcgcgatgctccgcaacctcgagccctaccgaacgccagtcacgccaccagcagtcgaggccaccccgatcgctgcgtgaaccccttgacaacaacatggggaca

SEQ ID NO: 1790 - DNA, 1433 bp, unidentified
  source 1..1433: mol_type = unassigned DNA; note = element_2657b67
  misc_feature 1: note = core
  misc_feature 2..138: note = LE
  misc_feature 139..1158: note = CDS
  misc_feature 1159..1433: note = RE
  misc_feature 1195..1430: note = bridgeRNA
atggtatggacgcctcccccctcaggggtgaagtaagcgggtgagtttgggaaggaagaggaccctccgtgccgacggcatccaagtgccttagtgtggaaggtgttcagacttcacaggctaccggagggtccagagatgaagagtatcgtagttggagtggatatcgcaaagcgggtgtttcagctgcactgggtggagcccgagacgggcgagatggtgtcggtgcagctgaagcgggagaagtttctggagcattttgccaatcgggcgagctgtgtgatcggcatggaagcgtgcgggggctcgcagcactgggcgcgatcgctccagaagctcggtcaccgggtgaagctgctgtcggcccggatggtcaagccgttcgtgggcggcaataagaacgatgtggcggatgcacgggcgatctggaccgcggtgcagcagccgggggtcaaggcggtggcgataaaaagcgaagcgcagcaagccgtgctggcgctacatcggatgcgcgagcaattggtgaagttccgcaccgcgcagatcaatggactgcgggggttggtgacggaatacggggaagtcatgccgcagggtcgagcgggaatcaagcgtgatatcccgggtgccctgggtcgattatcggatcggttgccggcgatggtgatcgacaccttgcgtgagcagtatgcgcgactgggtgagctcgatgagcagatcagccagatcgagcggcgcctgcggcactggcaatgtgaagactcggcgacgcagcgcattgcggcgatcccgggcgtgggtctgctgagcgcgacggcggcgattgcgacgatgggcgatgcaaaggcctttaaatcgggccgtgagtttgcagcctggctcgggttagtgccccgacaaatcggtaccggtggtcgagtgagattggtgggcattagcatgcgcggcgataaatatcttcgcacgctgctgatccacggcgctcgctcggtgctgacccatagcaagtcaccgccagagtggttaaccgagttactgaagcgtcggcccaagaacgtggccgtcgtggcgatggcgaacaagatggcacgcacgatctgggcgctcacggcccatgaacgggcgtaccaatcagggtacgtgagccagcccgcatagcgctggaatcacgatcgatgaactattaacagaggaaggtacgccaaaaggttgcgcaaggactacaacgtgtgatggtcaacaggtcagaccgtgacccgccaagcctgaatggttttccgagcttcgagctctcaggagaaatgaggtgcgggtcagcggaatccatcagggcccgcaggcttcggtctgcaaaacaggccggatataaacctgcagccttatctgtcggtcatcacaccgaaaagttcttgccatcgggaggcgtccatata

SEQ ID NO: 1791 - DNA, 1605 bp, unidentified
  source 1..1605: mol_type = unassigned DNA; note = element_265c82e
  misc_feature 1..2: note = core
  misc_feature 3..278: note = LE
  misc_feature 279..1325: note = CDS
  misc_feature 1326..1605: note = RE
  misc_feature 16..301: note = bridgeRNA
ctcctaatataaatgtgtagtggttatactcctcaacaaccagctgagggtatagtcctctcgttgctaaagctgttagaatgtagtggcattggtttggacggacacctccttggacccaacgtccgtaaataagtctgtctgccaaccactcattcgcagctgttcggtttacgtagattgaaccgcgtaaagtgcgttcgcttgatacccaggagattgaataagcaatgaggaatggttgacccactgcaaatttttctttggaggtatatcctatgttgaacgctgtcggtattgatgtttcaaaaggccaaagcactatctcaatcctgcgtcctgcaggtgaaattgtacggaagcctttcaatgttgttcattccgtcaaagagctctcggagctggtctccgttgtcggcagtcttgaaggtgataccagagtcgtcatggagacaaccggccattatcatgaaccgatactcaaggctttcctcgatgcaggcatttttgtctctgccgttaatccttctcttatcaagcgtcatgacagtgatgaaaatccacttcgcaaggtcaagtcagaccctgcggatgccagaaaaatcgccaagtatacccttgacaagtgggagcatctgcatcagcattcagctatggatactactcgaatacaactgaaaacattgaatacgcagttccatttctttatgcagcagaaggtctctttgaagaataaccttatttcccttctggatctgacctatcctggcgcaaatgctctatttgacagcccggtccgctctgatggaagtgaaaaatggattaattacgtacattccttctggcatgtggactgtgtccgtaagattggtctgaaagccttcacagagcgctatcagagcttctgcaagcatcatggctataactttcagccacgcaaaccagaagagctttttaacgcttctagggaacttgtcgctgtcgttccgaaagatcctgtttataaacagatcatcctcggcaacatcgagcagctgaacacggtttccaaacagatcgaagaattccgccacaagatgaatgagcttgcatcttcgcttccggaataccagactgttatgtccatgtacggcgtcggaccaacctacggacctcagcttatggctgagatcggtgatatttcgcgttttaatcatcgctctgccatcacggcctttgccggtgtggacccgggagttaaccagtcagggacgatgaactatgagagcaatcgtgcttcaaagcacggagcaccccgtcttcaaaaactcttttccaaatcatgaccaccttacttcagctagcgccttcggacgatccggtctatcgcttcatgatgaaaaagaaatcagaaggaaaaccttatcaggtatacatgaccgccggagcgaataagtttcttcgcatctactacggaaaagtcaaagaatacctggccgcgggggccgctgaataacaaatgtctttcctattttctctggtcagcgaattcggtggccttttttgtgatacctccaattctgcctactgatttttcaaatttaggcttgactttttattagtaga

SEQ ID NO: 1792 - DNA, 1461 bp, unidentified
  source 1..1461: mol_type = unassigned DNA; note = element_26611de
  misc_feature 1..2: note = core
  misc_feature 3..77: note = LE
  misc_feature 78..1193: note = CDS
  misc_feature 1194..1461: note = RE
  misc_feature 1192..1448: note = bridgeRNA
tgttggtgtggacggccccccgacggcatcgatgtgccagaatgaggtcgttggatctcaagcaagggaggccgtccgtggataatcttaagcgcattggcatggatacgtccaagagtgtttttcagctgcatggggtggatgaggccgagcagccaatactgcgtcgaaagctgcggcggcgtcaggtcgtggacttcttcaggaagctgccggcgacgcaagtgggtatcgaggcctgtggcgggtcgcaatactgggcgcgtgagcttgccgccttgggacatgatgtgaagctgctgccggcgcagcatgtgaagccttacgtgagacgcaacaagaacgatgcggccgatgccgaggcgatctgcgaggcgatgagccggcctcgcatgcaagaacggttcgtgccggtgaagtcggcggagcagcaggcaggattgatgctggcgggggtacgcggccaattgatcgcccggcgcacacagctcagcaacatgatccgtggccacgcggccgagttcggtctggttgccgccaaggggctggacaagctcgagccgctgctggcgcgcatagcgacggacgagacagtaccggagcttgcccgggagctgtttgccgagcttggcgaggagtatgcctggctggggagcaagctcaggcaggtcgaagcccggctgctggcctggcatcgcggcaacgagctgagtgtcaggttggctgagattcccagtatcggcccgatctgcgctgcagggctggtgatgaaggtcgccaacccgcacgccttccgctgcgcgcgggacttcgctgcttggctcggattgacgcctaaggatcattcgaccgctggcaagcatcgaacaagcgcgatcacacgtgccggagacgaggatctgcggcggctcttggtggcgggcgccactgcggtgatccagcaggccagtaaaagccgcggcaagccaatgccttggctcatcgcgctcatcaagcgcaagcccaagaagctggcggccgtggcgctggccaacaaggtggcgcgcatcgcctggaggctgatggtgagcggcgaacgctatgaccgcactcacgcgctcacaacacgcagcagtggcgcccaggaggcttcgctgaccctttctgctcgtgcgcggcgcgccgcctcgcacgtagcggcgagagcggcataacgtcttcactggagaggctacctgcctctctggaaaggtcgggaacttgcatgagaacgagcagatggtgtgatcgatcgatcccaagacacgagatactccgcggggcccaatggtgcttgacatcgccgcaatgtttggaactcgtgtcgcggaaaccatcttggcagcggtcatgtgcgaccgcgacaacagaccggacatatgatcgcaagcgatccgatccgcactctgccaaagctcttgcaagttcagggccgtccacata

SEQ ID NO: 1793 - DNA, 1403 bp, unidentified
  source 1..1403: mol_type = unassigned DNA; note = element_266d028
  misc_feature 1..2: note = core
  misc_feature 3..118: note = LE
  misc_feature 119..913: note = CDS
  misc_feature 914..1403: note = RE
  misc_feature 1163..1398: note = bridgeRNA
agatgccgtaatgggccggcgtcacaagagtagccaagttgggtggctgtccctcagaatgatggtgttggaaacggggtccgagcgatcggccccaagcatcatgagaggaacagccatggagtattatgccggaatcgatgtctctctgaaagagagcagcgtgtgcattgttgacgcgaagggtaaaatcgtccgcgaggtcaaggtcgccagcgagcccgagacgctggtgcggtatttcgacgagttggaattgccggtgtgccggatcgggctggaggcggggccgctatcgcattggttgcatgctgggcttgttgccgctggtcgagacgttgttttgctggagacgcgacacgtgaaggcggcactttcggcgatgaccgtgaagaccgaccggaaagatgcccgcgggattgcccagttgctgcggatgggctggtatcggccggttcatgcaaaatcggtggcatcgcaagatacccgcgccgtactcgtcgggcgtaagcttctgcaggggaagctgctcgacgtcgagctcagtatccgtgggattctgcgcggctatggactgaaggtcggcgaggtcagccgcggcaggttcgaggcgcgtatccaggaactaatcgtagggcacgccaccctggagacggtgatcggcgggatgctggcagcccgaacgacactgtggagtgagttcaccaggctccaccgggagatgctgaggatcgcgcgggcagacaagatttgccaccggttgatgagcacacctggcgtcggcgcgctggtcgctctgacatatcgatcagcggtcgacgatccgacccgctttgggaaatcgagtaccgtcggcgcctactttgggctgacccctaagaaatatcagtccggcgagaccgaccgggattgaggtgtcagcaaggtcggtgacgcgatggtccgaaccgcgctcttcgaagcggcgcatatcatgctgacgcgagcgacccggttttccagcctgaagcgctgggcgctcgaggtggcgaaacgtcgcgggatgaagcgcgcgaaggtggctctggcgcgcaaactgggcgtcgtgctccatcgcatgtggatggacgccaccgactttcgctggggggcaaccgcaatggccgcttgaaggacgaaatgctgatcgaggcgcgcttggaacggcacgcttctaatgaggtcccgtcgctgggacgagagcttggcaagatcgtgtgtagtgctgtgaatgcttcggcaaaccacgcttcctagattgatctgccggcttaaggatctgatggcatggtgtggcggtcttcgtgctgaccacggacagaagcatgatcccggcgacgagataatcattcagagggacttgacgaacaaaggcccattacaga

SEQ ID NO: 1794 - DNA, 1311 bp, unidentified
  source 1..1311: mol_type = unassigned DNA; note = element_2674b42
  misc_feature 1: note = core
  misc_feature 2..67: note = LE
  misc_feature 68..1087: note = CDS
  misc_feature 1088..1311: note = RE
  misc_feature 1099..1298: note = bridgeRNA
taatggtatggactgctccggcaggcgtatcgtgactgctggcgtttccgttcataggagtatcgtcatggacaccgtctgcttccttgccatagatctcgcgaagaatgtctttcagctgcacggcgtggacgccgctggcaagccggtgttacgccgccgcgtcggccgcgtccaattgactgagctggttcttcgacttgcaccatgcactatcgggatggaagcctgctcaggcgcccaccattgggcacgacagtttcagcaccaaggccacaccgtaaaactcatcagcccgcaattcgtgaagcctttcgtaaagggcaacaagaccgacggcaacgacgccgaggccatctgcgaggccctgcagcgaccatcaatgcgctttgtgccgatcaagtccgttgagcagcaggatgtgcaaagccttcaccgtgctcgtagtcgcctcgtaagcaatcgaactggacttgtgagtcagatgcgcggcattctcaccgaacgcggcatcgtattcgcgcaatcgattacgcgcgcacgtcgggagattccggccgtcgtcgccgacacgtcgaacgctttgacgccgctcgcgcgtgagatgctggccgatctgatggatcagttgcgcgagctcgacaaacgcgtcgccggattcgataggcgtatcgatgcggtgttcaaagcgagtgagacctgccaacgtattgcgcagattgaaggcgtcggtcccaagacagcgacagccattgttgccgctgtatcggatcccaaagacttccgaaacggccgtcactttgcggcctggctcggccttgttccccgtcagagctccagcggagaccgaacgcacctgctcggcatcagcaagcgaggcgaccggcatctacgtaccttgctcatacacggtgcccgcgcggtgctccgaaccgcacccaccaagcatgacaagaagcatgcctgggctcttgctctgcaagccagacgaggcgccaaccgagccattgtcgcgatcgcgaacaagatggcccgtgtcatctggtcgatgctcgcaaccggccagtcgtatcagaaagcagtgtagcaatgtcaccaacgatgcgttgacgaattgacgaatggcactccggtcgatccggcgagcagggaacctgacttttataacggcccccgaggccttccagttgttgaggcctgcacgcgcggaattccagttgggcgctgggctctgccctgacgccggatatatgtacgcaatcgacctccgtgtccgtcaacttccgtttgctattgggagcagtccatata

SEQ ID NO: 1795 - DNA, 1375 bp, unidentified
  source 1..1375: mol_type = unassigned DNA; note = element_2681a36
  misc_feature 1..2: note = core
  misc_feature 3..87: note = LE
  misc_feature 88..1119: note = CDS
  misc_feature 1120..1375: note = RE
  misc_feature 1137..1361: note = bridgeRNA
gatgggatggatggctcccgctcccggcgtcaacgcgccaaaatgtggttgttgtcaaagcgaccactaagcagggagccatccgagatggaaattatcacaattggcttggacttggccaaacacgtgtttcaggtgcatgcgatcgacgcggacggaaaggcgattgttcgcaaagcgttccgacgatcacagctggcgccgttttttgctgccctcccgccatgcctgatcggcatcgaggcgtgcgggacagcgcactactgggcacgacagctttcggaaatgggtcacgaggtgcggttaatgccgccggcgtacgtgaagccttacgtaaagcgcggcaagaatgacgccaatgacgccgaggccatttgtgaggcggtgacccgtccgacgatgcgttttgtgccgattaaatcggtcgaacaacaggccgctttggcaatgcatcgcgcccgcgcgctgctggtgagacagcgcacgcagcttgtgaatgcgatccgcgggttgctcgccgaatttggcgtagagatcgcaagcggcgttgagcaggcgctcaagctcgcgcagcgatttgtcgatggagaagctatagacgcgaccgcagctgcgtcgggtgtcatatcgctcctgtcgcagcaggcgctggacgttcaggctaagatcggcgtgctagagcgcgaaattctaatttggcatcgcggtaacgaaacatctttgcggttggcgacggcgcctggaatcggaccgatcgtcgcgtccgcaatcgtcgcttctgttggcgatcccggtcaattttcgtccggacgtcaattcgcagcgtggcttggactgacgccgcgtatcgcatcgaccggcggcaaggaaaggctcggtcgcgtcactaagatgggcgacaaatacctacgtcgactgctgtttctgggcatgatgtcgatcgtgcggcgcgccaagcagaagcctgaggcacaccctcatgcggcccgattgctcgcaagaaaaccaacgcggcttgctgctgttgccatggcgaacaaaactgcaagggtgatctgggccatgatggcgcggtccgaagactatcgctgtgatcgcgatacaatttgcgccgcctaggtcagcaaggagatcgagatcgattgtgaggacgacgtgaagtgatggcaaaatcggtcagaccgggagtgaagacagtccgatatgtgtcccaggcgtcagagcctgcgtttctagattggagcttcattcgccaaccccatcagggccagcagtcccattgtcgactgcatgcaaaggccgaagacaagactgcatccgaccgaatgtgcccaaaactcaatttcgtccttgcaagcgggagccatccagacag

SEQ ID NO: 1796 - DNA, 1577 bp, unidentified
  source 1..1577: mol_type = unassigned DNA; note = element_268304d
  misc_feature 1..2: note = core
  misc_feature 3..247: note = LE
  misc_feature 248..1423: note = CDS
  misc_feature 1424..1577: note = RE
  misc_feature 5..226: note = bridgeRNA
ctactattagtattgtcatagtcattctttaccttttctacaggttagactatgctgtttcaagatactgtggattggttctcacctcctaccactcgatggtttaaacgaggctccaaccacagtctctttgttcatttgttaatcagttagttaccgcacgacggtttatcaagaagtaggttacgattgcaaggaaccctgtggatcttaaaacagtatcaatacattttaaggaggtcctgctatgatttttgtaggaattgatgtcgccaaagataagcatgattgctttattacaaacacagaaggtgaatccttgtttaagccgttcaccatatccaacaaccttaatggattcaatgaactttatcttaaaatagaatccgttatggaagatgtttctaaagtaaaagtagggcttgaagccactggacactatagttacaatcttcttggatatcttcttgataaaggtttcccgacctacgttatcaatccattacatacaaatctgtacagaaaaagtctaagccttagacagaccaaaacggataaagttgattctcgaacaattgcttctatgatgatgtctgatgtaaacttaaagtcctactcagacacatcatatcataacgaagaattaaagtcactcacccgatatcgctttgataaggtaaaagaacgctctgctcttaaagtatccctagccagacttgtttgcattctattccccgaattagaaaaattagttccaacactccacatagcatcagtttatgctctgctttatgaatttccaagtgctaaacatgttgcttctgcacacttaacacgactgactaatcttctggaaacagcatcaaaaggtcgctatcgtaaggatgttgccattactttcagaaacgcagcaagaaattcaattggttcaaatatgcctgccaaatctttagaacttaagcacacaataaaattaatccaagaattagacgccgaaatatctgaaattgaaaatgaaatacaatctattatggatgaaatcaattctccaatacttagcatacctggtattagctataaaatgggagccatgattattgcagaaataggcgatttttctcgctttgattctcctgataaaatacttgcttatgccggtttatcaccaacaacttatcagtctggtcagctagatagttcccattctagaatggaaaaacgaggctccagatatcttcgttatgctttatttaacgcaaccaaatatgtttgtctatgggatccaacatttgcttcttatttatccaaaaagcgtgctgaaggaaaacattataacgttgcaatatcgcatgctgcaaagaaacttgttcgggtgatttttcaacttgaaaaatcagggaaacaatatataaaagcaatttaatctctaaatttccatacttcttttttgagcacctataagatgctctttttgtcatgcagttttcaaggttctgattgcagtgattcagtcactgccacttttctataaatttactaattttcaaaattatacttgacttcttttaatagttagt

SEQ ID NO: 1797 - DNA, 1437 bp, unidentified
  source 1..1437: mol_type = unassigned DNA; note = element_2686298
  misc_feature 1: note = core
  misc_feature 2..76: note = LE
  misc_feature 77..1108: note = CDS
  misc_feature 1109..1437: note = RE
  misc_feature 1209..1428: note = bridgeRNA
taatgggatggtccgccgcttgatcttccgagggaagagggagatcgtgaagtaggcggttcacggaggatcccatatggaaatgaaggtgatcggcattgatctgggcaagagcgtcttccatctggtggggatggatcagcatgggaaggtagtggccaggaagcggctttcacgttctcagatgatggtcttgacggcgaagattccacattgcctcatcggtatggaagcgtgctgtggcagtcactttgttggagcggcattgacggcgcagggacacgaggtcagactcattccggcacagtttgtaaagccattcctgaagtccaacaagaacgattatcttgatgccgaggctatcgccgaagcggtgcaacggccgaacatgcgctttgtacctatcaagacggacgaccaactggaccttcaggctctccatcgggttcgggaccggcttgtttctcgccgaaccagtgtgatcaaccaaatgcgcgcctttctactggagcgcgggatcactttccggcaagggcgggcttacttacggaagcagatcccagaactgctcggagatgctgagcagaaactatctccgcgtatgcggcagcttgtcgatcggctttggcaggagtggaaggcgctcgaagaacagatcgaagcactgagcagagagatcgaaagcattgccagtcaggacgcagcgtgccagcgactactggatgttcccggtgtcggcccccttgttgcaaccgctctggttgccgcaatcggcaacggagctgcctttaccaagggtcgcgatttcgcggcatggcttgggctggtgccaagacaacactctacaggcggtaaagcatggctgctggggatcagtaaacgcggcaacgcgtatctccggcgattgttcattcatggcgcgcgttctatcgtcatgagtctgaatcgagacaaccacgcaataggtaagtggatgagccagtcgggagccagaacgcaccggaacgttctggtcgtggcagtagccaacaagttggcccgcattgcatgggccgtgttggccagaggagaggtctatcgctccactcctgctttcgtagcaagttaactcaggcagtggaaaagacgcctggaaaagcaccagggttggaaatcgctctgcgatttccactttacacactgccactgcgacggctgctaatcagatttcccaccaaggtctgcttggggcaatacaaggatggcggaacagtcaaacggcttgccggaagcctgtggtacaaaacggttcttggaaaccgggatttttatgaggaccggcaagcgcgcaactcatcatggctcggagcctggctccattcagaagccgaatacatttgcgcagaccatttccaccatcctcaactttccccttgcagtcacgcggcggaccataca

SEQ ID NO: 1798 - DNA, 1383 bp, unidentified
  source 1..1383: mol_type = unassigned DNA; note = element_2686ff5
  misc_feature 1..2: note = core
  misc_feature 3..82: note = LE
  misc_feature 83..1111: note = CDS
  misc_feature 1112..1383: note = RE
  misc_feature 1085..1370: note = bridgeRNA
cgatggggtggacgccccctccggcggcatcggtgtgccagaatgggtatatcgacaaacgccattcgaggaggaggcatccatgtcggaggttagcatgatcgggctggatctggcgaagaacacgtttcaggcgcacggcgagaacgccgatgggtccgtggcattccgcaagaagctgcgccgggacaaggtgatgatgttcttcgatagccagccgcgctgcacggtggcgatggaagcgtgcgccagcgcgcacttctgggcgcgctcgcttcaggagctcggacacgaggtccggctcgtgccgccgcgctacgtcaagccgttcgttaagcgccagaagaacgacgcggccgacgcggaggcgattgccgaggccgccagccggccgacgatgcggttcgtggcgatcaagagcgaggccaagcaggcccaggggatggcgttcaagacgcgcgacctcatggttcgccaacgcacgcagatgattaacgcgctacgcggtaacatggccgagttcggcgtgatcgcaccgcagggcgtggcgaacgtcgagcgcctacgttcggtcgttgatgaccctgaggctgctctgcctgcacccgtcgtggccttggctcagatggcgctggagcagattgacgaggtcaccaagcggatcgacgcgatcgagcatgatatcaaaaagctcgcccgccagcaggacaccagcaagcgggtgatgacgatcccgggcgttgggccgatctgcgccacggccgtagaggcgttcgccccgcccatggagagcttcaacagtgggcgcgacttcgccgcttggctggggctgacgccgcgtcagcattcgaccggtggcaaggagcggctgggcaagatgtccaagatgggccagcgcgacctcaggcgcctgctcgtaggcggcgcgatggccgtggtgcgctgggccgccaagcacggcgcgccggcgggctcctggctggggcgcatgctcgagcgcaaaccgcgcatggtcgttgccgtcgccctggcgaacaagaacgcacgcatcatctgggcgctgctgacccagggtggcgtgtacaaggatccggcggtcgccgcggcgtaagcgccaagacggccgtccggatggcgtcggaggatgcgagcaggtctcagggaaggtaagggcaaacggtcatcgagacggggtcgggaaaaccaggaaaatcaggtgtgctctacgcacgttaacccgatttggacctgatccgcgtatctccatacaggcccgcggcgtgtaacggccgcatcatgaggccggacacacgactgcacctgaccgcatgccaataccggacccgaggagaaatcgcttgcatctgcgggggcgtccacaca

SEQ ID NO: 1799 - DNA, 1288 bp, unidentified
  source 1..1288: mol_type = unassigned DNA; note = element_2699281
  misc_feature 1..2: note = core
  misc_feature 3..239: note = LE
  misc_feature 240..1274: note = CDS
  misc_feature 1275..1288: note = RE
  misc_feature 61..224: note = bridgeRNA
tccattagactattaattataaatatattaaaataaattaaagtttattaaattaaatcaggtaccgaataaagaaggctgaacaagtctatgtttcctcaaaagaaagacttatattgcgaataagacccagccttcttgatgattaaagctaaatagtgctttcgtcgctaaatgacgactattaatggagtaagctcatatcatcgtttattcggcccaagaaaggaatatttattatgaaaaagaacttattttttatcggccttgatatctcgaaagctgattttgctgccagtatatatcaggtaccagaccaacccattgtgaccaaagaagcaattcccaatgaccggaagggctttgagatgctcctcttatggttaaatgactatcacattgataagaaaaactgtcgcatctgcatggaagccaccggtgtctattctcaagctatagcctactatcttttatttgcaggttttccggtcagtgtcgagccacctcttaaggttaaacgtgcctttgacccggtaggtcataagaccgacccggtagacagtaaacagattgccgaatatgcctaccgcttccaggatgagctgacctcctggaaacccaaagatgagatcctggaaaagatccggcaattactgagtgtacgggaacagtttaccaaacagaaagttgctttagataattccatccaggcctatagcaaacaaagagtccaggtggcactcattaaaaaagcccaaaaggagaccttaaaccagcttaaaaaacagattgcccgaatcgataaggaactggaaaagttgatcaaacaagatcccgaaatcttccaaaaagccagcaacctgaaaagtatccccggttacgggatgctcctggcagcccaccttttagttattaccgaaaactttaccaagatacaaaactctaagcgattggcttcttttgtcggtatcgtaccctatcaacatcaaagtggaacctctgtatataaaagggcgaaaattcgccactttgggcctgggccaagccgtaaactcctgcggctggctgcccaatcggtggccacccataatgcaacctttagacgttattatttacgtaaactagatcaaggtaaacccaagcctttggtcttaaataatattgctaataaattgcttaagatagcctgtactataattcggaacaatacccggtatatcaaagattatcgatcaataaaccctatgtatttaaaaagtttaaaaagtgcttgacaaagtcatagtgt

SEQ ID NO: 1800 - DNA, 1592 bp, unidentified
  source 1..1592: mol_type = unassigned DNA; note = element_26a6595
  misc_feature 1..2: note = core
  misc_feature 3..262: note = LE
  misc_feature 263..1465: note = CDS
  misc_feature 1466..1592: note = RE
  misc_feature 29..282: note = bridgeRNA
ttggtactataaaagtgtagttgttagacattgagaaatcagtgttgagcatttgcacttatttttttacaattagggagtattggtctggcgagctggttatttggattattacatccgacataaaaactgtcagccatcccttgttgtaagcattcgattaagcaggttgaaaccataacggctttcgcgtaacgaaccaaaatgaattgcaataagtgtagatggataccattacaaaattctattcaggaggttcgtaatgatcagtgttggtattgatgtatcgaaagaaaagagcatggtttgtattttgcgaccgtacggagaagtaattgcatctccttatgaaatcacacatactgcagattcaataatagcgttaattgaacgtattcgttatttgggaaatgaaactagagttgttatggaggccactggagcatatcactttcctttattaagtagtttaaaacagtctaatatttttgtgagtgttattaacccgctggtaatgaaaaagtatgcttccgtagctatacgaaaaggaaaaacagataaattggattctgttaggatagctaattatgggatagataattggtttcatttaaaggattttcaggtattagatgctgcttacgaggaattgaaaattcttgggagacaatattctcattatgtcaaaatgaaagtggaaagcaaaattgctcttggcaatataattgatcgaacgatgccaggcataaaaaaattacttccaggtaactctgacaatctaactaaagataaattatctgatttcataagggaatattggcattatgataatattactaagaagacagaggccaagtttgtcagcaactattgtcagtgggcaaaaaagaagggataccatgcaaatgaagccaaggcaaaagcaatttatgcgatggctaaagctggtatccctactttatcttccagtgccgcatcgaccaaaatgttagtattggaatctgttagagtgctgggtgaagtaaaccagaccctgcaaacaattttagcacaaatgcagatgatagcaactaacatggatgaatatgaagtggttcgctcaatgccaggtgtaggtgatgtgcttgctccgagattgatagccgaaattggaaacgttaaaagatttcatagcgggagcgcattgatagcttacgcaggccttgattccccgccttatgaatcaggaaattttagtggaagtaagcgcaagatttcaaaaagaggatcgtccttattgagaaaaacagggtatgaagtaatgaaatgcttaaaaaccgttaagccttcaaatgatgcggctgtgtatcaatatattataaaaaaggaatcagaaggaaaaccaaaaaaagtagcaaaaattgcggggttaaacaaatttcttagaatttattatgcccgagtaatggaggtgtatcaaaactaactaatcaaaataataccattttttgtaagactgatttaacaaatagattggtctatttgttatgcaaaaaaacataatataaatttttataaaatctgcaaaaaatagattgatttttcttagcagg

SEQ ID NO: 1801 - DNA, 1305 bp, unidentified
  source 1..1305: mol_type = unassigned DNA; note = element_26a7f60
  misc_feature 1..2: note = core
  misc_feature 3..188: note = LE
  misc_feature 189..1151: note = CDS
  misc_feature 1152..1305: note = RE
  misc_feature 32..201: note = bridgeRNA
cttgtgtccggaaaatctggcaggatgtgcgaacgggcggttctcgcaaaaccgcccgttgctggaactgagcccgttacgccccaaaagcgataagcctggatcagagcgagggacagctccggtgtcttcctcaacccgaacagttgcaagggtttcgagcccgtaccgagcaaggaagggagtggatgatggcacaaaatgatctcgttgtcgtgggcatcgatgtcgccaaggatagggtggatgcgtgcattcgcgcgttggcattgcggcagagctgcccgaacactgcacagggtcaccacaaactggttgcctggcttcgcaagtaccacgtgagcagggcggtgatggaggcaagtggcggttacgagcgtgaatggcgcaaagtgctccataacgccggcatcgaggtgcggattgtcgacccgaagcgggtccgcagctttgcgctatcggctggacggctggccaagaacgatgcgatcgacgcggagatgattgcctggttcgcagagacatttagcgaggcgccgaaccagacacacgatgccgcacacgaggaactggtggcgctggtgaaagcacgcataggtctggtcgagcttaagacccgactgcaaagccaagacgcacatgctgcgccaggtcaggttcgaaaaacacatgcgcgcgtcttgaagggactggctgccgaaattgaaaagctcgaggctgcaatcgcggccaaggtcaaggcgacagcagactttgccgaacgcgccgcgatcatcgagagcgtaccgggcttcgctgaaacgacctccgctaacctcctcgccgggatgccggagcttggtcatgtaagcgacgagattgccgcagccttgatcggcctcgctccgtatgacgacgatagcggccagaggcgcggcgagcgccacatcaggggtggtcgccgctggattcgcaacgccatctacatgccttgcctcggcgctgccacgcagaacaatcctgttatcaaggccttctatgaccgcctgattgccaaaggaaagccgccgaaggtcgcgctcgttgcctgcatgcgcaagctaatcatcatcctcaacactctgatcgcaagacggcagaaatgggatcccagtcgttacgtcgtcggataacgagcgcttccagatcgcgctcggtcctcgaccgagcgcttgtaaagccacagaccggtgagcggacggggtcaaggccgtagccgccgcaggcgggggcgcgccagcgccagccttgaggccgcccgatcaccgggctacttcgccacagttg

SEQ ID NO: 1802 - DNA, 1582 bp, unidentified
  source 1..1582: mol_type = unassigned DNA; note = element_26aa67d
  misc_feature 1..2: note = core
  misc_feature 3..246: note = LE
  misc_feature 247..1416: note = CDS
  misc_feature 1417..1582: note = RE
  misc_feature 6..225: note = bridgeRNA
ctcgtattatatagtcatacccattctttacctattctagtgtaacgggtatgctgttaaagatgctgtggattggttctcaccgtctaccacttgatggtttcccgaaaggctccaaccacagcctctttgtcacaatgttaatcagttagataccgcatgacggtttatgtagaacgaggttacgtcggcagagagccctgtggatccaatacagcgtcaaattttctaaggaggatcatgtgtatgatctatgttggtatcgatgttgcaaaggataagcatgattgctgtatcctggggtcagaagctgataagctctatcccgtattcactatccccaataacaaagttggctttaatgagctatatgagaaaatcttctctgtgactgacgacaaaaacgaaataaaagtaggacttgaagctaccggtcactactcactcaatcttctcggatcgctcattgataaaggtctacccacctgtgttatcaacccgttacatacaaatctttacagaaaaggtctaagcctcagaaagacaaaaacggataaagtcgacgccagtacaattgctatgatgttgatgaccgctagaactctcaagccctactcagacacatcttatcatagtgaagaacttaagtcattaacccgttatcgtttcgacaaagttcaggaacgcgcaaaactcaagtcttctgtatctcgtcttgtcaacattttattcccagagttagaaaagctcgttccaagccttcatatggcttctgtgtatgcactactttcggaatttccaggtgcatcttacattgctgaatctcatcttacacggctgaaaaatctccttgaaacagcgtctaaaggtcgctatcgccgagatatggcaattactctaagagatgcagccagagattccataggttctgtaatgcctgcaaaatcaatggaattgaagcataccatccatttgattgaagtgatgacagacgagattgatgaaatagaatcatccataaaatccataatggatactttagattctcctattttgacaattcccggaatcaactatcgtatgggagccatgattcttgctgaagtaggtgatttctccagattcaacaacgcagatcagatactcgcatacgcaggattatcaccatccacatatcagtctggacagttagagtccagccattctcacatggaaaagcgaggatctcgttatttacgttatgcattattcaatgccacgaaatttgtttgccattgggatgaagaattcggtaaataccttgctaaaaagctaggtgaaggcaaacattacaacgtcgctatttcccatgcaaccaagaagctgatacgcaccatttatcgaatggagcttactggcgaagccttccgaaaataacttcaaaataatatgttcttttctgtgagcacctattcagatgctctatttgtcatgcgattttcaaggttctgattgaggcttaagcctgcctcccggctatataaaacacctaatgatgttttatgcaaaaaagcattttttctattgacttttaatagttagt

SEQ ID NO: 1803 - DNA, 1373 bp, unidentified
  source 1..1373: mol_type = unassigned DNA; note = element_26aadc8
  misc_feature 1..3: note = core
  misc_feature 4..87: note = LE
  misc_feature 88..1110: note = CDS
  misc_feature 1111..1373: note = RE
  misc_feature 1109..1360: note = bridgeRNA
tgatggggtggacggcccctgtgtccggcgtcgaagcgccatagggtggtcgttgttgaagcaaccgccacagcaggagccgtccacatgaagactatcacgattgggattgatctcgccaagtccgttttccaggttcacggcgttgacgccgccggtctgatcaccgtgcggaagaagctgcgccgcgccgaggtgctgaccttcttcgcgtcacttgagccctgcttggttggcatggaggcctgcgcgacggcgcacttctgggcgcgggagttgtcgaggctgggtcacgaagtccggttgatgccgccgagttacgtgaaggcctatcttcgccgacagaagaacgatgcagccgatgccgaggcgatctgcgaggcggtgatgcgacccagcatgcgcttcgtgccggtcaagagcgccgagcggcagggcgtactggtgttgcaccggacgcgcgagctattggtgcgccagcgcaccatgttgatcaacgccatccgcggtcattgtgcagagttcgggatgatcgcccctcagggcgctcgtcgctcggctgagctcatcgggcaggttcaagcggcggacgcggcggttcttccagacctcgcccgatcagccttgcttaggctagccgatcagctcgatgcactcgctatcgagatccatgccctcgagcggcagctcatggcctggcatcgccaggatgaggccagccaacgcctggcgactatacccggcgtcggtatcatcacggcgactgcgctcgccgcttctgttactgatccgagcctgttccggtcgggccgcgagttcgctgccttcctgggactcgtgccgcgacagaactcctccggcggcaaggaccgcctcggccgcatctcgaagatgggcgatggctatctccgaaagcttcttgtggtcggagccacctccgtcattcgccgtgccggcgataatgcgtcagcgaccggcgcttgggtgagatctctgatggaacgcaaaccgagcagagttgtcactgtcgccatggccaacaaaaccgcacgcatcgcctgggccgtactttcacgcagggaggactatcgtgcgccagcaatgatctgaccaagatcgcagcggcagggccgctgctccaaactgcgagggtgcacatgagctgatgaggatcaagaagcggaccgcaaagaaagataacccgcagagctgtcggagcatcaagctcgctaatctgagagggacttttctagcggactccatcagggccagcggccatcgacgccgcgcaaacaggccggacagatgaccgcacccgacagatcttcagctcggctcaactttccccttgcagctcaggggccgtccacaga

SEQ ID NO: 1804 - DNA, 1390 bp, unidentified
  source 1..1390: mol_type = unassigned DNA; note = element_26acc11
  misc_feature 1: note = core
  misc_feature 2..88: note = LE
  misc_feature 89..925: note = CDS
  misc_feature 926..1390: note = RE
  misc_feature 1161..1385: note = bridgeRNA
caatgggatggactccccctcacctcggcacttcgagtgccagactgaaggtgcgaaccgcagtcactgattgagaaggagtccagacatgaagcttatgcgcattggggtcgacctggccaagagcgtgttccagatccacggcgtcgactgccaggagaggcctgtctggcggcagcggttatctcgcgaacgctggcttcaagcgatcctggagaaggccgagcccgattgtgagattggcttggagagttgcggtggagcccatcattgggctcggcaacttgaggcgcgtggatttcgggtcaagttgatcgcgccccagttcgtgaagccctacgtgaagagcaacaagaacgacgccaatgacgcggaagcaatctgtgaggcaatgagccggcccagcatgcgcttcgtggcgatcaagacggttgaacagcaggacattcaggcggcacatcgcattcgagcagggttgattgagcaacgcaccgccaaggccaaccaggttcgtggcctggtcgcagagtacggcctgattgcaccgaaagaactgtgtgcactgcgacgcgccattccctgctggctggaggatgcagacaacggtttaacgctgcgctttcggcatttgctggatgggttatggcgcgacttgcgcatgctggatgaacgggtcaaggagctggattgcgagatatccgggattgcggccaatgagccgagcgctcagagcttgcagcaactgcgcggcgtcggcccgatgatcgccaccgccctcgtcgcggccatcggtgacgcccgtcagtttgccaatggtcgacagtttgctgcctcgctgggattgacgccgaggcagcacagctccggtggcaaagatcgactgctgggcatcagcaaacgcggcgatgctacctgcgaacactgatgattcatggcgctcgatccgtgctgcgcacagctccatccaaggatgaccggctgagccaatgggccgtccgcttggctgaacgatcgcacaccaacgtggccgccatcgcgctggccaacaagaccgcgcgcatggcctgggcgatgctgcgcaatggcactgcctaccagccggaacgggctgcggcctgactcactatcagtcaaaacgctacgagagagtaaccgtcacccacgattgcgaagcaacctgaacgatggcaaaccggtcgaaccggcgcgagcaaacccctcaaatgtccatgtgcgcagagcacgtagaagcgattgggagcccgcgcgcgaatagcccatcatggcccagcatcagaagacgatgccgaaatcagagcccggatatacgtgtgcagtcggcacgggcgccaaagtgacgggagcttgcaatgaggggggagtccatata

SEQ ID NO: 1805 - DNA, 1355 bp, unidentified
  source 1..1355: mol_type = unassigned DNA; note = element_26b9a87
  misc_feature 1..2: note = core
  misc_feature 3..84: note = LE
  misc_feature 85..1104: note = CDS
  misc_feature 1105..1355: note = RE
  misc_feature 1089..1342: note = bridgeRNA
tgatggtgtggacggcccctgctcaccggcatcgaagtgccctaacgtggtcgtttctgagacgccacaaagagggggccgcccatgagcgagattatcaggattgcgatcgacctgtcgaagggcgcgtttgcgctacacggggtgaatgcggatgaagaagcgattttgtgccgtcagttgaagcgcggccaggttctcggctttttcaccaagctgtcgccgtgcctggtggggatggaggcgtgcgcctcggcccattactgggcgcgggagatcggggcgctgggccacgaggtggtactggtcccgccggcctatgtgaagccgtacgtcaagcgcggccgcaagaacgacgccaatgacgccgctgccatttgcgaagcgatggcgcggcgctctgtcccccgggtgccggtcaagacgcccgagcagcaggcggtgctgatgcttcatcgtgcccgcaagatgctggtgggccagcgcaccatgctcgccaatgcggtgcgggcgcatctggccgagttcggcatcgtcgcgccgtgcggcgacaaagcgctcgacggcctgatcgctcttgccgtggatgccggcgatctggctttgccgcaattggcgcgcgaggcgctgggcatgctggcggcacagttgcgcgatgccgaggccaagatcgatgcgctcgagcacgaagtcctggcggctcagcgcgccgacgaggcctgtcgacgtctgacgagcatcccgtccatcggtccggtcaccgccagcgccatcgccgccaccatgggcgaccctcatcgcttcaagaccggccgcgacttcgccgcctggctcggcctggtgccgtcgcagcactcgaccggaggcaagaccgcccttggccccatcaccaaggccggcgaccgctatctccgctccttgctcgtcgtctgtgccaccggcatgttgcgccaccgaaccgaaagcccgtggatcaaggcgctgctggaacgcatgccggcacgcaaggctaccgtcgccatcgccaacaagctggcccggatcgcctgggctattctcgcccatggcggcacatatcacaggcaggccggattggccgcctgaaccaaagtccaaccacggcacttcgattgcgagggcgatgaaagcgtgatggcgaccggtcagacccacgagccgaaaaaccctgttcgtgtcccggccggtcgaggccgtacggatgatttgggagcggttcgcggatcacatcatggccagcggcaaggtgtgccgcgcaaacaggccggacacatgactgccccagaccggcggacactgcgcctaattttccttgcaacgcaggggccgtccacaca

SEQ ID NO: 1806 - DNA, 1451 bp, unidentified
  source 1..1451: mol_type = unassigned DNA; note = element_26baac8
  misc_feature 1: note = core
  misc_feature 2..94: note = LE
  misc_feature 95..1150: note = CDS
  misc_feature 1151..1451: note = RE
  misc_feature 1218..1443: note = bridgeRNA
caatgggatggacgcccccgcctctaaccggcatcgatgtgccaaagtgtggggtgtgttcaacaacccacgtcaacgagaaggagcgtccaccatgaaggttacaacaattgggcttgatctggcaaaagatgtcttccaagtctgtgctgccgatgccagcggcaagattctctacaacaaacaactgcggcgcagccagatggccgagttcttcaccaagttgcccgcctgcctgatcggggtggaggcttgcggcagtgcccactactgggctcgaaagctccaggcgatgggtcacacagtcaagctcatgccaccccagtacgtcaaaccctacgtcaagacccacaagaacgatgccaccgatgcggccgccatctgcgaagccgtcacccgaccgaccatgcgctttgtggccgtcaagtccgaggagcaacaggcgctgctggccctgcaccgggtgcgccagagcttcgtcaaggaccgtaccgcccacagcaaccagattcgcggtgaactcgccgagttcgggctgattgtccccaagggtctgagcgcactgcgcaaacgcgtgccggttttgcttgaagatccccttgtcccggcgccttttggccacttgattgagcgcttgctcgctgaagtgttgcgcctggatgatcagatcaaactgcttgagcgcgacattgtgcagtggcatcgcaacagcgagttgagcaaacgcctggcccagattcccggtattggaccgctgacggccagtgcactgctgtgctccattggggatatcgcctgcttcaagagtgcccgccaactgcctgcctggcttggcctggtgccgcgccagcactccagtggagggcgcaatacgctgctgggcatcaccaagcgtggcgactgttatttgcgcaccctgctcattcacggcgcgcgctcggccattctggcagcgcagcgcaagcctgatgatccacaacacccaaactggctcaaacgcctgctcgggcgagttcaccccaacattgccgcagtcgccctggccaacaaaaatgccagggtggcctgggcgctgctgagcaagcaccaggactacaagcgcgggtatgaccccagcgaggacaacatggcacgggtacaactggcctgagcaccactgctgcatttgctgatcagggagtaacaacattgaagtcaagcgtttcaaggagtaagccaccgattgcgcaggcaattttgcaagtgaaggcaagacaggtcagaccggggttggcaaaacccgatcattgcgacgcacccagagtgctcgcgttcgctagaggagccaacccgcatatcccatcaggaacaagaggcagtgaaagctccctcaaagttcgaatgtacggctgcaatctctccgacttttgcatcactgaatttaaagcttgcacaaagggggcgtccatgta

SEQ ID NO: 1807 - DNA, 1168 bp, unidentified
  source 1..1168: mol_type = unassigned DNA; note = element_26bd1c1
  misc_feature 1..2: note = core
  misc_feature 3..224: note = LE
  misc_feature 225..1154: note = CDS
  misc_feature 1155..1168: note = RE
  misc_feature 8..220: note = bridgeRNA
cttgtatctttaacttgttcccttctttgtgcaaaagagggcaggtgcgagatcccgtcgcgaggcggctcgttggagttagaccacagagcgtgccgtagtccgatccgcacctgtccttggatggtgtttaaactcgaacagttactggagcgaccaggctgctccctaggtggggcagacagcctggccagctcgcatttacaagcaggagttatttacctatgaagcaacgcattgtctatattggggttgatgtagcaaaggaatatctggacgtggcatggcagaggcagtcacgtcgttttggcaacaacaaaagcggtcacgccgctttagtggcttggatcaagcaaagtcccactgtggtgcaattaatttgcgaagccagtggtggctacgagcgagggctccttgagagcttagagcgaaacgcagtgaaagttactttggtgcaagccaaccgggtccgacagtatgctcgtgccgctgggatcctggccaaaaccgataaggttgatgcccgtgtgctggcagcctttggcgcagccatgcagcctaagccaacagtgccagcctcagccaagcagaagcggctgcgtgaatacgacgctcagcgccggcatttaagtcgcattttgctggccgagcaaaatcgtttggcgcagttaggctgcgtccagctacggagcttaagccgcagtctaattagcaaaatcaaaaatcaaatcgctacgctcgataccagcatcagcgatttgattgcgcaggatcaagagctccgactcaaagcgcagaaactcacttcggttatcggggtgggtgcgcgtactgcggcgttggtgctagcgcaattaccggagctcggtcagctcaatcgacgccaaacggcagctcttggtggcctcgctccgtttaaccgcgatagcggcactttacgtggcaagcgcgccatctttggcggccgtcgcgctctgcgcagcggcctctacatggcagcgttgtccgcggctcgtcgtaatcatatcctctcgccgttttaccagcgtctgcgcgccaaaggcaaacctcacaaactcgccctgactgccgtcatgcgaaaacttctcatcgttctcaaccaaatcctcaaacccatccctttcccggcttgaactcaagacagtta

SEQ ID NO: 1808 - DNA, 1477 bp, unidentified
  source 1..1477: mol_type = unassigned DNA; note = element_26c143f
  misc_feature 1..2: note = core
  misc_feature 3..212: note = LE
  misc_feature 213..1460: note = CDS
  misc_feature 1461..1477: note = RE
tctaccattgtatttttacaggtgacagggctgcctttgtcaagtagaatatctacttgacgggggtgtggctcacggggtccgcaggcctgtaataaggtactgctcggttctgaattgccgcccccgtcttctgtttcatccagtgtgtctgttggaatgatgcgcatccgtaaggatggtcgctctgcgcagtagacgagaacaactggatgaggtttcatcaacctttaaaggaggttacagtgacagacccccagattcgtgtcggtattgatgttggttgtaaggcccatcgtgtaggtatcgcaaatactacaggaaagatcctagaagagtttgacatctcgcacacagatgctggtttccaggagttcttccgtcggattgaccaccacaaacaggtgttggacctgccggtggcggtagccatggaagggttcaatggctatgcccgtccattggatcagttgatccaacaacacgggtatacattgtacaacgtcaacaacctaaagctggcccggttcaaggaagtgtttcctggtgcagcaaagacagatcccattgacacccgcaagatcctggagttgtttcacttaaaggatcacttaccactagctaaggatacgctgcagaaagtagtatcagccccaccagtcaatgacaggctgaagcgtcttagtcgtcgacgcagacagctggtgaatgacaaggtacgggtagctaaccgaatacaatccgatctacaggccgtttgcccggaactactcgccatcactaacaagctaagcaacctgtggttcctacggtttctcacctgccgtgatgacctaactcaattggcacgactacggcgctccaccttgctcaaggttcgcggtattgggcagaagtacgccagtattatccaacagtggcagacaaaggcaagcttctcttccgaggttagttatgtagggccgatgatcatctccgatgcccggcggatcctcgagctcctcaaccagattcacattctggacgaagcgctggctgcgttagccgatcgttcagaacttgcttgccggatcgcttccataggaggctttggtaacacctgtgttgctgagcttgctggtgagattggaacgacggagcgcttcagcggtgaaagtagccttgccctctacgtagggatgagtcctctttccaaggattcagggcaacatcacggtagcaagtgtccacgtcaggtcaatcaccgggctaagggagcgatgatgactgctgtagcacggcacatcaattttgtccctgagtccagggtgtactatgacaggaagcgagcagagggaaagggtcacaatcaagcggtgcgtgcccttggtcgccatctcgtgcgggtgatctggtcaatggttaacaaccaaagggactacgaacttcgaaccccaggaggtgacaccaatgtgacttgaaaattcaagtggaatgt

SEQ ID NO: 1809 - DNA, 1428 bp, unidentified
  source 1..1428: mol_type = unassigned DNA; note = element_26cf299
  misc_feature 1: note = core
  misc_feature 2..202: note = LE
  misc_feature 203..1258: note = CDS
  misc_feature 1259..1428: note = RE
  misc_feature 12..247: note = bridgeRNA
ctgattgatacttgtgggggttgcgggacgtcgggttccgtagctttgagggttcgacgggtttggctctcgatgtgcctggtccaccctgtggggtggtcttcgtaacgatctgctagcccgtcgaacccctgggtcgtggtgtggctcgtaagaggcgaacgccggaggcaaccagttgttgtgatcaggagtgcccaccgtggctatccgtgacttcgacaaggaggttgacatggtcacgactattggaatagatccgcataaggcgacccatactgcggttgctatcgacggatccgaaacggtgctaggcgagatcaccatcccggttgaccggtatcagaccaagaggctgatcgactgggcttcagggctggatggtgatggccgctgctgggcggtggaggccgccggtggactcggcttcctgttgtcccaacagctggtcgctcatggtgaacacgttgttgacgtgcccccggtgttggcttcccgagtgaggctgttgggatcgggtcgttcggataagaacgatcccaatgatgcccggtcggtggcaatagccgcgttacgtcaacccggtctggcagtagtccggcccgaggatcacacccaggtgttgcgaatgttggcgaaacgccacctcgagctcaccgggctgagaacccaggcggcctgtcgtctccatgcggtgattctccaactccgaccgggtggaatcgcccggcggctgtcagctaaacaggcgagccggatgctccgagggttacgcaccctcgacccggtgggtgagcaacgacggacgatggccaaagcccatctgaccgacatccgtcgctacgaccgggagatcaaagccaacaaggtgttgatctcaaaggcggtggccgccgcgaacaccaccctgaccgacgtctacggggtggggccgatcgtggccgcactcttgatcggatacaccggcgatcccacccggttcgtgtcggctaaccactacgccgcctacaacgggaccgcacccatcgaatactcctcaggaggaaagaagaggcatcgactctcgatgagaggaaaccgggtgctgaaccatgccatccacatggccgccgtcacccagatccgccacgacaccgtaggccgcatctactacgacaagaaacaggctgagggcaagaccaagaaagaagccctccgagcgttgaaacgacgggtctccgacaccgtctaccagcagcttctcaccgaccacggctagggcccgggggacactcaggaacgtctaagcagcttgcgtggccggcctcacatcctgaacaccggctcttcagctcagtcaccccgggccgtccccaaacctacacgtcaggccggaacaccggccccgctcaacgcgtccaaaaacaaccacttgacacaaagaagctt

SEQ ID NO: 1810 - DNA, 1464 bp, unidentified
  source 1..1464: mol_type = unassigned DNA; note = element_26e4400
  misc_feature 1..2: note = core
  misc_feature 3..139: note = LE
  misc_feature 140..1186: note = CDS
  misc_feature 1187..1464: note = RE
  misc_feature 1227..1460: note = bridgeRNA
agatggcatggtcgtcccacctacaccgctgctgttgacatgagggagtaacagatccagaggtcgggcctcgcagtaacgccagagatatgccaaagtaaaaattgttcgcaaccacttcaaccctggaggaaccatcatgaaatcggcttcacaactgcccatcattggaatggacatcgccaaaaacgtctttcaactccacattgttgatgccgagacgggggagatacagcggcgccaactcaaacgcgctaaggtagccgagttcttcactaaccgccaagcatccctggtggcgatcgaagcttgcggcggggcccaccactgggcacgcaccctgcaggccatgggccaccaggtcaagttgctgccggccaagcatgttcgggccttcgtgctgcgcgacaaaaccgatgcactcgatgctcaagccatctgggtggctgcccagcaacctcacatccgggaggtgcctgtcaagagcgagcagcagcaatcctgtctgagcctgcaccgcatacgcgcacagttgatgaagatccgcatcatgcagaccaacgccctgcgcggtttgctctacgagttcggcatcgtgctgccagaggggcacaagaagttgctgctatctgtacaggctgaactggccaaggcccagcaggacaatcgcttgccagaggtggtggtgctgagcgtgcaggagcagctcaaacgagtcgaggccttgcaagatgacctcaaccagctcgacaagcggttggccgccatggtcaaacaaaaccagcagatgctggccgtgcaggcgattcccggagttggcccgttaacggcgacggccttggtcgctactgccacagacctgtcgacattcaagtccggacggcagtttgcggcctggctgggtctgacgccaagacaggttggcacgggcggcagaacacaacaactgggaatttccaagcggggagacacctacttgcgaacactgctgattagcggggccagagccgtcgtctgccgtagcgctcacagtagctggattgagcgcttgctgcagcgtcggcatctcaatgtggtggttgccgcgctggccaacaaaatggcgcgcaccgtctgggccgtcctggccaaaggacacgcatttgaccaggttaaatggaatccaaccgagacggctgcggcctgagatcatgaaagcgacaaccaagacctgagccagaaaggtaactttttttgagggagagcttgcaagaagcgttgtgatgggtcaaaggtcaaaccagggccgggatactccgataaaccgctagtaccttgagtacgtgcgcgagatgggaacctgactcgcgattgccatcagggccagcaggtgaacaagcctgcacaaacaggccggctgtaagactgcaacccccttgaaacttcatgccgttaaaaacttgctttccctgggacgaccatgta

SEQ ID NO: 1811 - DNA, 1399 bp, unidentified
  source 1..1399: mol_type = unassigned DNA; note = element_26e70d1
  misc_feature 1..2: note = core
  misc_feature 3..79: note = LE
  misc_feature 80..1120: note = CDS
  misc_feature 1121..1399: note = RE
  misc_feature 1118..1386: note = bridgeRNA
tgttggagtggacggcccccacacggcatctgatgtgccagaatgaggtcgttgcagatctcaaacaaggaggccgtccgtggagaaggttattcgcattggcatggatacgtcaaaacatgtgttccagctgcatggggtgaatgtgacggaggagccggtgctgcgcaagaagctgcggcggcgggagatggtgcggttttttgagaggctgccggccacgaccatagcgttggaggcgtgtggtggggcgcatcattgggctcgcttgttgagcacgttcggccatgaggtcaagctgatcccgccgcagtatgcgaagccgtatgtcaagcgtggcaagaacgacgcggcggacgccgaggcgctgtgcgaggcgatgagccggccgacgatgcgcttcgtgccaatgaaaacggccgatgatcaggcggcgctgatgctggccgggatgcgcgagcggctggtccgcaatcgcacacagctggcgaattcgatccgctacgcggccgagttcggactggtggccgccaagggcatgagtaacatcgcgccgttgctcgagcgtgccacgacggacgagaccctgccggcgctggcgcgcgagctgtttgctcagcaggccaaggaatatactcagttgcaggagcgcgtggcagagatcgaagccaagctgatggcctggcatcgcagcgacacgcgcagccgccgcctggtcaaggtacccggcatcgggccgatcggcgccgccttgctggtgatgaagacgccggctcccgagctgttccgctccggacgcgacttcgcggcgtggatcgggctgacgccgaaggaccactccacggcgggtaagacccggctcggtgtgatcacgcgcgccggcgacgaagccttgcgcagcgtgctgattgtcggagctaccgccgtgatccagcacgtgcgatgcggccgcagcgccgcctcgccgtggctcgccgggctgctcaagcgcaaatcgccgaagcaggccgccgtggcgctcgccaacaagatcgcccgcattgcctggaagttgatggtgagcggcgaacactacaaggccatgcacacaagccaacccgcggcggcgggagcggcatagagatcggctggcacggaggctctgcatgcgctccgagccaagctgatgccgggaacttgcaggacgaaaggcagatggtgtgatcgatcgatccgggacgcgagacattccgcaaattgcaacggccgccccaggtcgctttcttgtttggagctcgcgtcgcggaaaccatcttggccagcggtcatgtgcgaccgcacacgaaggccgtacatatgatcgcaagcgatccgaccacaaactgcacgacgatcttgcaaggagggggccgtccacata

SEQ ID NO: 1812 - DNA, 1847 bp, unidentified
  source 1..1847: mol_type = unassigned DNA; note = element_26ec754
  misc_feature 1..3: note = core
  misc_feature 4..250: note = LE
  misc_feature 251..1471: note = CDS
  misc_feature 1472..1847: note = RE
cttatacgttactattgatccaggccccctcgacaaggggccggtgccaggagtagactggcaccaggattgtcatctgtgccggggaaaggctatgtcttccacacggcttgaccgattacgaaagctcgtccttccttggcacggtttctgaacacgactggtcatcagagagtcacgcggtctgccgccacagtataaggacacaggagttcagaaacgcggtgtgtttgagaaaaggagccaacccatgaagttttgtggcatcgattgggccaatgatcaccatgatgccttgagtatcgatgaacacgggcagcccttggggtcgatccgcgtggctcatagcccccaaggactgagtcaattggacacgtacctggaaggcatcgctggtccgacaggccgcgagcagatcgcctgcatcgtcgaaacgacgcatgggctcttgatcgcccatttgctggaacaaggatggcccgtctacccggtcaatcctcgcacggtggagaagcgacgagccccctcgggagccaagaccgataccattgatgcctatttgctggccaaaacggggcgtgctgacttcccagacctgcgccgactcaaccccgacagcgagcagatccaggaactcaagaccctgacgcgcgaccaggacgccttgatccagatgcaaacgcgcctggtcaaccagctcacggcttgcctcaaagcctattacccggtggcgctggaagtcttcggcaagctgcagcagccctcgacgctggccttcttgcgggcctatccgacgctgcaagcggctcgcgctgcctcggcggaagaactgacgacgctgctcaagcaggcccgctatcctggcgcccggcagaaagcccagcagctcgtcaggcacctgcagcagcctgctctgcaagccactgaggtgaccacgcgcaccaaggcgcggctgatgctggccctggtcgatcagttggaaccactgctcaagcaaattgctgcctacgacaaggaaattgagcgcctttttttgagtcatgccgacagcgagctcttccagagcctgcccggagctggagcgcgtcttgctcctcgactgttggccgaactgggcgacgatcgcagccgctatgagagcgccagcagtctgcaagctctggctggcacgtcgccggtgctcttccagagcgggacgtatcagaaagcccatcggcgcctgggctgtatcaagccctggcgcaatgccttgcaccaatttgcctggcaaagtacccagcaggaagcctgggccaaagagtattaccaacgcaagcgggccgagggcaagagccataccgtcgcggtccgcgcgctggccaatgtctgggcgcgcattctctacgccgtctggcagaccaagcagccctatcacaccgcgacctttgaagcggccaggcggacccatgcgtcccaccaaccggcggcctgagtccagagcactcttgaccatcttgccccggtgagcctgttcagcgctgcaaggtcccttggaagtcgcggatgcctttgctccaacggagtcgcccaaccggttcccgccgtgttcctgctgccgacggtgagccgctgccactggcgctccaacgtctgccgcggcccgacaccgcgttcccgactcccggtgtgggttgctgaccacagaccacgccgagtcaaggccgcgcaggagggagggtgctcgggggtgggcgcgctcggcttggccttgaccggcgtggtacactggctcgcccacacgggaggcagcttcacttcctctcacctggcttcctcctttccgggttttgacccttgacatagagagt

SEQ ID NO: 1813 - DNA, 1229 bp, unidentified
  source 1..1229: mol_type = unassigned DNA; note = element_26ec9ab
  misc_feature 1..2: note = core
  misc_feature 3..239: note = LE
  misc_feature 240..1217: note = CDS
  misc_feature 1218..1229: note = RE
  misc_feature 6..209: note = bridgeRNA
cttgtatgtcgactacccgccataacggcgggtagtctccggctgatcaccggaaggaagaccaggaagacgtgtccgctcctaggctacgagcctgcactgtagatagtctcctgccttcccaatccactcgtgagtccgaacggtatctggagccccaccccggtggtagctcgtataggcaaggttggatggagtggagtgctgatgatgtaaagctgtaagaggtagcaggagttatggccatcgtagttggcgtggatatcgccaagaaaactttcgacattgcggttctgcagagcaatggcaaataccgcaccaaaggcaatctgagcaacgatcagtcgggcttcagcgtctttgaccagtggttgcaaaaacatgccgagccaggggcgtgggtggtgatggaagccaccaacatctatcacgaagctctgggcgattatctgttggcccggggatatcgtgtctgcgtgatgaatccggcacgtatcgccagctatgcgcaaagccagttgcaacgggtcaagaccgacaaggtcgacgccaagttgatcgccctctacggcgctcggcatgccgaggatctccagctctggcagccggacccggtgagcgtgcggcaactccgtgcgctggtacggcgctacgaagagctcaaggagctgttccagatggaaatcaaccgcctggaaaccgccaagagcgacgtggtgaaagagtcgatcctgtcggtctcggcccatctggaacagcagattgaacagacgctggaagcgattcgccaacatatcgacgacgatcctgacttgcggggcaagcgcgatctgctgacgagtatcgagggtatcagcgacaaaactgcagccctgttgctggccgaacttggatcaatcagccgcttcgagagtgcccgggcggtcgtggcttttgcaggactcaatccgaggctcagggaatccggccaacacaagggccaggtgaggatctcaaagatcggctcacgcctcttgcgggcaggcctgttcatgccagccatctgtgccatgagccataaccaggcgatacgggcactgcgtttacggctcgaggagaaaggcaaagcgggtaaacagatcatctgtgctgccatgcgcaagctgctgcagatcgcctatggcgtcctcaagtcgggccagccatacaatgtggaactggcccttgctcgaggctaggtgacacggtat

SEQ ID NO: 1814 - DNA, 1505 bp, unidentified
  source 1..1505: mol_type = unassigned DNA; note = element_26f33eb
  misc_feature 1..2: note = core
  misc_feature 3..214: note = LE
  misc_feature 215..1489: note = CDS
  misc_feature 1490..1505: note = RE
  misc_feature 9..210: note = bridgeRNA
ctgatagcggtaccttctttcatggctgggacctccggggaacgcttctggtgcttgtcctgcgaggactgaaatgagacagcgtcctcgggggttgtagccggaggcttgtcgtcttggagggtgttgtcccgatgaggactggtttatcagcacgacgcgcggcctccggttccagttttttcgttgctggacgcgaagggagtcggagcatttgcttggagcaggcatcgactgggcggaatcgtttcacgacgtggccttgggtcgccccggagaaggggtgatcgaacaattccgtatcgaccacaccgcagcgggagtcaaccggcttgtggcccgttgcctggagctggaaaccgacccggccgacgtgcgggtcgtgctggaaacccgacacggcctgttggtggaaacgctggccgacgccggtttcactgttcttccggtcaatccggacgtggtggcccgccgccgcgggccggctaaaaagaaagacgacgccgaagacgccaggatctgctgcctgctggcattggaccagtttctggaattgcggaaactgatcccgcacggcgagctggcgggagaattgcgcacgatcgcccgggacgacgaacgcgccgcccgcgacgagcgccggctgctcaaccggctgcgcgcggacctgctggcaaccttccctgccgcgctggccatcgccggcggcaacctcggttcgccggtcatgctcaagctgctgagccgctggcccggccacgacgagctcgctgcggccgacccgcacgacatcgccgcgttcgcccgcgccgccagccacggctggcccgaccggttcgccgcccgcgtcgccgacgccctcgccgccgaccggctgccggtgaaagactacctggcgcgcgcgaaaaccggcacgatcgcgctgaccgcgacccagctgctggccatccgcgaccaacgacgggcctgggaacgccgcatggccgaactgctgctcggaacggcccgccgcggccacgcaacacaggcgaaggaacccgatccgggaaaagcggtcccgggcggtgacatctacctgagtttccccggactcggggaccggctcgccgcccggatagccggagaaatcggagacgacatcacccagttcgccacaccgaacgggctgcaatgctacggcggaaccgccccggtcacccgccgctccggccggagcgagttcgtcgtcgcccgtcgtctggcgcacaaccactacctgggcgcagccgtgcatcagtgggccttttgcagcctctcccgcagcgcatgggcgcgggagttctacgacgggaaaatcgccgccgggaagagccatcactcggccctgcgcgctttggcgaaccgatggctggaaatcttgtggcactgcctggtcaaacgcatccgctacgacgagaccattcacattcgcaaccggcagcaagcccaccagcatccctcggcggcctgaggttgacagagggtgt

SEQ ID NO: 1815 - DNA, 1202 bp, unidentified
  source 1..1202: mol_type = unassigned DNA; note = element_26f9493
  misc_feature 1..2: note = core
  misc_feature 3..169: note = LE
  misc_feature 170..1168: note = CDS
  misc_feature 1169..1202: note = RE
  misc_feature 18..201: note = bridgeRNA
cttgtatctttccaaaccatgatatattgcttagctagcattatatcaaagtgcatgatcagagtttgtacccatccttagatgaaagtctgtgacgtagataaaacccatgcactatattcttaatactgaatggtatccaagtccttccagcatggaatgagactgaatgaacaaggggagtatacaagaaatgaatacaataggtattgatgttagtaaagctaaaatagactgtgcatggcttagagaggaaggaaaactaaaatttaaagtacttcccaatactaaggctggctgtaatgaattaattgaatggtcattaaaaagcacttctttggaaatcacgcagctacattttattatggaggcaacaggagtttatcacgaacaactggcaattcagcttcataacgcaggagcaatggtgtctgtcgttaaccctgcacaagtgaagttttatagccaaggcctaggagtaagaacaaaaaatgataaaaaagatagtgctatattagcgcgatatggattgaaagaaagtcctaaggcttggcagccagagcccgtagaaatacgtactttgaaggctttaattgctcgctttgatggcattgaaaaggacttgcaacgagaaaagaatcgtcaagaaaaagctgttattagtaaagcacctcaagaagtacttaattcaataacacaaatgattgagcttcttgaaactgagcaaaaacgacttgataaactgattgaagatcatatcaacaaacatgaagaactcaaaaaaaataaagagctgcttaagagtattcctggtgttggtaaggtaattgccactcgaatactaatggttataggaagtcgagactttaaaagtgctagccaatgttctgcttatttaggactagttccagtagaacatgaatcaggaagtagcataagggggagaccaaggctatctaaagcaggcaaccctatcattcgtgcgaagctttatatggcggcggtagtagcaatacagcataaccctgatattaatgctcaatacgagcgtttaacggcaagaggaaaaagcaaaatgtctgctttaggggcagcaatgcgaaaattagtacagatttgttttggtgttctaaaacaccaacaaacctatcaaccacaagtgacttaaattagcccttgtgattgatttggagagatggtat

SEQ ID NO: 1816 - DNA, 1458 bp, unidentified
  source 1..1458: mol_type = unassigned DNA; note = element_26fe55a
  misc_feature 1: note = core
  misc_feature 2..184: note = LE
  misc_feature 185..1072: note = CDS
  misc_feature 1073..1458: note = RE
  misc_feature 1113..1357: note = bridgeRNA
gaatgaaagggacttccccgtcccgagtgatccgcgcagttgcggggtacggcatcaaagtgccacgatgggaagtgcaacctctcatcaactcactcgtttttgtggaaggggaagtccatgtctgccattgtcaccattggaatcgatctcgccaagaacgtctttgctgttcacggcgtggatgacacagccttgcctcatcggcgtggaagcatgctccggcgcccaccactgggcgcgcgagtttgagaagtttggccacaccgtgcgcctgatggcgccaaagttcgtcatcccttaccgcctctcgggtcgccgtggcaagaacgatgcggccgacgcagccgcaatctgcgaagccgtcacccgcccaaacatgcgattcgtgccgatcaagtcaatcgagcaacaaggccagctcatggtgcaccgtgcccgccaaggctttgtggagcagcgcaccgccacattcaaccgcatccggggcctgctctctgagctgggcatcgtgctggcgctcaaagccgctgtggtgcgccgcgaggcgatggcccgcctggaagacctgcccggctgggccaacaccgtcatcggggacctgctcagcgaggtcacccatctggacgaacgcattgcgcagtacgaccggcacattgcattgatggcgcgccaaagcatcgaggcacagcgcctgatgcagttgtgcggcgtgggagagaccacagcgaccgcacttttaagcaccatcggcaacgggcgcgacttcaaatgcggccgccaattgtgtgcctggctgggcctggtgcctgggcaagacagctcaggcggtaagcagcgcttggggcgcattaccaaggcgggcgacccgtacctgcgcagcctgctggtgctcggtgcccgagcagtgctggcagcggccaagaccaagagcgatccgatcagccgatgggccgtgagcctggagcagcggcgcggctactggaaagccattgtggccattgccgcgaagaacgcccgcatgtgctgggccgtgctcagccgaggcgaggcattcaggttgccggcctgagcagcgcctattgagagattgacatgacaccgcagatcagaccgtccgccgcgtgaaggcttgttgttgatgtgcaaaggttaggacctgcgccggggaatgctcgattaactttaggggataccgggtgagaaatcgccccaagcccgactaacgaatggagccctcggcgcgcgtctttcatcagggttcgctgccatgtgatgcagcaagaatgaccgtttgtagtaccgccgtccgcaccgtttgccacagagcatcaacacaccgccaacactgggctgggagtcgatctggattgaaaaccgcaaaccgtttgcctgagtcgattgcgctgcaatcaactcaggatggattgcgcttgcaaaggtggggaagcccttgta

SEQ ID NO: 1817 - DNA, 1230 bp, unidentified
  source 1..1230: mol_type = unassigned DNA; note = element_2704a58
  misc_feature 1..2: note = core
  misc_feature 3..243: note = LE
  misc_feature 244..1212: note = CDS
  misc_feature 1213..1230: note = RE
  misc_feature 6..205: note = bridgeRNA
cttatgtcttggaaccagcccgacaaggttggtacccttcggttgatccccggagcgaggcaagatagattgttagcagcctaaggacttgatcctgtttgacagattaatcacttgcctcacctttgccaccagttcggacggtatccgaggcctgcttgacgcatgagcctgtacagataaggttgaaccggcattgccccatcttgagatcgacatcattgcttatggtaagaggtggttatgacacaaattcttctttatgtcggtattgatttagccaagcggaaattcgatgtggccttactgaatgcagacggcaagtatcgcagtaaagttttccccaataccccacaagggtttgacctgttctatgactggctgatcgagcatggcgctctggaagcccatctgtgcatggaaacaacgggggcttatggccgtgacctggccagatttctcgcctatcacaaactctgggtgagcgtggttaatcctgcccagatccatgcctttggcaaaaccgaactgattcgtgccaagacggataaggccgatgcgcgtctcattacacgatattgtaaaacccataatccggctcaatggataccgcctgctgatggagtggaaacacttcaggcgcttgttcaacggcttcatgatttgctggcgttgcagaacatggaaaacaaccgcttagagaattcggagcttcccgcagtaccttcaatacgtaaaatactgaccgtcatcgatcaggagatagagaccattcgtcggcaaattcaggaccacattgacgatcatccgaatctccattcgaaagaggaactgcttttaagtattcctggcatcggtgaggctacgattgccacactgctagcatttctcagcccttttgaacgattcgcatcaccgaaacagatggttgcttatgctgggttgaatcccagaattcgacagtctgggcaatggaatggaaaggcttccatcgccaagacgggcaattcccagttacgcaaagccctttatatgcccgccgtttgtgcaaaacgctttaacccagtcattagggtcttttgtgaacgattacttgctcgtggaaagtgtccaatgcaggtgattgttgcagccatgcgtaaactgctgcatatcgcttatggagtcctgaaatctggtcggccgttcagttctgaaatagcgcttgcatagagtccgtcaagacggtat

SEQ ID NO: 1818 - DNA, 1474 bp, unidentified
  source 1..1474: mol_type = unassigned DNA; note = element_2711832
  misc_feature 1..2: note = core
  misc_feature 3..232: note = LE
  misc_feature 233..1453: note = CDS
  misc_feature 1454..1474: note = RE
  misc_feature 7..225: note = bridgeRNA
ctaatggggttgcaccggctgttgttagggcagtgtggtgtccgagctgccgtcgggtgagcactcgcttcgcctggcctgtgaggtctagcgctagatcgtgccctcggcggctggcgaggaggtcgtagggctggtgggatgtcgtgcctgtggggcactgatccattaggtcgcctggatcttctcggtttagctcgtgttgtggtccagacgagaggagaaggcggcggtgctgttcgttggggatgactgggccgagttccatcacgacgttgagctcgtggacgaggccggcgaggtggtggcccggcgccggcttcctgagggggtggcggggatcgcgaccttgcacgcgctggtgggtgaccatctgggcgaggacggcgagccggagcaggtgctggtgggtatcgagaccgagcgtggcccgtgggtgcaggcattgctcgcggctggctatgtggtctatgcgatcaacccgctgcaggtggcccggtatcgggagcggcacggcacgtccggggcgaagtccgacccaggtgatgcgcatgtgttggccgagatcgtccggctggaccgtgcccatcatcgccctgtcgctggtgactccgcggttgccgagcacgtcaagatcgccgcccgggcacaccagacgatgatctggacccggcagcgcaacaccaacacgatccggtcgatgctgcgcgagtactacccggcggcgctggccgccttcgacgacctggcctcccgcgacgcgctggcggtactggccgccgccccgactccggagcagggccgacggctgacgccgggacgggtggagacactgctgcgccgagccggccggcaacggaatctggccactcgggccgcccagatcgtcgcggcgctgcgcaccgagcagctgcccgctcggccgggagtgaccgacgcctacgccgcggcggtgtccgcactcatcgcggtcaccagcgagatggtccgccagatcgcggtgctcgaggaacaggtgaaagcgggttttggccggcacccggacgctgagatctacctgagtcagcccgggctcggaccgatcctcgccgcccgggtgcttgccgagttcggcgacgacccccaccgctacgccgacgcccgggcccgcaagaactactccggcatgagcccgatcaccaaggcgtccggcacccgccgcgttgtcttggcacgttacgcccgcaaccggcggctcgctgacgcgctctaccagcaagccttcgccgcgctcaccacctcgacaggcgcccgcgcccactacgaccggcaacgcgcccgcggcgccacccactcccaagccctacgcgccctcgccaaccgcctcgtcggcaccctccacggctgcctgagccaccacacccactacgacgaagacatcgcctggcccaccaccgaacccctcgccgcttgacaccctccaaccgtgggatgt

SEQ ID NO: 1819 - DNA, 1209 bp, unidentified
  source 1..1209: mol_type = unassigned DNA; note = element_2713ffe
  misc_feature 1..4: note = core
  misc_feature 5..226: note = LE
  misc_feature 227..1189: note = CDS
  misc_feature 1190..1209: note = RE
  misc_feature 57..208: note = bridgeRNA
cattgtatattgactacaaattatttaattataaaaggatagttatgcaaaaagtaattgaaaggaataatggaaggtgagcaagcttattttgtcattggtcatgaagaccgttcagaatgttaagcccaccttccacgaatctgaacagtacattaggtttatagcctggataatgcacaatgatagattatttattcctgacaatttttgtaaaggagtttagatgaaaaagataacagccggaatcgacgtatcaaaagagacgcttgacatttctctttataatggagagaagcatgacaatattaccatcgctaacaacctgagagccttttcgaaatttcttaagaaatattcagcagatggccttcagatagtgatggaagctacgggtatctatcatttaaggattgccttggaagctcatgatctgggatacttcgtatcggtagtaaatcctttgatcatcaagcgttatggcgagatgaagatgttaagggcgaagacggacagggtggatgcaagactaatagccgaatatggttatgaacaaaatcccaaagaattttcaccacactcagatgagcgtatgatattgtttcagttattaaaagctatcgaagatttatataaaacccacaccgagttcagtaatcggcttgaatcgtatactcatgggtatccggtatcaaaggaagtgggaaagacttatcggtcgatggttaagaagatagagagggagatagacaagcttaagaagatgctttatgattatctcgatactcattttccagatcagtcatcgaagctgacctctatcaagggggtcggcaagatgacggcatcaatgatcatggctttttatggtaattttgagcaatttgagacagcaaagcaggcggtgtcctttgcgggactaaatcccaacccgagacaatctggtacgagtgtacggaggggttccgccataagtaagaagggacatgctttgatacgtaagactctttatatgagtgcgttgagtgcaaagaaacataatccaatttatcgagaatattatgaacgattattggcatcaggtaaatcaaagaaagtcgcacttgttgcagtcgcacataaattactacgccatatctttgctatcgtaaaatatgatagagaatgggaccctcaatatgctaaataagttgactttgaaacacagta

SEQ ID NO: 1820 - DNA, 1342 bp, unidentified
  source 1..1342: mol_type = unassigned DNA; note = element_27189ad
  misc_feature 1: note = core
  misc_feature 2..68: note = LE
  misc_feature 69..1043: note = CDS
  misc_feature 1044..1342: note = RE
  misc_feature 1111..1339: note = bridgeRNA
aatgaaatggtccgccccacctctccagacgcgctaagctgggaaggcgactgtaacgggagatgatcatggactacgcgacgctcgttgggatcgaccttgggaagcaaaccttccatgtgcacggacaggacagcaagggcaaggcagtattcagaaaaaagtttgggcgcagacagctgatcgaatttctcgcgacctgccattcctgtactgtcgtcatggaggcgtgcgccggctctcacttcatggcgcgcaagctgtcctcgctcggtcatgaggtcaagctgatttcgccgcagttcgtgcggccattcgtgaagtcaaacaagaatgacttcatcgatgccgaagcgatttgcgaagctgcatcgcgtccggcaatgcgatttgggacgccgaagaccgagtcgcagcaaacgctgtcggtacttcaccgcgtgcgtgaatcgatggtgcaggaccgcacgagaacgatcaaccagatgcatggtttcctgctcgagttcggcgtcagcctgccagccggcaagactggtgttccgcgactgccggagattctcgattttcatcctttgccgccccgtctcgttgctatcctcaagcggctacatgagcacttcaagtatctgcagcatcagatcggtgagatcgatcgtgaactggcactgcagcttgctgatgacgacgcggggcaaaggctgatgggcattcccggggtcggacccatcactgcgagtgtgcttgcctctgagatcggcgacggcacacagttcaaatgtggtcgcgacttgcagcttcgcttggccttgtgccccgacagtacagtatcggcggaaaatccaaccttctcggaattagtcgccgtggcgatagccacatccgaagccttcttgtgcagtgcgcccgggcatacatgcgctttcttgatcgacgaaccgggcccctcgcggaatgggcccgcgcgctggccagccggcgtcattcgaacgtcgtggcgtgcgcggtggccaataagctggcccgaatcgcatgggcgatagtcgcccgacacacgagctttaacgcaggacctatggccttgccggcctgaacctttcgaaaagactcatcaacacctcggcttttgcgacgcctgacactgatgaccggaacggcacaccggcctgcggaaaaacccgggaagtaatgaggctcaggaagccgcacgactttatgggggctgcaggcgcgaacttcatcatggcgcggggctcagccccaaccaacgacgccggatagatttgagcaagccaaccatgtcctcaagcacatggggttgcaaatctggggcggaccatag

SEQ ID NO: 1821 - DNA, 1358 bp, unidentified
  source 1..1358: mol_type = unassigned DNA; note = element_271a792
  misc_feature 1: note = core
  misc_feature 2..62: note = LE
  misc_feature 63..1112: note = CDS
  misc_feature 1113..1358: note = RE
  misc_feature 1126..1352: note = bridgeRNA
taatgagatggcccgccccgtctctctgcggcaaagtgaaatgacaaccaaaggaggaaccaatgattagaaatgcccctaaaaatgctgccgtgttcggcatcgatcttggcaagaacgtattccacatcgtgggcacagatgcgcagggaagtgtgattcaacgagtgaagttccgaagagacacgctgctgcaattcttcgaacgcgcaagccccacaatcgtcggcatggaagcgtgtcccggctcgcaatggctcgctcgcaggcttggcgcgatggggcacacggttcggattatgccggcccagttcgtgaagccatatcttaaggcaaacaagtctgacacgctcgaggcagaagccatcgccgaagccgtgacacggccaacgatgaggttcgttcacgtaaaaacgactgatcaggtcgacatccaaagtttgcaccgcatcagggatcagttggtcagacaaagaaccggtctgatcaatcagatgcgcgcgttctgtctggaatatggcgttgccattcgtcagggcgctggtgtgttcaagctggatttaccgcgcgttcttgccgacgaggaaaatgacctaacgcctgcgatacgtcgcctgctgacagacatgttcgaggatttgcggcacctagaggcccgtatcaagacaatcactgtcgagatcgaggcactggtcgcgcgcgatgacgttgctcggcggctcacgacgattccgggaatcggcccactcggtgcaagcgcccttctggcagcggtcggtgatggaagacagttccgccgagcacgtgacctggctgcctggcttgggctcacgcccagagagcactctaccggcggcaaacaaaaacttctgggcatttcaaaacgagggaacacatatgtgcgacggctgcttatccacggcgcccgctcctgcatcattcacctcgaccgcagcaggcaccgacttggcgagtggctcgatgccttgcagaagcgcaagcacatcaacaaagtaaccgttgcgctcgcgaacaagatggcgcgcatggcgtgggtgatcattacccggccaggcgcgctctatgaacggcgcgatccggccctaggctgaggactgcgccccaacagattgcgaggctcgggagaatgatgacgagacagtcgatcggcatattgtaaacccgccgcaaaaaagcgggcgatcagcccgaggtacttagtgggaacaatgtgcgcgtatctcatcatggcctggctgcaacagcagcccacttgcgagaggccggatacatttaagcaaactgttactcgtcagacaccacccgaaatcccttgcaatgacggggcggaccataca

SEQ ID NO: 1822 - DNA, 1230 bp, unidentified
  source 1..1230: mol_type = unassigned DNA; note = element_2721143
  misc_feature 1..2: note = core
  misc_feature 3..208: note = LE
  misc_feature 209..1132: note = CDS
  misc_feature 1133..1230: note = RE
  misc_feature 12..191: note = bridgeRNA
cttatctgttggaattctgccagtgtgggtgtcgagagccgacgtgggccaccgtgagagcctagatccttgccgatcgtcttgtagcagggtgcccacgtcggtatctcccctgtgtcgcccgaacggttgccagagttaacgctcgtagacgtaaggctgggcaggcaggggatctctcgacccttcaagcctaacggagttcgctatgaatggcatcgggatcgatgtgtccaaggccatgttggatgtggtcgtccattgcggccctttcgcacggtttcacaacacccctgccggtcacagaaagctgttgtcctggctagccacgcgggaagcgtgccagattgtcctggaggcctctggcggttatgagcagcgggtgctggatgccctgttcgacgccggtcaccaggtcgtgcgggccgatgcgcggcgctgccatgccttcgctgctgccaccggtgtgtcggcaaaaacagatcgcctggatgcggccaatctggcctgcatggccgccacgctggagctgcgtccccatcagccgatggaaccttggcggcgaaagctacgcgagttcgtgcgcgcacgacagcagctcgtggacctgacgattagcgcagaaaaccagttggaacacgtaacagagacgattttgcgccgcgcattgcaggccaacatcaaccagatgaaaaagaactgtctgcgattggaaaagcacattgccgaacaggtccgccagcaaccgcaattggaggcgatgcgcgcgttcaaaggcgtgggagcgaccctgcaagcagtgatcgccagctatttgccagagctaggaaccctcgatggcaaggccattgccaagctggtcggcgttgcccccatcgcccacgacagcgggagcatgcgcggcatccgccggatccgcgacgggcgcatagaggtacgcaacgtgctgtacatggcgtgcctgtcggccatccagcacgagccacggatccgggagttttatcggtccctacgagcacgcggcaaaccaggcaaggtcgccgtcgtggcggcgatgcgcaagatgctggtcatcctcaacgcccgcgccagagacactctagctggagtggcccaagccatcccgacctgagtgtccatgcgctggacggggcgacggctgccgaccagcggccggtaccaccgtgcccggcttatggactagccagagccactccaacaacacagttg

SEQ ID NO: 1823 - DNA, 1225 bp, unidentified
  source 1..1225: mol_type = unassigned DNA; note = element_27431ce
  misc_feature 1..2: note = core
  misc_feature 3..238: note = LE
  misc_feature 239..1210: note = CDS
  misc_feature 1211..1225: note = RE
  misc_feature 6..211: note = bridgeRNA
cttgtatctcgactctggtgcttcatcgcgccatagttctcgactgatcatcgagggagagtgggaagctgttgagctcctaaggcctagagcctccattgtagataaccactcccactctccaacctcactcgataagtccgaacggtatcgaaggcccgtccctgacgtgagcaagcatctacaaggccggaccgagtgacgcgatgatcgtatgcaatcgactcaggagagcaccatgtctgcttttgttggcatcgatatcgccaagaattcattcgatattgcgacgccgttggacaacggaaaattcagaaccaaagccaagctgcccaacgattcaaaggggtatcaggttcttcaagcttggctggaaactcactcagagccaggcgcctgggtggtcatggaggccaccagcgtctaccaccaaggcgtagctgatttccttcacggccaagggtaccgggtttgcgtggtgaatccggccagcattcatcagtacggtaaagacgatctgcgtcgcgtcaaaacagacaaggctgatgcaaagttgatcgccagctatgcccaagccaagcaggcaaagcttcgagaatgggtaccagaacctgcgccacgccgacgcctgcgagctctggtgcgccgactcgatgacttgcaggaaatcttgcagatggaaagcaatcgcctggatgtggcagaagataaggtcaaggaatccattgagtcggtcatcagccacgtcagaactcagattgccgaaaccaaaaaagcgatcaaggacagcatcgatgatgaccccgacctgcgtcaaaagcgtgatctgatcgtgagcattgatgggctgggtgacactacagccgccttgatcctggccgaactgggcgatccgttggactataaagggccgcgctcaatcgttgcattcgcaggtttggatccgcttggaggcagttctggtaactggaccgggccgactcatatctccaagaccggctcgaagagattacgcacagggttgtacatgcctggcatggtagggctgaagcacaacgctgtgctgatggccctcaaaacgcgcatgaaggctagcggcaaggcccctaaggaaattatctgcgcggctatgcgtaagctgctgcatttggtgtatggggtactgaaatcgggtaaaccttttgaccccctcatcgcgcttgcgcgatgagggtcaagacggtat

SEQ ID NO: 1824 - DNA, 1828 bp, unidentified
  source 1..1828: mol_type = unassigned DNA; note = element_2743a58
  misc_feature 1..2: note = core
  misc_feature 3..108: note = LE
  misc_feature 109..1383: note = CDS
  misc_feature 1384..1828: note = RE
  misc_feature 1500..1731: note = bridgeRNA
agcattcctgtagatctttatttttcgactttgaaaaaaatagggctcctcagtatgatatgagtatagacaccactctaactcacaacttttaggaggaaccctactatgaagtttaaaatgcagaacaaacaaaatcaactaatagaaagaatttctgttaaacatcttgttgtcggcgtggatattgcacaacaatttcatgtcgccagagccgtaaatttccgtggaattgtgatcggagatcctcttacattcaaaaatgatgaagaaggatttactagtttacttaaatggattaaaaatcttcaaagattaaacaacctatgtgaagcaattgttgggatggaaccaactggacactactggatcaatctttcaaaatggctccttaaacaaaatattgaggtagtaacggtgaacccacatttagtaaagaggaataaagaaaaccgtgataatactcagtcaaaaagtgataaaaaagatgcattagttatagctgatatggtaaagaacggctactattccgaggttagatacacatcagaatcatttgagaaactaagggtcctaatgtctaatcgtgatgtagtagttaagcgacttgttagttctatcaatcagttaaatcgctgggtagatattgtctttccagaactccgtcaagtctttaaagatattactgcaaatggagcaatcacaacccttcgcctatttccaactcctatggaattggccaccaagcagcctcatgagattattttgggttggaaatctctgatgaagaggcaacctggattaaaaaaggcccaattactcctccaggtagccaagaactccatcggttcaagacaagcactagatgcttataaatttcatttggagcaattacttgaagaatatgatttagcaataatacaactcgaaagagttgaaaagcaagttatcgatgtactgaataaaattccttatgctaaaaagctgcttaccattaaaggaattagtgaaatatctttagctggcatattaggtgaagctggagatattagtggattttctcatggtaattcgctacttcgacatgcaggattacacctagctgaagcaagttctggtaagtggaaaggacaaattgttttatcaaaacgtggaaggtcaaggctacggcgattccttttcttagctacgatgagccttgtggtgaacaatccagaatttcaagcaattcatacccataatgttaaggttaaaaaaataaagaaaatgaaatcaattatgaaattagttggtaaattggctagaatttttgtaggaatggctcgaagaaatgaatcctataattctgaaaaacttcaaacaataacacctatggcagcttagtggtaatggaattttagaatatgacccgtttttattaaggacatggaaaaagtaatagtaaactatacaccttagttatcatactaatcgaatattggcttattcgtaggatttcaaatatgtacagagtaccagattacttaaacaaaagggctctgacccatcccgttagcaaaactggcctccaccccttggataggcataacgaaggaatgaaagggcaaatgacccgttgagacatgggagggaaagcctccaggggcggcgtggagcatgtacatgatatggtaaaatatggagttcatttatactcctctatttaactatgcctccacgaagctattaatggatcttgccccctttattctatcgttaagaaatatcaaggtacatgaaatcctgcgaattagcgagtattcgggagaaaatcgtattaaactgaggg

SEQ ID NO: 1825 - DNA, 1563 bp, unidentified
  source 1..1563: mol_type = unassigned DNA; note = element_274fa7f
  misc_feature 1..5: note = core
  misc_feature 6..263: note = LE
  misc_feature 264..1475: note = CDS
  misc_feature 1476..1563: note = RE
ctcctacaatcttcttgtcgcgttttgactgttcctatcgaaccattcagaatgcgatgcagttactggctgggcaggcatgtcggcatgggtcctggggcgggcgaccgacccctttaaggagactgacagcctgccccattcggggcggttcgcggattagctggatggcggagcctcgtcgaggctaccccgtgtctcttacaggaggttgcgagcccgtttggtgagcaggggcctgccacgtacggaaaggcggcgccatgatctacgccggaatcgacatcgccaagaacagccacgtgataggcgcgaccgacgagcgcggaaaagacgccgcgaggccgatgcggttcgcgaactcggcttccgggttcgaccgctgcgtcgcctacctcgaaggcctggccgggtcgaagtccgacctgctggtcggcatggaggcgaccggccattactggctcccgctgttctgccgcctgagcgatcgcggctacgacgtcgtcgtgatcaacccgatgcggaccgacgcgatgcgccggttcaaaggcagctcgcgggtgaagaccgacgtcgtcgactgcgtgctcatcgccgagacgcttcgctgcggcgacttcgagccgagcaagctgggcgacgaggcgatgatcgagcttcgccagctcacgcgcctgcatcagagcctcaaggagagcgtcgcggacctgaagcgccagaccgtggccgccctcgaccaggtgttccccgaatacgactccgtcttctcgaacaccttcggcgagagctcgaaggcgttcctgagaagatgccccacgcccgaggagtgcctctcgatcagggtcgactcgctggcgaagacgctcagggaggccagcaggggaaggctcgggcgcgagaaggccgacgagataaaggccgcggccagggcgtcctgcggcgtcggcgtcgcgacctccgcgttctccttccagatcaagctgctcatagaccagatggacttcatcgagaggcagatcgccgaggtcgagaagaggatacgggacggcgtcgaggccgtcgagccgctcatactcacgatacccggcatcggctgcgccctcggagcgcagatcgtctccgagatcggcgacgtgcgccgcttccacagcgcgcccgccgtcgttaagtacgccgggataaacccgtcggtgagccaatcggggaagttctcctccgaggacaaccgcatcaccaagcaggggtcgccgtaccttcggcgcgcgctctacctggcggcgatggcccagctcaagctcaagaccccgttctacggctactacgccaagaagcgcgccgacgggaagtcgcaccgagaggccctcgtcgcggtggcgagaaagctcgtccacgtgatctacgccgtcctctcgaaaggggagccgtacgatccggaggtgacgcggaacccggagctcgcatcgcgttctgaatgatccgatatggaactgtcaaagtgcgaatccaacaaacgaaaaaccttcgagatgttcttcttaacccggttgactactcatagctggt

SEQ ID NO: 1826 - DNA, 1436 bp, unidentified
  source 1..1436: mol_type = unassigned DNA; note = element_2760735
  misc_feature 1..2: note = core
  misc_feature 3..131: note = LE
  misc_feature 132..1157: note = CDS
  misc_feature 1158..1436: note = RE
  misc_feature 1195..1433: note = bridgeRNA
gaatggaatggacgcctccccccgtgagggggagttgaatagagagtaggtggaccctcacgggccgacggcatcgaagtgcccaaggtggaagatacgaagatcttcacaggcaaaccggagggtccgaaatgaatggtagcaaaaacgtagtcggcatcgatattgccaagcgggtgtttcagttgcactggatcgacatggagagcggagaaatcgtgagcctgcagctcaagcgcgagaagtttcttgaacactttgccaaccggcagtcgtgcctgatcggcatggaggcctgtggcggcgcgcagcactgggcgaggaaactcacggcgatgggccatcaggtcaagctgctaccgggcaaggcggtcaaacccttcgtgatcggcaacaagaacgaccggcaggatgcgcgggccatctggtcggcagtccagcaaccgcacgtcaaggcggtggcgatcaagactgaagaacaacaggcgatcctggcgctgcaccgcatgaggagtcagctggtcaaattccgcaccgcccagatcaacggactgcgcggattgctcaccgaatacggtgaagtcatgccgcagggcaaggccggcgtcaggaaagggattgccgaagcgctggcacgactgtctgaccgattgccggcgatggtcatcgacaccctgcgcgagcaatgggcgcgcatcggcaagatggatgaagaaatcaccaccatcgagcaacgcatcaagctgtggctcaaaaacgatgatgcctgccgacgaattgccgagattcccggcgtcggcccgctgaccgccacggcagccgttgccatcatgggtgacgccaagacattcaagtcggggcgggagtttgccgccttcgctggtctggtgccacgacaggttggcaccggtgggcgcgtcaaactgctcgggatcagcaagcgcggcgacacctatctgcgaacactgctgatccacggcgcccgatccgtgctgacccatgccaaagaacccgggccgtgggttactgaattaagccagcgtcggccgttgaatgtggcggtcgtggcactcgccaacaagatggcgcggacgatctgggcgatgctcgcccatgagcggacgtaccaaaaggaattcgtcagtcagccggtgtaggtggctgacgggtgtatcaaccactttgaagaaaggagtggccgccgtaaaggttgcgcaaggtcgataaaagtgtgatggcaaacaggtcagaccgtgacccgccaagcctgtatgtgttcaaggacttaaagtcctccaggagaatgaggcgcgggtcagcggattccatcagggccagcaggcaatcccgcctgcacaacaggccggatatagaactgcagcctatctgtcccaacacaccaaaaccgatcttggcaaacgggaggcgtccatata

SEQ ID NO: 1827 - DNA, 1382 bp, unidentified
  source 1..1382: mol_type = unassigned DNA; note = element_27757df
  misc_feature 1..2: note = core
  misc_feature 3..86: note = LE
  misc_feature 87..1118: note = CDS
  misc_feature 1119..1382: note = RE
  misc_feature 1149..1370: note = bridgeRNA
tgatgctgtggacggctcctccaccggcacgagggtgccatggatgtgggcgctgctaaagctcccacgattcggaggagcgagccatgcagacggtcacgacaatcggttttgatatcgccaaatcagtcttccaggtccacggagttgatgccgcaggcgaagtagtcatccgccgccagttgaagcgtcgccaagtgctggcgttctttgagaagttgccgccatgcctggttggaattgaggcctgtgcttcgtctcaccattggtcgcgcgagctgcaggcaatcggtcatgccgtacgattgatgccgccggcttacgtgaagccctatgtcaaacggcagaagaacgacatggccgacgcagaagcgatctgcgaggcggtcgccagaaccaacatgcggttcgttccgaccaagacacccgagcagcagagctgcctgatgcttcaccgcacccgccacctgttcatgcgccagcaaatagctgtgatcaattcgatccgagcgcaccttgctgagttcggcattgtcgcaccggttgggcgcaaaggggtcacggaactgctgcgcgttattgccgacccaaacgacaagcggatgtctgaggttgcccgcgtgtgccttgccgcgctcggcagtcagctactcggcctcaagcagcagattctggagttcgatcggatgatcctggcctggcatcgctccaaccagaccagcaagcgcctacactacattcccggggtcggcccgatgctggcgaccgctctggtcgccagtgttgccgaccctagaaccttccggtccgggcgtaacttctccgcctggattgggcttgttccgaagcagcactcaagtggcggaaaggagcggctcggcagcatcagcaaacagggcgatcgctatctgcggagcctgttcgtggccggagcactcgccgtcatccgctatgccaagatccatggcaccgggcatcggccctggctcacggcgttgttggcgcgaaagccgaccaaggttgccgccatcgcacttgccaacaagatcgcgcggatggcctgggccatgatggccagagatgagcgttacaaagaacccatcgcgcttgcgcggtaaacgagatcgcaccgggcaaccggcgtgatgtgaaggttgggagggcgaacagcacgtaatgcagagccggtcgatccggcgatcaggacaacccacttgtgccatcgcattgttatcgaatgcgtgttgttgaccgggacctgatccgcggagggcattatggccagcggtcatgtgaaccgcatccaaaggccgaacacatggcagcaccgaccaagcctgcgacgtgaagattcttcttgccaacccggagccgtccacaca

SEQ ID NO: 1828 - DNA, 1348 bp, unidentified
  source 1..1348: mol_type = unassigned DNA; note = element_277ee4e
  misc_feature 1: note = core
  misc_feature 2..66: note = LE
  misc_feature 67..1092: note = CDS
  misc_feature 1093..1348: note = RE
  misc_feature 1118..1345: note = bridgeRNA
taatgggatggtcacccccacctctcagcgagtaggctgctgaaactttccagcggaggccatgccatgcaaaacgtcacgttagtcgggattgatctgggcaagcactcattccacgttcatgggcaggacagaaccggcaaagctgtgtttcgtaaaaagctctcgcgcaagcagttgcttgagttcttcgccacctttcacggctgcactgtcgtgatggaggcctgcgctggcgctcattggatggcgcgaaagctcagagattttggacatgccgtcaagctgatctctccacaattcgtccgccctttcgtcaagagtaacaagaatgatttcgttgatgctgaagccatttgtgaggctgcttcgcggccgtcaatgcggttcgtgacgccgaagaccgaatcccagcaaacgctttcagcgttgcaccgtgtgcgtcaggctctagtgcgcgatcgggtatgtactaccaatcagatgcacggatttttgctcgaattcggcataagcctgcccgtaggacacgccgttgtgaagcgcctatctttggtgctcgccgagcaccagttaccgccgcggcttgtcgcaattcttgaacgcttacatgcgcactttaaatatctcaccgagcaaatcggcgatattgaaaaggagctccagcggcagctttccgacgacgccctcgggcaacgcttgttgacgattcctggtgttggccccatcaccgctagtcttctcgcctcggagctcggcgacggaaagcagtaccgatgcagccgagacttcgccgccgcagtggggctggtcccaaggcaatacagtacaggcggtagatcgaccctgctcgggatttccaagcgaggtgataagaatattcgccacctgctggtccagtgtgctcgggcattcatgcttcggctagataaacattccggacccatggcagattggacccgggcaatgctcgcgcggcgacattcctgcgtggttgcatgtgcgctagccagcaagcttgcacgaatagcgtgggcaatcgtgagccacaacacagtgtttgaagaacaggtgactgcctccgttgcgtgaccggcagatcctgaaggtttaaggaaatcatcccatctggttttgcgactgctgataattgatgacgtgaacggcaaaacggcccggcggacatcctgaaaggttaacgagcttctgaagctgcagctgttaccaggaccgccaggcgcgattctcatcgaggcgcgaggattgttcctcataacgacgccggatagatttgagcaagccatccacacagcaaaatcggtgttgcaaaaatgggggtgaccataga

SEQ ID NO: 1829 - DNA, 1302 bp, unidentified
  source 1..1302: mol_type = unassigned DNA; note = element_2780260
  misc_feature 1: note = core
  misc_feature 2..220: note = LE
  misc_feature 221..1189: note = CDS
  misc_feature 1190..1302: note = RE
  misc_feature 44..211: note = bridgeRNA
tcttaagtttgatttctattaaaataggtagttttaattattaatcagaaagaacaaaagagcgcattaaggttactatatacggtgaagcttagacttcgacaacattgataatccgctctcttttactactttaattacgatcagttctgtgagactttagatctcgttttcaagtcgatgtactactagtagctagttctttcataaatcaatttatatgaataaatataaagaaacttttggagttgacattagcaaagatgtctttgatgttcacggtagtacttctggccataatcagtacaaaaatgatgcgactgggtttacgaaatttctaaaagatttgcctaaagcatctttagttgtaatggaagttacaggatattatcattatcgacttgcacagtttctttacaagaatggaacagtcgtctctgtagtaaatcctttatctgtaaagcgttttatacagatgaaactagcaaaagtaaagacagataaaagtgatgcaaagatgatttgtgaatatggggtgcttaatgaagtccctttatatactgcgctaacagatatgcagagtgaatgtttacaattatttagagtattagataattttataaagcaccgtacagccacaaagaataagatgcacggagaagaggttctaggcataccttctaagtttacttatcgagctttaagaagaaacaagaaacactatgatattgagataaaagctattgaagcaaagattctttcattagttaaagaggatcagcagcaacaactaactttattaactagtgtaccaggcataggccaaaagacagcattatttttaattatagttacagatggtttttcaaaatttgaaaccgcttctcagttgtgcagttatgtggggattacaccaacgataagagagtctggtagcagtgttagaggcaaggcacgaataagtaaggtaggtaataggaaacttcgtaatttgttgttcttatgttcctttaatgcttccaaacacaacaaagcttgcagagaactttatgagcgaatagtaagcaaaggaaaaagcaaaaagttagccttaattgcagttgtaaataagttaattaaacaatgttttgctatagcaaaatcgggaagaccttacgacgaaacatacgtttctatcttacctagataagtagaaaaaaatagcataaaaaaaactcaaagaatcacaaaagcgaatctctgagtatggcattataatgtcaaaatttaatgaagaaaagagttgtttttcacctcagttct

SEQ ID NO: 1830 - DNA, 1553 bp, unidentified
  source 1..1553: mol_type = unassigned DNA; note = element_2783a28
  misc_feature 1..2: note = core
  misc_feature 3..602: note = LE
  misc_feature 603..1436: note = CDS
  misc_feature 1437..1553: note = RE
  misc_feature 3..244: note = bridgeRNA
cttgtatgataattaggaagccagttatcacacgtttcctttcttttgatattgtggtttaatacattcagatgttgtggactttttatgttattttgtagctctgactactcaaaggagtgtattgccaccacttttatctgaatcgtttattagctggatgtgcctcgggatttccacccatgagtacttatttcaatcaagtctacgatgataatcgatagtggatatcacggtatcagactttagaaagggaggtgctacctcatgatgttttacactggcattgatattgccaaactcaaccatttcgcctcagtcatttcgaatgaaggcgaagtactcatcgagccgtttcaattctctaacgacagtgatggcttccggttgctgatctccgtcctcgattcattcgagaaggacagcctcatcattggtcttgaatctacggcacactatggcgacaaccttgttcgatacctcgtcgcttctgattacaaagtgtgtgtgcttaaccctatcaggacttccacactgcgcaaaacaacatccgcaagacgaagaccgataaagtcgacacatacatcatttgcaaagctcttatgatacaggatcatctccggttcgtttctttctacgatctggatctcttagatctgaaaactctgggacgctttcgacaaaagaccatcaaacagcggactcgtctgaagatccagttgacatcttatgtcgatgaagccttccctgaactgcaatactttttcaaatctggcctgcatcaaaaatctgtctatgcgcttcttaaagaagctccgacaccggaagcgatcacttctatgcatatgactcatctggctcatcttctcactgtgacttcccacggtcactttgataaacggacggctcagcagttaagagctctcgcacagaagtctgtcggtgtcagcgacagtgctatatctattcagataactcaaaccatttcacaaatcgagttactggatagtcaattaaaaaatgtggactctgaaatgattgaaatcgtgaaattccacgactccgtcatcatgaccattcccggtatcggctatatcaacgggggaatgatcctgggtgagatcggtgatatccaccgtttctcaagtccgggcaagctgctggcatatgctgggcttgctcctcccgtttatcagtctggaaaattccaggccaaacggacaagaatgtccaaacgtggatccaaagtctttcgatatgcacttatgaacgcggctcacaatgtcgtaaaaaacaacgccaccttcgaagcttattatgaagccaagaagagcgaaggccggtctcactacaacgctcttgggcactgtgccggcaaacttgtcaggatcatctggaagatgctcactgacgaagtagaatttaacctcgattagaggtcatctattatttggcaacctttttgaaatgctccatcgggaagctttattaaggttaccctttttaccacgaaaaagaatttttaatttcctgctatttttttcatagctggt

SEQ ID NO: 1831 - DNA, 1722 bp, unidentified
  source 1..1722: mol_type = unassigned DNA; note = element_2784a00
  misc_feature 1..3: note = core
  misc_feature 4..69: note = LE
  misc_feature 70..1230: note = CDS
  misc_feature 1231..1722: note = RE
  misc_feature 1268..1484: note = bridgeRNA
aagatgctatggggcgagcggcgaggagattgcatccatcggcgctaatatgcaccgatggaggacccaatgcggaagccgaatgacatgagccgatccctgaccgccctgaaaggggacaacacgctgatcgccgtgatcgaaatgagcctgtcgagctggctcgttgccgggattgtacccggcgtcgagcgacaaccattgaagaagctcgagaccgacgagggcacattgctcaagctgctctgtcgctggcgggcggaagcggagaaggcaggacagaggatcgatcgcatcgccgtcgccttcgaggccggtcgtgatggcttctggctggcacgctggctcggggcacacgacatcgaggcccatgtcatccacgcctcgagcatcgccgtctcgcgcgagcaccggcgcgccaagaccgaccggctcgacaccgagatgctcaaacgcgcctttctcggctggctacggggcgagcgcgatcactgcaagatggtcgcgatcccgaccatcaaggacgaagatgccaagcgacccaaccgcgagcgcgagagccttgttggagagcaaaaccggatcatcaatcgcatgagggcaacgttggtccggctcggcatccgcgggttcaatcccaagctcaagaaggccgccgaacgtcttgatggcttgcgcacgccggagtctgaaccgatcccagccaacacgctggctgagttgcgtcgcgatatggagcgcaggcggctcatcagtgctcaaatccgccagatcgaggaggctcgcctggagcgtctcgaacaagcatccggtgatggacaacatgccatggtccgcctactggcgcgcgtgatcggggttggtgtcgagacggccgacatgctggtgcaggaggtgctgtcgcgaaccttgcgcgaccgacgggccgtcgcgcgttacgccgggctcacgggctcacctgacgagagtggcaagaagcgtcgcgagaaagggctggcccggtccggtaacgctcgtgttcgacggggcatgatccaattggcgtggcgattcctcatgttccagaaagacagcgccttggcgcagtggttccgagcccgcaccgagaacgcccgcggcactcgcaagaccatgatcgtggccttggcgcgcaagcttctgatcgccctgtggcggctcgtgcgagaaggcctcgtgcccgagggcgttgttctgcgtccggcccaatgaacggaggacgctgaaggcacctgatagtttcggccaaacccgtgcgcttgtgacgggccgccgatgacggttcgaggtggcggggtcccgaggtgactcatggctttgatgccgagaggaagaatgggtccgccgcttcggagcttcgctgccgatgcgcatggctgcatcatggttcgggtcattgacccaccggatacaaggttgtggcgcgattaatttacgcccgaaagcgaactccccttggacatgtcatccgaccacagcgagcgtgcggccgcactcggcgctgtcaaggtatggcccggcaacgctggagcttggggtgtggtcggtgcgacgaccaacctcgacagcccctgcccgcgacagcgttgggagaatgtgggtcggggcgaagaaacggtcttccgagtcgactaaagaaactgggatgaagaaagaaagatgagaccgccctgaacttggagcttgactcctaacaccccatac

SEQ ID NO: 1832 - DNA, 1474 bp, unidentified
  source 1..1474: mol_type = unassigned DNA; note = element_279166b
  misc_feature 1..4: note = core
  misc_feature 5..80: note = LE
  misc_feature 81..1130: note = CDS
  misc_feature 1131..1474: note = RE
  misc_feature 1222..1461: note = bridgeRNA
atgatggagtggacggcccccgacggcatcatcagtgccaaactggtggtgttgattcgctccagcaaaggggaccgtccatgacgaaggttagcatgattggtttggatttggcgaagaacgtgttccaagttcacgggattgatgcagcggggaaagttgttgagcgacgtcaactgcggcgccaacaactggaaaagtttttcgccaagctgccaccaggtgtagtggtcggcatggaggcgtgcagcggtgcgcatcactgggggcgggtgcttcaaaagcttgggcatgaggctcggatgatgccggcggcctatgtgaagccttacgtgaagcgcaacaagaacgacgggcgcgatgccgagggcatctgtgaggcgatggggcgcccgacgatgcggttcgtgccggtgaagagcctcgactgtcaggcggttatggtcttgcatcgcacgcgtcggctgctggtgcgtcagcgcaccatgtcggccaatgcgctgcgttcggcgctggcggagttcggcattgttgcggcgcagggcctgaaggggctgcacagcctcatgcaggaactggaagacccggcaagcgctattccggacaaggcgcgcatgccgctgcaggtgctggcccggcaatgggaaacgctcaacacggatatctgcaaattggaaacggaaatcgttggtgccgccaagaccgacgaagtggcccgccggctgatggcgataccggggttgggtccgatcggagcgaccgccatcctggccgcggttccggatgcgcgcgtattcaaaacggcgcgcgattttgccgcctggctggggcttacgccgcgccagtttggcacgggaggcaagcaacgctcgggcggtatctccaagcagggtgatcgcacgttgcgcacgctgctgaccatcggcgccacctcgtatttgcgctatgagcgcgcgcgcggcgccaaggatccttgggtgcgcgatctgttggcgcggcgcccgttcaaggttgcagcggtggcatatgccgccaagatggcccgcatgatctgggcgatgctggtcaccggagagttctatcgcgcgcccaatcgaagccgcagcgtggccgcgcaggctgccacctgagctcacacaagcgccgtcgaggaggagagcaaggagggctgccgatggggtgcttgttgataccacggtgatcaaaaccagggtttgagtttgtggaccgcgtacgtggtcccaggatcggaaagggcaaatatggtgtgaaggcaaatcggtcagagaccgggtcgggacactccgagacgtcattgcgcgtcacagcgcgccggaatgattggaacccgaccaacgtactccatcagggccagcggtccatgcaccgcgtacaaaggccggatacatgaccgcacctgatccgcttgccgatacaccaaaaaatgcccttgccgagagggggccgtccatac

SEQ ID NO: 1833 - DNA, 1448 bp, unidentified
  source 1..1448: mol_type = unassigned DNA; note = element_2791c06
  misc_feature 1: note = core
  misc_feature 2..81: note = LE
  misc_feature 82..1137: note = CDS
  misc_feature 1138..1448: note = RE
  misc_feature 1211..1439: note = bridgeRNA
taatgggatggcccggccgcgctcctgccctgtaattgcgcgagcaattcagggattgagcaacgcaaaggagtccgtcccatgtcacgtcaaatatcacaatccactatcaccacgatcggcatcgatatcggcaagaacaccttccacctgatcggcctcgatccgcgtggcgcaattgtcctgcagctgaaggtctcacgcgatcagctcaatcgtcgtcttgccaatgttccgaaatgcttgatcggcctggaagcctgctcgggcgcgcatcacattggccgacagctcgccgccctgggccacgatgtccggctgattccggcgcaatacgtgaagcccttcctcaaggggcacaaaaacgactaccgcgatgccgaagcgatcgcggaagcggtgcagcgaccaaccatgcactttgtgacgatcaagacaccggagcagatggatttgttggctttgcatcgcgtgcgctcgcgtcttgtcggccagcgcacgggagtggtcaatcaaattcgtggctttctcatcgaacgcggcatcacagttcggcaaggccttacgttcttgcgcaaggcgctgcctgaaatcctgagttcccgcccggatgttctgtcaccacgcctggtccggcttattgccgacttggccgaagattggcggcgattggacgatcgcattgcaaccgtgtcggcggagatcgaagcattggccgagcaggacgatagttgccaacgtctgatgacggtaccgggtatcggaccaaccatctcaagcgcagtcgtggcagcgatcgggaatggtaccggcttcaggcagggacgcgactttggcgcatggctcggacttgtcccgaagcaggaatcaactggggaccgcacaatcttgggcaagatctccaaacgcggaaacaaatacctgagaacgctgttcgtgcaggctgcgcacgttatcctggtccgccggccgcgtgtcgccatgttgggtctatggcagtggatcgaacaggcgtcgaagcggatgcaccgcaatatgttggcgatcgcgctcgccaacaaacttgcccgcatcgcttgggcggtgctcgcccgcggtcaagcttatcagcccaaaaaagttctcaacgtcgcgtgagaaaccgaatttggtcaccagtgacaatcgaaggtccggagataaagatgaaatggagtcgttgaaacagcttccccaccgagtctgcgagatggaatgaagagatggacgaacggtctgcccggcgcagccaagagactgggtgccaagatggcccaacgaggtcttgacgctagccagtctggttgcgcgcggatacccatgctggcccggagcttaaaggctccacttcagaggtctgatacattgttgcagctctcacgttcgtcgctctcggaacttcatcttgctacgcgcggccgggccataca

SEQ ID NO: 1834 - DNA, 1363 bp, unidentified
  source 1..1363: mol_type = unassigned DNA; note = element_27a7f8c
  misc_feature 1: note = core
  misc_feature 2..305: note = LE
  misc_feature 306..1088: note = CDS
  misc_feature 1089..1363: note = RE
  misc_feature 1126..1320: note = bridgeRNA
gaatggaagggacttcccctggatatgcgtctgattaactttcgtgcaatcatgggataaatattgacccagagggattcgttatgaccatcactactgtcggtatcgatcttgctaaaaatgtatttgcagttcactgcgttgaccaaaatggtaaagcagttctggttaaacccaaggtgtcacgtgcagcacttcctgaactcatcgcaggtttacctccctgtgtaattggaatggaagcctgctcgggtgcccactattgagcaagattattcaggcagtatggccatgatgtccggttgatggccccaaaatttgtctcaccctatcgcatggcgggtaagaccgggaaaaatgatgcagctgatgcaatagctatttgtgaggcagtgcagcggccgcatatgcgctttgtacccgtcaaagacgaaagtcagcagacaatgcagtgcttacatcggacaaggcagggatttatccaggaaagaacggcaacgtataaccgtcttcggggtctggtatccgaatttggggttatcgccccacaaagcactgatgctctacgtcatattgtttctgaccagagggaaactctgccagtacaggtcaggctttgcattgatgatctattggctcacatcactaatattgaagaaaaaatcgccgaatatgacagggtattatctcgtgtggccaaaacagaccatcgcagccagcagttaattgaactgaaaggtattggccccacaacagcgagtgcactggtcgccagtattggcaacgcacatgattttaaaaacgggtgccaactggcagcctggctggggttaacgccatcgcaatacagcagtggtggaaaatcaaagcttggcagaataacgaaagccggtgattcatatctgagaacgctgctggtacagggagctcgttctgtgatgataggggcagagaaaagaacggactcgtttagccgttgggtctgctcgttgattggcaggcggggatactggcgtgctgtcgttgcaatcgctgccaagaatgcgaggttgtgctgggcatcattacattacggcgatgacttctgactgtattcggcaacatgaaaaatttaactgtgtagtaactgaactgcaactcgttgatggtaaagggttagacctccgtgagaagtatctgcatatcctactggatatcactatccgattagcgaaggaggatctcacgagcgtctttcatcagggtccgaatcaatagagattcaacgtgaccgtttatagtagcgcagtcttatcccttacccttcattgatgaacagacagaaattaaaaaccggcgttgactgttcggggaagcccttata

SEQ ID NO: 1835 - DNA, 1544 bp, unidentified
  source 1..1544: mol_type = unassigned DNA; note = element_27ad00a
  misc_feature 1..2: note = core
  misc_feature 3..239: note = LE
  misc_feature 240..1421: note = CDS
  misc_feature 1422..1544: note = RE
  misc_feature 3..218: note = bridgeRNA
cttgtattatagagtagtagttattagagtccctctccaaggactgtgctacactgtaagggatgctgtggattggttatgttctcctaccgcaagacggttcttgaaaggctccaaccacagtcctttacagtattgttaatcagttagataccgccagacggtttatgtagaacaaggttacaagagtaaagcgtcctgtggacccagcatcaaataaacataccggaggtaccatcatgatttgcgtgggaattgacgttgccaaggacaagtacgattgctttatcctcagctcagaaggcgaagtccttgcagatgtatttaccattccaaacaacgcagagggctttgacacgctgctgcaaaccattcgccgctgtgctcgtccggaagacaaaataaaagtagggcttgaggctaccggacattacagctacaacatcctcggatttttgcttaacgaaggtctggacacctacgtcatcaatccgctgcacaccaacctctaccggaaaagcctgagccttcgcaaaaccaagacagaccgtgtcgatgagcgaaccattgcagctatgctcatgtctgatgtggacctcaagtcctacacagacacagcataccacaacgaggagttaaagtcactcacaagataccggtttgataaagttcgtgaacgagcgaagctgaagcagtcggtttcccgtctggtcacaatcctgtttcctgaactggaaaagctggtttcaacactgcacatggcatctgtttacgcacttctcagcgagtttcccggcgccaaacaggtttccgaagcgcacttaacgcatttgaaagccgtcttatacgacgcctccaaaggccgctatgggagtgatatggcaacgacacttcgggatgctgccaggtgctctgtcggctctgtcatgtcggccaagtccctggaactgcggcatacgatccgcctgattcacgagctggacgccgagatcgaggacattgaggctgctatccagtccatgatgggcgaaatacaatctcccattactactatccccggcatgggtgtccgcatgggcgctatgatccttgccgagatcggtgacttctcccgcttcgactcgccggataaaatccttgcgtatgctggaatgtccccatctacttaccagtccggacagctttcactgtctggagcctactcgcacatggagaagcgaggctcccgttatttgcgctacgcgctttacaacgccaccaaatatgtctgcctttggaacccaacctttgctgcttatcttgccaagaagcgggctgaggacaaacactacaatgttgcgctctctcacgcggcaaagaagttggttcgcctgatttacgctttggagaaatccaaacggccatacagcacagccgcataacagcttttctctcacatgcttagctgggcgtccaaccggacatttgctttgctataccctttttgagccgtctacattttctcaccatcccatgcagttcaggcttgacatctaatagttagt

SEQ ID NO: 1836 - DNA, 1351 bp, unidentified
  source 1..1351: mol_type = unassigned DNA; note = element_27afbcb
  misc_feature 1..2: note = core
  misc_feature 3..235: note = LE
  misc_feature 236..1108: note = CDS
  misc_feature 1109..1351: note = RE
  misc_feature 1122..1337: note = bridgeRNA
gatggggtggatggctcctgctccaaccggcgtcgcaatgcgccatagtgcaggtgtcaaagtctgcttatgagaggagccaccccatgcaagttaccacgatcggcgttgatctggccaagaacgttttccaagtccatgggatcaccgccacgcaggaagtggtgttcaataagccccgctaagggcacagttcttgtctttctttgcgaagttggaaccttgtctgatcggcatggagtcctgcagcagcgcccatcactgggcgcgcgagcttactgccttgggtcatgacgtgcggttgatcccgccaatgtacgtgaagccatacgtcaaacgcgggaagtctgaggccattgatgccgaagcaatctgcgaagcagtgacccgaccgacgatgcgcttcgtggcgattaagactgtcgggcaacagtcattgctttcactgcatcgggcccgtgaccttcttgttcgccaaaggacgcaactgatcaacggcctgcgtggcctggttgccgagttcggcgtctacatccccagagggctggcacgcgtgattgggtttgctgaggatatcacccttggtgaagtgctcgatttgccagacatcgccaacgaggtgatccgtaacctgtcagaacagctcatgtccttgcatcagcgggtccgctggtacgaagaacgcctgaagcaagttgcaaaagaggacgcgcgtgttcgtcttctgcgcacgatccccggcgttggcgcggtgacggcgtctgccatcatcgccagcatcggagacggtcatcagttcaggaacggtcgggagtttgctgcctggcttggtttgacaccagcaaacaagtccagcggagggaaagagaagcttggtcggatcaccaagatgggtgaccagtatctcaggcaacggctggtcgttgggatgacgtcgcttgtcaggcagacccgatcccacccggaacgcgccagcaaatggctgacgtctttgctcgaacgcaaacccgcccgcgtggcaactgttgccatggccaacaagacggcccggatcgtctgggcagtgctcacacgcgatgaaccctacagcccacgcgctgcagcctgaaaggaatagactgacgagctggcaagacccgcgagatgatggcgcataagtcagccgccaaaaccaggactccccgccgaatgtcccgggcgtcacagcccgctaagctgtaagggacctggtttgcggaacccatcagggccagcggtcaaaaccgcgcaaacaggccggacacatgactgcttctgacaatcgcacaaatcagctcaaaaaggacttgccaagcgggagccatccacacag

SEQ ID NO: 1837 - DNA, 1615 bp, unidentified
  source 1..1615: mol_type = unassigned DNA; note = element_27baf8f
  misc_feature 1..3: note = core
  misc_feature 4..275: note = LE
  misc_feature 276..1484: note = CDS
  misc_feature 1485..1615: note = RE
  misc_feature 13..295: note = bridgeRNA
tctattacaataaatttggaaccggagcccggcagccagccgggctttcttccatctcatgcctaagctacaataagaggagcaactggctgactactcctttcctggtgctttcatgtccgtaaatcagactgtcagccatcctcttgttgtagcgttcggtttagcaggttgagccaccgtttatcggggtgttcgtgtcactcaatagattgaatcggcaatgagaaaaagatggattccggttgcacgatttttgtattggaggaatgacaatgaacgccgttggcatcgatgtttccaaaggcaagagtatgattgcagtcatgcgtcctggcaaggaaacggtgatcgaaccctttgaagtaagtcacaccgacagcgaactgatcgacttggcaaaagtgatccaaagtctggacggtgagacccgcgtagtcatggaggcaaccggcaactaccatttgcctgtagcctggatgctacatgatgctggtatctatgtttccgtagttaatgcgatgttgatccgcaactacggtaacaactcaattcgcaaaggaaagaccgataagaaggacgctcagaaaattgccaactatgccatcgacaactggactgaattgccacagtactttcctgaagaagatttgcgtcttatgctaaaaagttgctatcgtcaatatgagcacttctccaagattcgaacaatgatgaaaaataacctcattgcacttctggatgtcacattcccggatgcaaacaacctgtttagcagccccagacgagctgatggccgtgaaaagtggttggattttatagaaacattctggcattgtcagtgtgtctgtagcctcaccacgacggctttctcaagaaaataccagaagtggtgcaaaaaacatggatacaatttcagcgaagataaagcattagatatttatgcttctgcctgcgaccatgtctgtgttatgccaaaaacagatgttgctgaatttatggtaaagcaagcagtgacacagttgcaagctgtttccagaactttggctgctcttcagcagcagatgcagtctcttgcagaaaagcttcctgaatacccggtagtcatgcagatgtttggagtcggaccaattcttggacctcagctcatggctgagattggcgatgtcaggcgatttcactccaaaaaagctctagtagcttttgctggcattgacgcaccaccctatcagtctggcaccatggatgttcgaagccgtaatatctcaaagagaggttcatcttcgttgcgcaggacaatttttctagtcatgagtgtgattctaaagcagaagccacttgatgaacccatctatcaatacatggataaaaaacgagccgaaggaaagccctacaaggtctacatgatggcttcagccaataaattcctgcggatctattatgctaccgtaaaggcttacctggacactctggacaccgagtagtccacaactgcatctaacggacggctgccgtttcaaaaatgaaacgctgagcggcttagttaaggtgcgcttttctgctaaaaaagaaaattgtaattttgtcagtttaggccttgacttttattagcagg

SEQ ID NO: 1838 - DNA, 1350 bp, unidentified
  source 1..1350: mol_type = unassigned DNA; note = element_27bbae3
  misc_feature 1: note = core
  misc_feature 2..61: note = LE
  misc_feature 62..1093: note = CDS
  misc_feature 1094..1350: note = RE
  misc_feature 1096..1340: note = bridgeRNA
tatggaatggcccgcccctctcctccaccatgtccgggtaggcgaaatggagggtgaggcaatgaacgttgatgttctcgggatcgacttgggcaagaacagctgcagcgtggtcgggctggacccgacggggcgtgtgatgctgcgtcggcggatgcggcgggagagcatcgtgccgctcgcggcgaaactgtcgggctgcgtggtagcgatggaggcgtgctgtggcgcacaccacctcgggcggctgctggccgcacaggggcacgaggtgcggctgatgtcgccggagtacgttcgtccctatgtcaaggcgcagaagaacgatgaccgcgacgctgaggcgatcgccgaggcagcgacccggccgacaatgcggtttgtcgcgctcaagaccgaggctcagctcgacgtccaggttctgcatcgcgtgcgcgaccggctggtcggccagcgtacggcgctgatgaaccaggtgcgcagcatcctgctcgaacgtgggatcgtcgtgccccagggccggcgcagcctgctcaatgcattgggggagttgtcagccgagtccgacggcgacggcgtgggacctcgggtgcggttgctgctcgacgacatgctcgatcaatggcgcggcctcgaccggcggatcgcggctctggacgacgagttcgcagggatggcgcgtaatgacccagcggcacgccggctggcgaccatcccgggcgttggcgtgctgaacgcaaccgcgctggtcgccgcgatcggcgatgggcgcacgttcagccgcgcccgtgatctctcggcctggctggggctcgtgccgcgtcaagcgagcacaggcggcaaggcgaagctgctcgggatcaccaagcgcggcagcaaatatctgcgcaagctcatcatccagggggcgcgagcggctctgccctcgctgtccagaacggcgacgccgctcggtaattggctgcgcggcctgctcagtcgtgcgcatggcaacacggtcgtcgtcgcgctggcgagcaagctggtgcggatcgcctgggccttgctgcgcaacgaaaccgcgttcgccgccggcgggcttgcagcggcgtagattggatcggctcgcggcgatcacccggcgtcgcgagccgtagagggtctgcgggtggtggaagcgagatggcctgacagtcaaccggtgtcccgacagcctacggcgtaaaatggcactcgatgccgacccctttatcaggctcggggcgcgcggatctccatcttggccagggttcgaccctgagaccggatacgttgatgcagactgctcagattagctcgcggaaactgcttgccgacggggcgggccatacg

SEQ ID NO: 1839 - DNA, 1506 bp, unidentified
  source 1..1506: mol_type = unassigned DNA; note = element_27be9d7
  misc_feature 1..2: note = core
  misc_feature 3..247: note = LE
  misc_feature 248..1471: note = CDS
  misc_feature 1472..1506: note = RE
  misc_feature 48..222: note = bridgeRNA
cttatattgggtttgttgcaatgtgaacatacatcaggtgattttatgtagaccgatttcaagagcttgctggtatgaggacctttctctccctattccatcgaggatcacgtcgagactgtcccgaccagcgagagaacggagctagaggttcaatagaaagttgtccctgggaggaccgatataaggcgaatcttccgttcagcgctattggaattggaactatacccccgaggaggaagagaagttgaagcgatactatttgggtgtggattgggctgatgagtttgatcaagtttgggtcagtgacgcagacggcaacaaagtaaccgaaatgaaagtcctccaaaatacacaaggtttgagcgactttggccgctggctccatgagcgtaaagcgcaagcgatagagctttgggcggctattgagaaacctcacggacggattgtggattttcttttgaaccacggggtcgtagtctacccggtcaatcccaaggctctggatcgggcgagagatcgatttcgtatgagtcaatcgaagagcgattcttttgatgcttatgtgttggcggattttttgaggaccgatcatgctcgtttgcgagctttggagcctgactccgctccggcccaggagctcaagatagtcacccgggatcaccagaggctcatgcggcagaaaaatcggcttctcaatcagatcgaggtaaccctcaaagagtactaccctcgtccattggaggtttttaacgatctggaaacgaaaatagcgctggattttctcaaagcgtacccaacgccccaggccctctcgcagcttaaccgccggggctggaatcgctttgccaagcgccagcatcacctcagtgaggcgcgtgctgacgagctttgggagaaacttaataaggctcagctggcagttcccgagcacgtggtgagagccaaagcgagacttttggcggcgcttgtggttcagtttgaggctgcgcttcaagcggtcaagcaatacgaggagcaagtcaaaggttttttcgcctctatgccggcagctgaccttgtaaagacgctgccgggaggaaaaagcgggaccaccgtcccaatcctttgggctgagttgggagatgccaagagccgctgggagtcctttaggcaccttcaggctgaggcaggagcggtccccgtgactcaatccagcggcaagagccgtttcgtacagtttcgttttgcctgtaacaagcatctgcgatatgccatccactggttttctttcaactctctgaatcgctgtgagtgggcgaacaaatactatcggagccaacgggctaaaggacacagtcatccccaagcgctcagagccctgggagcgaagtggctgaagattatttttgtgatgtggagagatcataagccttacgatgagaattaccacctggcaaatattgcccgacaacagatgcgagcggcataaaaaataacaggggcttgacaaagctcatagaaagt

SEQ ID NO: 1840 - DNA, 1627 bp, unidentified
  source 1..1627: mol_type = unassigned DNA; note = element_27c107e
  misc_feature 1..4: note = core
  misc_feature 5..278: note = LE
  misc_feature 279..1508: note = CDS
  misc_feature 1509..1627: note = RE
  misc_feature 29..283: note = bridgeRNA
ttgctacaatatgtttgacctcagaatagccctgccaaggcagagctgttcagcggttcatacctaagctacaatgagagggtaatcggcctatcggggcattgcttgagctacccacgctcgtttgtgcaaacagttagccgtccctctcattgcggcgttcggtttacgcaggttgaatcatcggaagtcttccgtacattcgtgtaactaagcaagcagaatcggtaatgaactgtggcggtcgccggttaagattttttgcaggaggattgccaatgaaaacaaacatcatcacagcagtcggaatcgacgtttccaaagtaaaaagcactgttgctgccagatgtccgggaggcgaagttgcgttgataccttttgaagtgacgcacgatgcagagggcctcagaaagctggttgccacgcttcgtgaactcgacggtgaagtaagaatcgtcatggaacataccggaatgtactggagaccggttgctctcgcattgcgggaggccggtttctttgtcagcgtcgtcaatgcgatcctgattcacgatttcagcgacaactcacttcgaaaggtcaaaacagaccgcgcggatgcgctgaagattgcaaactacggtctaactttctggtcagagctgcgcgagtattctgtggaagacgaaactcgccagctgctgaaaattcaaagcagactttatgaaagaacgaccacaacgggaatcatgctgcgcaatggactgatctcgcttttggatcagacttttcctggagccaacaaattattcctgaacgaacagaaaaaccaaaaaggccacgtgaaatgggtcgatttcattatccgtttctggcataaagaatgcgtggcagctttacccttacactcttttgcagacaccttccaaaaatggtgcaaaagaaccggttacagattcagcacttccgatgccgagcgaatccataccattgcaagaaacgcagttgccacgcttcctaaaaatgatagtacaaaactgctcataacgcaagcggcaaacagtctgaacgctgtttatgattctctgcagatgcttcggaacgaaatgaatcggcttgcctcgctgcttccggaatatgagttggtcatgagtatggaaggggtaggtcagattaccgggccgcagcttatggctgagattggcgacatccgtcgcttctcgcacaaaggcgctctggttgcttacgccggtgtcgatgctccgccataccaatccggcacatttgacgcaaagaacagacacgtctcaaagaggggctcaccgcatctaagaaaagtcctgtttgagatagcatccatgatcctggtacgcagcaacatggataatccgattttccgtttcatggataagaaacgagccgaaggaaagcatttttacgtttacacggtcgctgggtcagcgaagtttctgcgcatctactatgcaaaggtaaaagaatacctgtccgcaaaagaagctgccgcataacgaaagcattacagcatacaagtctgatctgcaaattttcttcgttgcaggtctggtttgttataccctttttcttgaattcattttttcacttttgctcttgacacgtattagcaggt

SEQ ID NO: 1841 - DNA, 1357 bp, unidentified
  source 1..1357: mol_type = unassigned DNA; note = element_27c2c1a
  misc_feature 1..2: note = core
  misc_feature 3..72: note = LE
  misc_feature 73..1077: note = CDS
  misc_feature 1078..1357: note = RE
  misc_feature 1124..1356: note = bridgeRNA
ataatgatatggtcacccccaccttaacagcagtacgctgttaaggtaaatccctttaacggagagaccatcatgcagaacatcacacttattggtatcgatctcggaaagtattcctttcacattcattgtcaagacaagtctggtaaggctcttctgcgtaaaaaatttacccgcactaagctgatgcagtttctggcgacatgtcctccctctgttgttgtaatggaagcctgtgcgggtgctcactttatggctcgccgtatctctgattttgggcatgaaactaagctgatttctccacagttcgttcgcccgtttgtcaaaagtaataagaatgattttgttgatgcagaagccatatgcgaagcggcttcacgaccatcaatgcgttttgtccagccaagaactgagacccagcaggccatgagggcgttacaccgggtcagagaatcgctcatcagagataaggtgaaaacaaccaaccagatccacggtttcttgctggaatttggaatcagcctgccgataggtgatgctgtaataaaacggttgtctctcgtgttggctgaacacgaaatccccgaatatctgagccgccttttggtgaggttgcatacccactacttttaccttgttgagcaaatagcagagctggaatcagaattaagtcagtcaatcaacgctgatgataccgctcagcgcattatgacaattcctggtgttggtccgattactgccagcttactatcgtcgcaacttggtgacgggaaacagttctcatgcagcagggattttgcagcttccacaggacttgttccccggcagtatagcactggaggaaaatcgactctgttgggtatcagtaagcgaggtgataaaaatttacgccggttactggttcagtgtgcccgctcattcataatgcgacttgaacgcaagcatggaaaacttgctgagtgggttcgggagcaactcaacaagaagcattcgaatgtggttacctgcgctctggcaaataaactggctcgaattgcctgggcaatcactactcagaaaaaagaatatcaggcctgatatagatgctgatataactcaattagtttattttaaacaataagatacaagttacctttctggttttgcgaagactgattattgatgacatgaacggcaaatcgacctgattaaaaacctaacagatgaaatggctcactgaagccgaggggatttttaggattatcaggtgcggaactcatcggggcgcgggcatccttgcccacagagacgccggatagatttaagcaagccaaccattaatcaaaaatcagtgttgcaaaaacgggggtgaccatag

SEQ ID NO: 1842 - DNA, 1385 bp, unidentified
  source 1..1385: mol_type = unassigned DNA; note = element_27c6b2c
  misc_feature 1..2: note = core
  misc_feature 3..87: note = LE
  misc_feature 88..1116: note = CDS
  misc_feature 1117..1385: note = RE
  misc_feature 1090..1369: note = bridgeRNA
agatggggtggatgccgctctccccaaacggcatcgcattgtgccaagcttgcgttgtcgaaactcaagctgaaggagagggcatccatgggagaagttaccatcattggcgtcgatctggcaaagaacgtgttccagctgcacggagcagcgtccgacgggacggtcgtgtaccgcaagaagctatcgcggccgcagttcgcccggttcatcgccgagcagtcgccgtgcctcgtggcgatggaggcctgcgcgggcgcgcatcattgggcgcggcagatggcgcgtcatgggcatgaggtccggctgatcgcggcgcgctacgtcaagcctttcatcaagaggcagaagaacgatgctgccgatgccgaggcgatcgtcgaggcggcgcagcggcccaccatgcgcttcgtggaaccgaaatcggccgatcagcaagcgcgggcggtcgcgttccggacgcgcgagcagctcgtgaagcagcgcaccgaagccgttaatgcgctccggtcttatctttatgagtttggccatgtcgcgcccgaggggattggctacctgccgcgcctggcaaaggtcgtcgatgatcccgacgccgacattcctgatctggcgcgtgagatttgtcgcatgctcctcgagcagatcgcccagctgaccgaccggatcaatgcattgaaagcacggatcgcggccatgtcgaacgaagcggacatgccgcgccagctgcagacgatgccgggtgtcggcccgatcaccgcgctcgcggtcgagaccttcgcgccgccgatggagcagttccgacgcggccgagacttcgccgcctggctgggcctggtgccgcggcagtattctaccgggggcaagcagaagctgggcaagacatcgaagatggggcaacgtgatatccgacgattgctggtgatcggggcgacagcggtgatccgctgggcctcgcgccgcggggcgccgaaggggtcgtggctggcgcggatgctggagcgcaagccggtcccggtcgtggccgtcgcgctggcgaacaagatggcgcgcggcatctgggcgatgctgacgcgcggcgaaacctatcgcggcccggtgctgatcggcgcctgatcgggcatcgaacgggcactcgggccaccgagttgtgaggaaggcatgatccgaatgggtacatgatcgacatgatccgggtcgggcaaaccagaaaccttctccgggctccgagctcgctgttggagatttggacccgctccgcgcatcaccatcccggccagcggcgccatgtcagccgcatgaacaggcctgacaaaagaccgcgctcgatcacatgtccgaaacgatcagaaattccttgcaaaccgagcggcatccacaaaaga

SEQ ID NO: 1843 - DNA, 1436 bp, unidentified
  source 1..1436: mol_type = unassigned DNA; note = element_27caded
  misc_feature 1..2: note = core
  misc_feature 3..388: note = LE
  misc_feature 389..1420: note = CDS
  misc_feature 1421..1436: note = RE
ctgatatagctcgtagtggaggtcagtatggagcgtgacctcggcggggagaccgacgtccagctatccggctcgagaccgttgagcttagatgtcggccctcgcccttcgtcagaagcggagattgggatccaacggcttggaccggcgatggagcatcagccgacgcgaggcggaggtaagcgagtacccctggggtcgaccactttgaaggaggacgccatgagcgttatggtcggcatcgacgtgggggcgtacaagcacgccgccgcggttcattcggcgaggcgagcgggaagcggagaagaaggttctgcgctatgaggccaatcggggcgggttccgggagctcgacacctggctggcgcggcagggccaggtcgagcgggtggtggtggagtcgagcggacactactggtggccgctggcgagccatctgggccgagccgggctaccgctggcggtggtgaacccgctggaggcaaagtacttcgccaagagcaggctgcagcgatcgaagtcggaccccgcggacgcgcgcacactggcggcggcgttgggaatgcgcgagcaaccgccggtgcgagaaccactgctgggagccgaggtccgggaggccgcccgcttcagcatgcgcttggtgcgcgaccaagccaatgtctgccagcgcttgctgaggttagtcgagattggcttcccagagctgaaggaggcctttgaggaccccacctgtgacaccgctctggccgtgctgaggcaggcgccgacggctcgggcggcaacacgccgtcggctgggcacgctggcccaggcggtgcgaccaggtggccgacgggcactcggccagggccgcgcaagccggatccaggaactggctcgggagaccatcgccccgcccgagctggaccagcagatggccttcgaggtcggcctgctgatcgagcagtacgacctgctgggcagacagatcgaggcggccgagaagcgggtcgctgaactgctcgattcagaactcgcccgccggctccagaccatccccggtgtgggtccgacgatcgcggccagcctgattgcggagattggcgacatctggcgtttcgatgacttcgaccagctcgccgcctacgccggcacccaccctaaagaacagagctcgggacgccacggcgagcgccccgaaaccagctggaggatggccaagactggcaacgcccaccttcgctcagcgctctatcggctggccgtggtcgggacccagcacaaccccatcatcaaggagcattaccggcgcaagcgggagcagggcaaggccccgatgaatgccctcggccactgcatgggcaaggcgttggccatcgtctggggtgtctggcgttcgggtcaggacttcgacccgtccaaaggaggcccgaggacttgacaagaccctatgggat

SEQ ID NO: 1844 - DNA, 1429 bp, unidentified
  source 1..1429: mol_type = unassigned DNA; note = element_27cdf0a
  misc_feature 1..2: note = core
  misc_feature 3..265: note = LE
  misc_feature 266..1123: note = CDS
  misc_feature 1124..1429: note = RE
  misc_feature 1192..1426: note = bridgeRNA
taatgaaatggacccagccttcttccccaacaagcctcttcggaggcaagatgggtgctatcgagcgcgcaacgcacactcatcgtcagaacgaagggagggctattatgcacatcacaacattagggatcgatgtggcaaagcaggtgtttcagttgcacggggtggatgcccgaggacgcgccgtattcagccgacgcctcaagcgcgatcagttcttccacacggtagcgagtctgccgccctgcgtcatcgggatggaggcgtgcgggagtgcgcagcctgggggcgcgcgtttgaacagctcgggcatacggtcaagctgatgcacccgaagtacgtcaagccctatgtcaagacgaacaagaatgatcgtcgcgatgcggaagcgatctgcgaagcggtgagtcggcccaccatgcgcggtgtctcgatcaagacggtggagcaagccgacctgcaggctgtgcaccgcacgcgatcgctcttcgtgaaacatcggaccgctgtcatcaatcagattcggggtttgttggccgagtatggattggtaattggacaatccccggagaaggtccggcctgccctcgtccggtttctggatgacccggcgtcgggattgaccgccttggcccgggagaccttcgccgagttgtacgcacaactgacggagctcgacgcgcgcattgagcgggtgacgcaccgggtcgaatgcctattccgggcgcacccggtctgccagaagctggcggcggtaccggggattggtccgctgacggctacggcgctggtggcgaccgtcggtcgacctcacgcatttcacaacggccggcatctggcggcttggttagggctggtgcctcggcaatattccagtgggggcaaggagcggttgggcgggatttcgaaacacggcagtcggtacgtgcggaccctgctgattcatggggcgcgcgccgtcgtccaacgagcggagcggcgaaccgataggcagggacggtggctatgcgcactccaacaccgcaaaggcaccaatgtggctgcggtcgccttagccaacaaaaatgcccgagtgatctgggccttgttggctcatgatgaggcgtatcgatcacctgcttagaggcaggacaggtcgcgacggtctttaggaggagaggagggccgcatcccctcacaaggattcacaccacggagtgcaacgcggacgatccgtgatgacaccagagggacacctagcgcgttcagaccctggacaaattgtcggcccaaccaaggccgttgtgctaataaggagaacgcgcgcgtagttcatcaaggcccggacacagctgtggtccaccgagaggccgaatatatacacgcagccctgtgttacctggtgcatcgcgtgacacgccgtcgttgcagcgaaggctgggtccatata

SEQ ID NO: 1845 - DNA, 1193 bp, unidentified
  source 1..1193: mol_type = unassigned DNA; note = element_27d9c80
  misc_feature 1..2: note = core
  misc_feature 3..199: note = LE
  misc_feature 200..1171: note = CDS
  misc_feature 1172..1193: note = RE
  misc_feature 12..183: note = bridgeRNA
cttgtatcttgttctcattggtggttagcaattgaggtgaagaccagtttgtgcccacccttaaggctcgaccttggaaggtagatcaagcccttcacctcgttcccacaccataccaaacactggacggtagccaagggctatgaccctgtatgcacaaggagagtgggtgtgatgatcgagaacacgaggagaatctatgttttacctgggcgtggatgttgccaaagccaagcttgattgcatgctgctcgatacatcgagcgggaagctgaaatcgaagtccctgacaaatacgcctgcgggctttacccagctgctcgactggctagacaaacagaaggtggtcaagccgcatgtggtgatggaaccgaccgggatgtaccatgaaaacgctgcactggcgttggccgatgcaggcttggtggtctcactcgtcaacccggcccagctgcgtgcattcgcgcagggcttgggcgtcaagaccaagaccgacaaagcagatagtgctgtgctggcgcggtatggcgccacacaaaatcctgcgccatggcagccgccatcacagtcagcgcgcaggctcaaagcactgctgacacggcgtgacgctgtagctgacgacttgcagcgcgaacgcaatcgacaggaagcgaacaatttcagcccagctcctgaagcagtaggggaatcgatcgctcaatcgatcgccttccacgaggccgagcttaagcggctcgaaaaaatgatcgccgagcacatcgacaacgatccagacctgcgcaataagaaggaccttctcgagaccattccaggtgttggtccacgcgtctcaggacacatgacagcattatttgcagggcgaacgtttgagcgtgccgagcagctggccgcttatcttggcctggtgcctgtagagtggcaatccggctcgtcggtacgtggccggccacgcttgtccaaagctggcccagcttatttacgcaaggtactgtacatgcctgccgttgttgcacgacgctgtaacccacacatcaaggcgctcaacgaccggctgctcgcaaaaggcaagtcaaagatggcagccattggtgcagcaatgcgcaagctggctcacctctgctttggcgtgctccacagcggcaagccctacgacccaaaatttgcgatgtagggcttgacgggcaagacggtat

SEQ ID NO: 1846 - DNA, 1232 bp, unidentified
  source 1..1232: mol_type = unassigned DNA; note = element_27db841
  misc_feature 1..2: note = core
  misc_feature 3..253: note = LE
  misc_feature 254..1210: note = CDS
  misc_feature 1211..1232: note = RE
  misc_feature 6..205: note = bridgeRNA
cttatatcttgattcagacccctaaaaaggtcagaatccccgactgatcatcgggagggcagtggggaaatcgtgttcgcccttaggcttaaagcctgtgactcagattgatctccccactgtccgcactcgctaatcgtagttcgaacggtatacttaggctcagagcttgtatgaataaggttgaacatggcgtgtgtctcctgcttagatcataacactttgttattaaaaactatgagggttaatcattatgactaaaatcgtcatcggcgttgatattgctaagaaaaaattcgatgtggctagttttaacgatagcaaatataaacacaaaacatttactaatgatgaaccaggctatgccgacttcattatttggataatacatctttttgccaataataagcctttgatttgtatggaggctacaggtgcttatagtatcccacttgctgattttatggttagtcaaggttatcccgtcagtgtcgtcaatcctgccaaaatcaatgcatttgctaaaagtgagctgagccgggccaagactgacaaagcagatgccaagcttattgctcgctatgcctcgatcatacagcctccactttggatacctccacctcacaatattcgtatgctacaagcgttggtccgccgtgttgaacatttactggaaatgattcaaatggagcgcaaccgtcttgaaacttcagacattaccattgttgactcaatcaacaccgttctggcaacactggaaaacgaactggaagccacgcgtaaagccattcgtgaacatattaacaatgactctgaacttaaacgtcgtcgtgacctgctgattaccataccaggtatagcggacgctagcatcgctcatttacttgtcgtattgagtgaacatcatggctttatcaatgccaaacaagtcgttgcctttgctggcctcgctccagcactacgacagtctggtcaatggtccggcaatacccatattgctaaaagcggcgactctgctttgcgtaaggctttgtatatgccagctctgtcagcttggcaatttaaccctgccattcgtgagttttgtaaacgccttaaagccaatggcaagaacggaaaagccattgtctgtgccgctatgcgtaagctcattcatcttagttttgctatcttaaaatcaggtcaaccatttgatccaaatttcgcttgaaaaaatggatttaagacggtat

SEQ ID NO: 1847 - DNA, 1474 bp, unidentified
  source 1..1474: mol_type = unassigned DNA; note = element_27f7413
  misc_feature 1..4: note = core
  misc_feature 5..210: note = LE
  misc_feature 211..1458: note = CDS
  misc_feature 1459..1474: note = RE
  misc_feature 1..223: note = bridgeRNA
ccccgttaccttcttggtagccccaggttggggttgcaggccaccggtcccggcatgacttactgcccctgtcgttcatgatctggggggtgttgtcaccggggtcggcggatgccagtgaccgctgatggagacccgacccgatcctgaggtctgctcgtaacgtggctgccggcgcgggtatcccaggcaggtctgtcgagctgcgagatgaggtggaccgagttggctgattgcgaaaacaccgacgttggctacgcggtgttctgtggtgtcgatgtcggcaagtccgaccatcacgcctgcgcgttggaccgggaaggaaaccgggtccatgaccgggctctgcccaacgatcaggcagcgctggtgcaggtgttgaccgatctgagcaaacgcgggcgggtgctggtcgtggtggatcaacccgcctcgatcggcgcgctggtcatcgcggtggcccgctccatggccattgacgtggcctacctgcccgggctggcgatgcgccggatcgccgatctgcaccccggtcagggcaagaccgacgcgcgtgacgcctacatcatcgccgacgctgcccggtcgatgccgcatacccttcgtcgggtcggcaccgacgatcagacgctggccgagctagccgtactggccggctacgacgacgacctggccgcccaatctacccggctgaccaaccggctgcgggacgccctgctgcacatccatcctgcgctagaacggttgctgggaaacgctttcgaccgtggtggtgtgatcgatctactcgccgccgcccccaccccaacggcgctgcgtcaactcggtgtgggcggcatcggcgaactgatgcggtcgcgatcaccacggctggccaagacactgcccgcgaagatcatcgccgcgctggacgcccagaccgtcaccgtgccgggcacctatgcgttcggccgagtcatcgccggcgtcgccgcgcaactccgtggtgtccgcaacgaacgagacgaactggcctccgacctggagatccggctggaggcacaccctctttccaaggtcctgacctcgatgcccggcgtcgggttcaggaccgccatcaaaatcctgaccatcgtcggcgacggatcagccttcccaaccgccgggcacctggccgcctacgccggcctggcaccggtgacacgcagatccggcagctcgatcaagggcgagacccgctcccaacgcggcaaccacgccctcaaatcggcactgttcctgtcggcattcgcgagcctgaaagaccccgccagccgtacctactacgaccgcaaacgcgccgccggtaaacgacacaacgccgccctcatctgcctggcccggcgacgagtcgacgtcctattcgccatgctccgcgaccacaagccataccaaacgccggacaccccgatcgacgattcacaacccgccgccgcttgacaacgacatagagaca

SEQ ID NO: 1848 - DNA, 1363 bp, unidentified
  source 1..1363: mol_type = unassigned DNA; note = element_2800497
  misc_feature 1: note = core
  misc_feature 2..152: note = LE
  misc_feature 153..1103: note = CDS
  misc_feature 1104..1363: note = RE
  misc_feature 1126..1360: note = bridgeRNA
taatgagatggtcagcccgatccctccccagcggactacgctgagtagagattcgtctttctgggagaccatcatgagcgatcgtcacactgatcggtatcgatctgggcaaaaacagcttccacctgcacgcgcaggatgcggcaggccgcatggtgtttcgcaagaaactcacgcgtagccaactattcagccaactggcgaatgtcccgtcctgcacggtggtgatggaggcctgtgcgggcgcccactgggtcgcgcgccagtttgcggcgctcgggcacaccgcccgactgatctccccacaattcgtgaagcccttcgtgcagggcaacaagaacgacttcaacgatgcacaggcaatctgcgaagcggccagtcgaccgagcatgcgcttcgtgcccccgaagagcgaggcccagcaaacactgtcggcgctgcatcgggtgcgcgaagggtgggttcggcaacgcacggccgcgaccaaccaaatccacgccttcctgctggagttcggtatcagcctgcccaaaagctcagcggtcatcaaacggctgccggttgtgctggccttgcatcctgatctgcccgtacgcctgattgcggttctggaacgcctgcaggcgcacttcaagtacctggatgagcagattgtcgaagtagaacgtgagctcgctcagcaattgaaggaagacgaatccagccagcgtctgctggaaatcccgaggatcggcccgatcaccgccagcgcattgagcatggagttgggcgatgcccaacagttcgccagcagccggcaatttgccgcgtccctgggcttggtgccacgccagtacagcaccggaggcaagccgacgctgctgggcatcagcaagcgcggtgacaagaacctccggcgcctgctggtgcaatgtgcccgcgtactcatgcagcgcatcgataaacgcgaagacgccttggggcagtgggtgcgtgatctgctcacccggcgccactcgaacgtggtggcctgcgcactggccaataaattggcgaggatcgcctgggccctcctcgccaaagggacgcattaccagtccgacccagcggtgcaggccgcctgacggatgacaactgatttacctgaagtagcccatctggttttgcggcggtagaacgtgtgatgacctgaacggctcaacggcctggcaaagaacctgacacacaaaacagcggacaacgctgaagaaattttgaggtttgccaggcgcggccctcatcatggggcgggcagacaatctgcctaccacgaccccggatagatttaagcaagcccactataggtcacgcacatctgccttgcaaaaatcgggctgaccataga

SEQ ID NO: 1849 - DNA, 1572 bp, unidentified
  source 1..1572: mol_type = unassigned DNA; note = element_2807d7c
  misc_feature 1..2: note = core
  misc_feature 3..120: note = LE
  misc_feature 121..1146: note = CDS
  misc_feature 1147..1572: note = RE
  misc_feature 1344..1534: note = bridgeRNA
agatggtgtaacgggccgagctcgccactggtgaaggcgggagtcgtccctcaaattgatgttgtcaaaaacgaacggagtcgggtggatgcccgctccatgcatcatcgagggacgaccatgaaccactatgtcggaattgacgtgtctttggaagcttcgagcctgtgcgttgtggatgccaatggcaagattgcccgcgaaggcaaggttgccagcgagccggacgcgctgattgcctggttgagggggctgaaattggagcagacgcggattggcctggaagcaggcccgctatcgcaatggctctttgcggcgatgcgccaagccggatttgcggtcgagctgttggagacccggcacgtgtgcactgcgctcaagacgatgccggtgaagagcgatcgcaatgatgcgcgcgggatcgcgcagttgatgcggatgggttggttccgcccggtgcattgcaagtcgatagccgctcaggagacgcgcgcgctgctcactgcacgcaaactgctgcagggaaagcttcatgatatcgagatgagcttgcgcggcattctgcggggcttcggcctcaaggtcgggcccgccacaccggtgcacttcgaagagcgcattcgcgagctcgttgccggacatccaagcctggagacgattgccgagggcctgctggcggtacgtgtcgcgctgcggcgcgagttcgaccgcttcgagaagcaggtgcgggccacagcgcgcggcgataggcgggcgcggttgttgatgtcggtccccggcgtcggtgccatcgtctcactcactttcgcgtcagcgattgatgatccggcacgcttcaaatcatcgaagcaggtcggggcctatttcggcctgacgccgaccaaataccaatcgggtgagacggacatcgacggccgcatctcgaaggtcggtgatggctgggtgcgcgccgctctttacgagggcgcccacatcattctgaccaagccgctcaagggctgtacggcattgaagagctgggcgatgaagatcgccaggcgggccgggatgaagaaggccaaggtggcgctggcgcgcaagctcgccgtcatcatgcatcggatgttggtcgatggcaccagcttccgtaatctcgcggcggtctaagaggaggcgaatgatggcacagatcatgatcgctcggtacgcgccggagccgtcaagccccgcgcaagtgcgcgccgctgcgcggcttcggggctatgacggcccaacgcgaccgagccaagagggctgccgtgccttcaatgcagccttgccagcctcgcaatagatagagcagagattgtactgtttcgggtgggtcttgataccagccttcccgagcgaggtcccgacgccgggacgatggatcaggtcagaccgcaagttgggtcgtggctccgaccacgcgaaccctagattggtcgacctatcctctctaaccccatcaggtggcggcctgcgcgccgaccccgtacagaagcacgaccccggcgaacggatatctcggaagtgaaaagaagggattgacaaacaatggcccgttacaga

SEQ ID NO: 1850 - DNA, 1346 bp, unidentified
  source 1..1346: mol_type = unassigned DNA; note = element_28091ab
  misc_feature 1: note = core
  misc_feature 2..74: note = LE
  misc_feature 75..1097: note = CDS
  misc_feature 1098..1346: note = RE
  misc_feature 1106..1336: note = bridgeRNA
tatgggatggcccgcccttttcggcggcgacctttgttatggtcgccttggtcaaaagggaaaggagcggaccaatgtcgattgttactcttgggattgatttgggcaagacggtttgcagtcttgtcggtttggacgcggccggtacggttgtcattcgaaagcgtctgcggcgcgcaggccttgttgcctttgtccaggacctcgagcaatgcgtggttgcaatggaagcgtgttgtggcgcgcatcatttggggcgtgtttttgatcgctctggttttgatgttcggctcatgtcgccggaatacgtcaaaccttatgtgaaggcacagaagaatgatgaccgcgacgcggaggcgattgctgaagccgcaacgcgtcctacaatgcggtttgtccggatcaagacccaggagcagtccgatgttcaatctctgcatcgtgcgcggtctcggcttgtgtcggaacgtaccgctctgatcaataatctgcgatctctcttgctggagcgtggcatcacggtcgctcagggtcgcaagaagctcgaagcggagctgactgtctttgccgatgaagagcacccggatctttcccctcgaattcgaggtctaatcgaagacatgcgcgcacaatggcgatctctggacgagcggatttcggcctttgacaaggagttcatgacgatggctcgggaggacatggcggcgcagcgcctgatgagcataccgggcattggcgccatcaacgcgaccgcctttgtcgcagcggttggcaatgccgaagcttttggacgtggccgcgatctggcggcgtggcttgggctcacaccaaggcaggcctcgacaggcgggcggcagaagcttctgggtatctcgaagcgcggcaacagatacttgcgcagtacattgatccatggtgcgcgtgcggtgttgcacagattaatccatgaaccatcgcaactgggggcttggcttcgtgatctatccacccgggcccacaaaaatgtggtcgtagtggcactggcagcaaagcttgcgcgaacgatctgggctttgctcaggaaggaacagggctaccagcgcgtgttggctgcctgacaagacgggcaaccggcgaacagagccggcgaccctgcctgcgagtggttgagaggagatggcctgacagttgagcggcgacggcaaaacctggagaaattgaatggtcgtgacagactgttgtgattatgaggatgccggcgcgcgaaccccatcttggccagggcaagaccctgagaccggatacgttgatgcagactgcgcagagcttgatccaaaaaacaacttgcagaccgggcgggccatacg

SEQ ID NO: 1851 - DNA, 1413 bp, unidentified
  source 1..1413: mol_type = unassigned DNA; note = element_280e170
  misc_feature 1: note = core
  misc_feature 2..91: note = LE
  misc_feature 92..1141: note = CDS
  misc_feature 1142..1413: note = RE
  misc_feature 1180..1408: note = bridgeRNA
caatgggatggacgcccccaccctaaacggcatcgaaagtgccacagtggagatgtcagtttttccacctcaacgagcaggagcgtccaccatgaagattacaaccattggcatcgatttggccaagaatgtgttccaggtccacggcgtggatgagcacggcaaagccgtgttcaacaagccgctcaagcgcgaacagatggctgccttcttcgtgaacctgccgccctgcctgattggcatggaagcctgcggcagcgcccaccactgggcgcgcaagcttcagggcatgggccacaccgtgcgcctgatggcaccccagttcgtcaagccctacgtcaagaccaacaagaacgatgcagccgatgcggctgccatctgcgaagccgtcacccgcccgagcatgcgcttcgtaccgatcaagaacgtggagcagcaaggcgtgctggccctgcaccgggtgcgccagggctttgtcaaggcccgcactgcacaggccaaccagatccggggcctgctggccgagtttggggtgatcgttccccaaggcataggccacattacccaacgggtgccaatgctcattgaggatgcagccaacgagttgcccggcgtgtttagactgttgatacaacgtctgctcgagcacctcaaggagcttgactgccaggtgcaggagctggaggcacaaatcgtggcctggcaccgccaaagcgacttgagtcgcaaactcgggcagatccccggcattggccccatcacggcctgcgcattggtggcatctctgggggatgcaaagaacttcaaggatggcaggcaggtggcagcctggctagggctggtgccacgccaacactccagcgggggcaaacaaaacctgctgggtatcagcaaacggggcgacacgtatttgcgcaccttgctgattcacggagcgcgctcggtgatctatcacgcccagaaaaaagaccagcaccaaggccagggcagcgcgcagtgtggctggctcaatggtgtgctgcagcggcgcaacaagaacgtagcggcggtggcgctggccaacaagaatgcccgcatcgtgtgggcgttgctcgcgcatgacaggagctacgagccgggctacgtacgagagtcggtctgagcaactagcgccggcacgacaagaacgaggagcgggagaaaaccaaccgattgctcaagcaatcatgaagtgatggcaagacaggtcagaccgtggtggatgaaatccgataagaacgtggcacttggagtgcgttgaaccgataggacctccaccagcgattcccatcagggaccgtggctcgcgccacaacaagtccggatatacgggtgcaatctttaccttcttggcagcagtgagtgagggcttggcttattcggggcgtccatata

SEQ ID NO: 1852 - DNA, 1484 bp, unidentified
  source 1..1484: mol_type = unassigned DNA; note = element_2810db2
  misc_feature 1..3: note = core
  misc_feature 4..96: note = LE
  misc_feature 97..1206: note = CDS
  misc_feature 1207..1484: note = RE
  misc_feature 1247..1482: note = bridgeRNA
taatggtgtggacccactaagctgaagatgctaaaaacagaataactgtgtatagtatcgatagaaacaatattaacaaccaggaaggtccacaagatgattgtaaatgaagttgcaaagaatgtcgaaaaaattatttatattgatacagccaagaattcttttcaggtactggtggtaaatcagaagacaggtaaaaagaagaataccaaggtacagcgttcaaaatttgttgagtacattttaaagcagggtccttgtctaatctttatggaatcatgttcagcaagtcagcactgggcaagactatttgaaagttttggatttacggtaaagctcattgctgcacagcatgtaaaggcatttctcagaaacaggagagtcaagaatgatgagagagatgcagaggctatctataaatgtggcatacagcctgataccaagttcgtaagaattaaaacagttgaagagcagacagttgcattactgcatactttaaggaaagctgcagtttcacagagagttgaacttagcaacagaattagaggtatccttgctgaattcggaattgtagtagccagaggcagaggcagaggcagttttaattcagaaatagaagctctatttaatgaatgcgaaaagatacatgatgttaatttaagagcagctataagctctctgtttgaggattaccattatctggaacaaagagaaaaagaactgtcagagaagattgagtctcttaataaagataatgagcttgttaagatagctttaacctgtcctggagtaggtcctcttacagccagtgccattgtagctgaggttggtgatgcatcgcagtttcgaaatggtcgtgaaatggctacatggaacggtgttgttccaagtcagcattctacaggaggtcgttctaccttaggtggcataaccaagacaggaaacagatatctcagagcgctcttagcacaatgtgcctgtgcggttatacagaatgcatcaaggcatcttgaacaaggaaaggatacacaccttgacagatttgctctgagattaaagctaaatggcaaaccagcaaagaagatcatgattactgttgccaataagataatcagaatattatgggcaatgctgactcaaaggaaaacatttgaaaacaaagcagaagagacatcagatacatctgctgagcttcagcttgcttaaaaagatttgttataaaaactcttaggagaaatagcaaaaaagttcccaccagggaaatgcacagagaaagataaatttggcataacatgtaaaagcggactgtatcaaacctgaaaaagttaatggtatgaaataccgcgcttttaattaaggaatacagtcgcaaacaccatagaggtcagagtaggcatactcaacaagagaccggatatatagctgcatttactacgttatgaaaagttatcaaaatctcttgcaagtttaagtgggtccatata

SEQ ID NO: 1853 - DNA, 1675 bp, unidentified
  source 1..1675: mol_type = unassigned DNA; note = element_281c2f8
  misc_feature 1..2: note = core
  misc_feature 3..263: note = LE
  misc_feature 264..1445: note = CDS
  misc_feature 1446..1675: note = RE
ctcgtataaatgataattgcagcatacttttattgctgcattttcataaaaacaaacgtaggctgggagggtagttattaggacttacggcattgtccggctatcttagactaccaccctcactcctacggctctccggcaatttaacatgttacagctctgtgctcacagagtctggcgattttccacgagcttacgatctgtagagagcagagggatatttggtctccagcctataaaatcgtattgtgggggatcaaaaaatgtatttgaacatcggtattgatatcgctaaggatgctcatgaagcctgtattttggacgatgagggtaaacagattggaaggtatatccaaatcaagaatttaaaaagcagtatcgagaaattcatagaacgtgtggaatcagtatctaatagattaaattcaattcctcggattggaatggaagctacgggaatatactggtatgccatatattcggaactttcaaaacactatgaaattcatgcctacaatccttctcaggtaaaggggtttgcagcggtcaacattaggggatcaaaaaccgataaaatcgatgcaaaaacaattgctgcgatacttcaatttggggaggcgccaaaaacctgttatggcgataaaaaaagaatggaattgaaagaatactgtggattccatttcaagttgaaatcaaatgtggctaatctaaagaagcggttaatacgtaacgtacatcttatctttccccgatatgaccagatgttttccagcatattcactaaaacatctatagccattctaaatgaagtaccaagaccctcagatatgcttggaatgggagaggaaaagctctatgagtttatgaaaaaaacgagcagaaatcattacagtcctgagaaaacaagaaaactcttagaaatggcgaaagattcaatttctcctgactttattgaggaggctttattatttgaggtcaagtccttgcttaacctgattgaatacatggaaagccagataaaagaagtggaaaccaggattttggctgcttgggaaacgttgaaggataagcattaccttcagacaattcctggaattagtgatttaatggcggctatgatctgggcggaacttggagacgtggagaactttcaacatccagaccagatagtcgcttttgcaggatatgatccaaaagtaaaaaagtctgggaacaaggaagttatttcaggacctaacaaaagaggatcaagattgttaagatgggttttggggagagctgttgtgcaagcaaagatgcataatccggtgataaagcagtatttcatgaagaaaataagtgaggggaaacactacaatactgcactttgtgcggcagctaaaaagatgataaggattatttggtcggtagaaaagaataaaaaacctttccaagtcccgacataaagtaacctggtaggagaggagagatgaggaaaaggattgaataacggtagtggtggctatagatttttgttgatagatgtaaaaaaggaagaacgatttgtaggtttagaggaaacaaaacaaccttattagacgtcttcacggaaatttaccgcgcttacagcgcggctttttcataatggagttatcttgattaaaaaatggaatgtaaaaaatcatttataacatgt

SEQ ID NO: 1854 - DNA, 1432 bp, unidentified
  source 1..1432: mol_type = unassigned DNA; note = element_28240e1
  misc_feature 1: note = core
  misc_feature 2..62: note = LE
  misc_feature 63..1103: note = CDS
  misc_feature 1104..1432: note = RE
  misc_feature 1211..1426: note = bridgeRNA
taatggtatggtccgccgccttaactccatcggggtataaagggtgaacaaggaggtgttccatggaaattgataaggtcggtattgatttaggcaagtcggtattccatcttgcatgtctaagtgcgtcaggcgagacggtgatgaggaagaagttctcgcgattgcagttactccgattcacggcgaacttgcgggtgcgggtaatcggcatggaagcctgtggaggagcacactttcttggccgtgcgcttcgcgagcaaggtcatgatgtgcgtctgatgccggcccagtacgtgaagccgtttgttaagacgaacaagaacgactacatcgatgccgaagcgattgccgaagctgtagatcggccgcgcatgcgctatgtgccgatcaagagcgaagaccagctggacatgcagtctctgcacagggtgcgggaacgctgggtaaagagtcgtacggcgctgacgaaccagatccgtggcttgctgctggaacgggggatcacgatccggaaaggccgccggtatgctcaggcggcactgcccagtcttctggaagacgcggagaccaacctctcagcagccctgcgcctgctcctcgcgcaactcatgtcggaacttcagcggttggagaatcaaatcaccgatgtcgatgcgacgatcgcacgccgagccagcgagcatgaagcctgtcaacggctcatggcaatacccggcgttggaccagttacgtcgacagccattgtttcggccattggcaacggtgtggagtttcgcaaagcccgaagcttttccgcttggttggggttggtgccgggcgagtattcgaccggaggcaagcagaagctgctcggtatcagcaagcgcgggaacggctatttgcgcaaactcctggtgcatggggcgcgtgcgatcttgcgatgcagggaaaagcaatctcccggtctcagttcctggctcggacagcttctagcgcgtgcacatccgaacgtcgttacgattgcattggctaacaagatggcgcggatggcatgggtgttgttgacccgaggtgaaagctatcggccgccggtcttggaacagcaaataaaagtggtctgacaaaaacggcatgcaattgacgcctggcaaaatacgccaggcttggaaatcgctctgcgattcccacaatcgcacaccgtcggctactaccaatgaggtgaaatctgccaggtctgctggcgacaatgtgatgacaaaacggtcgaacccggcgttctcgaaacctgtaatggggaacaagcccgcgaggctgaccagttagtaaggacgggaacgcagcgcattccatcaagtgcccagagccagtgctcacataaaggccggatacattagcgcagaccaacctgtcactctcattttgcgcttgcagcaacgcggcggaccataca

SEQ ID NO: 1855 - DNA, 1656 bp, unidentified
  source 1..1656: mol_type = unassigned DNA; note = element_2829f00
  misc_feature 1..2: note = core
  misc_feature 3..348: note = LE
  misc_feature 349..1482: note = CDS
  misc_feature 1483..1656: note = RE
  misc_feature 59..274: note = bridgeRNA
ctggtatattgtaattgactcatttaatagtcatctacagtataccttctcctttctatcaaccttgtttatccgtggttgatgacgtttaagttattctgtaaaatattgaatatgtgaatgtagatttgtatttttttccttgtggcttgactactttagaaaggatcttaccacaccttattcctaaacaatgatgagttagatgagtcttgaattcctattttgcaccaggttttgtggtctaagtgttgtggataccatttcacataatctattaggaaaggatgttttatcatgaagttagttggaatcgatattggaaaaaacagacacttcttttgcatcatggataaagatacaggtgaacttattatttcgcctacttcttttgccaactataaagaaggatttgattttcttgttcaaaaacttaaaccttattctaaatcttctgtcttgattggtatggaagataccggacattatcattttgctttgttaaagtatctcttagatcaaagttttactgttgccttgatcaatcccaaaacgaccgatttcacgcgcaagctccaaggtggtatcacgaaaaatgacaaacttgatacgctgactatttgcgatgtcttagatacccccaaacgtaagaaacagtatcgtattacaaaggttgacagtttcgacctttatgaacaaaaacagctgactagacatcatcataatttaaaaaaggaaataaacgtctatacaaatcgtttacaaaaatgcattgatgttgtgtttcccgagtttaatagtctattcaagtgcaagtatggtactgtctacatgaatgtacttaaaacatttggcagtgctgaaaatattgccagtgctgatatcagaaccattcgtaaatgttttgacatcaaaggcagaggtggtcgtatctctctgaccgctgaaaaacttaaagagtgtgccaaatcttctataggcatttcttcatctgcagaagtgattcaaatcaagcatctcattagtcaaattgaacttattcatgatcaaatcgctgaaatagataaaaaaatagaagagttctctgttcaaaacaactctcctatcctaagtatcccaggaatttctcatttctctggtacctctattttagccgaattaggagagataagcaactactccagcgcaagaaaaatcattaaatttgcaggagtcgctcctttgcattatgaatccagtcagtttactgcacagcataccgctattacaaagaaaggatctaaatacttgagaaagaccttatatcaaatcatactgcctgtgatcaacaataatccagtattcaaacagtattatcaattgaagctttctcaaggcaagggacatcgttgtgctcagggacattgtgtaagaaagttgcttagaatcatttatcatctattaactacaggtcagcagtttgaccctgaactcctgagatagtaaatagccatatgcaaattttaaaaatacctttttcaaggtagttttcatcatgcccaaaaactacaaatacatattcactttttaaagaactttactagttgattcataaaatcaggaagtttattattttcagactttttcatcaaaaactcttgatttttatatagttag

SEQ ID NO: 1856 - DNA, 1379 bp, unidentified
  source 1..1379: mol_type = unassigned DNA; note = element_282af23
  misc_feature 1..3: note = core
  misc_feature 4..84: note = LE
  misc_feature 85..1116: note = CDS
  misc_feature 1117..1379: note = RE
  misc_feature 1147..1367: note = bridgeRNA
tgatgctgtggacggctcctccatcggcacatcggtgccatggatgtgggcgctgttgaggctcccaccattgaggagcgagccatgcagacgataacgacaatcggattagacatcgccaagtcggttttccaagtacacggcgttgacgctggcgggcaagtgattgttcgccggcaactgaagcgtcgctatgtcctgacgttcttccagaagctatcgccatgtctggtcggtattgaagcctgcggctctgcgcaccattggtcgcgtgagctccaggcactgggtcacaccgtgcggttgataccgccggcctatgtgaagccttacgtcaagcgacagaagaatgatgcggctgacgcggaggccatttgcgaggcggtcaccagggcgaacatgcggttcgtgccaaccaagactccagagcagcagagtggcctggtgctacaccgcacgcgccatctgttcatccgtcagcagaccgcggtgatcaatgccatccgggcccatcttgccgagttcgggatcgttgcgccggttgggcgccacggtgtcgaggaactgctcaatgtcgtcaccgatccaaacgacaggcgagttccggagatggctcgtgcgtgtctctcggcattcggggctcaattgcgcaggatccaggagcaggtacgggagttcgaccggctgatcagggcctggcaccgatccgacgagatgagcatgaggctcgatgaagttcccggcgtcggcccggtgctggccactgctgtggtcgctaccgttgctgatccaaagtccttccgatcaggacgcaacttctcggcctggatcggtatcgtaccgaagcagcactcgagtggaggcaagaaccggctcggcaatataagcaaacaaggtgaccgctatctgcgcggcctgttcgtggccggcgcgctcgccgtcatccgttacgccaaaatccatggcaccaaacatcggccctggctgacggccttgctggcgcgacggccgaccaaggttgcggctattgcacttgccaacaagctcgcccgaatggtctgggccatgatggccaggggcgagcgatacaaggaacccgtcgcgcttgcggcgtaaacgagatcgcgccggacaaccggcgtgatgtgaaggttgggagggcgaacagcacgtaatgcagagccggtcgatccggcgatcaggacaacccacttgggtcgaggcattgtcaaatgcgcgagtttgatcgggacctgatccgcggagggcattatggccagcggtcatatgaaccgcgtcaaaaggccggacacatggctgcaccgaccaatgctgcaaaacgtgaagaaagtccttgccaacccggagccgtccacaca

SEQ ID NO: 1857 - DNA, 1426 bp, unidentified
  source 1..1426: mol_type = unassigned DNA; note = element_283194f
  misc_feature 1: note = core
  misc_feature 2..91: note = LE
  misc_feature 92..1039: note = CDS
  misc_feature 1040..1426: note = RE
  misc_feature 1169..1421: note = bridgeRNA
caatggaatggacgcctcccccttaacgaggattcagcgtataacggaggaatatagcatagtcggcaaccgtaaaatgaaggagatagctatgagcaatataaccctgattggtatcgacctggctaagaacgtatttcatctacatgcagttgatgacaaaggtaaacagatgaaagtgactaagctgtcacgcctgaaacttgccgagtatttataccgcagtgaaccggtaatcgtcgcaatggaggcttgtgcaagtgcccactactggggacggctttgtacatcactgggccatgaggctcgtctgatatctccgcagttcgtcaagccatttgtcaaatccaacaaaaatgatcgtaatgacgcacgggcaatctgcgaagctgcactgcgtcctgatatgaattttgttcccgtcaaaacagtcgagcagcaagctgtactgagtcttcacagagttcgtgaaatgctgataggccaaagaacggcaaccatcaatcagttcaggggattactcaccgagtttggattacctgcacccacagggcgtagggcgctattcagtatgatccccgctatgattgaagatctccgaaaaatttcacccgcatttctcattacttgcattagtcaacaatgggaacatctcagacaactggaacaacatatcaacgaagtcactcatcagattgaaatgcatgcccgccagtctgatattgcacgccgcttgcaaacaattccaggtattggcccaatcacagcttcagcactggatgcctacgttggtaaggccactcagttcagaacagggcgacaactggccgcctggttggggttggtgccccgacagcattcaacaggagggaaatctgtgttgttggggaccagcaagcgcggaaacagttatttgcgccagctgtttgttcatggagccagagcagttgtatctgtagtatgccgttctcccgatgcgagcaagcaggacaaaactattacgggttggctgaccagaaagcatatgaatgtgccgtagtggctatggcaaaccgaaatgcacgcattgcctgggccgtcatagcccacgagcgtagcttcgacaataattatcgggaacaactgaccaaccagttactcccgggctgacagaaaatatttgatgtgttcctttcctgattgctacaggtgatttattgacgtgatggcgtagacaggtcagaccggtgttggcaaaacccgtggagctcgatagtcagaatttattgaattaagactgagcggtcgtttgggagccaacaagcagattccattatgggcagcgtatagtcaaataaacgcacaaacagcccgaatatacgactgcgatcttcaccttctgcatcaaaacaaaaaaatcacttggcaaaaaggaggcgtccatata

SEQ ID NO: 1858 - DNA, 1387 bp, unidentified
  source 1..1387: mol_type = unassigned DNA; note = element_2832431
  misc_feature 1: note = core
  misc_feature 2..301: note = LE
  misc_feature 302..1372: note = CDS
  misc_feature 1373..1387: note = RE
  misc_feature 7..293: note = bridgeRNA
ctgtgagtcttggagcggctggtctgggaccggctggcagggttgatgctggtcgcttcacctggcccgtgactcaccgaacccacggccccgcaaggtgccttgttaaggacttgtccaggcctcgtgaggcggccggcgttagctcggtccgctccggtggcttgattagaagcttgcccaaccccggcggggttgtggcccctcacagagttgcctcgaagcgatctttcccgggaccagcgccggtcgaacagcggccgttcagcgtcggttcttcctagaaaggtaggtagcgggattgactgtcatcgcgcaaacccgttcgtttgtgatcggcgtggattgccacgcacgtacacatactttggccatcatcgacaccgggacgagagaatgcctcggttctgaaaagttccccaccactgaggccggtatgtctcgggccctgaactgggcagcgcgtcgcaccggcggcgacatggagacgttgtgggtcatcgagggaatcggaacctatggcgccggcctggcccgagttgtggacgcagcagggtacccggtcgtggaagcacctcgaatgagctcgcgagcaaggcatggcatcggcaagtccgatgccttggatgctgtcgcaattgcctctgcagtcttggggctcgacgagtctgggcttcgctggccgcgccaggacactggtcctcgcgccgcactccggactctcggcacagccagggaccacttaggacgtgaacgaaccatgaacgtcaacgctctcactgcgctccttcgggtctatgacctgggtatggatgcacggaaaccgctcactggcccacaaatcagcacggtttcccgctggcgagaacgccaggaaccccttgaagttctcattgcaagagaagaagccgtccgcctcgcacggcgtgttcaggacattgacgccgaattgcgtgcgaaccaggcacgcatgaacgaactcatcaaagacagccctgcagcaccgctcctggaaatcaccggcgtcggggtggtgaccgcggccatgatcctcaccgcctggtcacatccaggcagggtccggtccgaagcagctttcgctgccctagccggcgtgagcccgatcccagcatcgtcaggcaacaccaccaggcatcgccttaatcgcggcggagaccggcaactgaacagagcactacacaccatcgcaatggtccgaatgacctacgacctcgaaacacgtacctacgtcgaaaaacgacgcgcagaaggccgcaccaaacgagagatccggcgcaacatcaaacgctatctcgcccgacacctctaccgcctactgaacaccctccatgcgacaccaatccccagttgacagacatagaagcgt

SEQ ID NO: 1859 - DNA, 1381 bp, unidentified
  source 1..1381: mol_type = unassigned DNA; note = element_2846ab4
  misc_feature 1..2: note = core
  misc_feature 3..324: note = LE
  misc_feature 325..1119: note = CDS
  misc_feature 1120..1381: note = RE
  misc_feature 1151..1369: note = bridgeRNA
tgatgctgtggacggctcctccaccggcacgagagtgccaaggtatgggcgccgtttttgaggctcccacgattcggaggagcagcctatgcagtcaatttcgacgatcggtctggatattgcgaagtcggtctttcaagtgcatggcgtcgatgcagccgggcaagtggtcatacggcgtcaactcaagcgccgtttcgtgctgtccttctttgagaagttgccactgtgcctggtggggatcgaggcttgcgcatcatcccattattggtcccgtgagttgcaggcgttgggacatacggtgcgattgtgcctccggcctatgtgaagccgtacgtcaagcggcaaaagaacgacaccaccgacgcggaggcgatttgcgaggcggtcacgagacccaacatgcggttcgtgccgaccaagacggtcgagcaacagagctgtctgatgcttcatcgagcgcgccacctcttcatccgccagcagactgccgtcatcaattcaatccgcgcctatcttgccgagctcgggattgtcgccccggtcgggcgccggggcgtcgatcagttgctggaagtcgtcgccgatacagctgaccgccggttcccggaggtggcccgcgcatgtcttgctgttctcggcagtcaattgcgggcgctgaaggtgcaaatcctggagttcgacaggcgtattgtcgcctggcatcgatcgagcgcgacgagcaagcgactggacgcgatccctggtgttggtccggcgctggcaacggcgctggtcgcgagcgttgctgatgccaaggcgttccgatcggggcgagacttctcggcctgggttgggctcgtgccgaagcagaactcgaacggaggcaaggacaagcttggcagtatcagcaagcagggcgatcgctatttgcgcagcctgttcacggccggcgcactcgccgtgatccgctatgccaaaatccatggaacggggcgtcgaccctggctctccgcattgctggcgcggcgagcaactaaggtcgctgccatcgcgctcgccaacaaactcgccaggatagcctgggcgatgatggcgaggaacgaacgctacaaggaacccgccgctctcatggcgtaaacgagattacgccggacatgccggtgtgacgtaacggttggaagggcgaacagcacttaatgcagcgccggtcgatccggcgatcaggacaacccacatcggccacggcatctccgaatgcgtgcttttgatcgggacctgatccgcggagggcattatggccagcggtcacgtgaaccgcgcaaacaggccgaacacatggccgctccgaccaacgccgcaaagtgaagattctccttgccaacccggagccgtccacaca

SEQ ID NO: 1860 - DNA, 1495 bp, unidentified
  source 1..1495: mol_type = unassigned DNA; note = element_28563c7
  misc_feature 1..2: note = core
  misc_feature 3..251: note = LE
  misc_feature 252..1475: note = CDS
  misc_feature 1476..1495: note = RE
ctaatgagggtagcgggttgcctgtgcggcagactcgttggctggtagccgccggcaggtgagcactgatccgggctgggttgtgaaccctggtgaaagaccgtgcccctgccggtggccgggagagttgatcgctgctgggatgtcgtgcccgcccgcctggtactggggcgtgagcactgtttcattagggcgcgattgttctcccgcaggctgccggccagatccgggactgcaggacgggagagcgtatgcgattgttcgtcggggatgactgggccgaggaccatcacgacgtggagctgatggacgcggcgggccgggtgctggctaaagcgcggctgcccgggggagtggccgggatcgcccggctgcacgccctgatcggcctgcagccgggcgaggacgctgaggatgcggaggtggtgaccgggatcgagaccgaccgcggcccgtgggcggccgcgctggtcgcggccgggtatgtggtgttcgcggtgaacccgctgcaggcctcgcggtaccgggaacgccacggcgtctccggcgccaagagcgatcgtggtgacgcgcacatgctgacggacatggtgcggaccgattcccgtcagctccgggcggtggcgggcgacggcccggacgccggcgcggtcaaggtggtggcgcgggcgcataagacgctgatctgggaacggacccggcaggtccagcggctgcggcaccagctgcgggagtacttcccggccgcgatcgaggccttcgccgacctggacgcccccgacgcgctggagctgctggccagggcaccggacccggcccgggccgcgaggctgactcgcgcgcaggtcagcgccgtgctcaagcgcgcccgccgccaccacatccccgccagggccaccgcgatcctggcggcgctgcgcagggcccagctgggccagcccgaggctgtcaccgccgcctgcgcggtcaccgcccggtccctgatcgccgtgatcacggtcctgaacgagcaggtcaaggcgctggagggtgaggtggaggcggtttttggccgtcacccggacgctgagatctacctgtcccagcccggcctgggactcatcctcggcgcccgggtccccggcgagttcggcgacgacccgcaccggtacgccagcggcaaggcccgcaagaattacgccgccacctctccgctcacccgcgcgtcggggaagaagaaaacggtcatggcccggttcgtccgcaacgaccggctcaccgacgcgctgatggcccaggccttcgccgccctgaccgcctcgcctggcgtccgggccctctacgacgccgagcgcgccagcggctccgggcacaaccccgccctgcgcaaggtcgccagccggctcgtcggcatcttgcacggatgcctcaagacccgcaccctctacgacgaggccaccgcctggccccagcaccaaaacacgctcgccgcttgacatctaaacccctgggatgt

SEQ ID NO: 1861 - DNA, 1413 bp, unidentified
  source 1..1413: mol_type = unassigned DNA; note = element_285bf11
  misc_feature 1: note = core
  misc_feature 2..91: note = LE
  misc_feature 92..1135: note = CDS
  misc_feature 1136..1413: note = RE
  misc_feature 1186..1408: note = bridgeRNA
caatgagatggactcctccctccttcaacggcttcgatgagccagactgggaagtgtcaccccccggtcaatcagaaagaaggagtccgtcatgaagattacgcgcattggccttgatctggcgaagagcgttttccaggtgttcggcgtggatgcccaagagaagcgcgtgttgtcgcgccagctcaagcgcaaggagatcgaagccttcttccgggccttgcccccttgcctggtcggcatggaagcctgcgccagcgcccactactgggcgtgggtcctcaccgagatgggccacaccgtccaactgatggccccgcagttcgtcaaaccctacgtcaagggcaacaagaacgacgccaacgatgccgaagccatctgcgaagccgtgagccggcccgggatgcgcttcgtcccggtcaagacgatcgaacaactgcacatccaggctcgccaccgggtgcgcacggagctggtcaagcagcgcaccgccaaggccaaccagatccgcggcctgctcgccgagtacggcatcgtgatcggcttgggcgtacgctgcctgcgccaccacctgccggagatcctggaagaggcagaaacccgtctgcaggaggatttccgcgtactgctcaccgggctgcgcgaggacctggtgtatctggatgagcggatcaaaaccgaggacaaagccatcgagcagctggcgagcacccacgccagcgcccggcgtctgcagcaactgcgcggcgtcggcccgctggtcgccacggccctgatcgcggcgttgggggatggccggcaattcacgaatgggcgccaggcctcggcctgggccgggctggtcccgggccagcacagcagtggcggcaagcagaccttgctggggatcagcaaacggggggacacctatctgcgtaccctgctgatccacggtgcgcgttcagccctgcgggtcgcccgtaacaagacagacccgctgagcttgtggcttcaggggctgtgtgcccgacgcaaccggaatgtggccgcggtggcgctggccaacaagacgatgcgcctggcctgggtgctcatcaggcgcgagcaagactacgacccgctgcacggccacgcgaggccgacacagcccgcctgaagcgggtccccaggtgtctgtgatgactgtttaagaaggagccccttcctcacgattgctcagcaagaatcgacgatgacaaactgatcgaatcggcgtctgaaaacccttaaacattcgatgtgccttgagcacgcgaggtcgttcaggagcagacgcgcggataactcatcatggcccgggccactacgcccaacaacgaggccggatatacgtgagcaatcgatccccccttgttatccaacattcgcgctggcaaaacgggaggagtccatata

SEQ ID NO: 1862 - DNA, 1264 bp, unidentified
  source 1..1264: mol_type = unassigned DNA; note = element_285d40c
  misc_feature 1..2: note = core
  misc_feature 3..224: note = LE
  misc_feature 225..1250: note = CDS
  misc_feature 1251..1264: note = RE
tccattagacttagaacattattatttattaattattttcacaaataaaaaggattaaataaaatacccaaagaaccgaataagtctaagacacgctcaagagaaaaactatactctgattaagacccggctctttggtggttaaagctaaataatatttccgtaaaaaaagattaataaaatggaacaagctcaaccacttgggtattttataaaaaagaacaatgcaaacaaaaaaatatttcaccggcttagatatatcggcagatgatttttctgccagctgcataaccagtcctgataattctgttttctcaacacaaaagttcctgaataacttcgatggttttaatgagtttctgtctctgcttacaaagaacaatataaagcaatcagaagtaataatctgtatggaagcaacaggagtttattctgaaaatctttcttacttccttgcttctaagggatttactctctgtatagaagcgccacataaaataaagaacaaaaccaaagactcacccaggaagaatgattttattgatgcagtttctattgcagagtatgcttttagatattctgataaactcagcttctggaaaccaaaagatgagatcatagagcaaattcaggtacttttaactactcgtgagcatttaagtattcaaatgattgctaatcaaaatgctcttaagactcttaagtacaagtattatcaaactccactggctaaccagatttatgagaaaacgatcagtaagttcaaagaacatatcaaacagattgaccaggagattaaaagccttattgataaagacgattcgtttaagaacaaaatctctttagctaaatctgttcccggtgttggacttctgttagctgcaaatcttcttgtgcttacaaaaggatttacagaacatcttaactacaaacacgctgcagcttatacaggaatatgtccttatgagcagagaagcggaacatcactgtataaaccaccaagatcaagaaaatgtggaccagctaagctgagaaagcttctatatcttgctgcattatctgtaagaacacataatcaaatttttaagaaatacttccttcgcaaagtggcggaaggaaaaaataaaagattagtcctaaacaatattgagaacaaattacttaaaataatttttgctgttattaattctggagtctcttatacatacaattataaatcaattaatccggctctcttaaaaacagcttgactatgtcataatat

SEQ ID NO: 1863 - DNA, 1379 bp, unidentified
  source 1..1379: mol_type = unassigned DNA; note = element_286a3c2
  misc_feature 1..2: note = core
  misc_feature 3..91: note = LE
  misc_feature 92..1108: note = CDS
  misc_feature 1109..1379: note = RE
  misc_feature 1150..1378: note = bridgeRNA
ataatggaatggacccatccacttttaatcggcctcgcaatgggccacgatgtagttgctaaaactcatcaacaaagaggacgggtccaccatgaagattactacagttggtttagatatcgcaaagtctgtttttcattttgttggtgtaaacaaagcgggaaaactagtcaaaaagaagatgataaagcgtaaagacttgctccactttcttgctcagatagagccctgcctggtcgtcatggaagcctgtggtggagcaaattactgggcaagggaatttgagaaagtaggccatcaagtcaaattaatagcacctcagtatgttgttccctacaggcagggaaataaaaatgactataacgatgcacttgctatagcggaagcagcccaaagacctaacatgcgctttgtacaacctaagcccgcagagcaacaagatattcagatgttacaccgaatgagagaaaggcttagcaagcagtctactgcactggttaatcaggtcagaggaatgctcgctgagtacgggattgtcatcacaaaaggaaaagcgtcttttaggtcaaaactgccagatattctagaaaacgccgacaatgagttaaccgccaaaggtagaagcattttctatcaactgtacgaagagtttaacggtatcgaggagcggcttaaacgctgtgacaatcaggtgcagcaagagacgaagaacaatcatgtatgtcagcgtttagaaagtgtaccaggtatcggtcctgtaacagcaactgcattttatgccgcagtaggagaaggcaaagactttactaatggcaggcatttttctgcatggtgcggcctagtgccaaaacagcacagcagtggcggtaaagataatttgctggggatcagtaaacgcggcaatgcttatcttcgaactttatttatccatggagcaagagctgtcctttaccatagtgatggtaaaggagatagatttagtcgctgggcaatagcacttgcagaaaggcgaggatttaacagagcttgcgttgcagtggctaacaagctagcgcgaatagcatgggtcattgcagcaagagaggatgaatatcggatggcagtataaagatccaaagccgatgttgatgttttaacgataattttttaccaaccaccaagttgcttagacacttgatttgatgatgagacagtcagactgatctacttaaaaccttttttcggcataggctctaaagaagccgtaaggatgataaggaaagtagaagcacatatccatcagggccagaggtaatctcataaataggccgaatatatgggtgcaatgaactcttctcaaaattaatatcgaatgccttgcaaaccggatgggtccatat

SEQ ID NO: 1864 - DNA, 1190 bp, unidentified
  source 1..1190: mol_type = unassigned DNA; note = element_2880784
  misc_feature 1..2: note = core
  misc_feature 3..190: note = LE
  misc_feature 191..1168: note = CDS
  misc_feature 1169..1190: note = RE
  misc_feature 14..199: note = bridgeRNA
cttgtgtctctccgcaggggagatgattagctatcatccccctttcagcccggtggcaacccgagtcgctcctgaggtcctggaacctgtgcggtagatgggaccaccaggctgtttctctcgaaacttgaacggtatccaagccacttccgtgcgaagagaggctgtacgaacaaggaaaggtggagagatggcccacattggcatcgacgtcagcaaaggcaaactggacctgtgctggctgcgtgagaacggcaagatgaagaccaaggtcttcaccaatcatcctaaacactatcccgcgctgatggactggctgacccgccaaaccggcgaacaggccggggacctgcgcgtgtacctggaagccacgggaatttaccacgagcccgtgacggagtggctgcatgaggtgggtgtgcaggttcatgtgacgaaccccgcccaggtgcgccattacgcccaggcgctgggtaactcgggcaagacggacaagaaagacagccaacttctggcgcgctacggccttgatcgtcagcctcccaggtggaagccggaaccggcggggatccgccgcttacggcgcctggccagccgtctggagacggtccagcaggacatccagcgcgaacaaaatcgtcgtgagaaggctcagttcagtcgggatacggaaacggtatcgtcgatcgatcaggttctgctggccttgcagagcgaagcgaaacgactacgcgaagagattaaagaccatatcgacagcgatggtgacctccagcgcgaccaggagctcttgaagagcatccccgggatcggtgacgccacgtcggtccatctgatggttctactgcggggcaaggtgttccgtagtgcccgccaggcggcggcgttcgtggggctggtgccgcgcgaatggacctccgggacctcggtgcgaagtcggccacgtctgaccaaaaagggcgcgccaatgatgcgtcgacggctgtacatggcggcagtggtcgcgagtcgacacaatccgatggtagaagcgctttacacccgattgcggcaagcgggtaaacctcccatgtccgccctgggggccgccatgcgcaagctggtgcacatcgccttcggtgtgctgcatcggcaaaccccattccagacccaacccgttgggggttgagtccggataggagagacggtat

SEQ ID NO: 1865 - DNA, 1419 bp, unidentified
  source 1..1419: mol_type = unassigned DNA; note = element_28814be
  misc_feature 1: note = core
  misc_feature 2..75: note = LE
  misc_feature 76..1107: note = CDS
  misc_feature 1108..1419: note = RE
  misc_feature 1188..1407: note = bridgeRNA
taatgagatggtccgccgcttaatccttcactgagcgtagaggattgtgttggcaggttaaggaggatcatcgacatgcagattcattcagttggtatcgatcttggcaagacgacgtttcacctggtagctctgagcgcagcgggcaaggtcttgttgcggaagaagttcactcagaagcagctcatcgccttcaccgccaacatgcagatctctttgattgggatggaggcgtgtgtgggggctcacttcctcagccgtaccttgcgagagcaaggccatgaggtgaagctgatcccggctcagttcgtgaggccgttcgtgaagtcgaacaagaacgacttcctcgatgccgaggccatcgcggaggctgtcgaccggcagaacatgcgtttcgtcccgatcaagacggacgaccagctggacctgcaagccatccatcgcgtgcgcgatcgtctcgtcgcgcgacgaacgtccgtgatcaaccaactgcgagcctttctgctcgagcgcggtatgaccttcgcgaagactccattcaagctcaaggtagcgatgcccgacctcctcgagaacgctgaggcgaacctgacgccacgcatgcgcaacctgatcagccttctctggagcgagtggaaggatcttgaacagcagatcgttggcatgaacgaagagatcgaacagatcgcctcgtccgacccggcctgccagcggctaagacagatccccggtatcggtccgctcgtggcaaccgcgatcgtggccgcgatcggcaacggcgcagccttccacaagggccgcgagttctcctcctggctggggctggtgccgcggcagcactcgaccggcgggaaggcgaggctattcggcatcagcaaacgcgggaatagatacctgcgtaagctcctcgtgcacggtgcccggtccgctgtcctccgagtcaagcgagagcgatccccgttcggcccatggctcgatacgctggagacccgggcgccgatcaacgtagtggtcacagcggcagccaacaagctggctcgcatcgcctggtccgttctatcaagcggccaagactatcgcgcaccagtaaacactgtggctgcctgacacggtgcggaaaagatgccttcggcttggaagcgctgatcgcgctcccactttaccgcaccacgacgacgactaaaagtttccaccaaggtctgcaccggatagctaagacgaacgaacagttccccaacggcgtgctcgcaacctgctcccgcaaatggccttccatgaccgtcccgtttatcaggaagagtacgcagcgcaactcatcatggccaggagacgtcgctctccactcaaaggccgaatacatttgcgcagacctgtcgatcgccttctctttttccttgcagtcgggcagcggaccataca

SEQ ID NO: 1866 - DNA, 1432 bp, unidentified
  source 1..1432: mol_type = unassigned DNA; note = element_28856bf
  misc_feature 1..2: note = core
  misc_feature 3..126: note = LE
  misc_feature 127..1170: note = CDS
  misc_feature 1171..1432: note = RE
  misc_feature 1193..1428: note = bridgeRNA
agatggtatggacgtctccacccttaccgccattgttggcatgagatctgattggggtctcgcagcaacggcatcaatgtgccacagtagaagttcgttaacactacatgaactggagaccccgccatggaatctaccgtaaatctgcctgtcgtgggaatggatatcgctaagaatgtatttcagctgcacgttgtcgatacaaagacgggtgaagtacaacgccacaagctcaagcgcgatcatgttgctgctttcttcgcgaaccacgagcgctcgctggtggccatggaggcgtgcggcggtgcgcatcactggtccagaacattgcgtcgcttgggtcacgaagtcaagctactgcctgccaagcatgttcgcccctttgttttgcgtgacaagactgatgcgcgcgacgcgcaggcaatctgggtagcagcacagcaacctcatatacgagcggtacccgtcaaaagcgaacaacagcaagcctgtctcgcgttgcatcgcatgcgcgcgcagctgatgaagatgcgtatcatgcaaacaaacgccttgcgaggattgctctacgagttcggcattgtgttgccggaaggtcaccaggccttgctcaaacgcattccagatgaattggccaaagcgcaggagaacggtcgactttcggagatcgttgtagtcagtgttcaggagcagttgaaacgtatttcacacctacagcaagacatcgaccagctcgacaggcgtcttgttcaattggttaaacagaacttccagatgcaggccatacagaccatccctggtattggaccgctgacggccacagcattagtggccacggcgaccgagctgtcgagctttgattctggcagacaatttgcagcctggctgggtctaacgccaagacaaaccggtaccgggggcaagacacgtcaacttgggatatccaaacgtggtgacgcctatgtgcgcaccctgctgatgcatggtgcgcgagccgttatatgccgaagtcgccaaactgcctggatccaacagctacttgcgcgtcgaccttttagcgtcgtggttgctgcgctggctaataaactggcccgcaccgtctgggcactcctgaccagaggcaaagcctttgatcaggcccaatgggaagttgctggcgcgactgtgtaataaaaactgatagcgtaaataccgagttttcaaaggagagcaagcaagaagcaacgtgatgggaaaacaggtcagacctgggtaaggaaaatccgatagtcgtccagagcgtaaacaagctcgattttcaggggggaaccttatccgcgaatgccatcagggccagcaggttaaacgcctgcatcaacaggccgaatgtaaggctgcaacctctttgaacgttcacacgctaaaaacttgttttccaggagacgtccatgta

SEQ ID NO: 1867 - DNA, 1349 bp, unidentified
  source 1..1349: mol_type = unassigned DNA; note = element_2885fc7
  misc_feature 1: note = core
  misc_feature 2..59: note = LE
  misc_feature 60..1109: note = CDS
  misc_feature 1110..1349: note = RE
  misc_feature 1122..1343: note = bridgeRNA
taatgggatgacctgccccaccctccgagacattgtggtgctgcacagaggaggtagaaatgatcaggaatgcacctaagccagctgccgtcttcggcgtcgacctcggcaagaaccttttccacgttgtaggcctggatgagcgcggcttcgtgatccagcgggccaagttccggcgagatacggtgctggccttcttccagcgcgcctcgccgaccctggtcggcatggaggcgtgccccggatcccagtggttcgcacgcaagctgcaggcgttcgggcaccaggtgcggatcgtgccggcgcagttcgtaaagccgttcgtgaaatcccagaagaacgacaccatcgacgccgaggcgatcgcggaagccgtcacccggccgaccatgcggtttgcgcaggttcggaccgtcgagcaaatcgacatccaggccctgcatcggatgcgagatcagctggtctcaagccgaactcgcctgatcaatcaagcaagagcgttttgcctcgagtacggggttgctatgcgacaaggcgtgggagtgttccggctcgatctgccgcgcgttcttgccgatgacagcaacgatctcactccaatgatgcgacagatgctggctgagattctggaagacatcgcccacgttgatcgacgcatcgtatcggtgacccgacaggtcgaagctctcgcagatcgggaggacagggcgaggcggctcatgaccatcccgggtattggaccactggcagctacagcattgttggcggccatcggggacggccgtcagttccgacgcgctcgagagctcgctgcctggctagggttgacgccacgagaatactcaacaggtggcaaaacgacattgcttgggatcagcaagcggggcaaccgctacgtgaggaagcttctggttcacggcgccagatcgtgcatcacccatatgaaccgatcaaaagaccggattggggaatggctcgacgctcttgaaagcaggatgcacctcaacaaggtcgccgtggccatggccgcaaagatggcaaggatggcgtgggccataatcgtgcggcccggcgccatgtacgatagacgagatccggctgtcgcctgagggcgccggcctgctgaaagcgaggctcgggatagtgatgacgaaaaagtcgaccagcgcattgtaaactctgcccaaaaaagcgtgctcctgcacggaccgtttattgagaaccatgcgcgcggatctcatcatggcctggccgcaacagcggtccactcgcgagaggccggatacatttaggcggactgccttcgtcagaacgaaatcgatccttgcccgggcggggcaggtcataca

SEQ ID NO: 1868 - DNA, 1392 bp, unidentified
  source 1..1392: mol_type = unassigned DNA; note = element_2888371
  misc_feature 1..2: note = core
  misc_feature 3..84: note = LE
  misc_feature 85..1119: note = CDS
  misc_feature 1120..1392: note = RE
  misc_feature 1093..1379: note = bridgeRNA
tgatggagtggatgccccctcctgacggcatcgaatgtgccaaggtggtgatgttttcgcatcccacgaacggagagagcatccatggaacaggttagcatcatcggtctcgaccttgcaaagcgctccttccaggcgcacggcgccctcgccgacggcggcgtggctttccgcaagaagctttcccgagagaaagttctcgccttctttgccgagcagccacgctgcgtcgtcgccatggaggcctgcgggagcgcgcaccattggggacggaccatccgcgaccttggccacgaggttcggttgatcccgcccgcctacgtcaaaccgttcgtgaaacgccaaaagaacgatgcggccgacgcggaagcgatcgccgaggctgcggttcggccgacgatgcgcttcgtcgcggtcaagaccgaggaacagcaagggcgcgccatgcttttccggacgcgcgatcttatggtccggcagcgcacgcaactgatcaatgcgctccgcggtcatttgtcggagcacggcgtcgtggccgcgcagggacccgcgaatgtgaaagttcttgcagaggcggtcgaggatcagggtcaggggacttcgcttccgcttctcgtcgtggagttggcccgtgtcttcctcgatcagatcgaggggttgtcgaaaaggatctccgaactcgagaaggtgacggtccacgaagccgcgtgcggagaaacgacgcgacgtctgcagacgatgccaggcgtcggccccatcacggccttggcgatcgagacctttgcgccgccgatggatgtcttcaaacgcgggcgcgatttcgccgcctggctcgggctcgcgccccggcaacattcgaccggcggcaagcaggttctcggaaaagtctcgaagatggggcagcgtgatattcgtcggctgctgatcatcggcgcgatggccgtcgtccgctcggcctcgcgaaagggcgccccggagggaagctggctgcagcgcttgctggcgcgcaaaccaaagatgctggtggcgattgcgctcgccaacaagatggcccggtcgatctgggccatgctggcgaaggcggaggattatcgggttcctgtggctgcggcggcctgatcgacaatcagccaaagcaaccggaggactgtcgggcgtgtagggaggtcgacgaacggtaaggtcaaaatgatcggttagatctgggtctggaaacgcgttaacatgcaccgagctcgacagctcgcccgaatgatctgcgccagatccgctcatctccataccggccagcggccagatcaggccgcttaccaaggcctgatacatgaccgcatccgatcacgcggaccaagtcgttcgaaaacatcttgcgcgaacgggggcatccataca

SEQ ID NO: 1869 - DNA, 1445 bp, unidentified
  source 1..1445: mol_type = unassigned DNA; note = element_2889dbc
  misc_feature 1: note = core
  misc_feature 2..229: note = LE
  misc_feature 230..1432: note = CDS
  misc_feature 1433..1445: note = RE
  misc_feature 13..234: note = bridgeRNA
ctactaggagacttcccgcaggatcggggtctggccagactctgatccaggtgaccggcgggacgctctcattgcggctgcccacccgtacttgggtgtggctctcatctggactgcgagccgccggtcatcgtgacgaggcgtggctcaagaggggtctgcccagctcgtagtagcactgcccacctcgccttcccagctggaactcgagcgcagacgaggtgagcagatgagcaagcagaagagcgccatcattggtgttgatccacacaagatgtcggtgacgatcgaggtcgttgacacccacgaacggcttctcggtggcggccggttcgacacgacgaatgccgggtatgccgcgatgcggcgttatgtgaggcagtggccggaccggctctgggcggtcgagggagccaacggcgccggacgcccgctggcccaaagacttctcgccgccggcgaacacgtggtcgatgtcccggccaagctcgctgcccgggtgcggctcttcgacaccggccacaaccgcaagaccgacgccctcgacgcacactcgatcgccgtggtcgcggtccgcaccgacgggctgcgggtgctggtcgaggacggcgagctcgaagcactgcggatgctcaccgatcgccgcgacgagctcgcccaccaacgagtacaaaccgtcaaccgggtgcagcgcctgctcagcgaactcctgcccggccaacgcaaacgcgacctgtcagccgcccaggccaaggcaatgctcgccaccgtgcgcccccgcgacatcgccggcaagacccgccgtcgcatggccgccgaggagatcgccgacctggtcgcagtcgacgccaagctcaagcgcatcaaggccgaactgaaggccgcggtgctcgagcacggctcgcacctgatggacatctacggcatcggcccagccggcgctgcacgggtgctggctgatgtcggtgacgtggcccggttcgccgaccgcaaccggttcgcgtcctggaccggcaccgcacccatcgacgcctcgtccggcgagcagacccgccaccgcctgtcccgggccgggaaccgacggatgaaccacgtcctgcacgtcgcggcgatcgtgcagatccgccacgacaccgaaggccggacctactaccgacgcaagctcgccgccgggaagacaccactggaagcactgcgatgcctcaaacgacgcctctccgacgtcgtctaccgccaactcgtcgccgacgcccagcctgctcagcctgatgaagcggatccgggagggcactgcggggcgacacttcaatccagcgcggccgactcacacccgctcatcgacacttcggatcagccacttcccggacccgcgcaaccgacgctacgccgaccacccctaggcaggaagaccctcgccccagccactccttgacacagaggggagc

SEQ ID NO: 1870 - DNA, 1636 bp, unidentified
  source 1..1636: mol_type = unassigned DNA; note = element_2898534
  misc_feature 1..3: note = core
  misc_feature 4..261: note = LE
  misc_feature 262..1503: note = CDS
  misc_feature 1504..1636: note = RE
  misc_feature 77..234: note = bridgeRNA
tcctgttactgtaagctagacaaagagagaccgatagcgtaaaacattgtgagacaatccatcatcacaatgcctacccatcggtctctggcctgggatcaaggaccctgtcattcctgcgctgcgagcgccagcctcggaccgtcccccaggcctggtgggtggtactgtccaaagcatgcagcgccatgagcgccctaacaggaacacagtaccccaccacgattgatgggactcccgtgaatgcacaaggaggtcccaatgcaagtatatatcggaatcgactggagtgaacagaaacacgacgtgattatgatgaatgcggcaggtgccgcgcttgctcagtttgagatccctcacagtccggagggctttcttcgtcttgacgaaacccgttggcgcatgaagttagcaactgaagattgtgttgtggggctggagacagcgcataatctgttgatcgacttcttgtggtctcgcggttacagtaaggtttacgtagtgccccccaccacggtcaaaagcaatcgcaaacgtttcagcagtagtggtgcccgatccgatcccagcgatgcgcttgttatcgcggatagcttgcgtaccgaccatgggcgcttgcagtcatggagcccagacagcttgcttacccgtcagatacgagccaaggtcagtctgatcaaccatctcaccagcagcacggttcgtctctccaatcgtctgagagccgtactgctgcgctattacccggcagtgctgaacatgttcagttcgtggccgaccaaggtcgccatggagtttatccgtgctttccctactccaaagcacgctgaaaacctgacttttgaccagtttcagcgctttgcccgccaacatcgatatccaaacccgaagagattgccaacttgttttgcgcgtctgcaggcgccacagccggaagctgctcaagagaccgtcgaagtctaccaagatgaggccgtgttgttggcgaccatgctcctgaccgcgatgcgtgccaaaaaaggggctttgctcgagctcaaaaccctcttccgcgagcatccagaccatgcgatctttgactccttgccaggtgcgggcgacttcctggcgccggcccttctggccaagtttggcgatgaccggaagcgatttccaacgccggccagcgttcaggccctcgcaggtacctgtccggtgacggaccaaagcggtaagcggcgcatcatcaagttccgccgtgcgtgtgatcgcgagttccgggcgatcgctcagcagtgggccatggcttctttgcaacaatcggcctgggccaatgcctattggcagcgagcacgatctcgcagccgttattccagtcttgcctaccgtcgcctcgccaatcgctggttggcgatcctgtggaagctctggcagacaggtcaggtctatgatgaggcctatcatcttcagcgttgtgcacttcgaagtaaaaggcatcgctggtcgttaaactttttcgtttgaatgtgcatcacgaaggcgcaggtgatgatggatcgttgtcgtgatgatggaagaccagctccggaccgaaatctagtatcggtgccgctgctgtatcgcgtctacttacaaaactgggtattgacaaagcatg

SEQ ID NO: 1871 - DNA, 1383 bp, unidentified
  source 1..1383: mol_type = unassigned DNA; note = element_28a1506
  misc_feature 1: note = core
  misc_feature 2..288: note = LE
  misc_feature 289..1368: note = CDS
  misc_feature 1369..1383: note = RE
  misc_feature 1..298: note = bridgeRNA
cagtcagaggatagtcgccagttcctgggcggtctgactctcacagcgatggaccgtttggtaggctggcgccgtgaggcgcccggtgcggtctgacccacactcagatcgaccaggtcgtgtctttccccggacctgtcgaccgcccgggaacgccttgcggtgaggctttgcctcgccgatgcctgtgacccgagaagggcctgacctccatggtctcgtgactgtcctgtccgcgcattcggtcccggtgaagccagttagggcatggcaatctggaggctgggaatggcggtcatcgaagggcgagagcgacacattgtcggcggcgtcgatacccataaggatcttcacgtcgcagcggtagtcgatgagcaggataggatcctcggaacacgatccttccccacgacccggcagggctatcgccagatgctcgcctggatgctctccttcggtgagcttcagcgcatcggaatcgagtcgaccggcagctacggcgcagggctcctgcgctttatgcagcaggcaaaggtcgtggtcctcgaggtcacgacgcccgacaagcaggatcgacggcggcgaggaaagaacgacgatctcgacgcccagaacgcggcccatgccgcccttgcaggccagcggaccgtgacgccgagaagccgggacggcatgatcgaatccctacggattctgatggcttgccggaagacggcggtcagcgccaggcgcatcgccctgcagatgatccataacacgatcgtctgcgctcccgacgcccttcgcgatcaactgcgcaacctcacccgcatgcagctcgtccgtacgttggcctcctggcggccggatctgacagcatatcgcgatctggattccgcctatcgcatcggcctcaaatcgctcgcccgacgttaccttgagctgcacgacgagattgcggatctcgatgtgatgatcgccgccatcgtcaatgagctggcgccgaacctggtcgcccgcaattcgatcggccacatcggagccgcccagcttctcctaacggccggcgacaaccctgaaagactgcggtcagaagccagcttcgcatcgctgtgcggcgtcagcccggttccggcatcgtcgggaaaaacggtccgccaccggatcaaccgcggcggagatcgcgccgcaaacagcgcattacacatcatcgccatcgggcgcttacggaccgatcagcgaaccaaggattatgttgctcgtcggatcgcagaaggccattccaaactcgacgccattcgagcgttgaagcgttacctcgcgagagaagtcttcacgctcatcacgcaacgtcgcaaggaaatcaacgccacccgaatcgccgcttgacaaacagaagggcgt

SEQ ID NO: 1872 - DNA, 1404 bp, unidentified
  source 1..1404: mol_type = unassigned DNA; note = element_28a85fd
  misc_feature 1: note = core
  misc_feature 2..92: note = LE
  misc_feature 93..1124: note = CDS
  misc_feature 1125..1404: note = RE
  misc_feature 1178..1399: note = bridgeRNA
caatgggatggactcctcctcacctatcggcattaacgtgccaaactggaaaatgagtaaaccagttaacggtgaaattgaaggagtccaccatgaagattaatcgagtaggtgttgatttggcaaagaatgtctttcaattacacggcgctgatctgcaaggaaaagcggtctggaaacggcgcctatcacgcgataagtggctgaaagtgttgttcaaaaccgttgagccaggttgcgaaattggcatggaggcatgcgctggtgctcatcactgggcacgcctactggcagccaaaggctaccgtgtaaaagtcattccccctcaatttgtaacgccctatgttaagagcaataaaaatgatgccattgatgcggaggcaatttgcgaagcgatgagccgtccgaatatgcggtttgtaacccccaaaacagttgatcaacaagatattcaagcgacacacaggattcgcagtgagcttatcgggcaccgcacagcgaaggggaaccaaatccgaggattggtcgccgagtatggattggtagcaccacagtacatgtcatctttgcgagcagcgattcctcagtggcttgaagatgacgataacggattaacgaatcggttccggtcactgttacatgggctttgggaagacttactgacattggacaagcgtgttgagtccctggatcgcgagatcgcggcaattgcacagagcgatcccgtagcccagcgtctacagcagttgcgtggcgtcggtccgttaatcgctacagccttaatcgcagcagtaggcaatggtgagcaatttagtaaaggtcgccagatggccgcgtcattagggctcacgccaaagcaacacagttccggaggaaaggaacatttactgagcatcagcaaacgtggaaattcgtatttacggagtatattgatacacggagctcgctcagccgttgcacatgcaaaacacaaagatgatcgcttaagtcgatgggtgacagatctagcaacgcggcgtcatctaaatattgctgccgtcgccttagccaataagacggtccgtatggcttgggcgatgatgagatacgaagtggattacgatcctgaatttgtagtcgggtgaagctgtaaaaaaatcaaaatttaacaattgatacttacgaaaggaaacctatttacgattgcgaagcaagctgaatgatggtgaactggtcgaaccggcgctggagaaacccgtcaatgtccgcgtgcgaaaagcacgacatagcaattgggatctggcgcgcgaataacccattatggcccggcatctgcgtatgccaacattaaaggccggatatacgtatgcagtcgaaccaacgaccattatacagaatgcttgcaaacgaggaggagtccatata

SEQ ID NO: 1873 - DNA, 1618 bp, unidentified
  source 1..1618: mol_type = unassigned DNA; note = element_28b2180
  misc_feature 1..2: note = core
  misc_feature 3..289: note = LE
  misc_feature 290..1501: note = CDS
  misc_feature 1502..1618: note = RE
  misc_feature 22..315: note = bridgeRNA
ctccttcctctactacaatatatttatggttaatatcccttacagccagtaaggaattatccatcttgttgcttaactgttagaatgtaggtagcaatcggtatatcgtctcccttccttggacttagcgtccgtaatttagactgataaccagctcctcattcgcagcgttcgttttatgcaggttgaactgcctcaggtacgttcgtgtcacaccacagtagattgaataggcaatgagtaaaactggtgcttatccattgcaataatcttaaggagtgacaaatttatgaacatgaatgcagtaggtattgatgtttccaagggcaaaagcatggttgctattctgcgcccttatggtgagattgtttcagcaccatttgaaattaaacacactttcggtaacatccaatctttgattgaacagatcaaatctatcgaaggtgaatcccgcatagttatggagcacactggtcgttattacgaaccactggctcgtgagctttctctggcaaatctttttgtagctgccgtaaatcctaagctcattaaagattttggagataactctctacgtaaagtaaaatctgataaagctgatgctataaaaatagcccgctacacacttgacagttggactgaattgaaacagtatagtctcatggacgaaatacgtaatcaattaaagactatgaaccgtcagtttggtttctacatgaagcacaaaacagctatgaagaataacctcatcggcattctggatcaaacttacccaggtgttaatacttactttgacagccctgctcgtgatgatggcacccaaaaatgggttgattttgctactacatactggcatgtggactgtgttcgtaaaatgtcatcaaacgcatttgttgaccattataagaattggtgcaaacgtaagaagtacaacttcagcaaagataaagctgaagaaatttacggaatagcaaaggaacttgttcctgtacttccaaaagatgatttaaccaaactgatagttaaacaggccgtagaacaattaaacactgcttctaagaccgtggaagaactccgcaccctgatgaatgaaactgcagccaaactccctgaatatcctgttgttatggaaatgaaaggtgttggtccgtctcttggccctcagcttatggctgaaatcggagatgtcacgcgattcactcataaaggtgctattacagcatttgctggtgtagacccaggtgtaaatgaatcgggaacctatgagcaaaaaagtgttcctacttctaagagaggctcttctgtacttagaaaaaccttatttcaggtcatggactgtctcgttaaaataaaacctctggatgatcctgtatatgcgtttatagacaagaaacgtgctcagggaaaaccttactacgtgtatatgaccgcaggtgctaataagtttttgcgtatctattacggaagagtaaaagaatatcttatgtctcttccagaataattccacccacatcctttcagaccagcagataatggtggtctatttttcataccataaaatcaatataaatttaatccagaaaaatcatcaatttcctattgactttttatttgcagg

SEQ ID NO: 1874 - DNA, 1627 bp, unidentified
  source 1..1627: mol_type = unassigned DNA; note = element_28b60d1
  misc_feature 1..3: note = core
  misc_feature 4..259: note = LE
  misc_feature 260..1255: note = CDS
  misc_feature 1256..1627: note = RE
  misc_feature 8..233: note = bridgeRNA
gttcgtattataaggttagccagaatgctaaatatttctggttgacctttttttattgggtcttattatatcagtagccagggtagaacgtaactgctcgtggggcttcgaccccgtcagctaaactgttcgccccctacttgtagaaacatgattgaggctggttgggactttgatctcgtataacaagcgaagctgtgacactgcaaggagaaattaggggtactggtaaattacatgtttaggaggaggatttagaatgaatccagtcgttggtctggatatttcaaaaggggaaagtcaagttcaagcatttttagataaaggcaaaccattcagaaagagttttaaagtacctcatacagttgaagggctaagttatcttgtatcgtttctggaggatgtgaaaaaagagtctggtaagaagccttcaatcattctagaagctactggacactatcaaactcctgttgttcattacttggaagaacgaggatatttattgattattattaatccgctgatttcatacaaggcaagaggttcaagtttaagaaaagtaaagacagatgccatagatgcctatcttctttgtgagttgttctataaagaggagttagagccctataaaaaacgtggtgtccaattattaaatcttcgtaatcttacaagacaacatgaaaatactactggagtcacaattcaaacgaagcttcaatttcaggctgtacttgaacaagtgtttcctgaatataaaggggtttttggcgatttatattctgttgtatcactcttaacactttcagagttcccctcttccgaggatattattaaagcaagtgaagaaacaattacagataaaatacatgaattatgtaaaagtcgatcaatcagatggacaaaagaaagtgcaattaaacttaaggctgcggcagctcgtaacccttttgaaaagacagtctaccagagtcatattttaagccttggtatgtatattaaaatgattcttcaatacaaagagcacctatcaaagttggagtcggagatagatgccctcactaaagaaattgaagaatataatattatcaaatctatccctggtatcggagaaaaaatcgctgcaacgattatttcagaaattggagagatagatcgatttactgatcctaaaaagctggtagctttcgctggagttgatcctagtgtattcgaatctggtaagtttacagccacaaaaaaccgaattacaaaatgagggtcaagtagacttcgtcacgccctttatatggctgttcgttgtgcgattcgtgattgccgtaaaaagaaaacaacggatgaaatcatccctcgcaacaagaaaatgcgagagttttacgacaagaaacgtggcgaaggaaaaccctttaaagtagctgtaatagcatgtgtaaataagctcttacactggatatttgcccttttaaaaagcaaaacgaatttccaagatatagcttagaacctaaattaaactaaatagtacaaaaccttccaaaaacagactaaaggaaggttatttggcatgcacatttttagtatagcatgagatattttaagtttttattgaaaaatattgacaaactattagctg

SEQ ID NO: 1875 - DNA, 1535 bp, unidentified
  source 1..1535: mol_type = unassigned DNA; note = element_28bc30b
  misc_feature 1..2: note = core
  misc_feature 3..242: note = LE
  misc_feature 243..1415: note = CDS
  misc_feature 1416..1535: note = RE
  misc_feature 3..220: note = bridgeRNA
ctcgtattataaaagagtagtatttatagccccctctccagggggtatgctacactgcaagggatgctgtggattggtttgtttcacctaccgcacagacggtttactggaggctccaaccacagccctttgcagtattgttaatcagttagataccgccagacggtttatatggaacgaggttacaagagcaaagagtcctgtggactcagcatcacatttttaccgttggaggttttacaatgatttgcgttggaattgacgtggcgaaggacaagcacgactgcttcattatcaactcagaagggaaagtccttgcggatgtgtttaccattccgaacagtatgaatggtttcaccagcctgctacaaagaattcaggattgttcctcacctcaggacaaaataaaagtaggacttgaggctaccggacactacagctacaacattctcgggtttcttcttgacaacggcctggacagctttgtcattaaccccttgcacaccaacctgtaccggaaaagcctcagtctcagaaagacgaagaccgaccgtgttgatgcgcgaacgattgcggctatgctcatgtctgatgtgggcctcaagccctacacagacacagcttaccacaatgaggaactaaagtcactgacaagataccgctttgacaaggtgaaggaacgcgcccagctcaagcagtcggtcgccaggctggtctgcatcctgttcccagagcttgaaaagctggtgccaacactccatatggcctctatttatgcgttgctggaggagtttccgggcgcaaagcaggtcgccgacgcgaacatgacgcacttgaagagtgtgctttgcgatgcatccaggggccgttatggcagggacaaggccattgaaatacgcgaggcggccaaaacctctattggttccgtgattccagcgaagtcactggaactgcggcacaccctccggctcatccatgagctggaggccgagattgatgagattgaggcggagattcagcagattatggaagagctgcattcaccgattaccacaattcccggcgttggcacccgcatgggcgctatgattctcgccgaagtgggagacttttcccggtttgattcgccggataaagtactggcctacgccgggctgtcaccgtctacataccaatccggacaacttaccaactgctattctcacatggaaaaacgcggctcacgctatctccggtatgccatttttaatgcaacgaagtatgtctgtctttggaatccggattttgccgcataccttgctaagaagcgtgccgagggaaagcattataatgtcgccatatcccacgccgccaaaaagttggtgcgtctcatcttcgccttggagaaatctgggagagcttaccaagctgcttaaccgttttacttactgtccgcgcagagcgcctttcgcgacgctcttgtagtcatatccttttttgccgtcttactaattcactacttttccctttttgggccttgacttttaatagttagt

SEQ ID NO: 1876 - DNA, 1532 bp, unidentified
  source 1..1532: mol_type = unassigned DNA; note = element_28c4f26
  misc_feature 1..4: note = core
  misc_feature 5..259: note = LE
  misc_feature 260..1507: note = CDS
  misc_feature 1508..1532: note = RE
  misc_feature 48..226: note = bridgeRNA
ctcactggtgcaccttccgtgtcgggtgcggtagtttgaccgcgctcaggagtgcttcggcgtccgggtagggagagccagcgtcgcttgccccgtgagggctcgcatgagacccgctcccctgcccggcgcggaaggccccaaccgaccacagggtgtcgcgccagggcacctgaagcccggagcgcctgtcagtgagcgatcggtgagaccttccaacgccggagcagaggaacgaacctcgactcggaggtgcgcgatggaaggactgcatccaaggtacgtggtcgggatcgactgggccagcgacaagcacgacgtctgcgtgctcgccgccgccggcgagcgccatctcgccttcccggtcctgcacacggcggacgggctggccgagctggtgcggcgcctcaagcgctgcggcgcgcccgccgacctgccgattgcgatcgagcgcccgtctggcgtgctcgtcgacacgctcgtcgcggccagcttccccgtggtgccgatccaccccaacgccctcaaggccacccgggcccgctaccgcgccgcccccggcaagagcgaccccggcgacgcctacatcctcgccgatctcctgcgcaccgatggccatcgcttccggccgctgcgcgccccgtccgacgcgaccaaggccctgcgcgccgccgtgcgcacgcgcgacgacctggtcgccacccgcgtccaactcgccaatcagctccgcacgctcctggagagtttctgggcgggcgccgccacaatcttcgccgcggtcgatagcccgatcgccctggacttcctcgacaccttccccacccccgacagcgccgcgcgcctcggcgccacgcgcctcgaccgcttcctgacgcgcgcggcgtactgcggccgccggcctgccgccgaactcctcgcgcggctccgcgccgcgcccgcgagccccgccggcccgctcgagcgcgaaaccaaggggcagctcgtgcgcgccctcgtcgccgtcctgcggccgctggtggtccagctccgcgagctcgatggcctcatcgccgcccacctcgcccagcaccccgacggctcgctcctccagtccttcccacgcaccggcactgtgaatgccgcccaaatcctggccgagctcggcgaggatcgccgccgcttccccaccgccgagcacctggccgctgaggccggcgtcgctcccgtcacccacagctccggcaagcaccggggcgtcgcctgccgcttcgcctgcaacaagcgcctccgccaagccctcaccacctgggcggacaactcccgccacgcccacccgtgggcccacgccgtctacgccgccgcccgggcccggggctgcgaccacccccacgctatccgtatcctcgcccgcgcgtgggtccgcgtgctctggcggtgctggcaggatcgcacccgctctgagccggcccagcaccgcagggcgctccccttcctgctgcctcaaccatccatctcccctgccgcctgaacagcggaaccttgacacagggtgt

SEQ ID NO: 1877 - DNA, 1444 bp, unidentified
  source 1..1444: mol_type = unassigned DNA; note = element_28c714c
  misc_feature 1: note = core
  misc_feature 2..358: note = LE
  misc_feature 359..1399: note = CDS
  misc_feature 1400..1444: note = RE
  misc_feature 112..289: note = bridgeRNA
tagtataataatggtgtagtcaatcaagactacttggttaataagtttctgtaaatcagataacaaaagaagggattcttccttcatcagatgttatccataataattatcatgtctgacggttcctgatagacaccagataaaacataaggtattatctcttaggataggacaaagaatgttcacctccttgggaagtcacttctgtgactgatacctgcaataaagtcaattagtccattcgacagggttttatgttttagctggttgggagcctgaaggccatacccgaataacacgctaggttgtgtacctgccagattggaaatggattcctatcagaaaggggctattgctcatgtcaaacaaagttatttttaatcttgatgaactattcatctctgttggtattgatgtcggtgctgatttctcatggatgtctatagcacttccaaaccaacaattcgtaggaaaaccttacaaaatcctacataacagtattgattcccttacaaccgctgtttctaaaataaaagaagcagaagagttgtattctttggaaagtcgcattttcctcgaatccacgggaatttatcattacccactcttctgctatcttcgtgataagggttttaactgctcggttattaatcctatcatcactaagaatagcacaaatatcaacatacgaaaagtacataatgatcgttttgattctaaaaaagctgctttggttggtttgaaacctgatttaaaggtttcacttatgccttcagatcttgctctaaactgccgtaacctatgccgtgcatcagcttttcttaaagcagacaagcaagagattattgatatcatcaaatccacagctcgatttgggcttacatatgctcaaaataagtataatgccataattcaggcggcaactgatgcaaatcagtttggttacatcatagacagcaacatcaagcgtattcgcctttatatcagcttcatacgtaaatatgatgaagaaatcaacagcattcttgaatcactccacgagcttgttgatgctaatgaagattctgactttgtcaagcagattcatttgattgaaactttcaaaggtgctggtttcttgtctgctgtatccattatgggtgagatcggtgacttttcagcattttcaaagcccaaacaacttttcgcttattttggtcttgatccagcagtaaagcaatccggtaaatttgaaggcaccaaggttcaaatgtctaagcgtggttctgccatagctagacgtgttattcacacgttaacattacaaagcataaatactataaacccaatgaatcaatatctttcaaaaaacgatattttcaccaaggggaaagtccgcccttttttagtcagaaaataaaatagattttttctcatttaactattgacatttattagctggact

SEQ ID NO: 1878 - DNA, 1357 bp, unidentified
  source 1..1357: mol_type = unassigned DNA; note = element_28c8bfc
  misc_feature 1..2: note = core
  misc_feature 3..84: note = LE
  misc_feature 85..1104: note = CDS
  misc_feature 1105..1357: note = RE
  misc_feature 1117..1343: note = bridgeRNA
gatgaggtggatggcccctgctccctcggcgtcgcgatgcgccataatgcagttgtcatcaactgctgagagaggagccacccaatgacagttaagacaatcggtctggatttggccaaggacgtctttcaggttcacggaatttctgcgaatgggcgcgtcatcttcaacaagaaggtcaagcgcgcgaagcttctgcaattcttcgagtccctgccaccctgcgtcgtcggcatggaggcgtgcgggtccgcccatcactggggacgcgaattgcgcaagctcggccacgacgtccggctgatgcccgcgagctacgtgaagccctacgtaaagcgaggcaagaccgacgcggtcgacgctgaggcgatctgcgaggcggtgcgacgccccacgatgcgctttgttgaactgaaaacggaggaccagcaggcgatcctgacgatccaccgcacccgcgatctcgtggtccggcagcgaacccaggtcgtaaacatgatccgcagcatcttgcgcgagttcggccatgtcctgccgaccggggtcgaggctgtcctcgccttcgccaaacgccacctcgacggggacctgcccgacatgccggagctggccaatggcattctcgggacgctgtgccaccaattgatgggcctcaacacgcgtgtcgtcggctacaccaagatgatcgagcagcatgccatgatgaatgcagacgcccggcggctgatgcgtatccccgggatcggtccgattaccgcctcggccatcatcgctacgatcggcgacgcaaaacagttccggaccgggcgcgatctggcagcctggttggggctgacgcccttgaacaaatccagcggtggcaaggagcggctcggaaagatcaccaagaagggcgaccgctacatcagaaagctgctgatcgtcggcatgacgtcgcgcgcgttgatgggcaagaagcatcccgaacgcgtcgatctctggacggccaagatcctggccgggaagccgttccggctggcgaccgttgccatggccaacaaggccgcccggatcgtctgggccatgctgacgaaacaacaggactaccgccagccgagcacctgactgcacggccggcgcgagatgcaagacgcctgaatcgtgatgatgcggaacgaagtcaaccaagagcaaggacactccgtgaatgtcagcggctctcgaggtcgctaagccgattggaacctcgctcgcggaactcatcagggccagtggcatcccgaaggtgccacgcaaacaggccggacagacgactgtactgacgaagacgccgcaaaatcgcgacaaagctcttgcaaagcaggggccatccacagag

SEQ ID NO: 1879 - DNA, 1474 bp, unidentified
  source 1..1474: mol_type = unassigned DNA; note = element_28ce748
  misc_feature 1..4: note = core
  misc_feature 5..251: note = LE
  misc_feature 252..1337: note = CDS
  misc_feature 1338..1474: note = RE
  misc_feature 28..271: note = bridgeRNA
ttttcgtactatataagtatgaggagttattcgaagaatagcttgtcatacttttttcatatatgatgagagcgactggttgacgggcaggatttagaattgaaacattcgtaaataaaactgtcaaccatcactcactatcaagaattcgattaagtaggtagagttcaaacactcgagtaacaggcgaaaatgaatggatagtgtagtgaaggagagatcagtcaactaagaatggggagcgagaaaaagtgatttcagtggggattgacgttgcaaaagagaaaagtgtagtagctataatgaatgaagaaagaaaattattaagaaaagtcgttacattaaaccatacaatgagtgaaataggtgcgtttattgaacttttaactctttatcaagaggaggaagaagtcaatataatcatggaggccactggttattatcatgagtctgtattacaacttttatgcgaaagtggatttaaagtatatgtggtaaacgtattagttatcaaaaagcataatgatgcgaagctccatcaagtaaagacagataaacaagatgccattaaactcgcagaatatttattaggtaatcactatcaacttaggcagcataaagaagaaggggtaaaatatcaagagcttcgattttatgcgagggagtatcataaaagtatggggatcaaagtgaaaataaaaaatcagttaactcagttgatagataagtgctttccaggtataaaaaagatttatcataacaacatggaagggactttattagatgtattagagaaatatccaactatagatcatgtttcaaggttgggacaaaagaggttcaataatctatttgtaaaatgggcaactaaaaaaggacatagaattacagagcaaatcgaaataaccacatctattttagcacagatgaaaacaatagcggaatcgattcctgaatatgaagtagtaagagaaatgtctggtgtgggagatcgtacagggccaagattattagcaggaataggagatattcgacgttttcattcctcaaaagcattagtggcatatgcaggaattgatgtatcaccgtatcaatctggccaatttgaggcaagagaacgaaaaataacaaaaaggggttcaaaatatttgaggaaagttctctatgaaattgttcaaagtttaaaaacagtaaagccaactaaagataatgcagtgtatcaatatatcttgcgaaaagaactagaaggaaaagcttcaaaaaaggctaaggttgcaggggtgaataagtttctgcgtatatattacgcgcgggtaatagaggtttatcaactatagataaattgtgcccccttgatgtcttaaaaaacaaaaatgtaaaaaagccgtacttgcgtacggttatttgcattggggggatattcatgtaaaaaaatgtatttttattaatttttatctttaaaataattagtagg

SEQ ID NO: 1880 - DNA, 1413 bp, unidentified
  source 1..1413: mol_type = unassigned DNA; note = element_28d3f05
  misc_feature 1..2: note = core
  misc_feature 3..291: note = LE
  misc_feature 292..1161: note = CDS
  misc_feature 1162..1413: note = RE
  misc_feature 1188..1371: note = bridgeRNA
acattgggtaatcgcggagcgagtcgccctcaggccagatgagtattgcatggaagtgcgggtggttgttccccgataagatggagatacgggctctcgactggacgccgggcccaagcatcgaatggagaacaaccatgggtgagtatatcggccttgacgtgtcgttgaaagagacagcgatttccgtgcggcgggacggcaagaggatctggcgcgggcaaatgcccctcggatcccaacctgatcgccgaggtcctgcgcaagcgtgcgcctgcggctcagcgggtggtgttcgagaccggtcctttgtcggtgtggttctatcatgcgctgagcgctgaagggctgccggcgatctgcatcgatgctcgccatgccaaggccgccctcgacatggcgcccaacaaaaccgacgccaacgatgccgatggcttggcccatctggccgaggtcggcttctaccgcgaggtgcgggtgaagggatatgacagcatgctgatccgcacgcgggtggccgcgcgggccagattgatccagatcacgaccgagctgtccaaccagatccgagggctcatgaggacgtttgggttggtcgtgccacgcggcaaaggcggcacgttcgaagccgaagtccagcgcctgctggccggtcaggaggaactcgctgggatcatcctaccggtgctggaggcttggcgcagcgtgcgcagccgtgccgccatcctggggcgacagcttctcgcgaacgcgcggcagcatgaggcctgtcagcggctgatgtcgatccccggggtaggcgcgattaccgccacctcgttcacggccgctattgaggatcctgcaaacttcagcaagtcgcgctcggtcggcgcttggctcggcctgacgacccggcgctatcagtccggtgaggtcgactatgacggccacatctctcggcgcggcgaggctcatctgagaggcctgctctatgaggccgcaaccgtaatcctgacacgcattcacgccaaaagcgatctgcgccaatgggggctgatgttgagagagagggttggcttcaagcgcgcagctgtggccgtggctcgcaagctggccgtcatcatgcacgccatgctcaaatccggcgagccgttcacccgggtggttggcgccgcctgatccggagagttcggatgcgcctgccctgaggcgtgctgaggcgtccctgccgggacgtggatgaaccattccgcctaggctgttgcaccgacgcgccagcaggcccgcagcgtgcgttccacaccttggaaggttcccccgcgtaggcccatcacgcggcgacattgtctcgaccgcgaagacgacactgctcccggcaaaccacagcctcggcatcagaaaaggccttgcattccaacgagcgattagacg

SEQ ID NO: 1881 - DNA, 1272 bp, unidentified
  source 1..1272: mol_type = unassigned DNA; note = element_28e0a03
  misc_feature 1: note = core
  misc_feature 2..135: note = LE
  misc_feature 136..999: note = CDS
  misc_feature 1000..1272: note = RE
  misc_feature 1034..1269: note = bridgeRNA
atggtatggacgcctcccactttaaaagtgaagtgacgaggtgagtttgtgaaggaagtggaccctaccgggccgacggcatcaaagtgcccaaggtggaagggttcaatcttcactggcaccggagggtccgacatgaatcgtatcgtggttggagtggatatcgcaaagcgggtgtttcagctgcattgggtgcagcccgagaggcggatggtgaagccgttcgtggttggcaacaagaacgatgcggcggatgcgcgcgggatttggatggcagttcagcagccggggatcaaggcggtggcggtcaagagcgaggagcagcaagcggtgttggcgctgcatcggatgagagagcagttggtgaagtttcgcacggcgcagatcaatggtctgaggggattactcaccgagtacggtgaagtgatgccgcaggggcgcgccgggatcaagcgagatatctctagcgctttggggcggttatccgatcggctgccggcgatggtgatcgatgccttgcgcgaacagtacgctcgcctgaatgagctcgacgaacagattgcccagatcgagcggcgtctacgtcagtggcagcgtggggactcggccacccagcgcattgcggcgatccccggggtggggctgttatgtgcgaccgcggcggtggccacgatgggcgatccaaaagcatttaagtcgggccgcgagtttgcggcgtggctcggattggtgccgcggcaaaccggcaccggcgggcgagtgcaactactcgggatcagcaagcgcggcgataaatatctacgcacgctgttgatccacggcgcgcgttcggtgctgacgcacagcaagtcgccgcccgagtggttaaccgaattattgaagcgtcggccgaagaatgtggctgtcgtcgcgatggcgaacaagatggcacgcacgatctgggcgctgacggcccatgaacgggcgtatcaatctgggtacgtgagtcgacccgcataggtcgcacacacgattcattaacgttaacaaaggaaggtacgccaaaaggttgcgcaaggactacaacgtgtgatggtacacaggtcagaccgtgacccgccaagcctgaatgcaactccgagcttcgagctcttaggagaaatgaggtgcgggtcagcggaatccatcagggcccgcaggcttcggtctgcacaacaggccggatataaacctgcagcctcatctgtcgaacatcacaccgaagagaacttgccatcgggaggcgtccatata

SEQ ID NO: 1882 - DNA, 1434 bp, unidentified
  source 1..1434: mol_type = unassigned DNA; note = element_28e740f
  misc_feature 1: note = core
  misc_feature 2..133: note = LE
  misc_feature 134..1150: note = CDS
  misc_feature 1151..1434: note = RE
  misc_feature 1196..1430: note = bridgeRNA
atggtttggatgcctcccccccgacaacgggcattacacgaaggcgttcacccgacaggcggaccctcgatgtaacggcatcgttttgccagagtggagacgcacatcaaccacccaaccaggagggtccgccatgcatcataccgtcatcggaatggatattgccaagcaggtttttcagctgcaccgagtcgatccgcagagccggcaggccgagcgcatcaagcgcaagcgttcggaagtcctgccttattttgcacagcatccaccggcgctggtcgcaattgaaggctgtggaggtgcgcattactgtgtacgcgagcttcgcaagctcgggcatgccgttcggttgctgccagctcaagcggtacgcccctttgtcttgcgtaataagaccgatgcggctgatgcgcgtgccatctgggtggcagcgcagcagacagatatcaaggtcgtggcgatcaagactgaacaccagcaaagcgtgctagcgctgcaccgggcacgttcacaattgatgaaggtgcggatcatgcataccaatgccgtgcgcaggctgctcatggaattcgggcagacgctgccggaaggttacggcgcattgcaaaagcgattgccgaactgccttgccaacctggacgggcagctgccggacatgctcgtgcaaacactgcgcgagcaatgggcacgcgtcgaggggctggatcgcgagattgctgtcattgagctgcggctcaaacaagccctgtcgaagtcggtcgctcgcaaagcgattgccgagatccccggcattgacctgctgagcgcgacagcggcagtggcgaccatgggagatcccggcagttcaagagcggtcgggaatttgctgcctgggctgcgtttggtaccccgccagacgggtaccggcgggcgcattcggcaactgggcatttccaagcgaggtgatgcctacctgcgcaccttgctgatccatggggcacgtgccgtcgttgctcgccgtaagcagtcgcccgggattaccggtttactagcccgacgaccgtatggcgtggtggtggcagcggtggccaataaactggcgcgcattctatggagcgtgctggccacagggcggcgctatgaaccagctgccttgagcgcagtcgggtgatgggcgagccaggcggaacgaagtggtattgaaacaaccgtaatcgatcatctccaaggagcgcaagcgagcatcgcatgatggcccacaggtaggaccgggacggacagagcctgataagcgtcgtgaacgataagttcgggagacaaatgaggcgtccgtcagcgaattccatcaggttcagcaggctaatcggcctgcattaacaggccggatagaagaccgcagccttacccagccgccagcatgcaaaaatcgcttgaacgccgggaggcatccctata

SEQ ID NO: 1883 - DNA, 1465 bp, unidentified
  source 1..1465: mol_type = unassigned DNA; note = element_28ebf71
  misc_feature 1..5: note = core
  misc_feature 6..222: note = LE
  misc_feature 223..1449: note = CDS
  misc_feature 1450..1465: note = RE
  misc_feature 1..226: note = bridgeRNA
cccccgttaccttcttgatcaagcccggacagggcttgcaggccgctggccatggcatgactcagtccccctgttgttcatgatctggggggtgttgtcaccgtggtcggagggcgccaacgaccgctgatagagacctgactcgcttgcgtggtcttctcgtaacgtggctgccggcgcgggtgtccaggtcggcctgccgcgacgatgaaggagccgcggttgagtaactccgaggcggcgtcggcggtcccgttcgcggtgttctgcgggctggacgtcggcaagtccgaacaccacgcgtgcgccctcgacgcggccgggcggcggctgcacgacaaggcactgcccaacgacgagaccgcgctgcgcacggtgttcgagcgcttgggcgagcacggacgagttctggtggtcgtcgaccagccggcctcgatcggcgcgctggccgtcgcggtcgcccgcgacctggaggtggaggtggcctacctgcccgggctggcgatgcgccgcatcgctgacctgcaccccggccaggccaagaccgatgcccgcgacgcccacgtcatcgccgacgccgcgcgcaccatgccccacacgctgcggcgcatccgcggcgacgaggagaccctcgccgaactcactgtgctggccggctacgacgacgacctcgccgggcagtccacccggctgagcaaccggctgcgcgatgccctgttgcacgtccaccccgcactggaacgcctgctcgggccacggctggaccgcggcggggtgcttgatctgctcgcggccgcgcccaccccggccgcgctggccgagctcggggcccagggcatggccgcggtgatggccccgcgctcgccacggttggcgcgcaccctgcccgcccagatcctcaccgccctgctcgcccagagcgtggtcattccgggaacggccgcgttcgcccgggtcatcagcggcgttgcgggtcagctgcgcgaggtccacaccgaacgcgaccagctcgccaccgagctcgaggctcggttggaggcccaccctcttggaccggtcctgacctcgatgcccggactcggggtcaggaccgcgatcaagatcctcaccatcgttggtgacgggtcggcgttccccagcgccgcccacctggccgcctacgccggcctagctccggtcacccgacgatccggatcctcgatcaagggcgaaagccgttcccaacggggcaaccacgccctgaagtctgcgctgttcctctccgcgttcgcgtcgctggccgacccgaccagccgggcctactacgaccgcaagaaagccgagaagaagaagcacaacgccgcggtgatctgcctggcccgccgccggctcgacgtcatctacgccatgctccgcgaccgccagccttaccgggctccaagcccctcgccagcgcctctcgcggcttgacaaccccatagagaca

SEQ ID NO: 1884 - DNA, 1460 bp, unidentified
  source 1..1460: mol_type = unassigned DNA; note = element_28ee23c
  misc_feature 1: note = core
  misc_feature 2..107: note = LE
  misc_feature 108..1127: note = CDS
  misc_feature 1128..1460: note = RE
  misc_feature 1146..1376: note = bridgeRNA
gaatggaagggacttccccgtcctgagctagccgcaaagcgtcgagcggccacgagtgccacgatgggatgcgcgaagtctcatcaactcactctgaaggggaagtcatggccattctttacgtcgggatcgatctcgccaagaacgtctttgcggtgcacggcgtcgacgagcacggcaagcccgccctggtccggcctagcgtggccagggccaagctgcacgagctgatcgccacgctgccggcgtgcactatcggcatggaggcgtgctcaggtgcgcaccactgggcgaggatgttcaagcagcacggtcacgccgtacggctgatcgctccgaagttcgtggcgccctacaggatgagcggcaagcgcggcaagaatgacgccgctgacgcgatggcgatctgcgaagcggtgcagcgaccgaacatgcggttcgtcccggtcaagagccaggacgaacaggcgcggttgtgcgtgcaccgcgtgcgccaaggcttggttgagcagcgcactgccaccgtcaaccgcatccgcggcctgctctgcgagttcggcatcgtcttgtctcagaaggccgctacggtgcgccgcgaggcggcagcgcacctcgaggatctgcctggctgggcgaacaccgccatcggcgactcgctgagcgagctgcaccggctcgatgagcgcattgccgagtacgaccggcatgtcgttctgatggcacgcgaggatgagcgcagccgcgctctgatgcggctgtcgggcatcggcagcacgaccgcgagcgcgctggtctcgacgatcggcaacgcgcgcgactttaagaacggccgtcagctcgccgcttggctcggcttggtgcctgggcagtacagctcgggcggcaagacccggctgggcagcatcaccaaggctggcgacggctatctccgaacgctactggtgctcggcgccaaggcagtcttggccgcggccaagagcaaggacgaccggctcagccgctgggcgctcgcgctcgaggagcgacgcggctactggaaggcggtcgtggccatcgccgcaaagaacgctcgtatggcttgggcagtgttggcgaagggcgagaacttcaagccgctcgagggctaagcacgaaccagcctctcattaccagactgcgtgacgacgaagtgttgatgagtcaagggttggacccgcgccgggagagctcgattatctttgggagacgccactcgagtgatctcgctatccgaatggagccccggcgcgcgtcttccatcagggtccgcagcaacgaacgctgcacgatgaccggttgtagttctgcagtccgcactcttgttactctgagcgcttcgtgttggcacggtggccgacaacccgcactagatcccccttgatgcgtcgctatgcgacacatcaaggcttgctatcgcttgacctcggggggaagcccttgta

SEQ ID NO: 1885 - DNA, 1349 bp, unidentified
  source 1..1349: mol_type = unassigned DNA; note = element_28ee6f0
  misc_feature 1: note = core
  misc_feature 2..68: note = LE
  misc_feature 69..917: note = CDS
  misc_feature 918..1349: note = RE
  misc_feature 1117..1346: note = bridgeRNA
taatgaaatggtcacccccacccctcgagcaggttacgctggaggagtattttccaagggaggccatcatgcaagacgtgacgctggttggaatcgatctgggcaagcactcatttcacctgcacgggcaggaccggcggggaaacatggtgtttcgcagaaaagtaacgcgcaggcaacttatcgaattctttgcctcgtttcatgcctgtaccgtggtaatggaagcctgtgctggggcacattacatggcccgcaagctggctacgtctggacacgaggtcaaacttatctcgccgcagttcgtgcgccctttcgttaaaagtaacaagaacgattttgtggacgctgaggcgatctgcgaagcggcaacgcgacccgccatgcggttcgttacgccgaagaccgaatcacagcaaacgctttctgccttgcatcgggtccgtgaatcgctcgtgcacgatcgcgtgaaggttatcaatcagattcacggattcctgctcgaattcggcatcagcctgccgatcgggctggccgtgatcagacgcctgcctgctgtactggcagagcaaccactaccaccgcgcctgattgtgctccttgagcgtctgcatgcccacttcaaatacctcagtgaacagatcggcgaactcgacaaggacctcgcacggcaactggccgatgacgatcttggccaacgtctgctgacgattcccggggtgggcccggttacggccagtcttctgactgccgagatgggcgatggcaagcagtatggatgcagccgagactttgcagcgtcgatcgggctcgtacctcgtcagtacagtaccggcggacgacccaacctgctcggtatcagcaaacgaggggacaagagtctccgcaggttgctggtccaatgtgcgcctatatgagcggctggagcgacaaaccggccgcatggccgagtggactcgtgccatgctgacgcgacgtcattcgaacgtggttgcctgcgcgcttgcgaacaagcttgcacgcaccgcctgggcgctcgccgttcatcacgcggaatttgatccaggacgggccgcgatgccagcctgaataccgcgccctgattctgctatatcaaagtctgaccatctggttttgcgatcgctgaaatttgatgacgtgaacggcacaccggcctgacaaacaacctgtaacgtgacatggctttcgaagccgccggcgtttttaggattgtcaggcgcgactctcatcatggcgcggagagtgatctccacaaggacgccggatagattgaagcaagccatcacaacttcaaaaatcaaggttgcaaaaacgggggtgaccataga

SEQ ID NO: 1886 - DNA, 1379 bp, unidentified
  source 1..1379: mol_type = unassigned DNA; note = element_28fd7d4
  misc_feature 1..2: note = core
  misc_feature 3..101: note = LE
  misc_feature 102..1151: note = CDS
  misc_feature 1152..1379: note = RE
  misc_feature 1158..1348: note = bridgeRNA
acatagcgtaatcgctcagggcctagccttcgaggcggcggctctccacactgtcccttgtcaactgtggccagtgtgccgaagcgatgaggagaaccgccatgaagtattatgccggactggatgtcagccagcaaacgacctcaatctgcatcgttgatgaggagggcaagactgttgccgaacggaaggtggcatcgtgcccagaggcgattagtgaagcgcttgagccgttcgcggtaacccgtgcaggactggaaaccggtcccctgtcggtctggctatggaatggattgaaggaacgcggcgttcccatcgtctgcatggatgctcgccatgccaatgcggccttaaagatgatgcctgccaagacggaccgcaacgacgccatcggcctggcgcagatcgttcgtacgggttggtgcaagagcgttcatgtcaagtcgacggcaagccacgaagctcgggcactccttgccactcgtagccaatttgtgcgaacccgctgcgacctggaaaaccagatcagaggtgtccttcgcacctttggtatcctgtttggcaaacgggttggtgggttcgccaagcgtgccgaggaaatcatcgatggcgagctcgatgcgtcgccaacaatccaggctgtcgtggaagcattgatgcgggcacgtgccaacatccttgagcagatccgtcatctcgaggcgaaggttcgcttgatagcacggcagaacaaggtcgtcagacggctgatgtcggttcctggtgtgggagttatcactgcgctcggcttcgccgcaaccattgatgatccgacacgattcaaacgatcgtccagcgccggagcctaccttggtctaacacctcgcatctatgcctccggtgagacgatgagatccgggcgcgtttcgaaacggggcgacgactttctccgacgtagcctgtatgaggcagccaatgcgctgctgacgcgtattccgcggttctccgctttgaagagctgggggttacgcatcgcgcggcgtggcggctatcgaaaagctaaggtagctgtagcccgaaagctggccgtgatccttcacgcaatgtggatatccggtgaacccttccgttggtcatcgcaagagccgggcgatctggcatcattacagtgatgtccatgattagctgagatcagcgagatcgtccggtcaggacgatggcgcggtcaagaccgatcccaggaatgcgatgctgtctgatacaggcaaccgcgaacaccacattggtcgaccgagcctatccaacgccatgatgaggcggccaaagtgacgacctcgaagagaaccatgagcctgacctgtgacgccctcggcgatcaacttgacaaccgcgattagaga

SEQ ID NO: 1887 - DNA, 1547 bp, unidentified
  source 1..1547: mol_type = unassigned DNA; note = element_29091ab
  misc_feature 1..2: note = core
  misc_feature 3..251: note = LE
  misc_feature 252..1430: note = CDS
  misc_feature 1431..1547: note = RE
  misc_feature 3..224: note = bridgeRNA
ctcgtataatatatttgtagttttttacatccctcttcaaggattttgtaatatactattattaagatactgtggattagttaatctcctcctaccacttgatggttttaaaaaggctctagccacagtctctttgttaaattgttaattagttagataccgcttgacggtttatatagaacgaggttacattcgcaaagagtttgtggttttacagtatcaatattttctttttgaaaggtggtattcttatgttctatatcggtatcgatgtctctaaagacaaacatgactgcttttgctgcaatgacgacttgcagcctgtttttcaatttcaattcagcaatgactctatcggctttaatctattatttgaggctatcaaatctcttgattcttcttttgataacattaaaatcgctcttgaagctactggacattactcctataacatcacttcctttatccttgacaatgaccttccgcttgctattatcaatccgcttcattctaatctgtttagaaagtcgatttctcttcgtaaaactaaaaccgacaaagtcgatgccaatgtgcttgccagaatgcttgtcgcttatcctgacttgaaattttctacttctttggatgataacgatatcattcttagcgagttaaaatctttaactagatttcgtttatcccttgttaaagatttatctaaactaaaaacttctgtatcccgaataattaacattatctttcctgaaattgaaaaagccttttccagcactaactccctttatgagctgctttacaatttcccttctgccaaagaaattgcaaatgctcatcttacaaaacttacaaatgttttaatcaaagcctccagaggacacttttctaaagaaaaagctatccaaattaaagaacttgccaaaaatacagttggcaattcttcctgtgcttcaacttttgaattaaaacatactattaaacttatcaatgaatacaattacagcattgataaaattgataaagagattaacactattatggataaaatcgcttcaccaattacttccattccaggtataggtattactcttgcctctatcatcattgctgaaattggtaattttgataactttgattctccagacaaaattttagcttttgccggcatgtctccaactatctatcagtccggtaaatatgtcgctagctctgctaaaatggaaaaacgtggttcaaaagcgctcagatacgctttatacaatgctgcaagactaaccagtatctactgccctgtatttaaggaacatcttgccagaaaacgttctcaaggtaaacattttaatgttgccatatctcacgttgttaaaaaattagtcagagttatttaccatttacaaactaaaaacgaactttttaaaaatatcattaattaatcatttgaataatttaaattattaaattatctattttgttatgcaaaaatttacataaattcttcaaaaaaaatttttgcttttttttgaaaaaaaacttgacattatatagttagt

SEQ ID NO: 1888 - DNA, 1487 bp, unidentified
  source 1..1487: mol_type = unassigned DNA; note = element_290f7e6
  misc_feature 1..4: note = core
  misc_feature 5..241: note = LE
  misc_feature 242..1477: note = CDS
  misc_feature 1478..1487: note = RE
  misc_feature 32..215: note = bridgeRNA
gtcactagggcaccatccttctgacggagctctttgagagagttctggtcggaatgaggcgagggccgggggtacggcctggcgtggtcgcccttcgagggcctgcatgacaccgccacccctggctctttcgaggctgtcgaccggctacagggagaagcgccgtagagcgccggttagtgaccacccggcagccagccccgatcgccgagtcacgtcgctgccaactgaaggagttccgttgtccctgctcgtgatgggagcactgttctacgtcgggatcgactgggccgccgccagccacgcggtctgcgtgctggaccacacgggccgacgagtcgccgcgttcagcatcgaacacagcgcggccgggttcaccactctcgtgcgccggctgagtcgtcttgccactgtggaccggatcgcggtcgcgatcgagcgcccggacggccgtctggtcgacaccctgctcgaggccggcttcgccgtggtgccggtcagccccaacgccatcaagacctggcgcgagtccgaggccggatcgggcgcgaagtcggacgccggtgacgcgtacgtcatcgccgactacctgcgctgccgcgccgcccgcctcgacccgatcgagccctacagcgcggccacggtcgcgctgcgcactgtggtgcgtacccgcgatgacctggtggcgatgcgggtcgcggcgaccaaccagctcgccgccctgctggacgcccactggcccggtgccaaggccatcttcgccgacatcgagtcgccgatcgcgctggcgttcctgacccgctacccgaccgccgcccacgccaaaggcctgggcgccaagcggttggaggcgttctgccgcgagcacggctacagcggcaagcgcagcggcgaggtgctgctggcccggctgcgcgccgccccgaccggcaccaccgaccccaccgtctgcgccgccctcgccgaggcggtgctggccatggtcgccacgctcacggtcctcggcgacacgctcaagagcatgggcaagacggtcaccgccacactcggggagcacccggacgggaaggtcttcacgtcgctgccaaggtcgggtcagatcaacgccgcccagatgctcgccgagtggggcgatatccgccaagcctacgacggccccgagtccgtcgccgccctcgccggcgtcactccggtgaccaaccagtccggcaagcaccgagccgtccacttccgctgggcgtgcaacaagcgactgcgggtcgcgatcaccacgttcgccgacaacagccgccacgccagcccctgggccgccagcgtctacgccgaagcccgcgcccgcggccatgatcatccccacgccgtgcgcgtcctggcccgagcatggatccgcgtcatctggcgctgctggatcgaccaagttccctacgaccccgatcgacacggcaacgcccgacaccgtcaacccacatggggttgacacagggagt

SEQ ID NO: 1889 - DNA, 1413 bp, unidentified
  source 1..1413: mol_type = unassigned DNA; note = element_2915693
  misc_feature 1: note = core
  misc_feature 2..89: note = LE
  misc_feature 90..1124: note = CDS
  misc_feature 1125..1413: note = RE
  misc_feature 1175..1404: note = bridgeRNA
caatgggatggactcctcctcccctaaacggcatctaggtgccagactgggagtgttatccaccagtcaatagagagaaggagtccaccatgaacaagcttagtcgggttggtattgatttggcaaagaacgtctttcagttacacggtgtggatcggtacggaaaggccgtatggcgtcgacggttgacgcgcgataagtggcttaatgcgttactggaaaaaattgagccaggttgtgagattggtatggaggcctgttcaggagcccactactgggcccgtcaattgcaggcaaagggatttacggtgaagttgattgccccgcagtttgtaaagccctatgtaaaaagcaacaagaacgatgccaatgatgcagaagctgtctgtgaggccatgagccggcccaacatgcggtttgtggctgtcaagacagtggagcaacaggatattcaggctgcacaccgcattcgtagcgagttaatcgggcaacgcacagccaagggcaatcagatccgagggctgatggccgagtacggtctggtggcccccataaaattggcgcgcctgcgatcagcagtgccagcgtggcttgaggatgcagagaatggcctgaccaaccgctttcgcgggttactgagtggcctgtggaatgatctgacaaccctggatcggcgtgtgacggagcttgatcatgagattaacatgattgctcagagcaaccctgtcgcaaagcgactgcaacaacttcgcggtgtcgggccgatggtcgcgacagcactggttgccactgtgggtaatgcgaggcagtttgccaatggcaggcaaatggcagcctccctgggactgacaccgaaacagcatagctccggcggtaaagatcggttgctgagtatcagtaagcgtggcgatgctcatctacgaagcatactaatccatggggcgagagcagtgatccaaacggccaggtcaaaggatgaccgattaagccaatgggtaacgagccttgcggaaagacgccaccccaatgtggccgcagtggcactggccaacaaaacggcgcgcattgcctgggccatgttgagatatgacatggattacgatcctgattatattgcggcttgatggctcatgcgcatcagatgaccaattaacgaaagagttagggggagaacctcactgacgattgcaaagcaagccgaacgatggcgaacaggtcgaaccggcgttggctgaacccgagaatgtccgggtgcgaaaagcacgaaacttcgatggggagctggcgcgcgaatagcccatcatggcccggcatcagtaaattgatgccaaaatatgaggccggatatacgtgagcagtcgtacctcatcaccgtcgaacggagtgcttgcaagccgagggggagtccatata

SEQ ID NO: 1890 - DNA, 1405 bp, unidentified
  source 1..1405: mol_type = unassigned DNA; note = element_291e39f
  misc_feature 1..7: note = core
  misc_feature 8..304: note = LE
  misc_feature 305..1369: note = CDS
  misc_feature 1370..1405: note = RE
  misc_feature 70..269: note = bridgeRNA
cgctggtcgagcgacgagcagatcagccgctggttgagctgtcgatgaacgtgtttcccgctggtttcagtgtcagggttgtctagccatttcggtggtggttgggttctgagcaccaggcatctggctctcccgctggttaccgccctggctgtatcgggctggtgttggctcattgtgccgatgcctggtgtgtcaggaccggccggcgtgacttgataggagcgtggcatcgcccccgactgagatgtgtccgccgaccggcccgactgtcgccactccctctgacaggaaggcatctcccatgatcgtcatcggtgctgatgtgcacaagcgcacgcacaccttcgtcgcggtcgacgctgtcggcaaacaactcggatccaccgtggtgccggcgaccacggccgggcatcgcacagccatgcagtgggcgcatacacgcttcggtaccgaggtgttgtgggcgatcgaggactgtcgcaacatgtcggcccggctcgaacgcgacctgctaggcgccgatcagaaagtggtgcgggtagcgccgcgcctgatggccgaacaccgccgtaccggacgggaacgcggcaagtccgatccgatcgatgcgctagccgtggctcgggccgcagcacgtgaacccgaccttccggtggcgtctcacgacgcgttgtcctacgagatgaaagctctcgtcgactaccgtgattgccttgtgcgcgaacgaacctcgaagatcaaccgggtgttgtggcgggtacaccaactcgaccccgagcaccacatcaaaaagggcgggatgaaactcaagaagcatcagaaagcgctgcaaacctggttgacgacccaaggcagcggtgtcgatgcccgcctggccggcaaggaagtcgccgctatctacgacctgaccgtggagatcaatgaggtcgaacgagagatcaccaagaaggtttccgacgcggtgcccaccctgttggcgatgcccggttgtggcgcgctcagcgccgcgaaactcctcggcgaatccgccgacatcacccgattccccggggaggcccagttcgcccgccacgccggaatcgcccccgtgccggtgtggtcggccaacccggggcgtcatcgactcacgcggtcgggcaaccgccaactcaacgccgcgatccaccgcatcgcgctgacccaggcacgcatgccggacaccctcggccacgcctactacgagagaaagcaggcagacggcaagactcctcgcgaggcgatgcgctgcctcaaacgccgcctcacccgcgtcgtctacaaccacctcaccaccgaccaccacgcccgcacccacaaagccgacaacccgacagccgccgctgcttgacataggagctatgagctgtcgatgagcgtggtctct

SEQ ID NO: 1891 - DNA, 1213 bp, unidentified
  source 1..1213: mol_type = unassigned DNA; note = element_291f26b
  misc_feature 1: note = core
  misc_feature 2..284: note = LE
  misc_feature 285..1091: note = CDS
  misc_feature 1092..1213: note = RE
tcacgtataatccaattatcttagatggtaattggatttttcctttctcccagttaacactgggtatttatttccatctctgatatattttgaaaaggcactgtggatctgtatctataacttttacagctttgactggtatgaggtgactcagaccacagcttttcgtctattactgttaatcagtttgttaacgcatcgacgtttttatttacgtgattacacagccgaattctctgtggaagacagcagtgctcaaaatatttatcaggaggtataaacctatgtcaatgtactttattggaattgatatttccaagtacaaacatgattgctgcatcatttctgcagctaatcaaaaagtagtttctaaagtcataatcaaaaacaataaagccggctttaatgaactgcttacaatcattcattctcttgcaaatcctgcggacataagaatagggtttgaatcaactgcccattatgctctcaatcttgaactcttccttgaaaattctctcctaaccttcatggaagtaaatcctgttctcatcagtgaatacaagaaatccaaaacacttaggcgtacaaaaaccgactctgttgactgtgaatcaatagctcgttggttaatgactgttgaatacaaaccccttgtaaaagagattgataccattaaaaaagaaatcaaccaactaattgaagaagtacatcctcactatatgtcagttcctgggatcggaccattatcagcagctgtaatctattctgaatacggcgatatatctaacttcactaatccaggacaaatgcttgcatttgctggaatagaaccgggaatcaacgaatctggtactgaatctcacggaggcaagatggttaaacgtggatcatcccagctccgctacacacttatcaattgttgtctaccattaatccgctttgacatgacatttgcaacttactatgccaagaaacgcggagaaggcaaaccgcatcgagtagccattactcatgtagctaaaaagcttattagagtcatctacgcattggagagccaagatatcgactttaatgctcaggaacttcgttaatctctagtggattaatactaatttctcccatctgaaatacgatgtattcagatggcttattaaagttacccctttttacaattcaaaaaaatttcaaaattctcttgactgtttatagtttg

SEQ ID NO: 1892 - DNA, 1617 bp, unidentified
  source 1..1617: mol_type = unassigned DNA; note = element_292007d
  misc_feature 1..3: note = core
  misc_feature 4..249: note = LE
  misc_feature 250..1485: note = CDS
  misc_feature 1486..1617: note = RE
  misc_feature 8..224: note = bridgeRNA
gttcgtattataagttcagccagatatttctggttgaacattttttatatagttttattataacggtagccggggtagaacgtaagcacccgtgggactcgatcccgtcaactaaacagttcgccccctacttgtagaaacatgattgaggctggttgggactatgatctcgtataacaagcgaagctatgatactgcaagaaggaattaggggtaccggtaattttattttggagaaggagatttagaatgaatccagtcattggtctggatgtagcaaaaggtgaaagtcaggtacaagctttcttggataagaaaaaaccttacaaaagtagttttaaagtaacacatacccttgagggattagatacgttacatcaatatttaagagaaattgagaacttaacaggggttaaacctccgattgttctggaagctacaggacattatcataccccggttgtccagtatattgaggacagagattatttaataattatagttaatcctcttgtctcctatcgtgccaagagctcgagtttacggaaagtaaaaacagatataatcgatgcaaatcatctctgtgaaatgtactataaagaggatttggagccttataaaaaacgtggaattcaactcttaaaccttcgtaatctaacaagacaacacgaaaacttaacaggaatatttgtacaaaccaagctacagtttcaagcagttcttgatcaagtttttcctgagtatagaggtgtttttggggacttatattcagttgtttctttactaactttattagattatcctacatctaacgatgtcttagaagctggtgaagaaaccatagcaactagaatcaaggatcattgtaaaagtcgttctcgaaggtgggcggatgtaaaagcaaagaaacttatagatgcagcagctcggaatccttttcaggaaaccttatatcaaagccacattttaaccttaaaaatgtatataaatatgcttttagaataccaaaagcacctatctacgtttgaaaatgagatagatgctttagcaaaagaacttatagaatataagattatccaatcaatccctggtatcggagaaaaaatcgcggcaacgattatttcagaaattggtgagattgatcggtttactcaccctaaaaaactcgtagcatttgccggaattgaccctagtatctttgaatctggcaggtttaaaggaaatgtaaacaaaataactaagagaggttcgagtaggctaaggcgtgccttatatttggcggttaaatgtgccattcgtgattgtcgtaaaaagaaaatgacccaagaaatcatcccgcgtaacaagaggttacgagagttctacgataagaaacgcgaagaaggaaagccttataaagtagctgtaatagcctgtgcaaataaactcttacaatggatctatgctcttttaagaagcaactctactttccaagatatagcttaaataataaataaaactaaacaatacaaaaccttccaaaagttgagataaggaaggttatttggcatgcacatttttagtataccatgaaatattttaagtttttattgaaaaatattgacaaactattagctg

SEQ ID NO: 1893 - DNA, 2101 bp, unidentified
  source 1..2101: mol_type = unassigned DNA; note = element_29254aa
  misc_feature 1..2: note = core
  misc_feature 3..272: note = LE
  misc_feature 273..1481: note = CDS
  misc_feature 1482..2101: note = RE
  misc_feature 22..247: note = bridgeRNA
ctcgtataatgaatttacggtttaagtgtggtgggaaccgcatgaaacccacttgttgccccacaagccatgtgggataataaggccagcaggcagagggcgcaggcaaactccttgaagtatagcttccacggaaagaattgcgcctctgtctttgcgggttgacacgaatgagctggatagcgaatgtgcgctgtatatcaaacgaggttgtgttccgcaaagaagtgtgaggggactctgtctggaaactgaagataggaggtcacattatgtactattgcgggatcgacatcgccaaatacaagcacgaagccacagtcatagacaaaaccgggaaagcgttgctggacagcatatcgttttccaacagtgcggagggctgcaaaaaactgctggcactatttgaacgactgtctatttccaaagataaactgctcatcgggatggaagccacaggccattactggttaagtgtctacggatatcttctggagaatggctttgaggtgaaagttatcaatcctattcagtccgaagcgttccgtaagatgtatatccgacagaccaagaacgacagcaaagacagcttcatcattgcccagatcatgcgctttgggcagttctctgccacaaacctttcagaggaaactatcgtagctatgcggcagctgagccgttaccgtctggctctggtggataactgcggcgactgcaagcggcggatcatagctctgttagatcaagtgtttcctgaatatgacagtctgttttcagatactttcggcgtcacatccaaagaggtgcttgccaaatatccaacgccggaggatatgctctctgtttccacaggaaaactcacaaatctcctgaaaaaggccagtcacggccggtttggcaaacagaaagcagaacaactccagtcgacggcggccggttccttcggcgtcagttttgcaaaagatgcttttgctttccagattcgacaactcattgagcaactggaatttctggagaaacaggtcgcagagctggaggggcagatctcctctttactgaaacagaccggtagctttatcactaccatccccggtattggcgataccttgggcgccatcatattgagcgagattgggaatatccaccgtttcagcactccgggcaaactggtggctttcgctggattggatgtccgtgtcacgcaatccggcgagttcatgggcacccggcaaaaaatttccaaacgcggttcgccttatctgcggcgggccatctggctggccgcatccagagcggctttttgtgaccctatcctctcggagtattaccaggggctgagggccagaggtaagcaccatctcaccgctattggcgctgtttcccgcaaactttgtaacatcattttttccatcctttcccaaaactgtccttatcaaacgattcctccaaatgacaaaaagccttgtccttcgtcaatttaaacaacatgaaatgtatttcgtcgtttgatttctacgaccggtatattcttcctgtaaaggaggatgtaccatgtcttttgaataccaattttcttcggatgtctttcatgcccgtaccaatcttggtttaaaacagccctttgttgcaaatgctctcggaatctctcttcgtgaataccaaaacattgagtatggccggttttcccctcagctgaaaactttcttaaagctggtctaccttttcgacctggatattgacgcttacagggaggtgctcggcgttgaaaaaattgctgttccttcccattgaacaggagctgtttgcgcctcacattggacactatcgttcttatggcattgctgctgtttgcttatcctgctcccgctgcgagattcctgcttttgtttctgatatttctacagactactctttcgtttctcatttggcagatcttttcactcgcaatcatctggatcctttgcatttgctcaatgtcattgaggacttcatctaatccttttcgtagttttctgctggctcgctttctgcgggcctttttctgctgcccgttctttaccttgttctctttccttttttctcttgactttttatagctggt

SEQ ID NO: 1894 - DNA, 1615 bp, unidentified
  source 1..1615: mol_type = unassigned DNA; note = element_2927aca
  misc_feature 1..2: note = core
  misc_feature 3..436: note = LE
  misc_feature 437..1468: note = CDS
  misc_feature 1469..1615: note = RE
  misc_feature 53..269: note = bridgeRNA
ctcgtattatatagtagtagtgtttagagaccctctccaaggtcttcataactattaagtcatagtccttttctttaccttttctacaggttcgactatgatatataaggtgctgtggattggtttcacactcctaccacttgatggtttaggaaaggctccaaccacagtctctttgttcatttgttaatcagttagataccgcatgacggtttatttagaacgaggttacaatcacaaggagttccctgtggttctaaaacagcattaatacttttttaaggagattttttatgatttacgtcggaattgatgtcgccaaagataagcatgattgctttatcactaactctgatggagaagtgttatttaaagcttttaccatcgccaacaacctgactggtttcactgaactttatcaaaaattgaatccgttatggaagatgtatcaaaagtaaaagtaggactggaagccactggacactatagttacaatctcctcggttatctcattgataaaggtttgcccacctatgctatcaatccgttacatactaatctgtacagaaaaagtcttagccttagacagacgaaaacggataaagtagacgcccgtacgattgcttctatgctgatgtctgatgtgaacttgaagtcctactcagatacatcttaccacaacgaagagttgaagtcactaacccgttatcgttttgataaagttaaggaacgggcaaagcttaaatcttccgtttccagactggtctgtatcttattccctgaattagaaaagttagtaccaacgcttcatatggcatctgtttatgcattgctttctgaatttcccggtgctaaacaagtcgctaatgttcatcttaccagacttaccaatcttcttactaaagcctcaaaaggtcgatatggtaaagaaacagccattacattcagagatgctgcaagaacctctataggctcaaatatgcctgcaaaatcattagaattgaaacatactatcaagcttatccgggaactgacctctgaaattgatgaaatagaaaacgaaatcaaaatcatcatggatgaaatccattctccaatccttagcattcctggaatcaactatcgtatgggcgctatgattattgcagaaataggtgatttcaatcgttttgattctcctgataaaatcctggcatatgccggattttcaccttctacttatcaatctggtcaacttgatggtgcttactcacacatggaaaaacgaggctccagatatctgcggtatgcgttatacaatgcggccaaatatgtctgccattgggattcgacgtttgctgaatatctggcaaggaaacgagccgaaggcaagcattacaacgttgctatatctcatgctatcaaaaagctggttcgagtcatttatcatcttgagaaaactaaccagcaatacatcaaggctgattaaatttttctaattcaatactcctttttttgagcaccaataatgatgctcttttcgtcatacagttttcaaggttcaaatatatctgaaatgcatttctgcaattcattcaaaaaattttcattttagacttgacttttaatagttagt

SEQ ID NO: 1895 - DNA, 1277 bp, unidentified
  source 1..1277: mol_type = unassigned DNA; note = element_292b4ad
  misc_feature 1..2: note = core
  misc_feature 3..230: note = LE
  misc_feature 231..1265: note = CDS
  misc_feature 1266..1277: note = RE
  misc_feature 17..242: note = bridgeRNA
ctgacttgtctactggtcccagacatcacgggtctgcagccctacggtgtccagggtgtcggcgcgggctggctcgcatgtccccttgccgcctccgggctggctcatcaagagcgtgcgtacccggccggcacccgccgcggcgtggctcagcagaggcgtgatcgatccggaagtcaggttgcccgccgtggtccctgcatcgtcgcagcgaggaaaggcatcgactggtgatcacgatcggcatcgacccgcacaagagctctctgaccgcggtagcggtggagccaaacggtcagacccatcgcccgatccgggccgtggtggacaagaccactccggagatgttgctggcgtgggccgcgcagtggcccgagcggcagtgggctgtcgagggtgccaccgggctcggccgcggcatcgcccagcagctcgtcgctgccggcgaggccgtcctggatgttccggcgaagctggcggcgcgggcacggctgctgggatccagcagcgcccgcaagaccgacgtcgcggacgcggtctcggtcgccgcggtcgccttacacaatcggcgcctgaaccgcgtccaggtcgaggaccacaccacgatcatgcgtctgctgaccgaacgccgcgacgacctggtcgccgagcacacccgctggatcaatcggctgcacgtcctgctccgcgacctccaccccggcggcgccgaagtccgcctcgacaccacccaagcgtcggtactgctggccaagatccgtcccgtgacggcggccgaccagcaacgcaagcagatcgcccgggacatcgtccgcgacctcaaacggcacgaggcctccatcaaggacctcgagaaacagctgcgggcggcagtcaacgcgagcgggaccaccctcaccgagatccaaggcatcgggttcctgaccgccgccaagatcctcgcgctgaccggtgacatccggcgcttcccgaaccaggagcactacgccagctacgcgggcaccgcaccgatcgatgtttccagcggcgaccaacagacccatcgcctttccaggcgaggcaaccgtcagctcaacgccgccatccacgtcgccgccgtcacccaggcacgcgaccccggtcccggccgcgaccactaccgacgcaagatcgccgaacacaaaaccgccaaggaagcccgccgcagcctcaaacgacgcatctccaacgccatctaccgccgcatcctggccgaccaacaacgcctccaacaggcagccgcttgacacacagaggcg

SEQ ID NO: 1896 - DNA, 1400 bp, unidentified
  source 1..1400: mol_type = unassigned DNA; note = element_292f3a3
  misc_feature 1..2: note = core
  misc_feature 3..85: note = LE
  misc_feature 86..1126: note = CDS
  misc_feature 1127..1400: note = RE
  misc_feature 1142..1388: note = bridgeRNA
tgatgtggtggaacgacccgctaccgcagcatcaaagtgctaaaacgtggtcgttgtttcaacgccacaaggtaggagccgttccgtgaagcagattacaaccattgggctggatttggccaaacacgtttttcagatccatggcgctgacgccgaagggtctccagtcgtcaatcgcaagctccgccgtgcgcaagtgttgcggtttttcgagaagcagcctgcgtgcctggttggcctcgaggcctgcggcagttcgcactactgggcccgcgagatcgccgcgctcggtcacgaggtgcgtctgatcccaccagcctatgtcaagccgttcgtcaagcgcggcaagtctgatgccgctgacgccgaggcgatcagcgaggccgtaacgcgcaaaaccatgcgctttgtccccatcaaatcagccgaacaacaggcggcggcgatggtgctgaggacgcgcggccttctggttcgtcagaaaacccaagtgatcaacgcgctgcgcgcccatctgtcggaattgggtattattgcttccatcggcacgacgaagattgccgggctaattgagatcgtgcgtgatgggtccgatgcccgcttgccgaaggctgcgcgcttcgctttgacggctatcgccgatcagatcgagatgctgatcgagcagatcgacaaactcgaacgggaaattgtggccgaggcaaagcgtgatccggatatgcggcgtctggcaacgataccgggcgttggcccaattacggcggcgtccatcaaagcactggttccagatcctggcggattcaaatccggccgtcacttcgcggcttggctgggattaacgcccaggtcccattcgagcggtggcaaggagcggctgggaggcatatcgaagatgggcaatcccgagctccgctccttgctcgtcctcggcgcaagctctgtcctgcgacgtgtccgaggcaatgataaagggccgaaatggctgagtgcgcttctgatgcggcggccctacaaggtcgtggccgtcgctctcgccaacaagacggcccggatcatctgggcgatgttgaccaagggcggaacatatcgaggtatggcaatgggaaatggcgtcgagagcgcctgaccggaagtgagccaaaacaaactgtcggtgcggtagccggcaggggcgaggtgcaagaaacagacgatgattccgtgggacgaaatcccgaggcgagaaaggccgctagtgtcaatgtgctcaaagcgcgtgccgttgattagccactcgcatcgcggacttcatcaaggccagcggtcagaaagccgcgctgaaaggccgaacatatgaccgcaccgtacccgcgtcatcaagcgtctgaaaaatgcccttgccaagcgggtcgttccacata

SEQ ID NO: 1897 - DNA, 1833 bp, unidentified
  source 1..1833: mol_type = unassigned DNA; note = element_29317ae
  misc_feature 1..3: note = core
  misc_feature 4..72: note = LE
  misc_feature 73..1233: note = CDS
  misc_feature 1234..1833: note = RE
  misc_feature 1270..1482: note = bridgeRNA
aagatgctatggggcgggcggcgaggaattgtatccatcgtcgcttttatgaaccgaccgagggaacgccccatgcaatatccgaatgactcgcgcagatgccttaccgttctggaccaagatagcacgctgatagccgtgatcgagatgagcctgtcgagctggctcgttgccggcatcgtgcccggcatcgagcgccagccgctgaagaaacttgaggccgataagcatgcactgctcaaactattgcatcgctggcgcgatgaagcagtgaaggcggggcgcaaaatcacgcgcatagctgtggcttttgaggccggccgcgacggcttctggctggcccgttggctcagggcgcacgacattgaggcccatgtcatccatgcctcgagcgtggcggtgccgcgcgaacaccgccgggcgaagacggatcggctcgataccgagatgttaaagcgcgcttttctcggctggctgcgcggcgagcgggatcattgcaaggttgtggcgattccaacgctggcagaggaagatgccaagcggccgaaccgcgagcgcgagagcctcgttggcgagtgcagccggctcgttaaccggatgaaggctgcgtttgtgcggcttggcattcgtggtttcaatccgaaactgaagaaggcgccggagcgcctcggcgctctgcgcacacccgagggagagccgatcccacccaacaccgtggcggcgttgcgacgggatatggaacggttgcggctggtgcgcgaacagatccgacagattgagttgacgcgtctggaacgattgcaaaaggcacctgaggtgggggcgcatgccatggtgcgcctgttggcgcgtgtcatgggcatcgggatcgaaaccgcagacatgctggtgcaagaggttctctcgcgcgaacttcgcgaccgtcgcgccgtggcacgctactccggcttgacaggttcgcccgacgagagcggccggaagcatagggagaagggactggcgagagctggcaatgcacgggtccgtcggggcatgatccaactggcatggcggttcctcatgtttcagaagaacagcgctctggcgcagtggtttcgccaacgcaccgagaacgccccccgcacccgcaaaactatgatcgttgccttggcgcgcaagctgctgattgccttatggcggttcgtgcgtgagggtgttgtgccggaggggatcgttctgcggccagcaccatgaacctggaaagctgagacacgttattcggcgctattggcagtttaagccgagttgccgatcacgatccgaggtgacgggatccgctgctgggacatggctacaatgccgcgtgcaagaatggacccgtcgcttcggagccttgccccgatgcgtattaatgcatcatggttcgggctgcattggcccaccgaatacaagtatgtgggcgcaagcgtttgcgttcgccggcaggctcccctcggatatggttatcagtgcttcggcccaattgcccgagtgtgtttaagcgcgatcagtttgcttgatgggctcgcgcggtcttcgaaggtcgaccaggatggtcatggtccgccgcattccattttgcgtcagtctgccgccgtgctcgatgtcgtcaagacgcggcctggcaatggcggagcttgcctcgatgtcggagcgacggccggtcttgacgacatctgcgcgcggcggcgtggcttatccacggtcggggcggaagaatgcttgcagcgcggtcgaacaaaagaatgggaacagagaaagtgaagaaagaagaggtcgtgcagcgctcacagcttgacaacaaaagccccatac

SEQ ID NO: 1898 - DNA, 1380 bp, unidentified
  source 1..1380: mol_type = unassigned DNA; note = element_2932026
  misc_feature 1..2: note = core
  misc_feature 3..88: note = LE
  misc_feature 89..1105: note = CDS
  misc_feature 1106..1380: note = RE
  misc_feature 1148..1377: note = bridgeRNA
cgatgagatggtctcctccctctttccgagtcggcgtcagaatgcgccatgatggaagtgtacgaaccatcaaaaaacggaggagaccatgaataccattgtgatcgtaggattggatttagccaagatcgtttttcacgctgtctgttgtgaccagcaccagcagatcgtaaagaaaaaaatgcttaaacgtggccagttgctgaagttcatcaaccaactgcccccgtgcctggtcggtatggaggcatgcgcaggcgcgcattactgggggcgtcaactgcgtgcgctggggcaccaggtcaaactgattccaccccattttgtgacaccgctggttcagggtaacaagaatgacttcaacgacggcttggcgattgtggaagcgttagggcggccgaggatacattttgttgagatcaagacgatagaacaacaggacatgcaggccctgtatcggatgcggcaacgctgtctgaaggagagaacagcgctatgtaaccaggcccgcggcttgctcgcggaatacggcatcgttttaccgaaagggattagttttattcgttcaaggttgccgaccattctggaggacgcagcaaacgggctgagcgtacttttccgacgactgctggcgcacagttatcagcagttgaaggagttagacgcccatatcgatagctacaccctggagttgaaggtgttgagccagcaggatgaagcctgccaacggttgcagacgataccggggttcggccccattgtttcgagtgttttccgcagcgtcgtaggcaatggtgccgccttcagacggggacgtgacgtatcggcatcgctggggctggtacccaagcagcacagcagtggagggaaagccgttctgcgaggcatcagcaaacgaggggactgttatttgcgtggcttactgatccatggtgcgcgagcggtgatgaatcaatcggccagaaaacaggatccactcagtcactggatcaatcggctcaaggctgaaagaggcgtcaatcgcgccgttgtggccctggccaacaagatggcccgcatgggatgggctgtgttaagcacaggcactgtttacacgcaggcatagcgctggacagcgctggcagagtttaaccagaggtaccttgccgaggattgcgaaggttttgagttaacgatgacataacaggtcagaccgacgtatcgaaaacctgactaacccggaggctgcaaggccgctccgccgataaggacgatacgtgcgaatctcattgaggccagaggcagctcctgagccgcctcaccaacaggccgaatatacggacgcgatcctgtccctggcatcaagcttcaaaaccttgcaatacgggaggagaccatata

SEQ ID NO: 1899 - DNA, 1355 bp, unidentified
  source 1..1355: mol_type = unassigned DNA; note = element_2938f5e
  misc_feature 1..2: note = core
  misc_feature 3..75: note = LE
  misc_feature 76..1110: note = CDS
  misc_feature 1111..1355: note = RE
  misc_feature 1117..1351: note = bridgeRNA
ttaatgagatggtcagcctgattcagcctcgtaggcttacgcttacgaggctgtttctttttcaggagacctttcatgacgacgatttcgctggtaggtattgatcttggcaaacgtacatttcatattcatgcccaagaccggcacggcaatgaggtattacgtcggcagctgaaccgaatgcaactggtgcgttggttggcgaatctgccgccatgcacggtggcgttcgagtcatgctgtggagcacactggatcggctggaagctgcgcgagtttggccacaccccgaggatgatcgatccgcgtcgggtgcggcctttcgtgacaggcaacaagcacgactttgccgacgcacaggcgatctgcgaggctgcgcgccgacccatgattcgttctatcgagccgaagacgccggaagaactggcgttggcgagccttcatcgcatccgcgatgcccgagtggctgagcgcacggcctgcatcaaccagacccacgcattcctgctcgaattcggcatgggcatggcaggcagcaaggccatgatgggcgctttgcccgacatagtcgaagatgccggcaacctcctgccgagcaccagccggcagatgttgatcgcgctctacgagcactatcgctatctgtgtgaccgaatcaaggcagcggacatcttgattcaggctcggctgaaggatgacgacctggcggttcgtctgcaagaagtgcccggtatcgggcccattaccgccagcgccatctgtgctgaagccacgcaggcccggcaatgcgccagtagccgcgactttgccgcctccattggcctgacgccccgccaacactcaactgggggcaggtcatcgatgctgggcatcaccaagcgcggcgatggaaatctgcgccgattactggtgcagtgcgccagagtcctgctgatgcgcaaagagcaacgcgaggacgcgatgatccagtgggcgcgtcgtttaagtagccgtcgccacaccaacgtcgtggcctgcgccctggcggccaaactcgcgcgtatcctctgggccatcctggtacgtggccagcgttatcagcctcaccccgtggcggcaacggtgggctgatctgaaccattcctatctgccttgcgacgacgaccgatgacggcaacagcccatgtcctgagcgacaccctgaccaaacacttagcggcaaacgctgggggttttttgaggacgctcgggagcgactctcatcaaggagcgggactgacctccaaatccagtcccagcacagactccggatacatttgcgcaggctctcttgccacatcaaagctcgacgttgcaaaactcaggctgaccataca

SEQ ID NO: 1900 - DNA, 1362 bp, unidentified
  source 1..1362: mol_type = unassigned DNA; note = element_2939bf6
  misc_feature 1..2: note = core
  misc_feature 3..88: note = LE
  misc_feature 89..1111: note = CDS
  misc_feature 1112..1362: note = RE
  misc_feature 1107..1351: note = bridgeRNA
tgatggtgtggacggccccggctctacggcatcgcaatgtgccaatgtggtcgtgggtaatgaccgcatgatgagggagccgtccaccatggaagtttcgacgattgggctggatatcgccaagcaggtttttcaggttcacggggtcgacgcgaggggcgtgatggttgttgggcggcgacttcgtcggggctcggtcttgagctttttctcggggttgccagcgacgctgatcgcgctggaagcctgttccacggctcattactgggcgagagagcttgtcgctttgggtcacgaggtccgcctggtgccgccgcgcgacgtgaaggcctatgtgagagggaacaagacggacgcggcggatgcggcggcgctgtgcgaggcggtgcgccgtgtcggggtgtcggttgttccgatcaagagcgcggcccagcaggcggtgctcgtgctgcatcgcgcgcgcgagcttgtggtgcgccagcgtacgatggcggcgaacgcgctcaggggccatctggccgagttcgggatcgtggcggcgcaggggcgggcaggactgcaccagctgatggcggggctgggcaggctgagcttgcccgaggaagcccgcttcgcgctcgagcttgtcgcggcgcaatggcgcgcgttggatgagaagatcgtggcgctggagcggcgcatcgtggcttggcacaagggcaacgagccgagccggcgcctggccggcattcccggtgtcgggccgatcacggccacggcgctcgtggccagcgtcggcgatccgaaggccttcaagaccggccgacacttcgccgcctggctcgggctcaccccgcgtgaatggtcgagcgggctgaaacggcgccggggcggcatcagcaagcgcggcgatggctatctgcgccggctcctgatcctcggcgcccatgccgtgatgcgccagctcggccggcgcgccatgccggggccgcgcgatccctggctgagcgcgctcagacaacgtcggccgagtgccgtggtcgcggttgcgctcgccaacaagatggcccgcatcgcctgggtggtcatggcacgcggcgagacctatcaccacagaccggtggcggcctgaagcgccaacggtctcgacgcttgcgagggcaacagcagcatgatggtagccacatcgctcgcaccgagcagcaggccaaacccgacccgaacaatgcgccttcgagcgcgccgacttgattgggacctgctgcgcggcctccatcatggccagcggctcaaaacgccgcgcaaacaggccggatacatgagcgcaagcgaccgcagcgctaccgtgttgcaaatagcccttgcaccggggccgtccaaaca

SEQ ID NO: 1901 - DNA, 1498 bp, unidentified
  source 1..1498: mol_type = unassigned DNA; note = element_29469e9
  misc_feature 1..2: note = core
  misc_feature 3..251: note = LE
  misc_feature 252..1478: note = CDS
  misc_feature 1479..1498: note = RE
  misc_feature 7..243: note = bridgeRNA
ctaataagaaccaccgggtcagcgatgagtcagactcggtccggtagccgccggcaggtgagcactccatgacccaggacgcttgcagtcctatgtcaagaccgtgcccctgccggtggtcgggagcctagaccgctgatgggatgtcgtgtccgccgatagtcggcgtgagcacttgtttattaggtcgctggtggttctcccgcaggctatgtgtggcaacactgtccactatggattggagtcagagggtgctgttcgtcggggatgactgggccgaggagcatcacgacgtcgagctgcagagcgaggacggccaggtgctggccagggcgaaactgcccgagggcgtcgcgggcatcgcccggctacacgcgatgatcggccggtacctcggcgacgaggacgacgacgcgactgtggtggtcgggatcgagaccgagcgtggcccgtgggtgcaggcgctgatcgcggccggctaccagatctacgcgatcaacccgctgcaggtggcccgctaccgcgaacgtcacagcgtgtccggggccaagagcgacaccggcgacgcgcacgtcctggctgacatggtgcgcaccgaccgccaccagctacgtccggtcgctggcgacagcgtgcaggccgaggcggtcaaggtccttacccgggcgcacaagacgctgatctgggaacgcacccgccacctgctgcggctgcgtcacgcgctgcgcgagttcttcccggccgcgttggtcgccttcgacgacctcaccgccaccgacaccctcgagttgctgcgcgccgcacccgacccagcctcggcggctgccttgaccatcgagcagattaccgccgcgctcacccgggcacgccgccgcaacaggcccgcgaaggccgaggcaatcgccgctgcgctgcgcgccgagtacctgggccagcctgcggtcgtgaccgcggcctacgcgagcaccgtccgcgcccagacagcgatcctcaccgtcctgggcaccgagatcaaagcgatggaagagcaggtcgaggcccattttggccagcacccggacgttgaggtctacctcagccagcccggtctgggcgccgtgctcggcgcccgggtgctcgccgagttcggcgacgacaacaatcgctacgccgatgccagagcccgcaagaactacgccgggaccagcccgatcacccgccaatccggcaagcgcaagaccgtcctggcccgctacgtccacaacgaccgcctcgtcgatgccctaggccttcaggcattcgccgcgctgcgcgcctcaccgggcgcccgcgcctactacgaccaactccgcggccgcggcatcggtcaccgcgccgcgctgcgccagctcggcaaccgcctcgtcggcatcctgcacggctgcctcaagaccggtaccaactacgacgagggcaaggcctggacgcccacacaacaagatcaacgaattgctgcttgacaaagaacgtcatgggatgt

SEQ ID NO: 1902 - DNA, 1388 bp, unidentified
  source 1..1388: mol_type = unassigned DNA; note = element_295053a
  misc_feature 1..3: note = core
  misc_feature 4..87: note = LE
  misc_feature 88..1116: note = CDS
  misc_feature 1117..1388: note = RE
  misc_feature 1087..1375: note = bridgeRNA
agatgggatggttgccgccctccccagacggcatcgcagtgtgccaaaaaggtggtctgagaaccacgaagcggagaggacggcgagatggaagatacgattattggggtggatctggcaaaacgtgttttccagctccacggggcttcaaagagcgggcaggtcaagttccgcaagaagctgtcgcgcgagcagtttcgtgctttcatggcccaacatccggcctgccatgtagtatttgaggcctgtggcagcgccagctactgggcgcaagaggtgcaggcgatggggcacgaggtcagactgatcgcaccgcagtatgtccggccgttcgtcaagcgccagaagaatgacgtggccgatgcggaagccattgtgattgccgcgcgccagcccgagatgcgctttgtcgcgccgaaatcgatcaaacaacagtcgaaggcggtcttgttccgaagccgccagcgcctcgtgcggcagcgaaccgagctggtgaatgctctgcgagccgtcctttacgaatgtggtcatgtttttccggcagggatcatcaacctgaagcggatcgagggcctgttgcaagatcctgaggtcgacctgccggcattgatcgtcgaagagtgcctggatctactggcgcagatttcagagaagacaaaccgaatagtcgccaagagcaagaaggtgaagttgctagcggccgagacggacacggcgcagcgccttcagaccatgcccggtgtcgggccgatgacagcactggctgttgaggccttcacacccgacatggcacatttcaaatgtggtcggaatttcgccgcttggcttggacttgctcccaggcaatattcttccggtggcaaggaacgccttgggcgggtgtcgaaagctggccagagcgatatcaggcgtttgctgataattggggcaatgtcgcggttgaactggatcgggcgtcgcacaatcccggaaggttcctggctcgcgaggatgttgtcccgcaagccgaagatcgtggtcgcgatagctttggccaacaagatggcgcggcagatctgggccatgctgacgaagaacgaagatttcagggatccggcgctggcgaccgcggcatgatcatcatgccataggcaaccaacgccggtgtcgaggggagtgagagagcgaagacctgaatgggcgcaatgatcgaacagatccggactaggaaaaccacccatggtctccgagcatcaagctcgagattgagatttggacccagcccgctgatcaccatcctggcccgcggcatctggaagcgccgcatatcaaggcctgacagaagaccgcattcgatcacacggccaaaaggtcagaaaatctcttgctcaacgggcggcaaccacaga

SEQ ID NO: 1903 - DNA, 1499 bp, unidentified
  source 1..1499: mol_type = unassigned DNA; note = element_29654ac
  misc_feature 1..2: note = core
  misc_feature 3..255: note = LE
  misc_feature 256..1479: note = CDS
  misc_feature 1480..1499: note = RE
  misc_feature 6..238: note = bridgeRNA
ctaatgggagataccgggtcggccacgcggcagactcggatccggtagcggccggtgagcgagcactcccggagcctgggcggactgtccagcctttggcagagaccgtgccctcgcaggccgtgaggagagcagtaccactgaaggggtgtcgtgcccgccgctggcgtgagcactgttccattaggccgttggtgctctcctccccgctactggggcattgaccggaggtgacggatcgaaggggaggctggtgtgctgttcgtcggcgatgactgggctgaggatcatcacgacatcgaggtgcaggatggggcgggccgggtgctggcccgggcgcggctgccggaggggatcgctgggatcacccggctgcacgcgctgatcggccagttcgccggcccggataccgagccgggtgaggtggcggtcggcatcgagaccgaccggggcctgtgggtgatggcactgcgcgcggcgggctatgccgtctatgcgattaacccgcggcaggtggcccggtaccgggaacggcacggcacgtcgggggctaagagcgataaggctgatgcgcacgccatggccggcatggtgcgcgccgactcccgccagctgcggccggtggccggggacagcgccggggcccaggccatcaaggtagctgcccgcgcccatcagacgctgatctgggagcggacccggcaggtgcagcggatgcggcaccagctgcgggagtacttccccgccgcgctggcggccttcgaggagctggatgcgcctgatgcgctggagctgctggccagggctcccgatccggcccgggccgcccggctgacccgggcgcaggtagccgctgcgctcaagcgtgccgggcgccgcgacatcgccggtaagacggacaccatcctggctgcgctgcgcggcgagcagctggtccaggcggagccggtcgccgccgcctatgctgccgccatgagctccctgacggtgatcatcgccgccctcaatggggagatcgccaagatggaacggcaggtgacggcgtgctttcgcggtcacccggatgccgccatctacctgagccagcccggtaccggcgagatcctcggtgcccggcagctgggcgagttcggtgatgacccgcaccgctacgccagcgccaaggcgcgcaagaactacgccgccagcagcccggtcacccgccagtccggcaagaagaagatcgtgatggcccggttcatccgcaacgacaggctcgccgacgccctgcaccggcaggcgcaaagcgccctgcgagcctcacccggcgcccgcgcctgctatgacgagcaacgcgaccgcggcctggaccacaacgccgcactccgtgccctgtctaatcggctagtcggcctcttgcacggctgcctgaagacccgcaccctctacgacgaggcaaccgcctggtcacaccgcgcgaacatcgccagagcctcttgacaatcaaagtccagggatgt

SEQ ID NO: 1904 - DNA, 1535 bp, unidentified
  source 1..1535: mol_type = unassigned DNA; note = element_296a945
  misc_feature 1: note = core
  misc_feature 2..262: note = LE
  misc_feature 263..1429: note = CDS
  misc_feature 1430..1535: note = RE
  misc_feature 5..253: note = bridgeRNA
cattacagtttgagttgtccgaaagggcggctcttttccgttgcacggctatacgattgagccgtaccggtggtcgctggccgaccgccccggacggccgtcagcccctgccccgtagagggcccgggacgtgttgccgccggggcgggaggggccgcggggaacgactgatagagatgtgccgggcccggaccgggccacggccgggtaatgtgggtgtcgcttccgcggctaacggccggctcaagggagaggatacaccatgcctgcagcagagacgcccgtggcctacctggggatcgacgtcgggaagagctcgcacagcgcgtgcgcgctcgatgcgggaggaggcgtcgccttcagggccgagctggcaaacaggcccgacgacatcgaccggctgctcgagcgggccggctccggcgcgctggtcgtcgtcgaccagaagcgaaacatcggcgcgctggtcctcgcgcgcgcccatgcgcacgggaacccctgcgcctacctgcccggatatgccgagaagcaggcccgcgggatgttccccggcatcgcgaagaccgacgccatcgacgccgaggtgatcgcgcgcaccgcgctcggcgtgccccgcgccctcaggccggcgcccgaggagcccgagggggccgcctcgctgcggatcctgtcgtcgcagcgcgagttcgcgtcgtccgccaggacccgcgcgaagaacaggctgcgcgcgaccctgctcgaggccgaccccgcgctcgagggcgcggtcgacccgtcgagccgctggcaggtgtcgatgctggccgagttcggcggggccgccgggtgctcggccgccggctggcgcagtttctcgaacgcagccaggcgcgcgggcgcccccgcggcgggggccaggaggctctgggaggcgctgctggcctcgtcgcgctcgggaaggcggctcccggccggcgaggacgtcgcggtccggatgctcgcccgggagatagcctccctcgacgccgacatcgaggagctcgactcgctcgtggccgactcactggcgggcgacgaggtctacgagtgcctcctcacggtgcccgggatcggccccaagaccgccgcggcgctggtgacgtcgatcgacatatccgccttcagggggcacgacgagctcgcgagctattgcggcgtggcgccgtcagacaggcgctccgggagcagcatcaggtcgacgtcgcctcagcacggcgggaacaggcagctcaagaacctgctcatattcagctgcaactccctcatcggcacggacaacaggttcgggaggtactacggggagtgcagggcgagggggatgaggcacagcaaggcgctgaaggcggtcgcgaggaagaggctcaaggtcatatatgcgatcatgcgcgacgccgtcccgtacgcggcctagcgggcggcgggatcaaccgaagaggaaaccaagcgggggcgccaggcgcccggatgcgtcatgccgaaatggcgcgaagcacgcggttgacaaaactatagagaca

SEQ ID NO: 1905 - DNA, 1340 bp, unidentified
  source 1..1340: mol_type = unassigned DNA; note = element_2978ca7
  misc_feature 1..2: note = core
  misc_feature 3..82: note = LE
  misc_feature 83..1120: note = CDS
  misc_feature 1121..1340: note = RE
  misc_feature 1095..1324: note = bridgeRNA
agataattggactcctccacctctactacggagtggggtaatgtaattgttgtcatacaattcatattaaggagagtctgtcgtgaataatactatcgttggtgttgatttagcaaaagatgtcattcaggtgtgcgtttacgcgaacaagaaagtggaatcaaacaccgaaatggcgcgacatgagtttcatgaatggcttctgaatacgtctaacacaacactggtttttgaagcctgtggcacatcgaattactggaaacagagagctgtacaggctgggcacgtggctcatctaatatctgctgagttagtttccacaatcagacagaaccagaaaactgacaaaaacgatgcattggcaattgtccaggcatcactcttaccggatattagtttcatcaaaggcaagacgattgagcaacaacaattgcaatccatcttgcgtcttagagagcttgctgtaaggcagaagacagcctctggcaatcaactcaaagcactattgttagagtttagtattcgcgtcagctcaagaaatggtggtctaggaggtgtgattgaatctgtgctggaggatgcgcaaaatgaactctctatgccatttagagcggcattgaatgcaggatggcaacaccatttggagcttataaggtctatcgctacttatgatcgctgcttagaggaattggttgaacagcacgaggattgcaaacggcttctcaagctcgagggagtgggcgtgattaacgccgtcaatctgtacgtagcactgggctgttctgatctgggtagttttcttaagggaaaagatgcgtcagcgtgtattggcttgactcccattcaacactcatcaggtggcaagataaaacatggttcgatcggtaggtatgtgaaaaacagcttgctacgtagccaacttatcaccggagccatggcggccgttgctcaagtctgtaaacgaacggctgtcacccaaaaggatctttggatacaacagttggttgccagacgaggaaagaaggttgcggctgttgcgttagccaacaaaaccgtgagaacggcatttgcgatgctcaccgaaggtactgaatacaaggcggagcttattgctgcctgaaaagcgttccaacaataaagatgcagcaacgaagataaaaatcagcgtgttaaatcagttagcgaaaaagagcctagagctcgttgaacagatttgaaaacacgtccgcgtaaatatcaaagagcctgagttcgcaactcaatcgagagctcgtacataagtacgcatctatttcttcgatttttgcaattttgttgttgacacaggaggagtccacata

SEQ ID NO: 1906 - DNA, 1354 bp, unidentified
  source 1..1354: mol_type = unassigned DNA; note = element_297a0f5
  misc_feature 1..2: note = core
  misc_feature 3..74: note = LE
  misc_feature 75..1100: note = CDS
  misc_feature 1101..1354: note = RE
  misc_feature 1124..1351: note = bridgeRNA
ttaatgagatggtccccctccaccccgcaaggtattaatcttgtggggtgtgttctttctggacggaggccatcatgcaagacgtcacgctcatcggtatcgatcttggcaagcacggatttcacctgcatggccaagataagcacggcaaatcgcaactgcgccggaagttcgaccgcaagcacctgatcacctatctcgccaatttacagccctgcacgatcgtcatggaagcctgcgccggcgcccactggatggcgcggcagttgtcggcactcggccatgaggccaaactcatctctccccagtttgtcaggcccttcgtcaagggcaacaagaacgacttcatcgatgccgaagcgatctgcgaggcagcgagtcggccatcgatgcgtttcgtgacgcccaagactgaagctcagcagtgcctgtcggccttgcaccgaatgcgtgaatccttgatgcgcgaccgggtcaaggcaatcaaccaggtccacggctttctgcttgagttcggtatcggccttccgaagggtccggcgatcatcaagcgcctgccttccgtgctggcagagcacgctctgccagcacggctggtgagcctgattgagcggttgcgtgctcacatcaagtatctcgacgagcagctcgacgacatcgaaaaggaactgggcactcagctccaggaagacgacctgggccagcgcttgatggccattcccggtgtcggaccaatcaccgccagcgtcttgtcgaccgagatgggagatggcaagcagtatggttgcggacgtgatttcgccgcctcgctcggcctggtgccgcagcagcacagtaccggtggacgagcgaacctgctaggtatcagcaaacgcggcgacaagaacatccggcgcctgctggtacagtgcgcgcgatcttacatgcagcacttggaccggcacaccgaccgactggcccaatgggttcgatcaatgctgatccgacggcactcaaatgttgtggcctgtgctctggcgaacaagctggcccgtaccgcgtgggccatggcagcgcaccacaccgaatacaaaatgcaagaggccgccacatcgctgtgacggcctcccgagcttgctgtacccaaccacctacctggttttgcgacgctgatactggatgacgtgaacggcacaccgacctgacggataacctggcataaaaatcggctcatgaagccgcgggcttttttaggaccgtcaggtgcgaactctcatcgtggcgcggagcaagtcttcaatacgacgccggatagatttgagcaagccacaccatcatacaaaaatcagcttgcaaacaggagggggaccataga

SEQ ID NO: 1907 - DNA, 1310 bp, unidentified
  source 1..1310: mol_type = unassigned DNA; note = element_297c69d
  misc_feature 1: note = core
  misc_feature 2..67: note = LE
  misc_feature 68..1084: note = CDS
  misc_feature 1085..1310: note = RE
  misc_feature 1086..1304: note = bridgeRNA
taattagatggtacgccccacacccaagcacctagactttaggtctgtctactaaaggagtgtcattatggctatcacaacgactatcggtattgatctaggcaaatcctcatttcatgtaattgggcatgattcatctggcaaagaaacatttcgtaagaagttgagtagaacgaaattacttcaaatgctttcggtacatgaaccagtgaacgtagcaatggagtcttgtggaggttctcattggttagcaaggaagtgtaaatcttatggtcatgtagttaagttgattcctgcacaatatgttaaaccttatgtgaagaccaataagaatgattttatagatgctgacgcgattgctgaagcatctactaggccttcaatgagattcacgtctcctaaagctgaagaagcgcaagtggcttcgatgattaggaaaattaggtcttcgtttatgaaagaaagaacagcctgtatgaacagggttggggctatgcttttggagtttggcctaagtttacctcgtggccatagccacctaaaaaaaatatttgcgtggatagaacttcaaaatgaggttttaccaaactccttgatttgtgaacttaaaactcaggttgaatactatcaataccttagcgagaagattgaatcccaagagaaaaagctacaactgattaataaagagaatatccgttatcacctgttacagactatccctggagtaggacctttgacagctgcatgctgtgtagccaatgttgctgacccaaaggacttttctaatggacggaactttgctgcgtggattggcttagttcctcatcaacattctacaggtggtaaaagtcgactgttaggtatatcaaaacgcggaaatagtgatctaagagagctatttatccatgctgctcgatcaatattaaaaagaacagaaaccgctgaaaagcattttggggagtgggtagtaaatctaaaacgcacaaaaccatttaatgtggttgttgttgctctagctaataagctcgcaagaatcgcgtggtctgttatggccacaaataaagaattctcactaaaaatttaaaccagatttgcaatgatgataagtgatgacaaaacggttagaccaccagattgaaacctgttgagtgaacaagcaaattaaaatgctttgatggttatgaggacaatctggcgcggatctcatcgtagagcgaagttgcgtagtgacttcataaagactctgaatacattggcgcaaatcagctcgttgttatttatttacttgcaaatgcggggcgtaccataca

SEQ ID NO: 1908 - DNA, 1400 bp, unidentified
  source 1..1400: mol_type = unassigned DNA; note = element_2980967
  misc_feature 1..2: note = core
  misc_feature 3..89: note = LE
  misc_feature 90..1121: note = CDS
  misc_feature 1122..1400: note = RE
  misc_feature 1092..1387: note = bridgeRNA
agatggggtggttgccgccctgacctgacggcatcgcaatgtgccaaagtggtggtgttcacagccactgagtagaaaggacggcaaccatggcgaaagatatgatgatcggggtggatctggcaaagaactcttttcaggtccacggcgcgacgatgaacggtcaagtgaagttccgccgaaaactgtcgcgcgcgcagtttctttccttcatggccgcgcagcccccggccatcgtggtgatggaggcctgtcccggtgcccatcactgggcccgcgagcttttggcgctcggccatgaagccaagctgatcgcgccgatctacgtcaaacccttcgtgaagcgtcagaagaatgacgcggccgacgccgaagccatcgtggaggcggcacagcgaccaggcaagcgctttgtcgaaccgaaggggcctgaacaacaggcccgggcgcttctgttccgcacgagggagcaactggtccatcagcgcaccgaactggtcaatgccctgcggtcttacctctacgaattcggctatgcccttccgatcggaatcgcgagtctgcggcgtatcgaggcgatcattgaggatgcggcgaccgatcttcccgagatggtccgcgaaatctgccgtgacctgcgccagcagatcgccgagaagacggtgcggatcgatgcgctgatgaagcggatcaagtccacggcagaagacaccgagacggcacgtcgtctccagaccatgcccggtgtcggccccgttaccagcctggccgttgaagccttcgcgccaccgcttgagaccttccgctgcgggcgcgactttgccgcctggctcgggctggtccctcgccagaactccacagggggtaagcagcgcctcgggcgtgtgaccaaggctggtcaggccgacatccggcgcctgctcatcgtcggtgcgatgtcccgcctgacatggctcggtcgaaagtcgatccgggaagggtcgtggttggcacgcatgcttgaacgcaagccaaagatgctggtggccatcgcgcttgccaacaaaatggcccgcgcgatctgggccatgctgacgcgcaatgaagattacagggatccgctgccggtcgctgccacctgaatttaccaggcgaacagcgaaacggtatcggtgtcagggaggtgcgagaaggcgacgaccagaatgggcaaaatgatcgatgagatctgggcggggaaaaccagcgatccgctgagaacatcttgagttcttaggccagatttggaccctgtccgctgatcaccataccggcccgcggcagactgaaaagccgcagcgatgaggcctgacagaagaccgcgctcgatcacctgcccagctgttcaaaatcctccttgcatctcgggcggcaaccacaga

SEQ ID NO: 1909 - DNA, 1499 bp, unidentified
  source 1..1499: mol_type = unassigned DNA; note = element_298794c
  misc_feature 1..2: note = core
  misc_feature 3..243: note = LE
  misc_feature 244..1479: note = CDS
  misc_feature 1480..1499: note = RE
  misc_feature 7..240: note = bridgeRNA
ctaatgagtgttagcgggttcgccgtccggcagactcgttagctggtggccgccggcaggtgagcactgttgtccgccggacctggagtcctgtgaaaagaccgtgcccctgccggtgaccgggagagtcgatcgctgctgggatgtcgtgcgcgccaggtggcgtgagcactgtttcattagggcgctgattgttctcccgcaggctgctgaccggatccggcatttcaggcgggagaattgatgcgcttgttcgtaggcgatgactgggctgaggatcatcatgacgtggagctgatggacgagcggggccgggtgctggcccgcgggcggctgccggagggggtggccgggatggcccggctgcatgagctgatcggggggcagctgggcgagggtgccgatgatgcggaggtggtgatcgggaccgagaccgaccgcgggccgtgggtcggcgcgctggtcgcggccgggtacacggtctacggggtgaacccgctgcaggcctcgaggtaccgggaacgtcacggggtgtccggcgccaagagcgaccgcggtgacgcgcacatgctgaccgacatggtgcgcaccgattcccaccagctgcgcgccgtggcgggtgacagcccgggcgcggaggcggtcaaggtggtggcgcggactcataagacgctgatctgggagcggaaccggcaggtccagcggctgcgccaccagctgcgggagtacttccccgccgcgctggcggccttcgatgacctggacgcacccgatgcgctggagctgctgggcaaggcaccggacccggtgaaagccgcgaagctgacccgggcgcaggtatccgccgccctcaagcgcgcccgccgccgggacatccccggcaaggccaccgtcatcctgaccgcgctgcgcagcgcccagctgggccagccgccggccgtcaccagcgcctacgcggccacggtccgctccctggtcgcggtgatcaccgtcctgaacgagcaggtcaaaaccctgcaggggcaggtggaggcggattttggccgccacccggacactgagatctaccggtcccagcccggcctgggacccatcctcggcgcccgggtgctcggcgaattcggcgacgccccggaccgctacgccagcggcaaggcccgcaagaactacggcggcaccagccccatcacccgtgcctccggaaagaggaagatcgtcgccgcccggttcatccgcaacaaccggctctccgacgcgctcatggcccaggccttcgccgccctcggcgcctcgcccggcgcccgcgccctctacgacgccgagcgcgcccgcggcaccggccacaaccctgccctgcgcaaagtcgctaaccgcctcgtcggcatcctgcacggatgcctcaagacccgcaccctctacgacgaggcaaccgcctggccgcaccgggaaaagacccctcaatctgacatcgccgcttgacacctaagcacctgggatgt

SEQ ID NO: 1910 - DNA, 1169 bp, unidentified
  source 1..1169: mol_type = unassigned DNA; note = element_298b936
  misc_feature 1..2: note = core
  misc_feature 3..225: note = LE
  misc_feature 226..1155: note = CDS
  misc_feature 1156..1169: note = RE
  misc_feature 31..230: note = bridgeRNA
cttgtatcttggaattgccctccttgtgatagaacaagggtgggtgtgagatccggtaaagcggcaggtcgtgatgatcaatcaagaccgttcgtaagttcgatccacgccctgcccttggcgctaagtaaaactcgaacagttactggagcgaccaagccggtccaacccaagggcggtgccggcctggccagctcgcatttacaagcaggagttatttaacccatgaagcaaagtgttgtctatatcgggatcgacgtggccaaagcgcatctggatgtggcttgggcgggaacattccgtcgtttgcctaacgagcggagcggccacgccgtgttagtgcgctggattaaacaaagtgctacaccagtgcaattgatctgcgaagccagtggcggctatgagcaagggttgctcgagagcctggaaaagagcgaagtaaaagtcactctggtgcaggccgtgcgtgttcgtcaatatgcgcgggcggctggcatcctggccaagaccgaccagatggatgcaaaagtgcttgcggcttttggcagcgcgatgcaaccgccgccaaccccgccactctgcgctgagcaaaagcgtctgcgtcagtatgaagcccagcgccggcatctgagcagggtgttggtggcagaacaaaatcgcctcgcgcaactcagctgcgccgagctgcgcaatttaagtcgcggtttaattagcaaaatcaaaaaacaaattgagacgatcgatacccgcattggcgatttaatcgcgcaggaccaaaccctccgtgagaaagcacaaaagctcaccgccatccgcggcgtaggtgtacgcacggctgcgctcttgctcgcgcaaatgcctgagcttggccaactcaatcgtcgccaagccgccgcactggccggcttggcgccctttaaccacgacagcggatcaatctgcggtaaacgcgccatcttcggtggacgccgggcactgcgcagcgggctttacatggctgcactctcggccgctcgcttcaatccgatcctgtcgcgtttttaccgacgtctgcgcaccaaaggtaaaccgcacaaactcgctctcacagccgtgatgcgaaaactacttctcgctctcaatcagacactcaaaccaatccctagcctcgcttgaaaacaacacagtta

SEQ ID NO: 1911 - DNA, 1493 bp, unidentified
  source 1..1493: mol_type = unassigned DNA; note = element_29902aa
  misc_feature 1..2: note = core
  misc_feature 3..231: note = LE
  misc_feature 232..1446: note = CDS
  misc_feature 1447..1493: note = RE
  misc_feature 12..198: note = bridgeRNA
tccatacctttcttcgtgggcttgaactggtcattcgtaggatcggtgggcccagggacctctggtatggctcgcatcgtgacgccgctgctgtggcttaggaggattggccgccggaggtcccgcgacgactcggccactcattgggatacgcgaactgcatcgcttcgtatggacacgtcggcgaggtcgtctgctgggtgagagaacggaacaacttcggaggtgaccgtgcccgaactgtgggccgggacggacgcgggcaaggccgagcaccactgcacggtcatcgacaaggacgccacggtgtacctcacccgccgggtgcccaacaacgagaacgagctgctcaagctcctggacgacatcctgggcctggccgagggcgagccggtgacgtgggcggtcgatttgaacgccggcggcgccgcgctgtggatcgccctgctggtcagccacgggcagaggctgctctacatccctggccgcagcgtccaccatgcttccggcgtttaccggggaagcggaaagacggatgccaaggatgctttcgtcatcgccgaccaggccaggatgcgccgcgacctgcagcccgtgcaggacatgaacgagatcgcggtcgatctgaagatcctcaccggccggcgcatggacctggcggccgaccgtacccgcgcgatcaaccggctccgcgcgcagttgctggagtacttccccgcgctggagcgggccttcgactacagcacgtccaagaccgcactcgtcttgctcacgaagtaccagacccccgctgccatgcggcgcatcggccgggcccggctggcgacctggctgaagaaccacggggtgcgcacgctcaccatcgcgaagaacgccgcggatacggcggtcaccgcgggcgaggcccagcacacagcggtgcctggcgagaagaccgcggccaagatggtccacaccctcgcgcgggaggtgatggccctcgaccaggagattgcggagcttgaagccctgatcgagggccggtttcgcgagcatcccgacgcggacgtgatcacgtccatgcccggcatcggcgacacgctcggcgcggagttcatcgccgcaaccgggggcgacatgagcgtcttcggcagccccgaccggctcgccggtgtcgccggactcgcccccgtcccccgtgactcgggcaaggtgtccggcaacctgcgcagaccccgccgttacagtcggcggctgttgcgcatgttctacctctccgcacagaccgccgccgtccactgccccgaatcccagcggttctaccagcgcaaacgagccgagggaaagaatcacaggcaggccgtcctcgcactcgccagacgtcgtctcaacgtgctctgggccctcatacgcgaccaccgcaccttcgaaagggccacccccaacatcggtgccgtactgccatgacaccgtcacgagacgtcaccactccggcttgacaacgtcattgggaa

SEQ ID NO: 1912 - DNA, 1364 bp, unidentified
  source 1..1364: mol_type = unassigned DNA; note = element_2993537
  misc_feature 1..2: note = core
  misc_feature 3..76: note = LE
  misc_feature 77..1102: note = CDS
  misc_feature 1103..1364: note = RE
  misc_feature 1131..1360: note = bridgeRNA
ttaatgagatggtcaccccggcactctgcgcaggctaggcttgcgcagggtgtttttatctccggagatcatcaccatgagcgaagtggcattagtcggcatcgacatcggcaagcacaccttccacctgcatgctcaggataggtccggccgggaagtgctacgcaagaagtgctcacgacagcaattaatgcgctttttctccaaccatccggtatgcaccgtggtgatggaagcctgcgctggagcgcattacctggcgcgtgaactgaaagctgcggggcacgatgccaagctgatttcccctcagttcgtgcgacctttcgtcaaaagtaacaagaacgattttgtcgacgctcgagcgatctgcgaagccgcttctcggccaacgatgcgtttcgtcgcggccaagactgtggagcagcagacgctttcagtctcacaccggattcgtgaatcgctgatccgcgaccgcaccaagacggtgaaccagatgcatggattcttgctcgagttcggcatcagcctgccgaccgggctggcagtcgtcaaacggctagcctcgatccttgaggaacacgacctgcctgtgcgcctcatcgctttgctgcagcgccagcacgaccatttcgtctatctggaagagcaaatcaaggtgttggacaaggagctggaaagccagctggctgacgatgatctcggaagccgtttgttgagcatcccgtgtgttggcccgatcaccgccagcctgctggccgtacagatgggcgacggtcagcaatacagctgtagtcgggattttgcggcatccgtcggtttggtacccaaacagttcagtaccggcggcaagcccaacctgctaggaatcagcaagcgcggcgacaagaatctacggcgcttgttggtgcaatgcgcccgggtgtacatgctgcgcctggagcaccaaaaaggtcccttggccgaatgggtgaggtcgctgtcaatgcggcgacactccaatgtggtggcctgtgcgttggccaacaaactcgcacgtatcgcgtgggcaatcaccactcggcacacgcaatatgaagcggagccagacgtcaccaacgcctgaccccgcagtacagcaccgttttgcaagtgttttaccaccaggttttgcgatagctgacaacagatgaaataaacggccgatcggcctgacggtgatcctggaagaaaatttggctcacagaagccgctcacttttttaggatcgtcaggtgcgaatactcatcgtggcgcgggattagagcccaatagacgccggatagatttaagcaagccacccatttcatccgttaatcagtattgcaaaaaatggggtgaccatagat

SEQ ID NO: 1913 - DNA, 1359 bp, unidentified
  source 1..1359: mol_type = unassigned DNA; note = element_29a9317
  misc_feature 1: note = core
  misc_feature 2..69: note = LE
  misc_feature 70..1122: note = CDS
  misc_feature 1123..1359: note = RE
  misc_feature 1130..1353: note = bridgeRNA
taatgggatggtccgcctcgtcctcccaccccacataagggagacgaactcaaaaaagggaggatcgtcatgagcgttcgtaacaaaccccgagaagcagccgtattcggcgtcgacattggcaagaacgtgttccacgtcgtcggattggaccctgctggtcatccaatacaaaaggcgactttccggcgtgacactgtcctgcaattcttcgaaggagctacgccgacaatcgttggaatagaggcatgccccggttcacagtggctggcgaggaagcttcaaggctttggccacacagttcgaattgttgctgcaaagtttgtgaagcccttcgtcaaatccaacaaaagtgacatcattgatgccgaagctatagccgaggccgtgacacggccaacaatgcggtttgtcgaggtgcgtacgtctgatcagatcgatgttcaggcactgcatagagtacgggaccgcctcgtggctcagcgcacccgggttatatgccagatgcgcgccttctgcctcgaatacggcattgcgatgcatcagggggcgggtaagttcaaggcggacatgccaagggtcctggaggatgaggacaacgacctgtcggcaccaatgcggcagttgcttatgtctctcttcgaggacattcgctatcttgagcaaagaattgctgaagtgagccgtcagatcgaagcagcggccgacgcggacgataccgcccgtcgcctcatgactgttcccggcatcggggcattgactgctactgggctattggcagcagcgggaacgggtcgccagttcaaaagggctcgcgacatggccgcctggttgggacttgttccgcgagagcattcaactggagggaaaaccacattactgggtatcagcaagcggggcagttcatatctgcgacgattactgatccacggcgcacgaacatgccttctccatcttgatcgaacgagagaccggctcggcgtgtggctggacgggcttcaggccaggatgcacaataacaaggcggcggtcgctcttgctgccaaaattgcacgcgtcgcatgggtgattatgacccgaccgggcgcgatctacaatcgtcaggatccggcaaaaacctgatccatcgacagactgcgaggagcgggatagtgatgacgagacagttgatcagcgcagcgtaagctctgggcaaaaaagcgggcttggcgcccgaaccagttattcgagaacggtgcgcgcggatctcatcatggcctgactgtaacaacagtccactcgcgagaggccggatacatttatgcagactggaaccgtcaggaccatcaaaccccttgcacggacgaggcggaccataca

SEQ ID NO: 1914 - DNA, 1436 bp, unidentified
  source 1..1436: mol_type = unassigned DNA; note = element_29a982c
  misc_feature 1..2: note = core
  misc_feature 3..120: note = LE
  misc_feature 121..1152: note = CDS
  misc_feature 1153..1436: note = RE
  misc_feature 1188..1390: note = bridgeRNA
agatggggtaatcggccggcgagcttgtggatagctgaagattttgggtgctgcgcttcaggctgatggtgaaacgaggtccgtggtaacggcctcaagcatcagaaggagaagcgcagcatggaccattttgctggactggacgtatcggtcaaggagacgagcgtctgcattgtggatggcacgggcaagatcgttcgggaggtgaaggtcgcgagcgaacctgatgctctgctggcggtgctgatcaacccttcctaccgcttcaagcggatcggattggaagctgggccgctggcgcaatggctttacagcgcgctcgctgaagcaggcttacctgtgatctgtgttgagacgcggcacatgcgagcggtattgaaggcgcagatcaacaagacagaccgcaacgatgcccgtggcatcgcgcagatgatgcgggcggggctttaccgtccagtacatgtgaagacgctacgcagtcagaaactgcgaatgctgctgacccatcgcaagctgctgcaatcgaaggccatcgccatcgagaacgacctgcgcggtactttacgcaacttcggcctcaaggtcgggatggtcgggatggcgagattcgagacacgcatcaaggagctggtcgagaacttgcccgacctggctgtcctggttgaatcactattggtcgtccggcgagtgcttcgcgagcagctcgccatcctgcaccgccgcttgctggcaatcgtgcgggaagatgacgtctgtcggcgcctgatgacaatccccggtgttgggcctgtggtaacgctgacctatcgcgtcaccgtcgacgtgcccgcccgctttcgcaactccaaggcagttggtgccgtgtttggactgacctgctccaagtatcaatcgggcgagatcaaccgaaccggcgcgatatcaaagtgtggagatgagatgatgagaatgatgctctacgaagcggcccaggtaatgctgacccgcaccaataagtggtcctggctcaaggcctgggcgatgaagatcgccagacaccgcggcatgaagaaggcgatcgtagctctggcgcgccggctggccgtgatcatgcaccgcatctgggtcgacggcaccgagttccagtggaccagggaagtcgcggcggcatgagagccttgcaggatcaaatactataggagaacactcgagctccacccagcggtggaatgatgtccctcgcgggacgatggatgaggtgagttcgtgagtctgcttggacctgccgttacactgacggtaaggtcgcccaaaagattgttccgcctcgttctcgaatcccatgatggaagggccctagtgccgattccgaagagaagcacgagcccgtgagcggacatcgacaccggagtggtggatagtctgaaggcgcttgaccccaaacggccgattagaga

SEQ ID NO: 1915 - DNA, 1365 bp, unidentified
  source 1..1365: mol_type = unassigned DNA; note = element_29adf15
  misc_feature 1..3: note = core
  misc_feature 4..76: note = LE
  misc_feature 77..1102: note = CDS
  misc_feature 1103..1365: note = RE
  misc_feature 1078..1352: note = bridgeRNA
tgatggggtggacgccccccgacggcatcatgtgccaaagtggaggtgttgatgacaccacttgaaggaggcgtccgtgtcggaggttagcacgatcggtttggacattgcgaagcacgtattccaggggcatggcgcagacgcgtcgggacgcgtcgtgttccgcaagaagatcacccggagcaaactgatggagttctttgcatcccagccccggtgcgtggtggcgctggaagcctgcggaggcgcccatcactggggtcgggagattggcaagctgggccacacggtccggctgatcccgcccgcctacgttaagccgtttgtgaaacgccagaagaacgacgcggccgatgccgaggcgatctgcgaagcggcgcaacggccaagcatgcggttcgtcgcggtaaaggatgaagagcagcaggcgaacggcgtggtgttccgggcgcgggacgtgcttgtgcgccagcgcacccagtgcatcaacgcgctgcgagggcatctgaccgagtatggttgggtggttcccaagggcacagcgcatgtagcaacgctgatcggccagatcgaggacccgaattgctccttgccggagagcgcccgtgcgatcttcagggttctggtcacgagtttgacgtcgctggaggaaagtattgccgtgctggacagcgagatcagccgccggtccaaagaggatccggttgctcgccggctgatgacgatacccggggtcggtccgatcaccgccacggcgatcacggctctggcgccgccgatcgagacgttcgccaccgggcgggacttcgcggcctggctgggcctcacgcccttgcagaagtcgaccgggggcaaacagcggctcggcgccatctcgaagatgggcgagcgaaccctgcggcggcttctgattatcgggggcagtgctgttgtcagccacgcttgccgacgcggcgcgccggatgggtcgtggctcgcgcgcatgctggcccgcaagccgcgcatgctggtgacggtggcattggccaacaagatggcccggatcgtctgggccttgctggccaagggcggggcctaccgagctccggttgcggcggcgtaagccacccgcgatcgcgaggtcgtcgagggcgtaggggcggtcggaaggagagtatggcgcaacgatcgtgagacgaggtcgggaaaaccagtttatgtcaaagcgccttcgagcgcgctgtactgatttggacccggccttcgaactcccatacgggcccgcggctgttcggccgcatgagaggccggacagatgtccgcacccgacctacgtcgccatgccgtccagaagatttctcttgcatccatgggggcgtccacaga

SEQ ID NO: 1916 - DNA, 1409 bp, unidentified
  source 1..1409: mol_type = unassigned DNA; note = element_29b3ca5
  misc_feature 1: note = core
  misc_feature 2..86: note = LE
  misc_feature 87..1127: note = CDS
  misc_feature 1128..1409: note = RE
  misc_feature 1169..1404: note = bridgeRNA
taatgaaatggacgcctcccacccacgacggcatcgcgatgtgccaaagtggaagagtgatcaaccactgagtgaggggaagcgtcatggacaagattagcgtagttggcctggatttggcaaagaacgtattccaggtacatggtgccaatgcacaagggaaaaaggttttgtcgcggcggttcaaacgggcagaggtgctggagttttttgcgagcttgccggcctgccgtgtcggcatggaagcgtgtggtggcgcccacgagtgggcccggcgcatcaaggcgctgggccatgccgtcaagctgatggcgccgcagtatgtgaaagcctacgtacagggcaacaagaccgatgcgcgggatgcggcggcgatctgcgaagccgctagtcgggactgtgtgccggcggttgccattcgcagccgggatagccagcaggtgcaggccttgcaccgggtacgcgaaggctggatgaagcagcgtactgccacggcgaatcaagtgcggggcctggtcgccgagtttggccaggcgctcacgcccggcatgcgccgcctgcgcagcgaagtgagtgcatggcaggacaaggcacgggccgatctggggctgctatgcggattgatcgacgacttgctggcgcacctgacgcaactggaagagcggattgcacaagtagacaagcagctcatgcaggtgcatcgggacaatgcagcgtgccaattgatcgagagcattccgggcatcggagtcatgaccgccacggccgtggtgggcagtttcggccgagcggacatgtttgcggacgggcgcaagtttgcgtgcgcgctgggattgacgccaagagaacacagcagcggcggcaagcagatattgctggggatcagcaagcacggcaacggttatgtgcgcaagttgctggtgcatggcgcgcgcgcggtgctcaaggcacggatgggcaagccggcgtatgccgacgattgggtggtcaagctggcggcgcgacgtggccacaacgttgcggtgtgcgcgctggcggcgaagaatgcgcggcgtatctgggccatgctgcaaagcggcgaggtgttccgtgccgattatgcgcagaccaacggcgtctgcgcataatcggcacggcagaaagatgaactgaacacgacaacggaggaagtgcaaccgattgccatggcaatcccaagtgatgacaggacaggtcagaccggggtggtcacagctcgccgagcgcaccgtgcgtgaagcacgatagggtgattgagcggccaccagcgaatttcatcatgcgtcagcagcccatacgtcggctgcaacaaagaccgaatgtatggctgcaatcgacttcgtcaggaaacacttgaagatttgttcttgcaaaagggaggcgtccatgta

SEQ ID NO: 1917 - DNA, 1369 bp, unidentified
  source 1..1369: mol_type = unassigned DNA; note = element_29b4d45
  misc_feature 1: note = core
  misc_feature 2..70: note = LE
  misc_feature 71..1102: note = CDS
  misc_feature 1103..1369: note = RE
  misc_feature 1134..1364: note = bridgeRNA
caatggtatggaacccgccctcgcggtacagtgggcgctcgaacgtcacctgctatgaaggaggagtgtcatgcaaatcgttcggataggtctggatctcgcgaaacatgtatttgaagttcacggcattgatgcgcatggaaagatcatcgtgcaaaagacgttgcggcgagaaacattggtaaggttttttgcaaacttgcccccttgcctgattggaatggaagcttgtgccggtgcccattactgggctcaggtattcactgatctcggacacgacgtacggctcatcagcccgcaatttgtcaaaccctatgtcaaatccaacaagaacgatcgaaatgatgcggaagccatttgtgaagctgtcggacgtccgtcaatgcgttttgtaccagtaaagtcatcggagcaactggcgattcaagccgttcaccgtattcgccaaaggctagtctctgatcgtgttcaattggctaatcagatccgtgggctgcttgccgagcacggaattattatcgcacgcgatatggcaaaattgcgctctgcgcttgcggaaattctagcgggcattgatgccaacctcaatgaactgatccgaacactcgttcaagaagtatacttggaattggctgagctggatcagcgtattgcatcctacaatcaacgtattcgcgaactttttcgcaacagtgaactatgccagcgcattggaaagatagagggcattggcccaattacggcaacagcgctgatcgcggcgattggtgatagaacgagtttcaagaatggccgccagtttgcagcttggctggggcttgttccgaaacagtattcaagcggcgggcgaacacgtttgttgggtatcagcaagcgcggtgatcgctatctccgcacattattaatacatggcgctcgcgcagcgttagctcgcgcgggcaaaaaggaagacccgcggagtctttggctcagtaagttgcggcaaaggcgtcacccgaatattgcggcggtcgcgctcgcaaacaaaaatgcgcggatcgtatggtcggtgctggcgaatgacaatttgtatgatccggctcgttctactgaagcagcctgaaatggcatcttaaaaggaataaagctcatccggcaattgcaacagatagcatgagatggaaatacggtcacatcgtcgctttccgaacctgatatgtggaccggcatggttggcgccgatgccttagggccgttgaggtgaaagcgcgcgaaaaccattggggctcgcagccaagaatattaagctgctatcagaagccgaatatacgtcagcaattgtgatcaaatccagatcaacaacctgttgcaatcgggcggggtccatata

SEQ ID NO: 1918 - DNA, 1360 bp, unidentified
  source 1..1360: mol_type = unassigned DNA; note = element_29b5b97
  misc_feature 1: note = core
  misc_feature 2..69: note = LE
  misc_feature 70..1092: note = CDS
  misc_feature 1093..1360: note = RE
  misc_feature 1113..1354: note = bridgeRNA
gaatgacatggattccccctcacgaggatttgccacacttaggtgtcgcgttaaataccggaggtaaccatgttttctatattcttttgtggcgttgacctcgtcaaacaccacttctcattgcacgcggttgatgaccggggaaaggtcatccttcataaatctgtattacgcgctaaattactgactaaattagcaaatattccagctatgcgtataggcattaaatcgtgtagcgatgcgcattattgggccagagcgttcacccaattaggccatgatacccgcatcatggcggctaagtatgacagcccctaccgcacaaaaggcaagaatgaccttaacgatgccattgctatctgtgaagccgtccaaagacccaatacgcggtttgttcctgttaaatcacctgaacgccaagccattcttgctattcaccgaatgcgtgagcattgggttcaggagcggactgccctcattaatcgtatccgtgctttgctcgccgagtttggcatcgtcattccaaccggacgtgccgctctccatcgcgagattcctcttattctcgaagccgctgaaaacggcttacccgatatcgcccgtgctgtcctggcggattgctatgagcacttacagacactgaatcaacgtgtcgaagacaccgaccagtgctttgagatggtaaccaaagccagccctaatgcgcagcgtatcctcaacgtccgaggcgtcggacctcaaaccgccacagccaatattgctgccatcggtaaaggtgagcagttccactcaaggagagacgtcaccgcctggctaggactgatcccgaaacagtattcaacaggcggtaaacctcgccttgggcgcattagtaaacggggcgacaagtatctacgaaccttgttagttcacggcgcgagagccgtcataaccaacctaggggaaaaacaggacaggctcagtgtctgggggagaaacgtcctcgaacgacgagggatgaaccgagccattgtcgcactggcagctaagaacacccgcattatctgggcgttgttacacaaccaaaccgaatatcaagactacgccgcctgagtaagaggcggcgcagggaaacacaccaacctggtcattgcagacgcagctgatgaggataggttaagaccatttgcagagagcctgttaatgcggcgggcacgttgatgccttctaacgccaatctgtttaatagaaaggggcactgcaaccgcgtaatgtcatcagggcaatgacgtaagtcagtgaaaggccgaatgcagagcggtagtccaaaacccatcttcaaaagtctagcggatgtttgacgaacgggggaatccatgta

SEQ ID NO: 1919 - DNA, 1839 bp, unidentified
  source 1..1839: mol_type = unassigned DNA; note = element_29b6354
  misc_feature 1..3: note = core
  misc_feature 4..285: note = LE
  misc_feature 286..1455: note = CDS
  misc_feature 1456..1839: note = RE
cttatatgttactattttcccagaccctctcgatcaagggtcagcaggggaaattcttgctcgctaagcactgcgggggaaaggctttgttctccacacggctcgaccgataagggaagatcgtgcttcccctggcagctttcctgggccaatcgatgattggagggtcgttgcttcgagcacccactatagaaggacccgagagccccaggaggtgcactaggaaaggaagtacgaagatgtggtacgttggactggactgggccgatacccgatcatgacgtcgtggtgctggatgaggccggtcgtcaggtcgactcgcgacgctttgcccacagccacgacggcttgaacgagttgaaacagtgtgtgttgcgcattgcagcttcgcccgagcagctggcgtgcattgtcgaaacaagtcatggcttgctgattgccttcctgctggaggcggggttcccggtctatcccgtcaatcccaagaccgccaatcaactgcgcaaagcggcaggcgccaagaccgatcgcattgatgcctatttgctggccaagaccggtcgcttcgacctggccgagctgcgccgcctggagcccgatagcgccacggtgcacgaattgaaaacgctcacgcgcgatcaggatgcgctgatccagacgcaaacgcgcctggtcaaccagttgacggcctgcctcaaggagtactacccagcggccttgcacctgtttgccaaggtgcagcagcgttccacgctggtgtttttgcaggcctatcccaccccgcaagccgcgctgtccgcctcggtggaggagatcacggccaccttgcggactggcaagcataccaacccggggcgcgtggctcccaagatcgtggcggaactgcaccgtccccagttggtggcgagcccggtcatcgtgcgtgccaagtcgcgcctgatgctctcgttggtcaaacaactgctggtggtgatccaggagatcgccagctatgacaaggccatccgccccctttttttgtgtcatcctgatcaggagctgtggcgttcgttgccgcgtgcgggcaaacgcctggctccgcgtctgttggcagaatggggcgatgatcgcagccgctatgccgatggaaacgctgtccagactctggctgggacggcacctgtgccctatgaaagcggcaagtacgccaaagcccacacacgcttcgcctgcgtgaagcccctgcgcaacgccctgcaccagtttgcctggcagtcgacgcgacaggaagcctgggcgctggactattatcggcgcaaacgcgcgcaaggcaagacccacagtatggcggtccgcgccctggccaacgtctgggtgcgcatcatctatcgcatgtggctgaccaagacctgctaccacaccgcgacctttgaggcggcgaggcttgcgcatgcgccccggcaacacgccgcctgagtcgcagccacgctgacccgtcacgctccgttgcgtcctctcagcgctgcgaggtctctcgccagcgctggaagcctgtgtcccaacggagtcgccccaacggttcccgtcgcacccgttctgccgaccgtgagccgctcccgctgcgggttctgtcgctccaacgtctgccgcagtccgccaccgcgttcccgactcccggtgtgggttgctgacaccagaccacgccgagtcaaggccgcgcaggaggtggggaggtcgagtgcgggcgcgctcgtcttggccttgaccggtgtggtagacttgcttccccacacgggaggcagcttcactcacgctcacctggtttttcctttcccgttttcggctcttgacatagagggt

SEQ ID NO: 1920 - DNA, 1364 bp, unidentified
  source 1..1364: mol_type = unassigned DNA; note = element_29c394d
  misc_feature 1..2: note = core
  misc_feature 3..79: note = LE
  misc_feature 80..1099: note = CDS
  misc_feature 1100..1364: note = RE
  misc_feature 1114..1351: note = bridgeRNA
tgatgtggtggacggccctttcaccgggaaacggtgtcaagctgggtgcgtcgaagaaaccaccttacaggagcggctgatgaccacgctggtgacgatcggtctggatctggcaaagaatgtcttccaggttcatggcatcaccgcagagggaaaggttctggttcgccgacaactgcgtcgtggcgaggtgctgaagttcttccagggtgtaccgtcgtgcctggtcgggatcgaagcttgtggcacggcgcaccattgggctcgggagattacggccttggggcatacggtgaagttgatgccgcccgcctatgtcaagccctatgtgaagcgcggcaagacggatgcggcggacgccgaggcgatctgcgaagcggtaacccggccgacgatgcggttcgtcgccatcaagacgatcgaccagcaggcggctttgatgctgcacaagacccgcgatctgctggtccggcaacggacgatgctggtcaacgggttgcgcgggcacctcgcggaattcggcatcatcgcggcgaaagggcttggcggggtgaagacgatcatcgaggccctgcatgaggcacaggatcaattgccggagctggcacggctggcgctgcacgggatcgttgagcaacttcgccacctcggcgccgagatcgaacggctggaagagcgcatcctggcttggcatcgggccagcgatgtcagccgacgcttggcgaccattcccgggatcggtccgatcaccgccagtgcgatcgcggcggccgtgccggacggaaccttgttccgatccggtcgccaattcgccgcgtggcttggcctgacaccaaaggcgcacagcagcggcggcaaggagcggcaggttggcatcagcaagcagggcgacggttacctccggcgcctgctcgtcgtcggcgccacagcggtcatgcggttggcccgcaaagacaacgccagccgaagctgggcgacgaagctgttggagcgcaagccggcgaagctggccgccgtagccttggccaacaaaactgcccgcatcgcctgggcggtgatgacacgcggaaaaacctacgaggcgccggtcgccgcgtagtcgttgttcacccggcaaagcgagagattgctcggcgggtggatgtgccagggtggtgagacgtgatgacgaaccggctgggccggggatcgatcaaacccacggggaccaagcgccttcgagcgcgttgaggtgatttgggcttcgatccgcggaattcatcaaggccagcagccacggctgcgaaaacaggccggacacatggatgcatcctatcggccgtcactacggatttcactcttgcaccggaagggccgtccacaca

SEQ ID NO: 1921 - DNA, 1458 bp, unidentified
  source 1..1458: mol_type = unassigned DNA; note = element_29d1eab
  misc_feature 1..2: note = core
  misc_feature 3..54: note = LE
  misc_feature 55..1209: note = CDS
  misc_feature 1210..1458: note = RE
  misc_feature 1218..1456: note = bridgeRNA
agatgagatgaacgccacccttcttttcagcgacgcagcaaggaggggaagtttatgggcagcggcaagaggaaggaggatcccccgtccgaacggcatcgatgtgccagagtggagatgttcagtaaccactcgaaggacaggggatccaacatgcaagttacgacgtacggggttgatttggcaaagcgggtattccaggtgcattgggttgaggggcagaccggcgaggtcaagcgcaagactctcttgcgtcaggaagtgggcgagttttttgcgcagcgggagctaggtgtagtggcgatggaggcgtgcggatcagctcatcattggggccggctactgagccgccttgggcaccaggtgcgcctagtgtcagctcagttcgtgcgaccgttcgtcaagaccaacaagaccgatgcggcggatgcgcaggcgatttgggaagcggcgcagcggcccgagatgcgcttcgtgggattgaagagcgaggagcagcaagcgctactgtcgttgcaccgggtacgccagcaactcgtcaaggtacgcaccatgcaggccctgcagatcagatcactcctgtacgagtttggcatcgtgctgcccaagagctggcgagcgctgctcgtgcaggcgggatccgtgctggccgattcaactcgcaacgagataccacagttgcttcgaggagagctgctcagtcagctcgagtcgctgcgcacgctcaccagccgcattcaacagctggagcaagctattgcctcctaccggggtcggctcgaggactgcaagcggatcgaagcgatccctggcatcggacgactgacttcctctgcgctcgtcgcgacgatcggtgatgcccgcacgttccgttcgggacgcgagatggccgccttcctaggcctggttcctcgtcagtcgggcaccggcggtcgagtacgactgatgggcatcagcaagcgcggcgatccgtatctgcgcacgctgctgatccatggtgcccgctccgtgatcactcatggaagtcggccaggacgcacgctagaaccctggatccagacattgctgctgcgacggccgaagaatgtggcgatcgtggcattggcaaacaagatggctcgtaccgcgtgggcgcttctagcccacggtagaagctttgatcggagttggggtcaggctctgcctgctccagtcaatttaaccacttaacaggaggaaccaaccactcagggttgcgcgagtgaagcattcgtgatggcaaaacaggtcggaccgtgaagaagtaagcctgaatggttgactggacgttagagtcctttcaggagatgaggccttcttcagcggagttcatcaaggccaagagctcatagctcttttatgtaggccggatataagactgcaaccacctgccatgccggatcgatcgcagtactcgctcaatagggtggcgttcatata

SEQ ID NO: 1922 - DNA, 1319 bp, unidentified
  source 1..1319: mol_type = unassigned DNA; note = element_29d6534
  misc_feature 1..2: note = core
  misc_feature 3..64: note = LE
  misc_feature 65..1069: note = CDS
  misc_feature 1070..1319: note = RE
  misc_feature 1087..1318: note = bridgeRNA
atgagatggtcactccctcttcctgagtactatgctaagaacaggctaaattaggagaatcaccatggaaaacattgcacttattggtatcgaccttggtaaaaactcttttcatatccattgccaggatcggcatggtaaagcggtttatcgcaaaaagttcaccaggcaaaaactgtatgaatttcttgcaacatgtccggcaacaaccattgtgatggaggcctgtggtggtgcacatttcatggtgcgtaagctgtctgaaatgggacacacgccaaagttgatatctccacaatttgtccgtcctttcgtcaaaactaacaaaaatgactttgttgatgctgaagcaatttgcgaagccgcatcacggccctcaatgcgttttgtgcaacccagaacagaatctcagcaggcaatgtatgccttacaccgggtcagggagtctctggtccgggataaagttacagcaacgaatcagatacaggcatttttactggaatttggcatcagcgcaccaaaggggccgacgttaatgaagcgcttagccgaaattctggagacaaacgatcttcctccatatctggtaactttacttgagaagctgcgtaaacattatgattaccttgttgagcaaataaaagatcttgagactcagctaaagataacgctgaaggaggatagtacagcccagcgtttactctccatcccctgcgtaggccctctgacggcaagtttgctctccacccaactaggggatggaaaacagtatgatagcagcagagattttgccgcttcaacagggctggtacctcgccagtacagcacgggagggcgaactacgttattgggcatcagtaaacgaggaaataaaaaattacgggcattgctggtacagtgctcccgggtatacctgcgaacactggaataccagagcggcaaacttgctgactgggtcagggaattattactgaggaagaataattttgtggtgacctgtgcactggcaaacaagctggccagaatcgcatgggcgctaacgacccggcagcaatctttcgaggcatagctattatttttattttaaacagttacttacctggttttgcgaatactgattattgatgatattaacggctaaccggcctgacgaaaaacctgtggttaggaatggcagttaaaatgccgctcagtttataaggttcatcaggcgcggaactcatcggggcgcgggcatacagcccattcagacgccggatagattcatgcaagccacaatatcttcagtgtcggtattgcaaaaacgggagtgaccatag

SEQ ID NO: 1923 - DNA, 1340 bp, unidentified
  source 1..1340: mol_type = unassigned DNA; note = element_29e1fb4
  misc_feature 1..2: note = core
  misc_feature 3..215: note = LE
  misc_feature 216..1073: note = CDS
  misc_feature 1074..1340: note = RE
  misc_feature 1110..1338: note = bridgeRNA
ttaatgagatggtcacccccaccctgtgagcggtacgctgacagggtgttttattttgagggaacaatcatgcaaaacgtgacgcttattggtatcgatctcggtaaacattctttccacgtacactgccagggtaaacacggtaacgtcttgctgcgtaaaagttttctcgcaatcaacttatgcgttttctcgcatcttgtgaggctgcaaccgtggtgatggagtcctgtggtggcgcacactttatggctcgccgcgtagctgattttggtcataaggcaaagctcatttcctcgcagtttgtccgtccgtttgcgaagagcaacaaaaacgattttgttgatgccgaggctatctgtgaggcggtttcccgcccctccatgcgttttgtgacgccccggacagaagaccaacaggccatggcggccctgcaccgggtcagggactcactcatacgggaacgtgttaaaaccaccaaccagatgcatgtctttttactggagtccggcgtcagcctgccacgtggagttgctgtgatacgacgactggcggcggtgctggaggaaaatcacattccgacctacctgacccggctactgaacaggttgcacagtcattacgtttatctcagcggagaaatagaggaacttgataaggggctgaaaaaccatctggcagaggatgcaaccgcgcagcggctgctgaccatcccgggagtggggccgatgacggccagtctgctagccacccgactgggtgacggtaaaaactatgccagcagtcgcgcctttgcggcgtcaacggggttggttccccggcagtacagcacgggtggaaaaagtacgctgatgggtatcagcaagcggggagacaggaatctgcgccggctgctggtgcaatgtgcacgagtctttatgcaacggctggaacataatccggggcgtctggcagagtgggttaaaaagcagcttgcgagccatcattcaaacgttgtggcctgcggactggcaaacaaactggcgcgaatagcctgggcagtgacggctcatcaggcggtgttcagcaaataaaagagccaatggtataagcgctggctcaaggtattaacacgttactttctggttttgcgacgacagataactgatgacatgaacggcctatcggcctgctgatgaacctgacataaaaaatggttcctggaagccgacggttttttatggtccggcaggcgcgaaactcattgtggcgcgggcaacctgcccagcagacgccgaatagatttatgcaagcccatcataaatcaaaatctgtgttgcaaaaacgggggggaccataga

SEQ ID NO: 1924 - DNA, 1402 bp, unidentified
  source 1..1402: mol_type = unassigned DNA; note = element_29e2a89
  misc_feature 1: note = core
  misc_feature 2..225: note = LE
  misc_feature 226..1389: note = CDS
  misc_feature 1390..1402: note = RE
  misc_feature 13..240: note = bridgeRNA
ctacttgttaactggtggtacgaccgcagcccggccaggcttggtcgaggtgatcggcggggtagctctctcatcggctgtccaccgcggtttggtgtggctctcatctggcatgcggcccgccggtcaccgtggcgcggagaggctcaagaggggtctgcccagctcgaagtagcgctgccctcctcgctgatatcaggcccagtctgatcgaggaggacgagcgtggcacgagtcatcatcggcatggatccgcacaagcggtccgcgaccatcgagatcgtcaacgaccgcgaggagatcctcgcccagggccggttcggcactgatcgcgacggctaccgggccatgctcaagctcggccggcagcacaaggaccgcatctgggcggtcgagggctgcaacggcatcggccggcacctcgcgcaacgcctcgtcgccgacggcgaaatcgtcgtggatgtccccgcgaagctgtccgcgcgggtgcgggtcttcgacaccggccaaggccgcaagaccgaccccgtcgacgcccacagcgtcgccgtcgcagccttacgcagcaagggtttgcagcaggtcgccgtcgatgacgcgaccgtagcgctgcggctgctcgtcgaccgccgcgacggtctcggccaggcccgcaccgacctactcaaccgcatccacaaacttctgctggaactgtcgcccggtggggccaaaaagttcttgtccgctccgcaggcccgcgctctgctcaacaccatccgtccgcgtgacctggtcgggcgcacccgccgccggctcgcctgcgaactggtcactgagctggtccaggtcgataagaagatcaagaccgcgaacaaggagctgaccgagctggtcgcggccaccggcagcggcctgcaggaactcaacggcatcggcccgtccggagcagcacggctgatcggcgatgtcggtgacatcagccggttcgcgacccgcgggcacttcgcttcctggaacggcaccgcgccgctagacgcctcctccggcgaccagacacgccaccgcctgtcgcgggccgggaaccggcgcatcaaccgagccctgcacatcatggccgttgtccagctccgccatgacaccgaaggccgggcctactaccggcgcaaactcgccgcgggcaagacctcgatggaagccatgcggtgtctgaaacgacgcctgtccgacatcgtctacaagcagatggtcaaagacgccgccgcggtgaggacgggcccgggaggacatttgggggcgactctgcaatccagcgcggccgacccgatccccatggtcagcacttcggaacagtcacttcccggacccgccaacacccaccctagaacacggctcctcaccagccattgacacagaggggtgc

SEQ ID NO: 1925 - DNA, 1378 bp, unidentified
  source 1..1378: mol_type = unassigned DNA; note = element_29e75b3
  misc_feature 1..2: note = core
  misc_feature 3..39: note = LE
  misc_feature 40..1107: note = CDS
  misc_feature 1108..1378: note = RE
  misc_feature 1148..1377: note = bridgeRNA
ataatggaatggacccatccccttttaatcggcctcgcaatgggccacgatgtagttgctaaaactcatcagaaagaggacgggtccactatgaagattactacaattggtctagatatcgcaaagtctgtttttcattttgttggcgtaaataaagcaggaaagttagttaaaaagaaaatgttaaaacgcagagaagttctgcagtttgttgccaagatagagccgtgtcttattgtaatggaggcttgtggtggcgctaactactgggctagagagtttgaatgcctaggtcaccaagtgaaactaatcgcacctcaatatgctgttccgtacaggcaaggtaataaaaacgactataacgacgcattagctatagctgaagcagctcaaaggcctaacatgcgtttcgtgcaaccaaagcctgttgagcaacaagatgtgcagatgcttcatcgaatgagagagcgtttaaataagcagtctatcgccttaattaaccaagttagaggcatgctagcggagtacggtattgtgatagcaaaaagcaaagcagcttttaggatggcttttccagatattttatctgatgagagcagtgaacttacagtgaaggggcggtttatatttacccagttgcatgatgaatttagtgatatcgagaaacgtctaaagagctgtgatacgcagataatagaagagataaaaacaaatcaagtctgccagcgtttagaaaccattccaggtattggccctgtgacttcaaccgctttttacgctgcagctggagaggggaaagattttaccaatggtagacacttttctgcttggtgtggcttagtaccaaagcaacatagtagtggcggtaaagacaatctgttagggataagcaaaagaggcaatgcttacttacgaacattgtttatacatggtgcaagagcggtcttgcagcacagcggaggtaaagaggataggctaagccgctgggcatacgctttggccgaaagaaaggggttcaacaaagcttgtgttgcagtagcgaacaagcttgcaagaatgacctgggctatcgccgctagagaagatgaatataggacatttgcttagtagttagtcctaaagtaagacgaaacgagttagtgtaaaacacaccagcaagttgctatgacacttgatttgatgatgagacagtcagactgctctacttaaaaccttaccaaaacataggctctgaagaagccgtagggatgataaggaaagtagaggcaaatatccatcagggccagaggttaacctcataaacaggccgaatatatgggtgcaatgaactcttctcaaaatgaatatcaaatgtcttgcaaacggggtgggtccatat

SEQ ID NO: 1926 - DNA, 1818 bp, unidentified
  source 1..1818: mol_type = unassigned DNA; note = element_29efd08
  misc_feature 1..2: note = core
  misc_feature 3..117: note = LE
  misc_feature 118..1419: note = CDS
  misc_feature 1420..1818: note = RE
  misc_feature 1470..1636: note = bridgeRNA
aaaggagccattcctgtaatgaagtaatttgctctttgaaaacaaaaagcgcctcctgtatgctgggtcttggaatggtggccattcactgccctaatttgaaggaggacgctcaatatgaagtataaactgaaacaaaagcagaatcaacggattacacgaattaccgaatcgacactggtggtcggtgcagatatcgcgaagaaggttcacgtcgcacgtgccgtagatttccgaggcattgaacttgggaaggactgtgtatttcacaacgatcaggaaggactatcgaagctggcaacgtggatgaaggagcttggtcaagcacacgggaagacgaacattgtgtttggcatcgagcctaccggacactactggtttccgttagctgcctatctgcaggaacaacaacaaatccaggtcgtcgtcgttaatccgcatcacgtaaacaagacgaaagagcttgaggataactcgcagacgaagagcgactacaaagatgcaaaggtcattgcggatctcattcggaatggaaaatactcagaaccgaaactgccgacgaaggaatacgcggaactgcgaatcctgatgaatctgcgggagaaggtatcagccagcctgacgcaagtgaaaggccgaatcagcaactggttcgaccggttcttccccgagtatgcttgcgtattcaagaaatgggagggcaaggcatcgctcatgaccatgcgggcgttcccgatgccagcggacatcgtcggcaagggggctagagacgtcctagtacactggaagacggaagtgaaacgcggtgtgggcatcaagcgcgcggagaagttagtagccgctgcaacggtctccattgggttgacggaaggttgtatggcggctcgaatggaattaagcacgttgctgggtcaatatgatctatttagtaagcaattggaagagattatggataaagtgctggagatccttgaacacatcccaggaacgaaggaaatgcttaccgtacccggggttggggcaattactgtagctggatttctggccgagatcggtgacttgaacaactacgatcatggccagcagattatccggcttgccgggctaaatctcaaagagaatagttcgggaaagcggaagggtaagaccgggattagcaagcgcggacggtcacgtttacgagcgctgctgttccgagcggtgatgcccatggtagcgaagaacgaagagttcaagacgcttcataagcattacacgacgaggagccagaatccactgaagaagaaacaatcgatcatcgcgttatgtggaaaactgattcgagtcctgcatacgctggggacaaagcaaagagagtacagtgcaatcgatgttatgggtccagtaaggcagttccagatccagcaagaagctgcttaaagcaaggaaacaaacggcctgcagatcaacttattcacatgtgtacaacttagacaacgaaagcacggagaagccgaagtactacattcagtaagggcaacgaccccgtaaaggagcaagaatcggcctccaccccttgagaggtagaacgaaggaatgtaagggcatagacccagtgtgacatgggagggtaaaccccgagggtgaatatggagatccactgtgcgatcataccaattatccacagttttggaagaaggtcattcctaagctctgttcccgcctacgctcttacggaaatcgaggtgcagagtacattctccactactatctcttaggctgtcaaagttgaaatactgagaatgagtgaggaaacaggagaaaacgatactttatagt

SEQ ID NO: 1927 - DNA, 1533 bp, unidentified
  source 1..1533: mol_type = unassigned DNA; note = element_29f5aae
  misc_feature 1..2: note = core
  misc_feature 3..241: note = LE
  misc_feature 242..1420: note = CDS
  misc_feature 1421..1533: note = RE
  misc_feature 19..218: note = bridgeRNA
cttgtattataaagtagtagttattagagcccctctccaagggctgtgctacactgtaagggatgctgtggatcggtgccgtcctcctaccacaagatggttcacgaaaggttccaaccacagctccttacacttttgttgatcagttaaataccgccagacggtttatgtggaacaaggctacaaaagtaaggcgcactgtggatacagcatcacatatttatcgttggaggtatttgttatggtgatttctgttggtattgatgtttcaaaagacaagcacgattgcttcatcgtcagctccgagggtgaagttctggcggatgtatttaccatccccaacacaatggatggattccactgcctgttgcagagagtccgggactgcatcacaccgcaggacaaaataaaggtagggcttgaggcgaccgggcattacagctacaatctgcttgggtttcttcttgacaatggtctggccacctatgtcctgaaccccttgcgtacaaacctttaccggaaaagcctcagcctgagaaagaccaaaaccgaccgggtggatgcacgaacgattgcggctatgctgttgtccgatgcgggcctcaaaccctacacagacacagcataccacaacgaggagctaaagtcactcaccagataccgttttgacaaagtaaaagagcgcgccaagctgaaaagttctgtctcccggctggtctgtatcctgttcccggagctggaaaagctggttcccacgcttcacatggcctctgtttacgcacttctggaggtgttccccggcgccaagcagattgccgcagcccatttgacaaggctgaaagcacttcttgaatcttcctccaaaggccgttacaaacgagatatggctttagaaattcgggatgctgccagaaattccatcggttcccggatgcctgccaagtcccttgaattacagcacaccatccgtctcatccgtgaactgaatgctgaaatcacggaaatcgaagaacagatccaatccattatggatgagctccattctcccattaccacgattcccgggttgggattccgcatggccgccatgatcctggccgaggtcggcgacttcactcggtttgactccccagacaagctgttggcttatgccgggatgtcgccatccacttaccagtctgggcaactcaaaaactgttaccctcacatggaaaaacgcggctccagatacttacgctatgccctttacaacgcgaccaaatatgtctgtcactggaacccgacctttgccgattaccttgccaaaaaacgggctgagggtaagcactacaatgttgcactttcccatgctgccaagaaattagtgcgtttgattttcgctatggagaaatccagagcgacataccgtttggcagcttaatccttgtttaatagttagccggggcctctccggcctctgctttgctataccttttttgagccatctttatcaccaccaacagtcatttttcgggttgacttttaatagttaat

SEQ ID NO: 1928 - DNA, 1463 bp, unidentified
  source 1..1463: mol_type = unassigned DNA; note = element_2a06c57
  misc_feature 1: note = core
  misc_feature 2..228: note = LE
  misc_feature 229..1449: note = CDS
  misc_feature 1450..1463: note = RE
  misc_feature 12..236: note = bridgeRNA
ctactagacgattcccttagggccggcgtctggccagactcggtccaggtgatcggcgggcagctctccatgcggctgcccaccggctgtactggtgtggctctctttcggtctgcggcccgtcggtcaccgtgacgaggcgtggctcaagaagggactgccctgctcgtagtagcaatgcccacctcgccgtccacatcaaggaacgagcgcaggcgggagcagcacatgccgaacacggatcacgtgatcatcggggtcgatccccacaagctttcggcgacgatcgaggtcgtcgaccgccacgagaagttcctgggctcgggcaggttcaccaccgaccgggccggctacgccgcgatgcgcaagtacgttgccggatggccggaccgggtgtgggcggtggagggcagcaacggtgccggccgacccttggcgcagcggcttctcgaagatggcgaacacgttgtcgatgtcccggccaagctcgctgcccgggttcgcctgttcgacactggtcacaaccgcaagaccgatgcccgtgacgcgcactcgatcgcggttgtcgcggtccgcacgacgaccctgcgggtgctgcagctcgacggggagctcgaagcgctgcggatgctggtcgaccgccgtgaggcactgacccggcgccgggtccagaccgtcgaccggctccaggcgttgttggctgaactccttccaggacaggcgaagaaggacatcactaccggtcaggccaaggccatgctcgcgtcggtccgcccgcgtgacatcgccgggaagacccgccgacggatcgccgccgaggagctggccgagctgatcgcagtcgacgccaagatcaagaaggccacctccgagctcaaggcgatcgttctcgcccgcggctcacacctgatggacctgcacggcgtcggacccgtcgtcgcggcccggaccttggctgacgtcggcgacatcagccggttcgtcgaccgcaaccggttcgcgtcctggaccggcaccgcaccactggatgcgtcctcaggtgagcagaaccgtcaccggctgtcccgggccggaaaccgccggatgaaccacatgatccacatcgccgcgatcagccagatccgcctcgacaccgacggccgggcctactaccgacgcaaacgagccgagggcaagaagcccctcgaagcgatccggtgcctcaagcgaaggatctccgacgccatcttccgacagctgctccaagacgcccagatcgatgcggcacagcgagtgtgcgcgggcccgggagggcactgcggggcgtctaaagaatccagcgcggtcgacctgcccccgcacatcgacacttcggatcagccacttcccggacccgcaaacccgacgctacaaccgcctcggtccgcacggaagtcctcccgcccgaggaccgtgtcggccaccggttgacaacaaaggggagc

SEQ ID NO: 1929 - DNA, 1500 bp, unidentified
  source 1..1500: mol_type = unassigned DNA; note = element_2a09245
  misc_feature 1..2: note = core
  misc_feature 3..79: note = LE
  misc_feature 80..994: note = CDS
  misc_feature 995..1500: note = RE
  misc_feature 1221..1487: note = bridgeRNA
tgttggtgtggacggcccccgacggcatcgatgtgccaaagtgcgggtcgttgctgatctcagacagaggagaccgtccgtggaacaggttagccgcattggcatggacacgtcgaaacacgttttccagcttcatggcgtgaacgcctccgacgaggtggtcttgcgtagaaagctgcggcgcaaggagatggtggcgttcttcgagaagcttgcgccgactgtgatcgcgatcgaggcgtgcggcgcgtcgcactattgggctcggcttctgcggtcgttcggccacgaggtgaagctgatcgcacctcaattggtcaagccgtacgtcaagcggggcaagaacgacgcggccgacgcagaggcgctttgcgaggcaatgagccggccaacgatgcggttcgtgccggtgaagacggccgagcagcaagcggcgctgatgctcatgggcctgcgcgaacagctggtcgccagccgcacgcaattgtcgaacgccatccgcggctatgcgatggaattcgggctgaccgccgccaaggggaaggctcacctcgaaccgctgctcgagcgcatccaggccgacgagagcctgccgatcttggcgcgagagctgttcgcgatccaggccgagggccatcggcggatacaggcgcaaatcgacgaggtcgatgccaagctggcggcttggcaaaagtccgacgaatgcagccagcggctcgtcaagatccccggcgtcggcccgatcggcgcggcgcttctgaagatgaagaccccggcgcccgaactgttcaaatcagggcgtcaatacgccgcttggatcggtctgataccaattgccataagtctcgacctgactttgccggtgttcgcggcccaatttggcctgcacatcacgccgagggcaggggtcagctcttacggcaactggtatgacgccaaaggaccattcgaccgccggcaaggccaggctcggcgccatcacccgagccggtgacgagaccttgcgcagcgtgttggtggtcggcgccaccgccgcgatccaacaggctcaacgacgtggcaaagcctcgccctggttggccgcgcttctcaagcgcaagccgccgaagctcgtcgccgtggcgctggccaacaagatggcccgcatcgcctggaagctgatggtcacgggccaaagctacgccgcgaaatctgcgcccgccaccttggcggccgcagcctagagatcagcccggcacggccgccattgaacgacaaccgtgtcgagctgatgccagaacttgcaagcaaacggcagatgatgtgatcgatcgatccccgacaagagacactccgttgtccgtcatggccatcgtaggtcgttcgtttgttaggaactcttgtcgcggaaaccatcttggccagcgttcatgtgcgagcgcgacaacaggccggacatatgagcgcaagcgatctgatcaaaccaccgccaaaccttgcaaggagggggccgtccacata

SEQ ID NO: 1930 - DNA, 1569 bp, unidentified
  source 1..1569: mol_type = unassigned DNA; note = element_2a0a7d5
  misc_feature 1..2: note = core
  misc_feature 3..248: note = LE
  misc_feature 249..1424: note = CDS
  misc_feature 1425..1569: note = RE
  misc_feature 3..228: note = bridgeRNA
ctcgtattataaagtagtagtgtttatagtccctctccaaggactgtatgctatactttttggagatactgtggattggttttcacctcctaccacttgatggtttttgaaaggctccaaccacaggctctttgtatatttgttaatcagttagataccgcatgacggtttatttagaacgaggttacaatcacagagagtacccgtgggttccaaacagtatcaaatacatttaaaggagaacttccatgatatatgcaggaattgatgttgcgaaagataagcatgattgctttatcacgaattcagatggtaaagtgctctttcaagcatttaccattccaaacaaccgagatgggtttgatgaactctatcaaaagattacagccgttaccgatgatttaaacaaagtaaaagtaggccttgaagccactggacactacagttataacatcttggggtatcttcttgataaaggtctcgccacctttgttttcaatccgttacataccaatctttacagaaaaagtcttagccttagaaagacgaaaacggataaagttgatgcccatacgattgctactatgctgatgtctgatgtgaacttaaagtcctactcagacacatcttatcacaatgaggagctaaagtcactaacccgttatcgttttgacaaggtaaaagaacgggccaagctcaagtcttccgtttcaaggctggtctgcatcctgtttcccgaactggaaaagcttgttcctacgcttcacatggcgtccgtttatgccctgctttctgagttcccaggagcatcctttgttgctttttctcatcttacccgtcttgcaaatctgctttctgagagttccaagggcagatacggaaaggataccgccattatgtttcgggaggctgcaaaagcatctattggctcccacatgccagcaaaatctcttgaactcaagcacacaatcaaactgattcgtgaactggatgctgagattgaggaaatcgaaactgaaatcaaaaccatcatggatgaaatcaactcaccaatccttaccattcccggtatcagctaccgcatgggtgcaatgatccttgccgaaattggtgatttcagccgctttgattcgccggacaggatacttgcttatgctggaatgtcgccgtccacctaccagtcagggcagcttgataactgttatgcccacatggaaaaacgtggttcaagatacctgcgctatgccctttacaatgcaacgaaatatgtctgccactgggataaatcttttgccgcctaccttgccaaaaaacgggcagagggtaagcattataacgtcgccctgtcacatgcctcaaagaagcttgtgcggctgatttttgcaatggaaaaatcgggacaggcgtataacaaagctgcctgattccttctgtaaaatatctccttttttgagtgcctttaatgacactctgtttgtcatgcagttttcaaagtacaaatatatctgaaatgccttttggcaattcattcaaaaaatttattttaggtcttgacttttaatagttagt

SEQ ID NO: 1931 - DNA, 1389 bp, unidentified
  source 1..1389: mol_type = unassigned DNA; note = element_2a1020d
  misc_feature 1..2: note = core
  misc_feature 3..88: note = LE
  misc_feature 89..1114: note = CDS
  misc_feature 1115..1389: note = RE
  misc_feature 1085..1376: note = bridgeRNA
agatggaatggttgccgccctcccggaacggcatcgcaatgtgccaagatgtggatcgtagagccataaacggagaggacggcaaattatgaatactatgatcggtgtcgacttggcaaagtcagtttttcagcttcacggcgcgacaatgaccggtgaagttctgtttcgcaagaaactgacgctggcgcagtttctaagattcatgtctgagcatagcccggcaacggtggtacttgaatgttgcgggagcgctcatttttgggcgagagagatgcggaaactgggtcaccaagttaagctgatccccccgcaatatgttcgtccatttgtgaagcgacaaaagaatgacgcagcagatgccgaagcgattgtcggcgcagcacaacggcctgaaatgcggtttgttgagcccaaatctgcaacgcagcaggcacgggcggttctgtttcgggcacgcgaccgcctcgtccaccaccgcaccgagctgatgaacgtcctacgaggtgtactttatgaacaagggttcgtcttcccacaggggacacatcattttactcgcgttcatgttatgctcgacgaccccgagtcagaccttgacccgttggttctggaggaatgtcgggatttgactgaactgatcgctgagacaacggaccggatcaatgccaagacccgaaagatcgcggccctttcaacaaagtcggacatgacacggcggctccagtcgatgcccggtcttgggccaatgacagcgctggcgattgaagcatttgcgccacagatggacaacttcagaaagggacgcgacttcgcagcctggctgggacttgtgccgcggcagaattcgacgggcggaaagacccgacttgggcgcatgtccaaagcagggcaaaaggacataagacgcttgctgattattggcgccatggcacggctcaccccgcgcggccgcctgggaataaaaccaggatcatggctggctaggatgctggaccggaaaccgaagatgctggtagcggtggctttggcgaacaagatggctcgaatgatctgggcgatgctgacaaaaaaagaggactatcgggaaccggcccagggtgttctggtctgagcatataaactcaatcagataacctgacgccgggaaacgggaggtgtgagaaatcgagaaattgaatgggaaacggatcgaaaagatcgggagtgggaaaaccagtttacggcctagggcgcacgagcccgcaggggagattgaggcctgctccgctgatcaccataccggccagcggcatatcagacgccgcacactaaggccagatagaagaccgcactcgatcccacctcgcgacgtcagatacttcttgcataacgggcggcaaccataga

SEQ ID NO: 1932 - DNA, 1353 bp, unidentified
  source 1..1353: mol_type = unassigned DNA; note = element_2a13ae7
  misc_feature 1..2: note = core
  misc_feature 3..343: note = LE
  misc_feature 344..1105: note = CDS
  misc_feature 1106..1353: note = RE
  misc_feature 1121..1340: note = bridgeRNA
tgatgtgatggacggcctccgctcccggcatcgcaatgtgccaagatgtgggctgtcgaactcacatcaggagatgcatccatggaggaggctataattggcctggatatcgccaagcaggtatttcaggttcacgggatcaatgaggctggcgcgatcgtgtgccgtcgcaggcttcgccgcgacgatgccgctgaattcttcaaggtgttgccgccgtgcctgatcggaatcgaggctggcgcgaccggacaccactgggctcgagttcttacggcgctgggtcacgaggttcggctgatgccggcgtcgtacgtcaagccatacgtgaagcggcagaagaatggatgcgacggatgccgaggcgatttgcgaggcggtgacgcggccgacgatgcgcttcgttccggtgaagagcgaggagcaacagagtgtgctgatgctgcatcgggtccgcgagcttttgatccggcagcgaacaatgctggtgaacgccttgcgcggccacttggccgagttcggcatcgtgacgcgacagggcactgtcggcgtcggaatgctaattgcgttggtcgaagacgatgatcacgatctcatcccgccgctttcgcggtccgcacttcttccgctgatcgggcagttgcgggaggtgcacgagaaggtcagcgagttggatcgccaaattcatgcctggcatcgctcgaacgaactgagccgtcgccttgagacgatccctggaattggccctatcactgccagcgccattgccgcgacagtgacagacgcctcgctcttcaaatccggccgacaattggcggcgtggataggcctcgtatcgcggcagaacccatcgggtggcaaagaccgtgtcggaaggatcagcgaacaaggcgatccctatctccgtcggcttctcgtcgtcggggcgcatgcggtcctccgcttcagccgcaacggcaaaacggcagcgacgcgttgggccgccgtgcttctggcgaagaagccgtacaacatcgtcactgttgctttggcaaacaagatggcgcggatcgtgtgggcgttgatggcaacgggcaggtgctttgaagctgccggcactgtttaacaactcgggacaatgcagaattggtgaggtgctgatggtgtaatggcgtacggtcgagccgggattggagaaacccgatcagtgggtgtcgcttgaaagcgcgttgacctgtctgggatccaatcagcggactacatcagcgccagcggcatgaacacgccgcaatcaaaggccgaatacattcctgcacccaaccaatccgccagaaacaccaacttgccccttgccacgcggaggccgtccataca

SEQ ID NO: 1933 - DNA, 1381 bp, unidentified
  source 1..1381: mol_type = unassigned DNA; note = element_2a1846a
  misc_feature 1: note = core
  misc_feature 2..86: note = LE
  misc_feature 87..1112: note = CDS
  misc_feature 1113..1381: note = RE
  misc_feature 1142..1373: note = bridgeRNA
taatgggatgggcgcccttccccaaaacggcatctgagtgccaaagtggcgaatgtacgttcccactgatgagagaggcgaccaccatgaaggctacgacaatcggcatagatttggcaaaagaggtattccaggttcacggggtggacgagcacggtaagcggttgttcaacaagcaactcaagcgttcacaaatagcctccttttttgccaatattccaccctgcttgatcggcatggaggcctgtgcctctgcccacttctgggccaataagctgcaagggctgggacataccgtcaaactgatggctccccagttcgtcaagccctatgtcaaaaccaacaagcatgatgctgctgatgcagaagctatctgcgaagccgtcactcgacccaatatgcggtttgtgcctatcaaaagtcctgaacagcaagccgttctggcacttcatcggagccgccagggattcatcaagcagcggaccgcacaagctaatcaaatcaggggattattagctgaatttggcattgtcatgcctatcgggatccaccaactactgcgacggttacctgagatcctggaggacgcagagaaccagttacccaacctgtttcgtgttcaactgagtttgctacagaaacatattgagtatttgtttgatgtcgtgtcgacgctcgacaagcagatagagcactgccatcagcaaaacgcgctatgccagcgtattggtaagatcccgggtatcggccccatcaccgccagtgcgttgattgcgaccataggcaacgccaacaatttcgagaatggcagacaacttgctgcctggcttggcttagtgccacgccagcattccagtggaggtaaacaagtgctgcttgggataagcaaacgcggggatacctatttgagaaccttacttatccatggtgccagggctgtcttacagtccgtcaaacgtaaacaggataccgtatcgggttgggccagtaggctattggagcgccggaataacaacattgcctcggtagcattggccaataagaatgcacggatagtgtgggccttattggccaaagatcaggaatacagcgcgccagtgatgaacgcttaatattcggagtcagcaagagagggataacaccaccgattgcccaggcaagcatgaagtgatggcaagacaggtcagaccgtgatggggaaaacccggtttaggcaaggctcttgaaagagcgagttgttgattgaggcctccatcagcggattccatcagggacagaggcgttttattacctcagtacagtccggatctatggctgcaatcgatgacctgagtaaagccactacaacatatttcgcttggcaaacgggggcgaccatcta

SEQ ID NO: 1934 - DNA, 1400 bp, unidentified
  source 1..1400: mol_type = unassigned DNA; note = element_2a2096a
  misc_feature 1: note = core
  misc_feature 2..89: note = LE
  misc_feature 90..1124: note = CDS
  misc_feature 1125..1400: note = RE
  misc_feature 1171..1392: note = bridgeRNA
caatgggatggacgcccccacccactgacggcatcgatgtgccagagtggaagtgtcagccaccactcgatgcggaaggagcgtccaccatgcagattacgacaatcggaatcgacctggcgaagaatgtgttccaggttcacggggcgaacgagcacggcaagccggttcttcgcaagcaactgaagcgcgaccagttcattgcgttcttcgccaacctgtcgccgtgcctgatcggcatggaggcatgcggtggggcgcatcactgggctcgcaagctgcaggcgctgggacataccgtcaagctgatggcgccgcagttcgtgaagccttacgtcaagagcaacaagaatgacgtcgctgatgccgaggcgatctgcgaggccgtgacgcgaccgactatgcggttcgtgccgatcaaaaacatcgaacagcagtccgtcctcgcactgcaccgcgcacgacagggtttcgtgaaggcccgcacggctcaagccaatcagatccgcggcatgcttgccgagtttgggttggtgatgccgcagggtatcggctacatcgcgagtcgtgtacctgaactcatcgaggatgcctcgctgcagctcaccggcggcttccggttgctgatcgacaggctactcgaccacttgaaggtgctgcacacgcaggtcgacgagctcgaagcccagatcaaggcgtggcacaagaacagcgatgtcagcaagcggctcgagaaggtacccggcatcggcccgctcaccgcgacggcaatcgcggcaaccgtcggcgatgcgaagaacttcgacaatggccggcagttggctgcgtggcttgggctcgtcccacgacagagctcgagcggaggcaaggcgacgttgctcggcatgagcaaacgtggggacgcctacctgcgcacgctgctcatccatggagcacgatccgtgatctatcgagccaatcagcgcgccgatgcgcagagttggctgttcaaactgatcacgcgtcggaacgtcaatgtcgcggcggtcgcgttggccaacaagacggcccggatcgtctgggcgatgttggtgaacggcagagaatacgacgacgcatacaaggccgctggcgctgctgcctaggcaacccgacgatcagacggcacgcggctcaggaaaggaacaaaccaccgattgctcaggcaatcacgaagtgatggcaaaacaggtaagaccgtggtcgacaaagcccgttatgaccgcagcacccagagtgcgcgtaagcgattgaggcgttgaccagcaaatcccatcagggacagcgagctccgctcgcatcaaaagtccggatgtacgggtgcaatcttctctctcgagccgtcatgaagtgaaagcttggcaaacgggggcgtccatgta

SEQ ID NO: 1935 - DNA, 1359 bp, unidentified
  source 1..1359: mol_type = unassigned DNA; note = element_2a24116
  misc_feature 1..2: note = core
  misc_feature 3..28: note = LE
  misc_feature 29..1102: note = CDS
  misc_feature 1103..1359: note = RE
  misc_feature 1125..1356: note = bridgeRNA
ttaatgagatggtcacccccaacaccctgtgagggctacgctttcacggggtgttttgttttcggaggccatcgtcacgagcgagtcagcactgatcggtatcgatctcggcaaacatactttccacctgcacggccaggataagtcgggccgcgaggtgtttcgcaaaaaatgctcacgagcgcagatgatgcagtttttcggcaatgtgccgagctgtgtcgtggtgatggaggcctgcgcagggtcgcattttgtcgctcgccaactgatggcgatgggacacacggccaagctgatttccccgcagttcgttaagcccttcgtcaagggcaacaaaaatgacttcgtcgacgctgaggcgatctgtgaagccgcttcccgcccatccatgcgcttcgttacgcctaaaaccgaatcccaacaaaccctgtctgtgctacatcggatgcgcgaatcattggtgcatgaccgcaccaaaacggctaatcagatgcacggttttctgctggagtttggggtcagcctgcccaaggaattggccatcatgaagcgtttggcgagcgttttggccgagcacgaattacccgttcgtctgacggtcttattgcagcgcctgcacgatcacttcgtctatctggatgagcaaatcaaagcgctggataaagaactggcgggccaactggccgacgatgatatgggcagtcgtttgctgagcatgccgtgtgtcggcccgatcaccgccagcctgctggctgtggagatgggcgatggtaaacagtaccgatgcagtcgcgactttgccgcctccgttggcttggtgcccaggcagtacagcacgggcggcaaggccaatctgctggggatcagcaagcggggtgacaagcatctgcgacaactgttggtgcagtgttccagggtctatatgcagaggctggatcaccagaaaggcgctctggctgactgggttaaaaccttgctcagtcgacgacattcaaatgtcgtggcctgtgccctggctaacaaactggcgcgtatcgcttgggcaatagccgctcgccatacgcaatatgaagcagggccagacgctttgaacgcctgaccctgcagttgttgcagtaccacgattcacccttcaggttttgcgatagctgaacaacagatgatgtgaacggcacaccggcctggcgaagatcctgacataaaaatcggcttcagaagccgacgggtttttaaggatcgtcaggcgcgactctcatcgtggcgctggggcatgccccaaacagacgccggatagatttaagcaaaccaaccacaccacccgttaatcagtattgcaaaaatgggggtgaccataga

SEQ ID NO: 1936 - DNA, 1442 bp, unidentified
  source 1..1442: mol_type = unassigned DNA; note = element_2a2cdab
  misc_feature 1: note = core
  misc_feature 2..228: note = LE
  misc_feature 229..1428: note = CDS
  misc_feature 1429..1442: note = RE
  misc_feature 12..243: note = bridgeRNA
ctactagaggattcccgtaggaccggcgtccggccagactcggtccaggtgcccggagggcttgctctcttttgggctgcccaccccgtccgcgggtgtggctcgattccggtttgcggcccgccgggcaccgctgacgaggcgtggctcaagaggggactgcccagctcgtagtagcaatgcccacctcgccgtccatatcggtacgagcacaggcgggagcaacgcatggaccatgtcgttatcggggtcgatccccacaagctgtccgcgacgatcgaggtcgtcgaccagcacgagcatctcctcggatccggtcgcttcagcaccgaccaggctggctacgccgccatgtgtgcctacgccaagacgtggccgaagcgcctgtgggcggtcgaaggtgccaacggcgcgggtcgtacgcttgcccagcgtctcctcgaagccggcgagcatgtcgtcgacgtgcccgcgaagcttgctgcccgtgtccggctcttcgacaccggccacaaccgcaagaccgacgcccacgacgcacacgcggtcgcggtcgtggccgtgcgcccgacgaacctgcgggtgctcaaggtcgacggcgagctcgaggcgatgcggatgctggccgatcgccgcgaagcccttacccggcgtcgtgttcagaccgtgtgccgactgcaggcgctgctcgcagaactcctgcctggccaggccaaacgcgacatcaccactggtcaggccaaggcgatgctggccaccgttcgcccgcgcgacatcgccgggaagacccgtcgacgcatcgctgccgaagagctggccgagttgatcgcggtggaggcgaagatcaagaaggccactgccgagttgaaggcgatggtcctggcgcgggagtcacggctgatggacatccacggtgtcggtgctgtggtcgcggccaggatcctcgccgatgtcggcgacgtcgccaggttcgccgaccgcaatcggttcgcgtcctggaccggtaccgcgccgctggacgcctcgtctggtgagcagaaccggcaccgtctctcccgcgccgggaatcgtcgggtcaaccacatgattcacatcgccgcggtcacccaactccggctcgacaccgaaggacgcgcctactaccggcgcaaacgcgccgacggcaagaagcctcaggaagcactccgctgcctcaagcgacgcatctcagatgccatctaccggcaactcgtcaccgacgctgttcgagccgaaggtgcggacccgggagggcactgcggggcgtctcaagaatccagcgcggtcgacctacccccgcacatcgacacttcggatcagccactcccggacccgcagacccgacgctacgccgcactacccggcacgcggaagagccaaccggtcggaaccctcgccagcaccggttgacaacagaggggagc

SEQ ID NO: 1937 - DNA, 1253 bp, unidentified
  source 1..1253: mol_type = unassigned DNA; note = element_2a34e3d
  misc_feature 1..2: note = core
  misc_feature 3..233: note = LE
  misc_feature 234..1238: note = CDS
  misc_feature 1239..1253: note = RE
  misc_feature 15..186: note = bridgeRNA
cttgtatattgctaatcgcctgctcagtgagagactgagagcacgtttccggggaagccgcgcgctccttgaggcagcttgactgacctcgttcgtagagtggctccccgccccagtcgcagagcacgaagagtgtcccgggccgttgagccagcgtgacaaggctgtgccgcgaagatgcggggtcggggaaccgggaaccatcctagccgaaacctggaggaaaactcatcatgtccgttcccgttgaacccctgttgctcgctctcgatgtcggtgccaaacgccatgccttcgcttgggaattgaagaatcaccgggaagtcggtgagatcgccaatgatctgaccacgctgcgcccgttcttgaagggcttgattgcgcatgccggatcggttcgtctgttggtggaagccaccggcatctactatctggatctggccctgctggccgatcaactcggtatcgaagtcagcgtgatcaatcccaaggcagggcacaactttgccaaggcgctgagccagcgcaacaagaccgatcggctggatgccgagatgctgctggagttcctcaaacgcatgccgtttcaggcttggcaagcgcccagtttggcgcgactggaactgcgccactacgggcgtcatctggttcagctcaccgaggaaagcaccgctatacgcaatcgcttgcacgccctgtccagcacccatgcctcaccggcctacctgaaggcggatctcaagcgagcgatcacttcgcttcagacgcgcattgagcggatccgcacacgcgccctcacgctcattcgtgcggatgcgtggattcaggaacgcttcgaggcggtgatcaccgtcatcggagtggccgatgtctcggcggtctcgttgctcagtgaattgctggtgcttccaccctcgctgagcgcacgcgcttgcgcgagccacgcgggtctggacccgcttatcttcgaatccggcaccagcgtccacaagcccgccagaatctcccgacacggtaataaatacctgcgccgtgccttgttctacccggctatggccgctggactacacgatccccgcgcagccgagttcaaggcgcggctgctcagcaaaggcaagaagaaaatgcaggccaatgtcgccatcatgcgcaagatgctaaccgcgatatgggcgatcatcaaaaacccgcaaccttatgacggcaaaaagctctattcctgcgaacaaatcgcttgacgcggaacagagtgt

SEQ ID NO: 1938 - DNA, 1432 bp, unidentified
  source 1..1432: mol_type = unassigned DNA; note = element_2a475bb
  misc_feature 1..2: note = core
  misc_feature 3..121: note = LE
  misc_feature 122..1153: note = CDS
  misc_feature 1154..1432: note = RE
  misc_feature 1189..1385: note = bridgeRNA
agatggggtaatcggccggcgttcttgtggatggccgaagaatttggggtgatgcgcttcaggttgatgatgaaacgaggtccgtggatgcggcctcaagcatcagaaggagaagcgcagcatggaccattttgcgggactagacgtatcggtcaaggacacgagcgtctgcgttgtggatgaggcgggcaagatcatccgagaagtgaaggtggcgagtgaacccgacgctctgctgacggttctgaacaatcctgcctaccacttcaagcggattggactggaagctggacctttgtcgcagtggctgctcagcgcgctggccgaagcgagcctgccgatgatttgtgtcgagacgcgacacatgcgggcggtattgaaggcgcggatcaacaagactgaccgcaatgatgcccgcggcatcgcgcagatgatgcgggtggggctatatcgcccagtgcatgtgaagacgctgcgcagccagaaactgcgcacgctgttgacgcatcgtaagcttttgcagtcgaaggcccttgccattgagaatgacctgcgtgccactttgcgcaacttcgggctcaaggtgggcatggtggggacggctaagttcgaagctcgtatcaaggagctaattgaaagccttcccgacttgaccctgttggtcgaacctctgctcgttgtccggcgggcgcttcgcgagcagattggcatcctacatcggcgcttactggccattgtccgagatgatgaagtgtgtcggcgcctgatgactgtgcccggcgtggggccggtagtggcactgacctatcgggctaccgtcgatgtccccggccgcttccgcaaatccaagtcagttggagcggtgtttggactgacgtgctccagggatcaatccggtgaaagagaccgccctggcgccatatcgcgctgtggcgacgagatgatgcgggcaatgctctacgaggcggcccagaacatgctggtgcgttcgacgcgatggtcctggctcaaggcttgggcgatgcagatcgtcaagcgccgcggcatgaaaagagcgattgtcgcgctagcacgccgattggcggtgatcatgcaccgcatctggattgacggcaccaagttctgctggaccagagaagctgccgcagcatgaaagtcattagagatcgaatgcgataggaggaaactcgaactccaccaagtggtggaatgatgtccctcgcgggacgatggatgaggtgagttcgcatgtccgcttggacctgccgaccatcggcaaggccgccaaatagattgttccacctcgtcttcgaatcccatgatggaagggccgatgtgtcgattccgtagagaagcacgagcccgcgagcgacatcggcaccgcagccgcggatagtctgatagcgcttgaccccaaccggccgattagaga

SEQ ID NO: 1939 - DNA, 1450 bp, unidentified
  source 1..1450: mol_type = unassigned DNA; note = element_2a4d248
  misc_feature 1: note = core
  misc_feature 2..225: note = LE
  misc_feature 226..1437: note = CDS
  misc_feature 1438..1450: note = RE
  misc_feature 13..237: note = bridgeRNA
ctacttagagacttcacgcaggatcggtgtctggccagactcggtccaggtgtccggcgggacgctctcaactgcggctgcccacccggtttgggtgtggctctcatctggtctgcgacccgtcggacaccgtgacgaggcgtggctcaagaggggactgcccagctcgtagtagcactgcccacctcgccgtccctaccggttcgaggagtgcaggaggcatccatgacgggcgtgatcatcggggtcgatccccacaagctgtcggccaccatcgaggtcgtcgaccaccacggacacctgctggggtccggcaggttcaccaccgacaaagccggctacaccgcgatgcgcagctacgtgaaggcctggccggagcgcacctgggcggtcgagggcgccaacggcaccgggcgtccgctggcccaacgcctcgtcgaaacaggtgaacgggtcgtcgacgtcccggcgaagctcgccgcgagggtccggctcttcgacaccggccacaaccgcaagaccgacgccctggacgcacactcgatcgcaatggtcgcgctgcgcaccgcgggcctacgagtgctgacacccgacggtgacctcgaggcgctgcggatgctcaccgaccgtcgcgacgagctcgcccggctacgggtgcagaccctcaaccggctgcagcgactactcagcgagccgatccccggccaacgcaagaaggacccctccgccctgcaggccaaggcgatgctggccaccgtccgtccccgcgacatcgccgggaagacccgccgccggatggccgccgaggagctcgccgacctcgtcgcggtcgacaagaagctgaagaagatcaagaccgagctgaaggacgccgtcgccgcaaggggctcgaccttgatggaggtgcacggcatcggaccagccggagccgcccggatactggccgacgtcggcgacatcgccaggttccccgaccggaaccggttcgcgtcctggaccggcaccgcacccctggacgcctcgtcgggtgaacagatccgccaccggctgtcccgagcagggaaccgacggatgaaccacgtcatccacatcgccgccatcgtccagctgcgccacgacaccgaaggccgtgcctactaccgccgcaagctcgccgccggcaagacacccctggaagcgctgcgctgcctcaagcgacgcctgtccgacgtcatctaccgccgcctcgtcgcggacgcacgagcagcccaggaccgggcagcagacgcgggcccgggagggcactgcggggcgactcaagaatccagcgcggtcgacctgcccccgcacatcgacacttcggatcagccacttcccggacccgcaacaccgacgctacaaccggccggccgagcccgaaagactccgaagaggaccactcctcaacccgctgcttgacacagaggggagc

SEQ ID NO: 1940 - DNA, 1383 bp, unidentified
  source 1..1383: mol_type = unassigned DNA; note = element_2a4e311
  misc_feature 1: note = core
  misc_feature 2..171: note = LE
  misc_feature 172..1122: note = CDS
  misc_feature 1123..1383: note = RE
  misc_feature 1146..1375: note = bridgeRNA
caatggtatggactcctcctcccctaatcggcatctaggtgccaaactggtaagcgttatcaaccagcaaacggaaaagaggagtcaccatgaagcttagtagagttggagtcgatttggcaaaaaaacgtttatcagttacacggagttgatcggactggcaggacgatattgaagcgccgcctgaagcgtcatcaatggctcgaggtgttgttggataaaacagagccagcttgtgtgattggcatggaagcctgtgccagtgcgcatcactggggtcgggagctgcagtctcgaggctacacggtcaggttgattccaccgcagttcgtgaagccgtacgtgaagagcaacaagaatgatgccagggatgccgaggcaatctgcgaggcgatgagccggcctaatatgcgcttcgtgacggtgaagacggtggagcaacaggatatacaggcgacgcaccgggtgcgtgaagatctcaaggttcggcgcactgccaagggcaaccagatccggggcctggcggccgagtacggcctggtggcgccgaagagtttaagttccctgcgtgcggcgatccctggttggcttgaagatgcggagaatggcctgacgcattactttcgttccctgctgcagggtctgtgggaggatctgcttatactggatgatcgcatgtgcgagatggataagaccatcaagcgattggctaaggaaaatgaagattgcgttcgactcgagcaaatacgcggtatcggtccgaagatatccacggccatgatcgccacggtgggcgatgcgcggcagtatcacaagagccggcagatggctgcagcgatcggtatcacaccaagacagcatagttcgggcgacaagcatcgcctgcttggtattagtaagcgcggtgatgtctatcttcgtacgctgatgatccatggtgccaggtcggcggtggctgccgcgaaacacaaagacgacccgctcagtcgttgggtcaacggcattgccaacagaagtcatcccaatgttgctgcggtggcactggccaacaagaatgcacgcatggcctgggccatgttgcgaaacaagacagattacgatcctgacttcgcagtacgctgagacaggatgtatagatggagaccctccaagacgattgcgaaagcaaactgcatgatggcaaacaggtgagaccggcgtcagtgaaacccgcgaaggtccgcgtacatataagtacgagaaagcgattgggactgacgcgcgaataaaccattatggcccggcatcaacaaatgtatgccaactttagaggccggataaacgtatgcagtcgtaccatgtctgccagaacagattgcttgcaaatgagggggagtccatata

SEQ ID NO: 1941 - DNA, 1447 bp, unidentified
  source 1..1447: mol_type = unassigned DNA; note = element_2a4e67f
  misc_feature 1: note = core
  misc_feature 2..78: note = LE
  misc_feature 79..1143: note = CDS
  misc_feature 1144..1447: note = RE
  misc_feature 1212..1438: note = bridgeRNA
taatggaatggtccggccgtgctcctgccccgccagcgatggaagctggcacggggcgccaaagacaaggagcacactatgtcacagaacccaaataccgcgatcgctatagtcggcatcgatataggcaagaactcattccacgttgttggccttgatcagcgcggtgcgatcgtgctgcgtcagaagtggtcgcgtggccaggtggaagcaagatttgccaatatgccgccgtgccagatcggcatggaagcctgcgtcggcgcgcatcatctcagtcgccagcttaaggcgcttggtcacgatgcccgtctgatgccggcgaagtacgtgcggccctactcgaagggacagaagaacgacttccgtgatgcggaggcgatcgccgaggcggtgcagcggccgacaatgaagttcgtggcgacgaagaccgccgatcagctcgacttgcaggcgctgcaccgggtgcgggagcggttggtcagccagcgcaccggcatcatcaatcagattcgcgccttcctgttggagcgcggcgttgcggtacggcaagggttacggtttttgcgagccgagctgccgcgcatcctggctacaccccccgatgtcctgtcgccccgcatggtgcgggtcatcgaggatttggctggcgactggcggaggctcgatgagcgcgtccagaatctatcagatgagatcgaggcggttgcgcgccaggatgccggttgcgagcggctgatgagcgtgcccggcatcggcccgatcatctccagcgcgatggtagccgcgatcggcaccggagatgggttctccaaaggtcgcgactttgccgcctggctggggctcgtccctaaacagatctcgactggcgaccgcaccatcctgggcaagatatccaagcgtggcaatcgctacctgcgtgtcctgttcgtacaggcggcatgggtcgtgctgatcaagccgaagagctgggagcgccacgggctcaagccctggatcgaggccgccaagaagcggctgcatcccaacgtgctggcgattgcgctcgccaacaagctcgcccgcatcgcttggagcgttctggctcacggtcgaaacttcgagacgaggacgaatactaacgcaaccgtccaagctgcttgatcgtccaacgcgagatgagcaccgaaagatgaggagcccgcgatggcgtagtcagatcgatacgacgtacccgccgaggtctgcgagaggatgagacgaaatggaggttcggtcttcccggcgcatgcgaacactggtgacccagatggcccggtcgaggcctgtccgttaatgagatcgcacgcgcgctgatatccatgatggccaggagcccacgctccaacaaaaggccggatacattgatgcaagaccgctcaccgccaactcgacgaagttctcttgcaacgcacggccggaccataca

SEQ ID NO: 1942 - DNA, 1668 bp, unidentified
  source 1..1668: mol_type = unassigned DNA; note = element_2a51baa
  misc_feature 1..3: note = core
  misc_feature 4..293: note = LE
  misc_feature 294..1274: note = CDS
  misc_feature 1275..1668: note = RE
taatctccattccgccgccttcggttggcggcacaaatagtaatgaaagtgttccaactctctacactgtgctgtaaaatagtttgcaagaagctacactaaaaagcacgggaggaggagttgtaataactttcttcgttttagacagcataataatcagtgtaagttctgccttttcaagcacaaataagtggcatcatgaatccgtacactaagaattgtttaagcaccttagtttaattgtgtggcagttcagtcaatggcttcttatcattcacgaaaggagtctgactatgaaagttacttatcaaacctgttgtggtgtcgatgttcacaaatcttttctcgttgccacaattgtaaaaaccactggtggcattgagccttcttaccaaaagaagcgcttttccacctttaacaattcaattcttgaattcaagcaatggcttctcgacaatgattgccatgatgtctgtatggaatccacaggtaaatactgggttcctgtctttaatcttctggaagatgagatcaatgttgtcattgccaatcccaagtgggtaaaggctgtgaaaggcaacaaagatgataccaaagattctaaatggattggggatttattccgtctcggacttgtcaaaggcagctatatcccttgtaagatagtccgtattctcagggaatacactcgctatcgttacaagcttgtttcctgccgttcaagtgaaaagaatcgatatcagaatgctcttactgtctgtaatgttgcattagattctgttgtttccgatatctttgggaagtcatccatgtccattatcgactatctgcttgaacaatcgggtacatccattaaccacgaagaaatcgcatctaagcttcttcggagcctcaaatccaaagaagatgctgttatagaatccgtcgaaggatatcagatgactgatgcccaaaaataccgtatgcgcctcgtccgcacacatatggattatatcacagcagaaatcaacgatgttgataaaatgatagaaaatatgatttcttctaatcctgattttgaaaatgctgtccagctcctctgtaccattccgggtgtcaaacgtgatagtgcaatcactatcatctccgaaatcggtactgatatgtctcagttctcaagttccaaacgtttatgttgctgggctggtcttttacaccaggcagcaatgaatctgctggtaagaagaaatctgttcggattacacgtgccggtgtctacctcaaacctgcattagtacagtgtgctcatgcagccgtaaaatctgacaaatctccttactacaaaaagaaatatgaatcacttgttaaacgtcgtggcaagaaaagagccattatcgctattgcccgtatgattcttgctgccatctaccagatgctgtctactggtgagcagtggaatccgagcgatctttacaaaatcgatatgcctgtagctcttattgaaaaacaaaaggcaaaagctatcaagcaagccaagaaactattgcaacgggagggaatacttcctcctgatgaaccattagcttcttaatctaattcactatatctataacactctaaaaagttgcctgatttaggcagcttagtaaagtgcgcccatttatggctgtcctctactttctttcacac

SEQ ID NO: 1943 - DNA, 1554 bp, unidentified
  source 1..1554: mol_type = unassigned DNA; note = element_2a53ee6
  misc_feature 1..2: note = core
  misc_feature 3..262: note = LE
  misc_feature 263..1429: note = CDS
  misc_feature 1430..1554: note = RE
  misc_feature 2..239: note = bridgeRNA
gtatgataattagaaggtaattatcactattcctttcttttaatattggtatataatacattcagatactgtgactctttgattttgtcttgtagctttgactacttaacaggagtgtattgccgctacctttatctgaattgtttatgtgctggatgtaccggagcatttgttccaatgagtacttatttcaatcaagtctacgatgataatcgtttgcggatatcacagtatcagatcttatgaaagggaggattacctcatgatttatgtaggcattgatattgccaaacttaaccattttgcctctgccatttcttcagaaggtgaaatactcatcgagccgtttaaattcacaaatgacgctgatggcttccatctgctggcttccaaactcgaatcattcgataaggccagcaccatcatcggtcttgagtcaacagcacactacggtgacaacctagttcgataccttgttgccgggctttacaaagtgtgtgtactaaaccctattaagacgtctcaaatgcgtaaaaacaacattcgcaaaacaaagacggataaggtcgacacttatgtcattgctaaaactcttatgatgcaggataccttaaaattcatcagtttctatgatcttgatctgatggaattgaaggcacttggacgtttccgtcagaaagcaataaaacaacggacacgccttaaaatacaactgaaaacttatgttgatcaggtatttccggaattacaatacttcttcaaatccggtctgcatcaaaaggctgtatatgctgtactaaaagaagcaccttcgcctaacaggattgcttccatgcatatgactcatctggcaactctgctcaaaactacatctcacggacactttacaaaggagcaggccaaggaattaagagttctggcacagaagtctgtcggcgcaaacgacagcactttatctattcagataacccagtccatagaacaaatcgagttactggacagccaattaaaaaagattgaagaagaaatgactgatatcatgaagttcaatgattctgtcataatgaccattccgggtatcggttatataaacggcggaatgattcttggcgaaataggtgatattcaccgtttctccaaccctaacaagctgctggcttttgccggtctggatccatctgtttaccagtccggtaactttctaggccagacgaacacggatgttcaaacgctactcccgtgtactaagatatgcactggtcaatgcactttgaatgttattaggaacaattttaccttcaagtcttactatgaaaccaaaatggctgaagggaggacacactataatgccctcggacactgttccggaaagttagtcaggattatctggaagatgctcactgacaaagttgaatttaacctcaaataagaggtctataccaacgtcgatagtacttgaaaaggcaccctaagggagctttgttaaagttaccctttttaccatcgatataaaaagaaagttttacctaatttaaacttgacttttcatagctg

SEQ ID NO: 1944 - DNA, 1494 bp, unidentified
  source 1..1494: mol_type = unassigned DNA; note = element_2a59bd6
  misc_feature 1..3: note = core
  misc_feature 4..135: note = LE
  misc_feature 136..1167: note = CDS
  misc_feature 1168..1494: note = RE
  misc_feature 1196..1378: note = bridgeRNA
aacatggggtaatcgcggagcggttcactccatggccattttctcagcaatggctagcagaggtggttgcccccgataagatggaaatacgggctcacgattggaaccgggcccacacatcgaatggaggcaaccatgaaccagtatattgggcttgatgtttcattgaaagataccgcaatctcaatccgacaaggcggtaggcgggtctggcgcgggaagtgcccttcggatccaaaacttctggcgcagatgatccgtaagcacgccccgcacccaaagcgcgttgtattcgagacggggccattgtcgacgtggttctatcatgcgctgacagccgaagggcttcctgcgatctgcatagaagctcgacacgcgcaaaaggtcctgaacgagacgctcaacaagactgatgccaatgatgcggatggtctagctcagttggcagaagcgaacttttacaaggtcgttcgggtaaagtctttcgacagcatgctgacgcgcacactggtggcggcgcgaaatcaacttttgggaatcacaactcagctcagcaaccaaatccgcggcctgatgaagacgttcggtcttattgtcccaaagggaacaggtcgtgtatttgatggtaatgtgcggaaactgttggatggaaattacagcctggcacagatcctactgcctctgctcgatgcgtggcgcgacatacgcaagcgcgcggccgatcttggtcatcagttgctcgcagcggcgagagagagcgaggctaccaagcttttgatgacgatcccgggcgttggtgccgtcacggccgtgtcttacgttgccgcgatcgaaaatccagaaaacttccgaacgtcacgctccgttggcgcttggcttgggctgacaacacggcgctatcagtcgggcgaggttgactataacagccgtatctcacggcgaggagacaatcacctgcggggacttctttacgaagcggcaaccgtgctcctgacgagagccacaacttcgatcgagtgcagtctgagagattgggggctcaaactgcgtgagcggttaggcttcaagcgcgctgcggtcgctgtcgcgagaaagctcgcagtcatcatgcacagcatgctcaaaacgggggaagtatttaatccatcggctggcgctcccgcataagcgaagccagccgactcacctcagcgcgtcaaacctgattgagacgctgagcgtccctgctgtggacgtgggttgggtcattccgccagtttggccgcagctcgaacgagactgcgccttaaacataggaagatccaccctgcgaaggcccattatgcggcgaccaagtgttgaccgcggagacaaccctgctcccggcgcggatagcttagtagcaaacaatgacgcagaggcccgactcggtcatataaatatcgcgttgcataccctgcaacacgtgaggtcgccggctgatcaacggccttgactaatgacatgcaattagac

SEQ ID NO: 1945 - DNA, 1227 bp, unidentified
  source 1..1227: mol_type = unassigned DNA; note = element_2a66e66
  misc_feature 1..3: note = core
  misc_feature 4..244: note = LE
  misc_feature 245..1210: note = CDS
  misc_feature 1211..1227: note = RE
  misc_feature 7..213: note = bridgeRNA
tcttgtgtcttggaatggcgccctgatcaggcacaattcccccggtgaccccgggaggctccgatgacgctgcctcggctcttaagccttcgagcttgcaaagtagattcagcgcgtcggcggcctgacaccgccttggaacttgaacggtatcttaggcccaccttcgggtgagagcctgcactcacaagggcaagtctggcggcttccgatcacgatcgtaagttcaagctggagcaagatcatgcaagtaatcggcaatgacatggccaaggcgacctttgatgttgccctgccactgtccgacggcaagtaccgcaccaaagccaaacttcccaatacgaccaagggttatacggaatttttggcgtggcgagccaagcatgcgcctgacgcagcggtaggtatggaggccacgggtatctatcacgaggctttggcgcgcgccctggtggaggctggggtgacggtttatgtcgccaaccccgcgcgggtgaaggcatttgggcaggctgagggagtccggaccaagaccgaccgaagtgatgccaagctgattgcccggttctttgaagcccaacgtccggaaaagctgcatccctacgtgccgccgacaccctcggaggtgaagttgcgtgctttggtccggcgtcgggacgatcttcaggaaatgctgcagatggagcagaaccgtctggaagttgccgatatctccgtccagcaagggatcaatgacgtgatccggacgttggaggaacagatcaaacaggtgcaaaaggcaatccaggaccacatcgacaacgacccggacctgcgcgggcgccatcaactgctcaccagcatccccggcgtgggcgataccagcagcgcccagctgctggcgtttttaggcgatctcaacaaatacagcgacgtgcgtcaggtagttgcccacgcaggcctgaatccagcgcagcgtcaatcaggaagttacgaaggtaaagcccggatatcgcgggtgggcgatgccaatttccgcaagaagttgtacatgcctgcgctgaccgggaagacctacaacccgactctgaaggcctttgcagaacgtctcagcgagaaaggaaagccattcaaggtcatcatgtgtgcgctgatgcgcaagctcatacacctggtctggggagtactgaagagcggccgaccgtttgagcctgaagtcgtccttgcctaggcaaggacgacacggta

SEQ ID NO: 1946 - DNA, 1200 bp, unidentified
  source 1..1200: mol_type = unassigned DNA; note = element_2a6a0e0
  misc_feature 1: note = core
  misc_feature 2..209: note = LE
  misc_feature 210..1175: note = CDS
  misc_feature 1176..1200: note = RE
  misc_feature 34..201: note = bridgeRNA
tcttaagtttgatttcctaacttttgagtactaattagaaagaacaaaagagaggagtaaggttatgttattcgtgggaacctggagattccgtcaacattgaaaatcccctctcttttctacttcaatttcgttcagttctatgagactttgatctcgtttttaagttgttgaaagcaaagtaggcgtcctttcctaatcaattttctatgaataaatgtagccaaatttatggagtagacatcagtaaaaacgtattcgatgttgtagactccaagggaaatcactctcagtttaagaatgatggtaatggatttaaagcctttcaaaaagcgcttcctgccgatgccttagttgtaatggaagccactggatattatcattatcgattggctcagttcctgtatgagcaaagcgtaaaggtctctgtagtaaatccactatctgttaaaaggtttatccaaatgaaactttctagaataaaaacagataaatctgatgctaaggccatctgtgaatatgccactgtaaatgaagttccattatatactgctagggacaagaaccaggcggaatgcctacagctcatgcgcctcatcgatatctacttaaaacaaagtacggccttaaagaataaactgcacggagagaaaaccctggggacaccatccaaggtagtatatcattctttaaatcgctctctaaaagccgtgcagaaagaaatccagatcctggaggaccgcctgacggagatcgtaaaggaagagcaacaaaaacaactgacccttctcaaaagcattcccggaatgggcagtaaaacagccattatgctaattgttctaaccgagggattttcaaactttgaaaacgcccgacaactttgtagctacaccgggatcacgcccactttgcgtgaatcaggtattagtgtgagaggccggagccggataacaaaaatggggaatgcaaagcttagaaatctattattcatgtgcagtttttccgcttgtaaacacaataaagcctgtagagagatctatgaacggattatagcaaaagggaaaagtaaaaagttagctcttatagctgtatgtaataagctactgaaacaggaatttgctatcgctaaatcaggtctgccttatgaggaaaattttgtttcgagattagcttagaaaacttgttttttaactcagttct

SEQ ID NO: 1947 - DNA, 1195 bp, unidentified
  source 1..1195: mol_type = unassigned DNA; note = element_2a6cb6e
  misc_feature 1..4: note = core
  misc_feature 5..213: note = LE
  misc_feature 214..1173: note = CDS
  misc_feature 1174..1195: note = RE
  misc_feature 37..202: note = bridgeRNA
tcatcctatgtttgcaaagtattaattttaggaaagaataaggaaaagagagtaaagaataaggctatgtattgtcattagtcattaaagaccgttcggaatgttagtccctttactcttttactaccaagtttgaacagatcattaggcacgaagcctgtatttaggatagataaacaattgtagtattctcttttccaaaaacatttaggaatgagtaaaattataggaattgacattagcaaacaagtttttgatgtaagtttttttgatcagcaactctggaatcattacgttttcaagaacacggattcaggctttaaagaattattgaaatttgttgaaaaaggagatgtagtcataatggaagcctcaggaacttactaccttccattagcagagtatctttattctcaaggaataaatgttgttgtagaaaaccctttatccataaagcgctacgcacagtcaagactgaagcgtgcaaaaaccgacaaggcagattctaagataatcgccgaatacggaaagaagaatatggatgagctgagtttatggaatgcagaaagtaaggtgtgcatcagaatccgtcagatgcatacaaggatacagatgatccaaaagcagatcagccaaacatataatcagctggaggcctttcgaagcagtggttttttggatgagaagctggagcttgaaataaaggattcggcaaagcagcttctatcgggaaaagagctattagaaaaggaaatagaaaaattggcattagaggaatttggagaaaccatagaatgccttacaagtattccgggaatcggagtggaaacggcaattatgctgactgttattacagatgattttaaaaagttcaatcattacaagcagcttattgcttttgtgggattcagtccccggatttttgaaagtgggagcagtgtgagaggaaaatcaagtatctgtaaaatgggtaagtctcaaataagaaagcttttgtatctatgcagttggtctgcaaaacgatggaataaaaaatgtaaagaaatgtatgaaagattaatcaacaatggaaaagcggaaagagtggcaaaaatcgctcttgccaacaaacttctcaaacaagcttttgcaataggaaagaaaaaagaaaagtacatagaaaatttgtgctaaataatttgctttttaacacaga

SEQ ID NO: 1948 - DNA, 1550 bp, unidentified
  source 1..1550: mol_type = unassigned DNA; note = element_2a77b52
  misc_feature 1..3: note = core
  misc_feature 4..588: note = LE
  misc_feature 589..1431: note = CDS
  misc_feature 1432..1550: note = RE
  misc_feature 3..229: note = bridgeRNA
ctcgtataatgaacatgtagtccattatacatttttttattcttaatttcattgtataatatctacatagacactgtggattagtgcaaattactatcgctttgacgattatattaatagactctaaccacagatgtttgtttaattgttaattagttagataacgcttgacgtttaatattgaacgagtttactttcgacaagcatttcgtggatcacattgtctaaatattttgtaaaggagtttttattatgatttatgttggaatcgatgttgcaaaagataaacatgattgttttgctatgaattctgatggcgaaatattaattgaaaaattaaccataacaaacaatttagatggttttgaaactctctacaattctttaatgaatttttctgattcattagacaatataaaagtagggcttgaagccactggtcattatagtaataatattctaaactttctgaccgaaaaaggatttaatatctatcttattaatccattacaaactaatctttacgtaaaaggtcaaagccttagaaagacttaaacagataagttagatgcacatgttattgctacaatgcttgtttcagataacttaaaaccctacataccagtatcatatcatatttctgaattaaagtcactaactagacacagatttcgtttagctaaggaaaactctaaatttaaaacttctcttgtaagacttgtagatattgtttttcctgaacttccaaaaattgtttcttctgttgctcaaaagtcttgtttagctttactttatgaattaccaagtgctaaagatatagctgaatgtaatcttacacatttaactcatcttttatctgataattcaaataaaaagtttgacagagaaaaagcacttcaaattagagatttagctagaaaatccattggtttaaatagcaactctgtttcatttgagttaaaacagacaattagtattattcagtttatacaagagcaacttgatgatgttgagaaaagaataaaagaaattttaaaagagattaattctccaatactaacaatacctggaatttcttttaaaactgctggctctattttagctgaaattggagatatttctagatttgattctcctgctaaattactagcttttgctggacttgatccatcaatgtatcagtctggtaaattcttttctactcattcagtaatggtaaaacgtggttctaaatatcttcgttttgctttgatgactgctgctagaatggtttgtttaaatgatgctaccttttgtgcttttaaagatagaaaaatggctgaaggcaagcattatatggttacaatgggacatgtaacaaagaagttggttcgagtcatttattatttattaaaaacaaataatgtatatcaagctagcaaagtggcttaatatcaataatcgcatagtttttaaaagcatttttcgaaatgcttatttgtcatgcaataatttatctaaaaaattttaaaatttttttacaataaactattgacattcatatagttagt

SEQ ID NO: 1949 - DNA, 1521 bp, unidentified
  source 1..1521: mol_type = unassigned DNA; note = element_2a7aa7a
  misc_feature 1..2: note = core
  misc_feature 3..245: note = LE
  misc_feature 246..1412: note = CDS
  misc_feature 1413..1521: note = RE
  misc_feature 9..225: note = bridgeRNA
cttgtatactcagaactgtaataatagttagagtataacttcctttctttctattgttataattaaattaagcactgtggatttgtgtcatttatgtatagctttgactattgaaggagactcttaccacagttcttatttttaatgtcaatcagtaagttagcgctagacgcttcatcacaagactacataaataagaaatctgtgacttacccagtgctaaaacttatattggaggtgtttttatgtacttaattggaattgatatttctaagtacaaacacgactgcttcatagctactgaagcgggtgaatctatcaaagcatttagctttgacaacaatcgtttaggatttgatacatttcttgagactttgaaatcaatagatcagtcaaaagaaataagaataggtcttgagtcaacaggacactatggatcaaaccttaaacagtttatttgtgcatctggttatacttatctagaattcaacccttacttaacgcacatgttctcgaaagcattatcgttacgtaagacaaagacagataaagttgacgccaaaactatttcaagtatgctaggttctgttgactacaagaccttacatactagattttaccacatcaatgaattaaaacaactggtgagatatcgacactcacaaatggtcaatcgttccaaaacactgattgagcttacaaacatcttagatcggatattccctgaattcaaacctttcttcaacgaaagactcgccggtagcgccatatttatccttaagagattcaaatcaagagcaagaatttctaaactctcaaccaaagattatgaagctattcgaagttactctaaaggaaaaatcacttatgcccgaatccaaaaacttaaatctttagctgcttcatctgttggttatgaaaccaaatctgatctcttacttcttaaacactcaatcacgcattatgaagacttaactgaagtacttgattctgttgaacatgaaatcattcatctgatggaaaatatcgatcaaacattgacaactattccaggaattaatatcatttctgcagcaatcatcatcgctgaacttggtgatttcaagaactttaccaattctgctcaaatcatttcatttgctggactggatacctctgttaatcaatctggaacaatggaaactagaggtcatcttgttaaacgtggttcaggccttcttagaatgacattatggcaaatcacattttctagtttaagattaaatccaaaactctatgattactaccttaagaagcgtgctgagggtaaacatcataaagtcgctatggtacactgtgctagaaaaatgattcgtgtaatctattacttaggtgtcaatcaattgacatttgatcattcacaattcagataatcaaatgagggtgtagctacctcttattggttcataaaacttatttaggcttccatgtgaggtcttttactattttttatcatttactgcttgacttattatagtaagt

SEQ ID NO: 1950 - DNA, 1438 bp, unidentified
  source 1..1438: mol_type = unassigned DNA; note = element_2a80871
  misc_feature 1..3: note = core
  misc_feature 4..151: note = LE
  misc_feature 152..1171: note = CDS
  misc_feature 1172..1438: note = RE
  misc_feature 1208..1438: note = bridgeRNA
agaatgagatgaacgccccccactcattaagttcggagcgacatgatggttgaaagcgtgaaatcggcaggtgtggagcctcgcagattttcggcatcatagtgcccaatacgggatgcataaagctccctcagactggagactccacaacatgaaatatacaccggttggcgttgatatcgcaaagcatctgattcaggttcacttcatcaatgagcatacgggtgaagtggtggataagcagcttcggaacaaggctcttctgacgttcttcagcaaccgggaaccctgtctgattggtatggaggcttgcggaggctcgcagtactgggcgcgtgaactggaaaagctgggccacaaagtcaggttgatgcagggacggttcgttaaggcgttcgtcatgggtaataagaacgacgtgatggatgcacgggctatctggatggcggttcaacaacccggcaagggtatcgctgtgaaaacggaagagcagcaatcagtgctggttctgcatcgttcgcgcagacaactggtgaagttcagaaccgcgcagattaatgccctgcacggtacgctccttgagttcggcgaaactctccacaaaggtcgggcagcgatagacagggagttaccggcagccctggatagaatgaaatcaactctgcccccgtatctcatcaccgtgctggaggagcagtataacaggctgaatgagctggacatgctgatagagggtcttgaaaaacagcttattagtgtggctcggcaaagtgaaacctgtaaacggctgatggaaatccccggtgtggggccgttaatcgctacggcggcggtcgccacgatgggagaggcatcagcatttaaatccggaagggagttcgctgcttatgttggtctggtgccaaaacaaactggctctggagggaaagttcgcctgctggggataagcaaacgcggcgatacgtatctgcgaaccctgtttatccatggagcaaggtcggtgtcattagtggcaaaagagcctagcccatggataacagagctgaaaaaacggcgtccggccagtgtggctatcgtggcgatggcaaacaaattggcgcggacggtatgggctatagctgcgcatgagcgtcaatacgataaaaatcatgtcagtatcaggccatattaatcgctgatactgataaatatttactcttaaaaagggtgaatgctgaaaggttgcgatggcagcccgagtgatgacaaagacggtaagaccgtgacctgataaacctgaataggatcccggacataaagtccgccaggagaataaggaccaggtcagcgaatctcatagaggcccgcagcgctgactgcaataaggccggatacagagctgcaactactcgtcaatgtcagaacaacggaagccttgcaaacggggaggcgttcatac

SEQ ID NO: 1951 - DNA, 1161 bp, unidentified
  source 1..1161: mol_type = unassigned DNA; note = element_2a8540a
  misc_feature 1..2: note = core
  misc_feature 3..210: note = LE
  misc_feature 211..1149: note = CDS
  misc_feature 1150..1161: note = RE
  misc_feature 11..219: note = bridgeRNA
cttgtcttatgctttccttatcgatctgcaaagattgagccactgccggccaagccatttatggctggcagtggtggcggctggatcgctttgggcttggtcgtgagggaccgttttcgagtatggtcagccgccgtcttcgcatgaggcctgaacggatacgcaagctggatttttcatgggcttgcatgacaagcataggacatgacgatgatgacagatgatagcataggcattgatatttcgaaggactttctggaagcgcatcggttaagcgatggaggcacagcgcgctttcccaatgcacctaccggtttccgtgccctctcagcatggttgggcgcggacatacctgctcgtgtcgtatttgaggccactggtccgtatcacagacgttttgaacgcgcactttctcggcgactccctttggccaaggtcaaccctttgcaggcgcggcggttcgctcaggcctgcggctccagggtgaagacagatgtagtagacgcgcgcatgctcgcaagctttggaaaagcctttgccttaaagccagaccaacccatcgacgaaaagcaatatgaaatcagagagttattcagtgcccgaggagctcttatcaaggatcgcacccgattgataaatcgtctgcaaacacaaactcttgctctcgtcaggcggcaaaccaaagcacggatagaacagctaacgcgtcagctgaaggcattacaacaagacattaacgtaaggctgcaagactgccccagccgcgcccgggccaacgcaattttacgatcaatcccgggcataggcgaagtggccgcagcaaccattctgattgagatgcctgaggtcggtactcttgataagaagaaagctgcaagcctgaccgggctggctccgatgacccaacagtcgggaaagtggcgtggcaaagccagcattcaagggggccgaaagcagttgcgcgacgcgctctacatgcctgctctcgtcgctgtaaaacacaaccccgatatgtgcaaaaaataccagagaatgatcaaacagggaaaaccgcaaaaggtcgctctcacagcaatcatgcggaaactcattgagctcgccaacacattggtcaaagcagatcgagagtgggttcaaaaccacgcttgaccaagacggata

SEQ ID NO: 1952 - DNA, 1232 bp, unidentified
  source 1..1232: mol_type = unassigned DNA; note = element_2a87a92
  misc_feature 1..3: note = core
  misc_feature 4..238: note = LE
  misc_feature 239..1207: note = CDS
  misc_feature 1208..1232: note = RE
  misc_feature 48..215: note = bridgeRNA
catcctatgtttgcaaaaggaagttcttttaatattttataaatttatttcaacagaagaaagagaaagataaaagctaaatcttgtcattggtcaattaagactgttcaatatgctagttcctttctctctctgcttttgaacttggacagttcattggtcataaagaccgtatttaggattgataagtctcaagcagatttcttccgtttactttaatttccttaaaagcaaatgtatgaaaaaaagcaaaaattatgttggaattgatatttcaaaattaacttttgatgttgctatttgtaattctgaaagcaagtataagtattttaaatttgctaataatcatgaaggttttattttgttttcagaacttttaaatgcatcagaatctatttgcataatggaagctagcggtccatactatctaaagttagctacttttttatcagagagtgggattggtgtttgtgttgtaaatccattgatagtcaggaggttttctcaaatgcgaatgagtcgggcaaaaacagatagaaaagatgctatgctaattgcagaatatggaaaaaccgaacgaccaaatctctggcaaccagaagcagattatgttttagagcttaagcaaatgcaggcatatctagaacaattgaataaaaatagaacaggatatatagttcaaagagaagcttttaatcaaaaccctataaaaagtaaaacccttgaaaaaagtattaattctgttttagaaacaatagaacaagagattaaacaaattgaaaaaagaatggagttaataataaaaacccatcatcaagaaatgtttaatcaactaaaaagcattccaggaatgggagctaaaacatctttgtttttgattgtaatatcaggaggatttagcaagtttaagaatcataaacaacttgcttcttatgttggaatatcaccaagaatatttgaatctggaacaagtgtaaagggtagatcgaaaatttgtaaaatgggaatgagtaaaataagagctatgctgtatgtttgtgcatggtcagcaaaaaaatgtaacaaaacctgtaaagaattatatgacaggttagtagaaaaagggaaatcaaaaaagcttgcattaattgcagttgtaaacaaactattaaaacaagcttttgctattgcaacaaaaaaagaatattattcagtaaaaattaactaaaataaatttggaaataaacacagtt

SEQ ID NO: 1953 - DNA, 1796 bp, unidentified
  source 1..1796: mol_type = unassigned DNA; note = element_2a880d2
  misc_feature 1: note = core
  misc_feature 2..260: note = LE
  misc_feature 261..1250: note = CDS
  misc_feature 1251..1796: note = RE
  misc_feature 56..255: note = bridgeRNA
cctttagatttgttctatagatgaaatctattatgataatgatgttgaaaagagggggtctgggggagactcataacttacagaatttgtcaataactttaaggttaagagaacggggtgaactttggcgagggctaggttaacgaccctggtagtgtattagtccccgttccattaacccggttgccaaggaccagataggatagtagccttggctattaaaggttttagtcaatgcaaccttttaaacttttaatactatggaaatcaatgaagttatcggtatcgatgcaagcaagttaacattagattgctgtattcacaatagtgggtatcaagatgtttttaccaacaatcccaaagggatcgacaaactattggactgggtatcaacccatgttattgccaaaaaagaacagatcttgttcgtatttgagaacacaggtctttacaccattgaacttacggatgttttacacgagcgtagattttttatgtacgtggcatccggtcttgaaattcgacgttctctcggtatcgccaggggcaaagatgataaggcagacgccaaacggatcgctctctatggttatcgggtaagagaaaatgttgagccttactgcatgccaagtatagctttggctaaattaaaacgattgatgtccatccgcaggaaattggtagtacaacacgctggatatatggcaaacctcaaagaacaaaagagggtcttgagtgacaacgaaatattgttcaacgtgcaggagaaagtaatggaagtgctctacgtacagataaaggtagtcgaaaaggaaatggataggattatcaaagatgagcccgagcttgcaagacttcaaaagctcctaactagtataaagggaataggccaagtaacggcccggttcctgataatttatacagttggttttacagctttcgagtcttggcggaagtttgcatcatatgttgggattgccccattcccaaacaggtcgggcacaagtattaaaggcaggaataaggtaagcaaccttgccaataaggagggcaaggctcttcttcatatgtgtgcagtttctgcaattcaatgcagtccggaaataaaggtctattacgaaagaagactcgctaagggcaaacacaaaatgagcaccctaaacattatccggaacaaactattatcaagagcttttgccgtggttgttcgcggcactccgtatgtcaacactatgaaatatgcttcttaaagcaactttcattacgaacctctaacaatacagaatagaggctgacttatatctacttattaaactgttttgcaagcgtaaaataagctgattggaaaaatattgcccaaaaatgacctaatcattcaagaaacctttatgcattttgtgcccttgctttgaactctgtctctcttcaatgttcatatttgacctactatatccatagctcccactatccctttttaaaactgcgaaaaaacaacatcctttcttggacagcggcataaagccgttccggctttgcctactctttttatacgctttaccaatcccggatggtgtaaagcaaaagcatcaaaaaagggaatgtggcggcactataggaagtaagtcaaaatcaacaatcatgaaatcaatacgaaaacataaaatagcaagagcacaaaaaaatcaaaaagaggaaaatgctctggatataataagtaagccggttcaactgcgttgccaaaagatcagaataatagagaaagtttatcatcaaaaatttggaattaccataggata

SEQ ID NO: 1954 - DNA, 1542 bp, unidentified
  source 1..1542: mol_type = unassigned DNA; note = element_2a97c80
  misc_feature 1..2: note = core
  misc_feature 3..239: note = LE
  misc_feature 240..1304: note = CDS
  misc_feature 1305..1542: note = RE
  misc_feature 3..218: note = bridgeRNA
cttgtattataaagtagtagtttatagcccctacccaaggggcgtgtgctacactgtaaaggatgctgtggattggttaaatcctcctaccgcaagacggttccgaataggctccaaccacagtcctttacagtattgttgatcagttagataccgccagacggtttatgtagaacaaggttacaagagtgaagtgtcctgtggacccagcatcaaataaacataccggaggtaccattatgatttgcgtgggtattgatgtcgccaaggacaagcacgactgcttcatcctcagctcagagggcgaagtcctggcggatgtattcaccattcaaaacaatgcagagggctttgacacactcctgcaaaccattcgccgctgcgtctgtccaggagataaaataaaagtagggcttgaggctaccggacactacagctacaacattcttggatttctgcttgacaaaggcctggacacctatgtcatcaatccgctgcacaccaacctctaccgaaaaagcctgagccttcgcaaaacgaagacagaccgtgtcgatgcgcgaaccattgcggctatgctcatgtctgatgtggacctcaagtcctacacagacacagtataccacaacgaggagctaaagtcactcacaagataccggtttgacaaagttcgtgaacgggcaaagctgaagcagtcggtttcccgtctggtcacgatcctatttcctgaactggaaaagctggttccatcacttcacatggcatctgtttacgcacttctcggcgagtttcccggtgccaagcaggtcgccggagcacacctgacgcatttgaaagcagtcttatacgatgcctccaagggtcgctacgggagagatatggcaacaacgcttcgggaggcagcccgatgttctgttggctctgtcatgccggccaagtctctggaattgcagcatacgatccgcctgatccgcgaactggatgccgaaattgaggacatcgaggccgctattcagcccatgatggacgaaatgcagtctcccattacgacgatccctggtattggcgttcgtatgggtgctatgatccttgccgagattggtgacttctcccgtttcgactcgccggataaaatccgcctatgccggtatgtctccctctacttaccagtccgggcagctttctctgtctggagcctactcgcacatggaaaagcgaggctctcggtatctgcgctacgcactttacaacgccaccaaatatgtctgcctttgggatcctgtctttgccgcttaccttgctaagaagcggactgagggcaagcactacaatgttgcgctctctcttgcggcaaagaaattggtgcgtctaatttacgcgatggagaaatccagacagtcatatcgtaacgctgcgtaaatccattcttctatatgctcagttaggcgtccgtctggatgtctgctttgctataccctttttgaaccgcctgcattttttcaccactcctccgcatttcgggcttgacttttaatagttagt

SEQ ID NO: 1955 - DNA, 1533 bp, unidentified
  source 1..1533: mol_type = unassigned DNA; note = element_2aa29e6
  misc_feature 1..2: note = core
  misc_feature 3..241: note = LE
  misc_feature 242..1417: note = CDS
  misc_feature 1418..1533: note = RE
  misc_feature 3..219: note = bridgeRNA
cttgtattatagagtagtagttattaagggccctctccaaggacttgtgctacactgtaaaggatgctgtggattggttgtatgctcctaccaccagatggttcccgacaggttccaaccacagccctttgcatttttgttaattagttaaataccgccagacggtttatgtggaacaaggttacaagagcaaagcgccctgtggaagcagcatcacaatcttaccgtcggaggtcttgctatgatttctgttggaatcgacgttgccaaggataagcacgactgctttattatcaattcagaaggggaagtcctcgcggatgtgttcaccatcccgaacagcctagaggggttccagagtctgctgcagaaaatccgaagctgctcctcgactcaagacaaaataaaagtagggcttgaggctaccggacattacagctacaacatccttgggtttcttcttgacaatggtcttcccacctatgtcctgaaccccctgcacactaacctttaccggaaaagcctcagtctcagaaagacgaagacagaccgtgtcgatgcacgaacgattgcggctatgcttatgtctgatttaggcctcaagccctacacaaatacagcataccacaatgaggaattgaagtcactgacgaggtaccgttttgacaaggtgaaggagcgtggccagcttaagcaatcaatttcccgtctggtctgcattctctttcctgaactggaaaagttggtaccgacgcttcacatagtttccgtttataccttgctggagaaatttccaggagccaaacagattgcggaagctcatctgacgcggctgaaaacacttttacatgacgcttccagaggccgctatgggcgggacatggccgtaaaaatccgtgatgctgccagaaattccgtcggttctgtgatgccggcgaaatcgctggagctgcagcataccatccggcttatcagggaactggataccgagattggggaaattgagtccgccatccaacacattatggataagattcattcacctattaccaccgttcccggcattggtactcagatgggtgctatgattctggctgaggtaggagacttctcccagttcgactctccggataaaattctggcctacgccgggctttcgccctctacctaccagtccgggcaactcaaaaattgctatgcccacatggaaaaacggggttccagatacctacgttatgccatatttaatgccacaaagtatgtttgcctttgggttccgacgttttcttcctactttgctaagaaacgagcagagggcaagcactacaatgtcgcaatctcccatgctgccaaaaagctggtacggctcatttacgccttagaaaagtccggagaatcttatcacctggcagcatagctttcactcaatagctggtgtgaaactttgataggacctcgctttgctatacatttttgaaccatcttcttttcgatcaccatcctcagtttcgaacttgacttttaatagttaat

SEQ ID NO: 1956 - DNA, 1619 bp, unidentified
  source 1..1619: mol_type = unassigned DNA; note = element_2aab41a
  misc_feature 1..3: note = core
  misc_feature 4..277: note = LE
  misc_feature 278..1495: note = CDS
  misc_feature 1496..1619: note = RE
  misc_feature 14..297: note = bridgeRNA
ctactacaatatatttatggttaataccccttacagccagtaaggaattatccatcttgttgcttaagctgttagaatgagtatggcaattggtctggccttttcctcctaggacttaacgtccgtagaatagtccgccaaccagcctctcattcgcagcattcgttttacgcaggttgaacccctttggcgttcgtgtgacacccccagtagattgaacaggcaatgagaaaactggtgttgaccattgcaaatccattttaaaggagtacccattatgaacgcagttggtattgatgtttctaaaggtaaaagcaccattacgatccgcaggcccggcgatgtcgtccttatgtctccttgtgacattcctcacactcaatccggaatcaatggcctgattgagaaacttcgaagccttgatggtgaaaccaaagtttgtatggagcatactggccggtattatgagccgcttgctacctggcttaccgatgccggtatttttgtcagcgctgtcaatcccattctgatccgggactttggcgacgattctctccgctctcccaaaaccgataaagcggatgctaaaaaaattgcacgttatacccttgaccgttggacatatttgaggcaatatggaaacatggataaaacacgcaatcaactcaaaaccatgaaccggcagttcggcttttatatggaccagaagaccgccatgaagaataacctcatcgcccttcttgaccagacttatcccggggccaataccttctttgtcagtccttcacgctgcgatggcagccagaaatgggtggattttgtccacacttactggcatgtggactgtgtccgtaaccaatcgctgaaagccttcattgcgcactatcacaactggtgtaagcgcaaaggctaccacttcagtatcgacaaagcagagcacatctaccatctttcttctgacctgatcgctgtgttcccaaaagatgacaacaccaaaatgctcatacggcaggcggtcacaatgctccataccgcttccgtgaccattgaatctctgcgtcagaaaatgaatgcggccgcttcgactctgccggaatattccatcgttacggcaatgaacggtgtcggcccaacgcttggtcctcagctcatggctgagatcggggatgttacccggttcactcaccgcggtgcgcttactgcttttgcaggggttgaccccggaaagaacgattccgggcagcgcactcaaaaaagtgtgcgtacttcaaaaaaaggctcgccaatcctgcgaaaaaccctcttccagatcatggacagtctcatcaagcgttcgcctattgatgatccggtttatgcctttatggacaaaaaacgggcacagggtaagccttattacgtttatatgactgccggtgcgaacaaatttctccgcatttattacggacgggtaaaggaatacctttccaccctgtctaaaaacgaagaatcttaatcgaactcgctcatcattccctctcagaccagcgtactgcggtggtctgattcttgtgctttttattcaacctgtttcaatttcttaaagttcttccatttctgcttgactttttatttgcaga

SEQ ID NO: 1957 - DNA, 1378 bp, unidentified
  source 1..1378: mol_type = unassigned DNA; note = element_2aabb21
  misc_feature 1..3: note = core
  misc_feature 4..88: note = LE
  misc_feature 89..1111: note = CDS
  misc_feature 1112..1378: note = RE
  misc_feature 1110..1365: note = bridgeRNA
tgatggggtggacggcccctgtgtccggcgtcgagtgcgccatagtgtggtcgttgttgatgtggccacagaacaggaaccgtccaccatgatgactaccacgatcggcctcgacctcgccaagagcgtatttcaggttcacggcgttagcagcgaaggacaggttactgttcgccggaagctgcggcgttctgaactcatgaggttctttagagatttacccccgtgcctgatcggcatggaagcgtgcgccaccgcccattattgggcccgtgaactctctgccttgggccacgaagttcggttgatgccgccgagttatgtaaaggcctacctccgccgccagaaaaatgatgcggctgacgctgaagcaatctgcgaggctgtgacgcgtccgacgatgaggttcgtgccggtcaagagcgctgagcgtcaagcgatcctgaccttgcatcggaccagggagttgctggttcgacagaagaccacgctgatccgggccatccgtagccattgcgcagagttcggcctcgtcgtcccgcagggcgcgcgacggatcactgatctcctgcagttggtgcgagagacacatccttcgacgcttccgcaagcggcggtgctgacaatgcagatgctcggtgcccagcttgatgccctggccgtacaaatacgcacgcttgagcggcgactgctggcttggcatcgcgagaacgagacaagccagcgtctggccaccattcctggagtcgggattatcacttcaaccgctctggcggccagcatcagcgatccaaaactgttcaaatccggtcgtgagttcgctgccttcctgggactggttcctcgacaaaactcatctggtggcaaggagcggttgggccaaatctccaagaagggagatggctatctgcgcaagctcctcgtggtcggggctacgtcggtgatccggcgtgctcgaaccggtgtgacgccatcagctggctgggtccaggcgttactggagcgtcggccatcccgcgtcgtgaccgtagccatggccaataagaccgcccggattgcgtgggcggtaatggcgcgaggcgagacctacagacctatcgctaaggtttaaccgagattgctgcgaaccattggtttgtagctccgaactggaagggtgcatatgggatgatgatgatcaggtagtggccgcaggctgggaaaacccgaggtactgtcggagccttgagctcgatagcctgattgggacctggtccagcggactccatcagggccagcggccatcgacgccgcacaaacaggccggacagatgaccgcaacacccagatcgtcacttcaaaccagattcacccttgcagtgcaggggccgtccacaga

SEQ ID NO: 1958 - DNA, 1332 bp, unidentified
  source 1..1332: mol_type = unassigned DNA; note = element_2aaf7a5
  misc_feature 1: note = core
  misc_feature 2..77: note = LE
  misc_feature 78..1106: note = CDS
  misc_feature 1107..1332: note = RE
  misc_feature 1105..1326: note = bridgeRNA
gaatgatatggactccctctccctgaaactccgcgtgccatactgactcagtacacgctgaagaactggaggttatcatgtccaacattcaaactattggcgttgacctcgccaagaatgtgttcagtattcacggcgttgatgcatatggcaagtgcgtcttacgcaaaacagtcaaaagaaacaaactcttagacacatttgccactttaccgccttgcatagtcggcatggaagcctgctcaggtgctcatcattggtctcgtgaactcagaaaactgggtcatacgcctaaaatcatggcgtctaaattcgtcattccataccgacaaagtgagaagaacgatgcgaacgacgccgaagcgatatgcgaggctgtttcaagaccgaaaacccgttttgtttcggtaaaaagtgaagagcaacaagccgtactttgcttgcatcgaattcgtcacagtctcgtgaaaaatagaacagctacgattaatcaacttcgtggcttactctccgagtttggaattatcattcctcaaggccgctatccacttcaaaaaatggtgcctgatattcttgaggatgcggaaaacggtatcccattcctcgctcgggagttgctgagtagtttagtgaataacatccgccagcttaacgaagaaatccttcgttatgatagaaaagtctatcttttgagtaaggaaatgaagcaagctgccaaactcatggccgtgcctggtgtgggtgagcacagtgctaccgccattgttgcaacagtctgtgacggaaaacagtttggctcgagtcgccaattcgcggcgtggattggcctagtaccaaggcaatactcaacaggtggtcacgtacatcttggtcgtatcagtaaaagaggcgaaaaacacattcgtactctgcttatccatggtgcgagagctgttattgcccgctgcaaagaaaaaacagatagaaacagcttatggttacaacagctcgttgagcgacgaggttacaagcgcgcggctgtcgccctagcagccaaaaacgctcgaataatatgggcattattaacgactgaaaacgagtacaaagctaactatataagcggttagcccttaccgagtcaaagcaatagcaatagatgacaatacggtcagaccgagatgcttaaacctgtttacttgggaagtaacaaatactgtctaacgaatgaggtcagcatcaagcgaatatcatcagggtgacggatagaatccggcaaaacaccgaatgtagagctgctgtccgatccactgttgtcagcggtagctattgttgacaaaagagggagtccatgta

SEQ ID NO: 1959 - DNA, 1568 bp, unidentified
  source 1..1568: mol_type = unassigned DNA; note = element_2aaf8a7
  misc_feature 1..2: note = core
  misc_feature 3..250: note = LE
  misc_feature 251..1423: note = CDS
  misc_feature 1424..1568: note = RE
  misc_feature 3..226: note = bridgeRNA
ctcgtattatatagtagtagttatttacatccctctccaaggatgaaatgctataattcatacagacgctgtggattagtctcacgctcctaacgcatgacgttttcagaaaggccataaccacagccgtttgttcaattggtaattagttggataacgcatgacgtttcatttagcacgaggttacattcgacaaactggtctgtggaataaagcagtgtcaaatatatcgcacaaaggagtaactgctatgatttatgctggtattgatgttgccaaggacaagcacgattgcctgattattgattctgatggtgtgatcctctttgatccgttcaccatccctaacaaccgcattggttttaatgatctttttggaaagctggaagcctgctctgcagatttatccaatatgaaagtaggactggaagctaccggtcactacagcgataatcttctagagttcctgatttccaaaggtctccacaccacggtaatcaatccgttacataccaatctttacagaaaaagtctaagccttagaaagacgaaaacggatcgggtcgatgcccactctattgtgactatgctcaggacggaatgcttaaagccctactcacagtcatcttatcacgttcgtgaattaaagtcactcacaagataccgtttttccctcgttcaggattgctccagactgaaaacttcttatgtcagactttgtgtccttctctttcctgaattggaaaaattggttccatccctgcatatagcttctgtttacactttgctttctgaattgccaaatgccaaagccgttgctgaatgccatcttacccgccttacaaatcttcttgtaagtgcctcgaaaggtcgttatggtaaggagaaagcagttgaaatccgtaacgcagcaagagtatctgttggatctttcagcgaaatgaagtcacttgaattacaacagaccattgggctaattcaaattatggaaaaacagattgaacaggtggaatctaaaatcaatccgattgtggattccctacacagcccaatcatgaccataccaggcatttcttaccgaatggccgcgatcatcattgcagaaacggaaaaccttacaagctttgattctgcagagcaggtgctcgcctatgccggattggagccttcggtccaccagtcaggacaaatgacgtccactcatgcgaagatggtaaagcggggctcgaaatacctgcggtatgctttgttcaatgccgcgaaatatgtctgccgctgggatgaacattttggtctgtatctcgcaaagaaacgctccgaaggcaaagcctacaacgtggccgtttcccatgctgcaaagaagctgacacgggtcatcttccacctggtaaaaacaaacctgtcttttgttagtcaggtatagtcaaacttctcatagctatttttagagcagctccttgaggtgctctgttttgtcatgcaattatcaaggttcaaaaatatctaaaatccattcctgcactttgttccaaaagtttcattttaggacttgacttttaatagttggt

SEQ ID NO: 1960 - DNA, 1474 bp, unidentified
  source 1..1474: mol_type = unassigned DNA; note = element_2ab53dd
  misc_feature 1: note = core
  misc_feature 2..87: note = LE
  misc_feature 88..1116: note = CDS
  misc_feature 1117..1474: note = RE
  misc_feature 1245..1466: note = bridgeRNA
taatgggatggtcgcccctacccgaaacggcatctgagtgccaaagtggcgaatggaaattcccacaaaccgagaggagcgaccgagatgaagattacgacaattggccttgatttggcaaagaccgttttccaggttcacggtgttgatgagcgaggcaaagcagcacttaagaaagtactcaaacgagcgcaagtgttgcccttctttgcgaacctacagccgtgcctgattggaatggaagcctgcggcagtgcccaccactgggcgaggaaactggaggcgttgggtcacaccgtcaaactgatggcaccacagttcgtcaaagcgtacgtcaagacgaacaagaatgacgctgcggatgcggaagcgatctgtgaagcggtgactcgaccgacaatgcgctttgttccgatcaagaacggcgagcagcaagccgtactggcactgcaccgcgcccggcaaggcttcgtcaaagcgcggacagctcaagccaaccagattcgcgggctactggccgaatacggtcttgtgatcccgcaaggaatcagccagatcgccacgcacctgccggacattctggaagacggcgagaacggactgcccggggtgtttcgtcaactgatcgaccggttgggaacacacctcaaggaacttgaccgacaggtccatgaactggaagaacaaatccaggcgtggcaccgggccaatgaagcgagccgtaagttggcagaaatccccgggatcggcccgatcaccgcgagcgcgctggtggcctcaatcggcgacgccaggaacttcgatgatgggcggcaactggcggcctggctggggctggtccctcggcaacattccagtggcggaaagcagaccctgctgggtatcagcaagcgcggcgatacttacctgagaactttactgatccatggcgcacgcgccgtgatccgggtggccgaacgaaaggtcaatcacgcgggtagctggctggccggggtgatggggcggcggaacaagaacgtggccgcggtcgctctggcgaacaagaatgcgcggatcgtctgggcgctcttggcacacgaccgcaagtacgcctgcgattatgtgtcggcggcttgaacacgggttatccaccgcgccgctcgcctcccgcttgatagaccagcgggcggcggcaccgtggataaccctgccgcatcgcatcgcaacgtaagggcacaacggcaatacaccatcgaaggagattcccaccgattgcacaggcaatcatgacgtgatggcaagacaggtcagaccgggaccagtaaaacctgcggaagccaaagcacttcgagtgcgctctattgatcaggcgctggtcagctcattccatcagggaccggggcaatgccccattcagagtccggatctatggctgcaatctcttcctgcttgacatcatcaagtgaatgcttggcaaaataggggcgaccatcta

SEQ ID NO: 1961 - DNA, 1495 bp, unidentified
  source 1..1495: mol_type = unassigned DNA; note = element_2ab5b8c
  misc_feature 1..2: note = core
  misc_feature 3..251: note = LE
  misc_feature 252..1475: note = CDS
  misc_feature 1476..1495: note = RE
  misc_feature 7..244: note = bridgeRNA
ctaatgggagctagccgggtcgggctcgctggcagactcggtgcccgtagccgccggtgagtgagcactttccgcccctggaccgagacgagtcctagggtcagaccgtgccctcgccggtggtcgggagacgggacggctgatggggtgtcgtgcccgccgcttcgggtggcgtgagcactggtccattagggcgccggagtctcccgcgggctgctgacaagtgaccgttggacagagcggagaccgtagtgttgttcgtcagagaccactgggcagaagaccaccatgacatcgagttgcagggcggtgatggtcgggtccttcgcaccgcacgggtgtcggagggcgtggacgggatggctcgtctgcatgagctgatcgcgaccgttctgcccgacgacgcctatccttcacgggtgctggtgtgtatcgagaccgaccgggggccgtgggtgcgggcgctggtcgcggccggttaccgggtgttcggggtgaacccgaaacaggccgcccggcaccgggagctgttgtcgctgtcgggcgccaagagtgacaaggccgacgcgcacaccctggccgacatggtccgcacccgccgccaccagctgcggcaggtcgcggtcgactccgacctcgccgaggcggtcaaggtcgtgactcgtgctcatcaaaccctgatctgggaacggacccggcacatgctgcggctgcgggccgcgctacgcgactatttcccggccgcgttggaggcgtacaagccgctggggttgaccgggcacgacaccctcgaactgctggccaaggcgcccaccccggccgccgcggcgaagctcacccgcacccagatcagtgcggcgttgaagagggcccgtcgccgcgacatccccgccaaggccgccttgatccaggccgcgctgcgcaccgagcacctcggacaggccgagatcgtcgccggtgcctacgcggccaccgtccgctcgaccgtagcggtcctgcagaccctgaacgccgagatccacgccctggaggggcaggtcgaggcgcattttggccagcacccggacgctgaggtctacctcagccagcccggcatcggtgccatcctcggtgcccgggtgctggcagagttcggcgacgcacccggccgctacgccgacgccaagtcccgcaagaactacgccggcaccgcaccgatcacccgccagtccggcaagtccaagaccgtgcatgcccggttcatccacaacgaccggctcgtcgacgcgctccacatgcaagccggcgcggcgatcctgcacgaccccggttcccgcgcctactacgacgaactccgcgcccgcgagatcggacacaacgccgccctccgccaaatcggcaaccgcctcgtcggcatcctgcacggctgcctcaagaccgacaccagatacgacgcacacaccgcctggtcccaccgcaccgcccatgcggcttgacacctcagctcctggggtgt

SEQ ID NO: 1962 - DNA, 1359 bp, unidentified
  source 1..1359: mol_type = unassigned DNA; note = element_2ab64a1
  misc_feature 1: note = core
  misc_feature 2..240: note = LE
  misc_feature 241..1344: note = CDS
  misc_feature 1345..1359: note = RE
  misc_feature 76..237: note = bridgeRNA
ctgtgaggatcgtcaagtgccgttcgcggcggtgggtctgactcgcaaatcgtctgggcttggtgcctttgagcggatctgtcggcctgtcgctgcgagcggtgcttgctgccaccgggcggctgggggcgtgtcccgataggggccttgccgtcacaagagcgccatcacagtcctgaccgctcccttgtgccacccggtgacggccaatccgttcccaagcacaggaggagatcgaccttgtccagcatgccgcaatcgccagttcattcccagcccggtcccgaccccgccggggaggtggtgctgggggtcgacacccacaaggatttccacgtcgcggttgtgctgtccctgctcggccaggtgctgggcacacgatccttccggaccacggcggcgggctatcgggccctgctggcctgggcgcagagtttgggggtggtgcgccgggccggggtcgagggcaccggcagttacggcaaggcgttgacccgtcagctgctcgccgccggggtggcggtggttgaggtgaatcagcccgaccgggccgagcggcgccggcgcggcaagaccgacgccatcgatgccgaagccgcggcccgggccgtcttgtcgggccgggccaccgcgaccgcgaagaccggtaacgggcaggtcgagatgctgcggatgttcaagctggccagggaatccgcggtcaaagcgcgcacccagacgctcaaccagctcaagaccatgatcatcaccgccgatcccgaactccgcgaccagctgaccggcctgaccaccccgaaactcgtccggcactgcgccggcctgcccgaccagcccgtcaccgacatcaccgccgcggcccgctacacgctgcgcctgctggcccggcgcgtgcagcaactcaccgccgagatcaccgacctcgcccgccaactcaaagccaccgtcaccgccctggcccccgcgttgctgcaacagcaagggatcgggcccgaccacgccgcgcaactcctgatcaccgccggcgacaaccccgaccggctccgctccgaagcagcgttcgccgcgctctgcggcgtcagcccgatccaggcctcctccggcaacacgacccggcaccggctcaaccgcggcggtgaccgccacgccaactccgcgctctacctgatcgtggtctgccggctacgccactgcccagccacccgcgcctacaccgcccgccgcaccgccgacggaaagtccaaacgcgacatcatccgctgcctgaaacgctacatcgcccgcgacatccacaagatcatcaccggagccctccgacccgcagaacccgcacccgcgaccccttgacaaacataggggcat

SEQ ID NO: 1963 - DNA, 1661 bp, unidentified
  source 1..1661: mol_type = unassigned DNA; note = element_2ab6efb
  misc_feature 1: note = core
  misc_feature 2..242: note = LE
  misc_feature 243..1457: note = CDS
  misc_feature 1458..1661: note = RE
tcgtataatatatttaccaaccaaatagttaaaatatggttgtgtgttcttaaagactcatagttttcacaaaagctaataataaacaggtttttttcctttttggacattcgtaccagcacataaaacgtcttgtattagcttgataaaatcatctataggatgctaaggggtaactgacactttccaccttttataatacgaagctatgagatcttaaatctaactacaagaggtgtattatgtattacgttggaatcgatgttgcgaaagaaaaacattatgtgtgtatcttagatgatactaatgaatttgctgttaaaccattttggatatattcagatgtacttggacttagagagttactaaatcgattagctgatatttcactcaataatgatgattttattattggagtagaatcaactggagcatttagtgaaaatctttatgaatatataactgatgcacattataaagtgatacttttaaattcttatcaaactgcaaagtatagagactttagcacaatgagaaagattaagaatgatgctatagatgcttatgtaattgcagaacttttatttagcaataaatacaaagagagtcatataagtagtgatgattatcactctttaaaagttcttggaagactaaagcgttctttagacgataagataaaaactatcaagagagaagtctctactgtaatggctacagtaaatcctgaaataactttagtatttaaaaatatatttactaaaacagcactgcaaatcattaaagcctatcccacggcagtggatttatcaaaggctacgccaaaaaagctgactcggttatttcgacatattcaaggtaacaactttaacgatgaaaaggctaagtatttaatagaacttgccaaatcttccatctatgctggtcgtgccaatgaatcaagagctttaatgattagaactaatattaagatattagagcttttaagtcaagaaaaacttgaaattgaagctcaaataaatgctttaatagaatctggtatctctaaagagctagatgctccaattgagaatctaaaatctattcctggtgtagctgataaaactattgcagctatacttggagagtgtggagatttaagaagattctcttcagctaaagctttgattggttaccttggtctttatcctactcagtatcaatcaggtaattctttatctgttggtagacttgctaaaagaggaatacctatagctaaacatgccctttatatggcggctgtatcttctgttcttcataacgatgaactaagaaaaatctttagagataaagtatctgctggtaaaagtaaaaaagaagcacttataattatttctaaaaagttagcaacaattatgtattcaatatttaaatacaacacaccttataatgctaagagagttctagtctctaaatgatattaaaatggttagttttaacacttgtgaaaacaatgagtttttaatgaacactgacctaaaaatataaccttttatacagtggttatatctttgtatttgatcatatgaatatttagttttttctaaatactcaaataatgaaacacattatctatgtctataaagaagagctacttgtttaagctattctttataggatgg

SEQ ID NO: 1964 - DNA, 1470 bp, unidentified
  source 1..1470: mol_type = unassigned DNA; note = element_2abf6b6
  misc_feature 1..4: note = core
  misc_feature 5..253: note = LE
  misc_feature 254..1453: note = CDS
  misc_feature 1454..1470: note = RE
  misc_feature 12..242: note = bridgeRNA
ccccgttaccttttaggtgtcactgttttccggcaggatatgcagtgtaggtaaccagctggttccggcatgatggttgccccgagtcgttgatgatcagggggggggtgtagtcaccggaaccagtctggttcgttcggatcgctaatagaagcacgctccaaaattttgtgggtcttcgtaacgtggatgtgaacgcacgaaccaccggtcaccttgtttttattggaacgcacccaagaaggtgatcgatatggaaccccaagtattcgttggtatcgacgtcggaaagtctcagcatcacgctaccgcagtcaatcaggagggcggggtagtgcatgacaaaccgctgccacaatccgagcccaagattcaggaactcctgacagatcttgtcgccaaacacggcgagttgctggtcgtagtagaccagccgaaaactatcggtgcgctggttgtcgctgtagctcagcagatggatactcaggtggcgtatttgccaggactgacgatgcgtcgagtcgctgatctgcatccgggtcaggccaaaaccgatgcccgagatgcttacatcattgccgaaactgcccgcaccatgccacacacgctgcggggtatcaccgtggctgaagaacagatcgcggagttgtcaatgctgtgtggttttgatgatgacctggcagcccagctgactcaagtccgcaatcggctcagagggctgctgacgcagatccatccagcattagagcgcgtgctggggccacggttggcacacccagcagtcgttgatttactcggcaggtatccaactcctgcggggttgaaacgcgccggtcgaggccacgttcgagctcggctcaaaaagcttgcgccgcgcatggcagcacggttgaccgatgagatctttagggcattagccgagcaaacgactatcgtgaccggcactcatgctgctgagcatattattggtcgcttagctgcccaactacagcaactcacgcagcaacgcagtgatgttgaagctgaaattttgttgttggttgatgcgcaccctcttaccgaggtcctgacttccatgcccggtgttggagtcaggactgccgcacgcattctcaccgaagtggtcggtaaagacttcaaaaccgcagctcacctagcatcttatgctggcatcgcaccggtcactcggcagtctggcacctcaatccgtggtgagagtccgtcccgacgcggcaacaaagtcctcagacgcgtcctgttcttgtcagccttcgcctcgatcaaaggcgatcccgtgtcccgtgcctactacgatagaaaacgagccgaaggaaagcgccacaatcaagccatcatcgccctcgctcgacgcagatcagacgtgctcttcgcgatgctcagagacggcaccttctacgaatcccggcctactcaacttgcaacagcagcttgacgaaaactatagaagca

SEQ ID NO: 1965 - DNA, 1613 bp, unidentified
  source 1..1613: mol_type = unassigned DNA; note = element_2ad80cb
  misc_feature 1..2: note = core
  misc_feature 3..276: note = LE
  misc_feature 277..1494: note = CDS
  misc_feature 1495..1613: note = RE
  misc_feature 13..296: note = bridgeRNA
ctactacaatatatttatggttaatatcccttacagccagtaaggaattatccatcttgttgcttaagctgttagaatgagtggagcaataggtctggcctccttctctcaggactttacgtccgtaaaatagtcagccaaccagccactctttcgcagcattcgttttatgcaggttgaaccttgatacgttcgtgtgaaacacccagtagattgaataggcaatgagaaaactggtattgaccattactaatacattacaaaggagtatctgttatgaacgctgttggtattgatgtttccaaaggaaaaagcactgtcactatccgaaaaccaggagatgtggttcttatgtccccctgcgatatccctcacacccagtctgccataaacgacctgatcaaacagatcaaaagccttgaaggcgaaaccaaagtctgcatggagcataccggcagatactatgaaccggttgccacatggctttctgatgccggtatctttgtcagtgccgtaaatcctatcctgatcagagatttcggtgatgattccctccgcacacccaagacagataaagcagattctaaaaaaatcgcacgttatactcttgaccgttgggctaaactgaagcaatatggaatcatggataaaacacgtaaccaactaaaaactatgaaccgacaatttggattctatatggctcagaaaactgcaatgaaaaacaatctcattgcgctgatcgaccagacttatccgggagccaatgatttctttgacagtcctgcccgcaatgacggcagccaaaaatgggtagatttcattcatacctactggcatgtcgattgcgtccgctccaagtcattaaatgcctttacggagcattaccagaattggtgcaaacgtaaaaactataacttcagtgcagagaaagcagcgaaaatttatcaaatttcctctgacctgattgccgtatttccaaagaatgacatcacaaaaatgttgatatggcaggcagtagcattactaaacactgcttcgaaaacagtagaatcgctccgttcaaaaatgaatgagcttgcatccacgcttccggaatatccggttgttatggatatgaacggtgtaggggcaacccttggtccgcagcttatcgctgagattggggatgtttcccgttttacacaccgggaagcccttactgcttttgcaggtgttgatcccggtaaaaatgattctggaaagcacatacagaacagtgtgcgaacctctaaaaaggggtctccctacctgcgtaaaactctttttcagatcatggacagtcttatcaaacgatctccagtggatgatcctgtttatgcctttatggataaaaaacgatccgaaggcaaaccttattatgtttatatgattgccggggcaaacaaatttctccggatttattacggtcgggtaagagaatatctatccaacttgtcgaataatgaaactatttaatatcactttttaacttctaccagactagcgcatcgcggtggtcttattttcgtgtcttacgttcaacctgtataaattttcaaagttcattaatttctgcttgactttttatttgcaga

SEQ ID NO: 1966 - DNA, 1434 bp, unidentified
  source 1..1434: mol_type = unassigned DNA; note = element_2ae0546
  misc_feature 1..2: note = core
  misc_feature 3..152: note = LE
  misc_feature 153..1181: note = CDS
  misc_feature 1182..1434: note = RE
  misc_feature 1197..1429: note = bridgeRNA
agatggggtaacgggccggccgcccgctcgctacggcgcaatttggaagcgcgctcgcgagcggcctgttggttggaaggcggtcgtccctcaaactgatggtgttcaacggagtcgggcaagcccgctccaagcatcattaagggacgaccatgtaccactatgcaggaattgacgtgtctttggaatgctcgagcgtttgccttgtcgatgggacaggcaagattttgcgcgagacgaaggttgcgagcgagccggcggcgctgatcgcctggttccggtcgctgggtctggtactggaacggatcgggctggaggcaggccccttgtcgcaatggctgtatgcgggtctgcgagacgcagggcttgcggtcgagctgctggaaacgcggcacgttcgcgaagccttcaagtcgatgccggtgaagacggaccgcaacgatgcccgccggatcgcgcagttgatgcggctcggctggttccggccggtgcactgcaagtcggtcgcggcgcaggagacccgcgccatcctgacggcgcgcaagctgctgcaatccaagcttcgcgatgtcgagaacagcctgcgcggcatacttcgcggttttggcctgaaggtcggtgcgaccaccgagcgcacgttcgccggacgcatccgcgagctcgtgaccggccatcccggactggagttggtcgcggcggcgctgctccaagcccatgcggtgctgctgcgggagttcaagagcctggacaagcacacccagaagctcgccaggacgcatccatccgccaagctcctgatgacaacgccgtccgttggtccgatcgtggcgctcacctatgccgcggcgatcgacgacccgaagcgcttccgctcctcgaaggccacgggagcccactttgggctcaccccgaagaagtaccagtccggtgagaccgactacaccggccgcatcagcaagatcggggatgcctccgtgcgcgaggcactctaccaggcagctcacgtcatgctgaccaagccggtcaagaattgctcggcattgaagagctgggcgatgcggatcgcccggcgcgcaggcatgcgcaaggccaaggtagcgctggctcgcaagctcgccgtgatcctgcatcgcatgctcgccgacaccaaaccgttcaacccgatgaccaaggccatctagccaggagcagcaatcggttccgggcgggccacgacaccaggctctccccgagcgaagtccctccgctgggacgatggatccggtcaggccgccatccgggaagtggctcacgaccacgcaatccgtagattggccggccggctcctcaatgcaccccatcaggcgacggccttcgcgccgatcccgtacagaagcaagtgcccggcgagtggatgacgcgaaaagggattgactaaccaaggcccgttacaga

SEQ ID NO: 1967 - DNA, 1344 bp, unidentified
  source 1..1344: mol_type = unassigned DNA; note = element_2ae7d4b
  misc_feature 1: note = core
  misc_feature 2..104: note = LE
  misc_feature 105..1109: note = CDS
  misc_feature 1110..1344: note = RE
  misc_feature 1114..1338: note = bridgeRNA
gaatgaaagggacttcccctactcgaagcgggtttgagcccgcacggcatcgaagtgccaagattgagtttgcgctgttcaatctgataacgagaggggaagtcatggaaaaggttactacgttggggatcgatctggcaaagagcgtgttctcgctgcacggggtaggtggtgcggggcagacggtgctgcgacgtacggtgcggcgcgatcagctggtgaaggtggtggcgggtatagcgccgtgtctgatcggcatggaggcgtgctcgggggcgcacgagtggggccggcggttccaggggttggggcacacggtgcggctgatggcgcccaagttcgtggctccgtacaggaagagcggcaagaacgacggcaacgatgccgaggcgatctgtgaggcggtgacgcggccgagcatgcgttttgtgctggtgaagtcgctcgagcagcaggcgctgctggcgatacaccgggtcaggcaggggtttgtcgtggagaggactgcgatcatcaaccggctgcggggattgctctgtgaattcggagtggtgctgccgctgcgctcggtgactgtgcgccgccaggcggctcaggcggcggagaatctgcccgatctcgcacgccgcgcaatcggcgatctgctcgagcagctacgcgtgctcgatgaacgcatcggtggctacgaccgggagatcgaagcccaggccaaactgtgcgagccggcacagcgcctgatgaagatccgcggcatcggccccaccacggcgctggccatcgtcgcgaccgtaggcaacgcacgggagttcaagaacggtcggcagttcgccgcctggatcggcctgacgcccagccagtactccaccggtggcaaaccgcgcctggggcacatcagcaagcgcggtgacgcctaccttcgcaacctgcttgtgcagggtgcgcgctcggtgctcaacagcgccggcatgcaccaggatcgtatgtcgcgctggattctcgagctgcagccgcgccgcggctactatcgcacgctcgtggcgattgccaacaagaacgcacgcatcgcctgggcgctgctcgccaagaacgaaacaatgcgctcggtatgaacgcacccatccgctgagactgcacctgtcgatgacgaaacggtcaaaccgatgctcggagaacctggtcaaacacgacggcagcaccagatgccgactaacgagagaggtccgggcatgcggctttcatcggggccagagcattcattgctcacaaacaggccggttatagtgacgcagtccgttcttccatcggcacaaacgcttccgttgcggaaacggggaagtccttata

SEQ ID NO: 1968 - DNA, 1359 bp, unidentified
  source 1..1359: mol_type = unassigned DNA; note = element_2aeb409
  misc_feature 1: note = core
  misc_feature 2..64: note = LE
  misc_feature 65..1117: note = CDS
  misc_feature 1118..1359: note = RE
  misc_feature 1127..1353: note = bridgeRNA
taatgggatggtccgcctcgtcctcctgccgcatcatgaggctgtcaagtcgaaggaggttgcaatgccacaacgtaatgtgccgcgtcctgccgcagtctacggaatcgatatcggtaagaacatattccacgtcgttggcctcggaagcgacggcgtgccagttcaaaaggttcgtttccgacgtgacacgctgctacaattcttcgagcgagccgcgccggcgatcgttggcatggaatcgtgcgccggatctcaatggattgcgaggaagatacaggcgctcggacataaggtgcgcttgatccccgcgcagttcgtgaagccctacgtcaagtcgaacaagaccgacatcatcgatgcggaggcgatcgctgaggcggccacgcggccaacaatgcggtttgctgcactcaagagcgaggaacaagccgatcttcaggctttgcaccgggtgcgggaccagatgatcggaacgagaacgcgtctgatcaatcagatgagagccttctgcctcgaatacgggatcgccctacgccagggggcaggcctgttcaagctcgacctgccgctggttctcaacgatgcgtcgaacgacctatcgccggcgatgcgcaaactgctcacggatctgttcgccgacctccaccagctagagcagcgcattcaggacgtgacaagggagatagctgcgattgcagatcgagaagatgttgcccgccggctcatgacgatccccggcatcggagcactgggcgccaccgcccttcttgcggcagtcggcaacggacgccagttccagaaggcccgcgatctggctgcatggctgggccttgtcccgcgggaacactcgaccgggggcaagcagaagctcctcggcatcagcaagcgcgggaaccgctacgtccgcaagctcctcgttcatggcgcgcgatcctgcttcagacatctggatcgaacccgggatcgccttggaagctggctcgacgggctgcagagccgaatgcatccgaacaaggccgttgtcgcactcgccgccaagatggcacgtattgtctgggttgttctgaccaagccgggagcgctctacgaacgccgggatcctgcattcgcctgacgcttgcggctcgattgcaaggctcgggaatagtgatgacgaaacagtggatcagcatgccgtaagccctgtgcaaaaaagcgggcttcgtgcccgaaccatttattgggaacggtgtgcgcggatctcatcatggcctggctgcaacagcagcccgctcgcgagaggccggatacatttatgcaactggaatcgtcatcgacgatgtcgcgaacccttgcacggacggggcggaccataca

SEQ ID NO: 1969 - DNA, 1200 bp, unidentified
  source 1..1200: mol_type = unassigned DNA; note = element_2aef7cc
  misc_feature 1..2: note = core
  misc_feature 3..222: note = LE
  misc_feature 223..1185: note = CDS
  misc_feature 1186..1200: note = RE
  misc_feature 28..198: note = bridgeRNA
cttgtatgttcctcccggctcctacgcggtatgtaggggccagggtggagggaccgtcaacatgttatctgcgggtaccagccgacagacgagtcgagcgatccccatcccgcaccttaacgtcgataaaggatctagcggcctttgaggaccgccgatgtaggcaagccaacgtggtgcggtaccaccccagcccttcaacaatagctgggagttgcgcagatgtcagatcgtttcgccgtcggtattgatgccgattcacagaccctggtggtggcctactacggcaccaagggcagcgcccgcatcgccaattcagcgtcggccatcactaagtggctgtccgctctgccggccaggtctcgcattggagtggaggcaaccaatcgctaccacgaacttgtggttcaagctgcccagaaggccggtcatgccgtctttgtgctcaatccgcgcgacatcaaacattacgccaagggcgtggcttgccgcggtaagaccgacgctggcgacgcccaggtcattgcgcgttacatcgccaaggaggccgacaatctgcacgagcatgtcgcccgttcgcctgcacaggagcggctgcacgtgcttctgcagcagcgcgacagtctggtgcggaacaaggcaacgctccatctttccctggggacggacgcggctgactcagccatcttcgggcgcattttcagtggcctgaaggaggcgattgcgatgctggaccgggaaatccaacgactctgccgcagcggcgaacagagcgatctgtatcgacggatcatgaccatcccggggatcgggccgacggtggctgcctttgtcacccatcacatcacccgctggccgctggccagctcagacgcttgggtggcctgcaccggtctggatccgcgacccaacgaatccggcgcacggatcggccgccgccgtttgtccaagcgaggcaacgccggcctgcgtcaaatcctctacatggcggccatgggcctgacccgatccaaaggcggcaagcccctctacctggccatccgcgagcgcggacacagcagcaccgccagtttcaacattctggccagaaaactggccaggatcgcttggggcgtcttcaagagcggtcgggactttgacccggccatgctgaaagtgggtcaagcctgcttccagcaggcttgaccacgaacataggat

SEQ ID NO: 1970 - DNA, 1612 bp, unidentified
  source 1..1612: mol_type = unassigned DNA; note = element_2b0c1a6
  misc_feature 1..2: note = core
  misc_feature 3..273: note = LE
  misc_feature 274..1293: note = CDS
  misc_feature 1294..1612: note = RE
  misc_feature 14..293: note = bridgeRNA
ctactacaatatatttacggttaataccccttacagccagtaagaattatccatcttgttgcttaagctgttagaatgagtatgacaataggtctggcctctcctttccaggactttatgtccataaataagtcagccaacccgccactcattcgcagcattcgttttacgcaggttgaactttctcgttcgtgtgaaatccccagtagattgaataggcaatgagtaaatctggtattgaccattgctaattcatttcaaaggagtttttttatgaacgctgttgatatcgatgtttccaaaggaaaaagcactgtcaccatccgcagacccggagatgtggtccttatgccgccctgcgatatcccgcatactcagtccgatatcaacgctctcattaaacggatcaaaggccttgacggcgaaacaaaagcctggatggagcataccggcagatactatgaaccggttgcaaactggctctctgacgccggcatctttgtcagtgctgtcaatcccatccttatcagcgatttcggagacgactctctccactcccaaaagacggataaagcggattctaaaaaaatcgcccgttatactcttgaccgctgggcaaaactcaagcaatatggaagcatggataaaacacgcaaccaattcaaaacaatgaaccggcagttcggtttctatatgaaccagaaaactgccatgaaaaacaacctcatttcccttctggatcaagcctatcccggtgccaatgacttctttgacagtccggcccgcagtgacggtagccagaaatgggtagactttgtctatacctactggcatgtggattgtgtacgcagcaaatctctaaaatcctttacggagcattaccagaagtggtgcaaacgcaaccgttataatttcagtccctcaaaagcggaaaagatctatcagctctcctctgacctgatcgccgtgtttccgaaagatgacggcacaaaaacgctgatacggcaggctgtcacgatactgaacactgcttcacagaccgtggagtctctccgccttaaaatggatcagactgccgctgtacttccggaatatcccgttgttatggcaatgcatggtgtcggtccatcgcttggtccccagcttatggctgagatcggagacgttacccgtttcactcacagagaagcgcttaccgcttttgccggcgtagatcctggcaaaaacgattccagcaaccatagccagaaaagtgtacgtacttcaaagaaagactctccaagcctgcgataaacactgttcccgatcatggacggattgatcaaacgctctccgatggatgatccggtctatgctttcatggataaaaaacgattcgaaggcaaaccgtattatgtctatatgactgccggtgccaacaagtttctccgcatttattacggacgggtacgagaatatctggcttccctggaggaatcccgggaaggctaatttcaattccatactttgcttcaaaccagcgcactgcggtggtcttgttgtgatactcttttttcaacctgtataaatttttcaaagttcattaatttctgcttgactttttatttgcaga

SEQ ID NO: 1971 - DNA, 1349 bp, unidentified
  source 1..1349: mol_type = unassigned DNA; note = element_2b1513c
  misc_feature 1..3: note = core
  misc_feature 4..59: note = LE
  misc_feature 60..1085: note = CDS
  misc_feature 1086..1349: note = RE
  misc_feature 1121..1347: note = bridgeRNA
aaatggtatggacgcctcgtcatcgcataatgaggcgtcgttcaaccaggagaacgcaaatggaaccgacagtcgtaggcgtagacatcgccaagcgggtcttccaactgcactggatcgctgcggacaccggcgaggtgttcgaccggcagctccgccgcagtgattttctcgagcacttcgccaatcgtgagccctgtctcatcggcatggaggcctgcggaggctcacagcactgggcacgccgtctcaccgagctcggccatcaggtcaaattgatgccaggcaaactggtcaaagcgttcgtgacaggaaacaagaacgatgtcgccgatgcgcgcgcaatctgggcagctgcacgacacccgggcgtgaaagccgtcccggtgaagaccgaggcccagcaagcggttctggcactgcatcgtattcgacagcagttggttatatttcggcgctctcaatctaactgcctgagaggcttgctcggcgagtacggagaggtcatgggcgtgggacgcgcagcaatgaatcgcgccatgcccgacctgctgctacgcctcgaattgcgcctgccgcgagtcttgatcgattccctgcgggaacagtggcaacgccttgtcgacatcgacaagcagataaccctcatcgagcagcgactccgcgcgtggctgcatgaaaacccggcctgcagaacgattgccgaaatccccggtgttgggttcctgaccgccactgctgccgtagcagctatgggcgatcccaaagcgtttcggtccggccgcgaatttgcagcatggctgggtctcgtccctgcgcagtttggaactggtggcaaggtccggctgctcggcatcagcaagagaggcgatcgatacctgcgcacgctgatgattcatggcgcacggtccgtcatgaagcacccaaaagacccgggttcctgggcagtgcagttgagcatgcggcgtccgctcaatgtcgtagtcgttgcactggccaacaagatcgcgcggacgatctgggctctgctagctcatggccgctcatactgcgagagctatccgcctccagttactgcagcatgacgtgtgtcgagatcgtatcgcgttctatcaccgatctgtagtccaaggttgcgcaaggtagtgttgtaatggcaaacaggtaagaccgggactcatcaaacctgcatcgtcttctggacatcacggtccgtggcaaaaatgaggcatgagtcagcggattccattggggccagcgggcttcgacctgcatgggccggatataaaaccgcagcctgtatctgttcgacagagcaacaaaccttggcaagccggaggcgtccatat

SEQ ID NO: 1972 - DNA, 1240 bp, unidentified
  source 1..1240: mol_type = unassigned DNA; note = element_2b1efb5
  misc_feature 1..2: note = core
  misc_feature 3..262: note = LE
  misc_feature 263..1222: note = CDS
  misc_feature 1223..1240: note = RE
  misc_feature 6..216: note = bridgeRNA
cttatatcttgattcggccatcttttgggggcagaatccccgactgatcatcgggagggtagcggggaagtcgtgcgtaccctaaggcttaaagcctgttttgtagattgaactccccgccatccgcactcgctattatagttcgaacggtatacttaggactccattcgctggatgatcctgtatttataaggctgaatacagcgagcgtatttcgtgatcaaactatttattattcaactatttattaaaacttaaaattatgtcaaacgttatcattggtgtcgatattgctaaattaaaattcgatgtagcgcgtctgtgcgatggcaaatacaaacatgcaaaattcactaacgatgcccaaggttatgccgattttattgtttggctcatcagttttggcgatgaaaacctccgcatttgtatggaagccacgggggcatacagcttaccccttgccgaatttatgactgacaaagggtattttgtcagcgtcatcaatcccgcccaaattcacgccttcggaaagagcgagttaagccgcacaaagactgacaaagccgatgccaaactcatcgcccgttacggaatgcaagctaagctggacgcttgggttcccttaccggtcaatattcgtgagctgcaagccatgacacgccgtattgagcatttgctggaaatgcaacagatggagcgtaatcgcctcgacaccgctgatacggctatcattgactccatcaacacggttttaaacaccttggaagccgaactaaaagccacacgtaaagccatccatgatcatatcgacaacgatccagaccttaaaagacgcagtggcttgctcgattccattccaggaataggctctgcaaccatcgcccatttactggttgcactgagtccgcatcatggttacaccagcgccaaacaagcggtcgctcatgccggtcttgcccctgcaatccgtgagtcagggcaatggacaggtaaaacgcgtatcgccaaaaatggtgatgcagcattgcgtaaagcgttatacatgccagcattggttgcttggcagcataacccggttatccgtgccttctgcgaacgccttaaaggcaatggcaaaaatggtaaagccattgcgtgtgcggccatgcgtaagctaatccatctcgcttttgctatcttaaaatccggcgagccgtttgatccaaatttttcacttgcataatttgtatcaagacggtat

SEQ ID NO: 1973 - DNA, 1471 bp, unidentified
  source 1..1471: mol_type = unassigned DNA; note = element_2b28b3f
  misc_feature 1..2: note = core
  misc_feature 3..230: note = LE
  misc_feature 231..1454: note = CDS
  misc_feature 1455..1471: note = RE
  misc_feature 1..231: note = bridgeRNA
ccgttaccttgtgagtgctccgatggtcggggttctggtcgctcggccgggtatggcttaggtgccctgccatcgatggtccggggggtgttgccgcccggtcgagagacacgcgttgactgctgatagggacacggcccagcactgctgaggtctcttcgtaacgtgggtgccagcatcgggtgtcgagactgcgaccagtagtgatgcgttcaaaggaggacgccatcatggacacgaggttcgcggtcgtgatcggcctggatgtaggcaagagcgggcatcatgcctgtgcgttgtccccggacggagagcgcttgttcgacaagcctctcccgcaggacgaggcccagttacgcgagctgttcacgggcctgcaagagggcggtgaagtactgatggtcgttgaccagcccaacacgatcggtgctctgccgatcgcggtcgcccgcgatgtcggttgcgcggtcgcttatctccccggtctggcgatgcgcaaggccgcggacctgtacccgggcagggccaagacagacgcgcgggatgcgttcatcatcgccgataccgcccgcacgatgcctcacaccctgcgcagcgtcgatcgtgacagcgaggtcctctccgcgctgaaagtcctggccggtttcgatgaggacctcgcccatgagaccacccgagcgttgaaccggatccggtcgctgctgacccagatccaccccgctctcgagcgcgtcttcaccggtggcgtactgtcgaccagtctcgtgctggacctgctggagaagtacggcggtcctaccggcctggcagccgccggccgcggcaaggtcctgcggttcgcacggtctcgttcccgccgggacccagcagatctcgtggaccggatcttcaccgccctgagggaacagaccgtgatcgttcccgcgaccacggcagtcgagctcgtcctgccgcgagtagccggccaggtcaaagaactcaaacaccagcgagcaacagtcgccggtgaagtcgaggccatgctggaggacttccctcttgcctcggtcttgatgagcatgccggggatcggcatcaagaccgccgcctcgatcctcctcgcgatcggtgacggcacggccttcgcgaccgctggtcatcttgcggcctatgccgggatcgcgcctgtcacacgacgatccgggacctcgatccgcggggagtttccagcccggtccgggaacaagcgattgaaaaacgccctgttctactccgcatggatcgctacccgctgcgacccggtgtccaaggcctacttcgaccgcaaacgcgccgaaggcaaacgacacaacgctgccgtgatctgcctcgcccgccgccgctgcaacgtcatcttcgccatgctccgcgacggcacctactaccaaacaccgaccaccaccccgacccccgagccagccgccctcgcagcttgactcagaacatagggaca

SEQ ID NO: 1974 - DNA, 1518 bp, unidentified
  source 1..1518: mol_type = unassigned DNA; note = element_2b2d6e0
  misc_feature 1: note = core
  misc_feature 2..106: note = LE
  misc_feature 107..1150: note = CDS
  misc_feature 1151..1518: note = RE
  misc_feature 1277..1516: note = bridgeRNA
taatggtatggtccgccccgctccaaacggcaacaggtgtgccacggcgtcaaatgcgccaagatggagtttcaaccaaccatccaaaaatggagcggagcgaaccatgggcaagattataccaaacggagagatcaaggtactcggaatcgacctggccaagcactctttccaactgcatggcgtcaacgaaaaaggcgaaacggtgctgcaaaggaattttacccgggcaaagttgctggaactcatggcttgtctcaaaccctgcctggttgccatggaggcgtgtggtggggcacacttttttgccagaaagttcaaggaatttggccatgacgttcggttaatggcaccacaattcgtcaaaccttacgtcaagagcaacaagaacgacagcatcgacgctgaggcaatatgtgaagccgtgcaacgtccgaatatgcgttttgtgcctatcaagtcggtagagcagcaggatttgcaaagtctgcatcggatgcgcagcctggtggttgcaaaccggactgcatcaatcaaccagactcggggaatcctcgcggagtatggaatcactctgccaaaaggcgcagaccagctacgcacgcatctctcagagattttggatgactccgcgaatggattgacgatggaaatgcggcaactcatgggcctgttgagggatgaagtggtgcatttggatgaacgaattgctgaatatgattccaaaataaaagcgatcagtcagcaacacgagccttgtcggctgttgatgacaattcctgggatcggtcccctcattgccacggcgctcatagcagcagttggtgatgtcagcgttttcagaaatggccgggaaatggcagcgtggcttggtttggtgcctcgacaacactcgacagggggcaagcaacgactccttgggatcagcaaacgaggcgatgtctatttgcgcatgctgttgatacatggcgcacgagcggcactccgggtctctggcaagaaggaagatcgacgtagccggtggctcgtggatctggaaaaacgtcgtggggcaaacgtggcaactgtggcgttggccaacaaaaacgtccggacagcatgggcgatgctcaaaaaaggtgagaaataccaaattcagaaagcagcctgatcagagctggttcaatgagcgtgatacatcaagcaactgtgtgtaatcaaattcgtggggggcaaaaaacgccccccacacccccctggccgtaaagggaataaagaatcgggttttggagctatgtctacctccaagttgcgtggattgaattgacattgatggcatacaaaggcgagtcctgcgttcctgaaaacctgactggaccacgggccccaagaggccgctgggatgatgaggacaggaacgcgcgaatttccatcagggccagaggggtaaattccctcaaccaaaggccggatatatgggtgcaactttcccttcatgccaacaagaattcgtccttgcaaagcggggcggaccatata

SEQ ID NO: 1975 - DNA, 1397 bp, unidentified
  source 1..1397: mol_type = unassigned DNA; note = element_2b4241a
  misc_feature 1: note = core
  misc_feature 2..89: note = LE
  misc_feature 90..1112: note = CDS
  misc_feature 1113..1397: note = RE
  misc_feature 1168..1389: note = bridgeRNA
caatgggatggacgcccccacccgaaacggcatcgaatgtgccaaagtggaagtgtcaaccagccacttaaaccgaggggagcgtcaccatgaagattacgacaattggcattgatctggcaaagaacgtgtttcaactgcatggcgtggatgcacaaggtaaaacggttctccgaaagcagctcaagcgcgagcaaatggcggcgttcttcgtcaacctgccgtcgtgtctgctcggcatggaggcgtgtggtagcgcgcattactgggcgcgtaagctgcaggcgctgggccatacggtaaagctgatggcgccacagttcgtcaagccctatgtcaagactaacaagaacgacgcggccgatgcccaagcgatctgcgaagcggtcacccggccgagcatgcggtttgtaccgataaagaatgtcgagcagcaggcggtgctggcgctgcatcgggtgcggcaaggaatggtcaaagcgcgtaccgcacagggcaatcagattcgagggctattgagtgaattcgggttgatcattccggtgggcatagctcacctttctgggcgtgtaccggcactgcttgagcagactggtgatcaattgccagctgtgtttcggcaactggtgcagcgcatgctcgatcatctccaggaactggatcgacaggttggcgaactggaagtgcagatccaaatgtggcatcgttccaatgctctcagccgtaggctagagcaaattccgggcatcgggccgattacagccagtgcgttgattgcgtccataggtgatgcaaagaacttcgccaatggcagacaactggcagcctggcttgggttagttccacggcagcactcgacgggtggcaaatcgaatctgttaggcattagcaagcgcggcgatagctatctacataccttgcttattcacggggccagggctgtgattcggcatgccgaacgccgggtcaacgcgtatggatggctgaagaatcttctggctcggcgacataagaacgtggcagcggtcgcattggcaaacaagaatgcgcgaacagtttgggcgctgttggtacacgacaggcagtaccgagttgattatgctggcgcataatcagctcggctcagcaaaggctcgtaggtggtagcaacaaccggcagttgattccagcgattgcacaggcaatcatgaagtgatggcaaaccaggtaagaccgtggttggcaaaaccctagaaaccgctgcacgaaaagtgcgatagtgcgattgaggagccagccagcatatcccatcagggacagtggcaaagcgctacagacaaagtccgaatgtacgggtgcaatctttaccttcgcgtcatcatggatcgagagcttggcaaatcgggggcgtccatgta

SEQ ID NO: 1976 - DNA, 1408 bp, unidentified
  source 1..1408: mol_type = unassigned DNA; note = element_2b4ce52
  misc_feature 1..3: note = core
  misc_feature 4..274: note = LE
  misc_feature 275..1126: note = CDS
  misc_feature 1127..1408: note = RE
  misc_feature 1128..1395: note = bridgeRNA
tgatgtcgtggatggcgccctccaccagcgtcggacgtgccagaatgggcatgttgaagaaccggagaggagccacgtccatgccagagattgccacgatcggccttgatatcgcgaagaacgtcttccagatccacggcatcgaaaggaatggcaagattgtcctgcgcaaggcgctgcgccgcagccaggttcggggttcttcagcaccctttccccttgcctgatcggcatggaagcttgtgcaaccgctcaccactgggccggcacgctcatggccttcggccatgacgttcggctgatcccgcccgcctatgtcaaaccctatctgcgccggcagaagaacgacgcagcggacgcggcggcgatctgcgaggccgtcacgcggccatccatgcgcttcgtcccggtcaagagcccgcagcagcaaagcactctcatgctacacggagcccgcgatcttctgattgcgcagcggacagctctgatcaatgccctgcgcggtcactttgcagagctgggcatcgtggtggcgcaaggcgctcgcaactcgcgccagctgctcgctttccttcaggagggcaatccagacgtccccacaacggctcgcattgcgcttcaacctttggcggcgatgctgcttgggatcgaggcgcagattgccaggctcgataaggccattctggcggctcatcgcagcgatcccatcagcgtcagactggctgccatcccggggattgggccgattgtcgcctcctgtctctcggccagcatcccggacgctagcctgttccagggcagtcgggagttcgccgcctatctgggcgtcgtgccgcggcagcactcaaccggcggcaaggcgaggctgggctccatctccaagatgggcaaccgccatctgcgcaggctgctcgtcgtcggcgcgcatgccgcgctctacagcatgaagtccggtaagacccggacggccttggctgactgggcccggtctctgctagccaagaagccattcaaggtggtcgccgtcgccttggccaacaagatggcccggatcgcctgggcggtgatggccaggagtgtggcttacgagcccgggagcactggagctggcgcgtcggcggcatagcaaccagttcagacgatctgcccgtagggcatcccagttggcacggtgacgatgagatgatgtgaagccacagcggatagggaccgccggaactggagaacccgtggtgttgtcttgcgtcagacaagcgcgataacgtgagagggactagcttccagcgcaaaacatcagggcctgcggtcaggaagcaccgcgcttaaaggccggagacatgaccgcacccgccccgctaggcctaaatgtcatccacaatcacattgccaaacgggcgccatccagaca

SEQ ID NO: 1977 - DNA, 1334 bp, unidentified
  source 1..1334: mol_type = unassigned DNA; note = element_2b4e9f6
  misc_feature 1..3: note = core
  misc_feature 4..7: note = LE
  misc_feature 8..1090: note = CDS
  misc_feature 1091..1334: note = RE
  misc_feature 1098..1332: note = bridgeRNA
tgatgtaatggtctcctcccacactcggcatcggtttgccatgattgaattgcaaacaatcgaaatgggagaagaccaaatgcagattacaacaatcagtatcgacatcgcaaaaaatatttttcattttattggatgtaacctatccaataagattgtagtaaagaaagctattaaacgtcgtcaactactgacttatttggcacaaatgccaaattgtaaattagtcatggaagcgtgtggaacctctaattattggggtcgtgaaattagccaattaggttttcaagttgagctcataccaccacaacacgtgaagccatttttgacggggaataaaaatgattacaacgatgcgtatgcaattttaattgcatcacagcaggcacatattcgctcagttccagtgaaaacattagagcagcaagatagtcaaacaatccataaagtgagagagcttgcaattggtcaacgaacagcactgagtaatcaaattcgaggtttgctacttgagtacggcattgccattactaaaggtatcgaaaatgttcgcaaagaagtggctgctttgttaggtgaggagcgagtattgaccgcgagctttaaacaagtgcttagccaactctataaactcctacaagtgcttgatgaaagtattgaaacgtacaatcaacagataaaagagcaagttaaaaacaatgagatatgcgtcaatttacagagtattccgggcatagggccaatagttgcaagtagttactttaacgaagtggggaatggtagtggttatacaaaagggcgagatgtttcagcctcattaggtctcgtgcccaagcaacgtagtacgggtggaaaatcagttttgctcgggataagtaagcgtggtaatcgatatttgagatgtttacttattcaaggggcgaaatcggttgtatcgagagcaaagtataaaacagaccaactgagtctttggataaatcgacttgtacaaacgcgagggcataataaagcctgtgtcgcttatgccaataaaatggctagagtggcctgggcaattacagtatcaaaagaggcatatcaagcaagataagtagatttctttcaccgaattgcgaaagtgactgaagtagatgacataacaggtcaaaccggcatattgaaaacctgtcgagctcaggggtagctaaataccgataacctgattagggcaatatgcgcgatttacatctaggtcagagtttcaaataaaactcattaacagaccgtatatatgacagcaatcctgtccctgttatttactaaagaaaccttgcaataagggaggagaccatata

SEQ ID NO: 1978 - DNA, 1420 bp, unidentified
  source 1..1420: mol_type = unassigned DNA; note = element_2b5cfbd
  misc_feature 1..2: note = core
  misc_feature 3..120: note = LE
  misc_feature 121..1158: note = CDS
  misc_feature 1159..1420: note = RE
  misc_feature 1176..1374: note = bridgeRNA
agatgggatattcggcttgagccccatcttcgatggcgatgcaaggaggtgctgcgcttcaggctgataatagaacgtggtctgtgtgacagccacaagcatcagagaaggaagcgcagcatgaaatattatgccggattggacgtatcggtaaaagagacctccgtttgtatagtcgacgaggtcggcaagatttatcgcgagacgaaggtggtcagccaccctgacgacctctctgcggttctgagaggtgcggggttgcgcctcgagcggatcgggctggaagccgggccgttatcacagtggctgttcgagggcctggccagagccggattgccgacgatctgcatcgagaccaggcatgccaaagcattcctcaaggcccaggtgaacaagacagaccgtaacgacgcgcgcggaatcgcgcagatgatgcgtgtcaatctgttccggccggtgcatataaagacgctgacgagtcagaaacgccgtgcgctgttgacggcacgcaagctgcttcaggataaggcgatcgccatcgagaacgatatccgcggcttgctgcgcaacttcggactcaaggtgggtgttgttggaacactccgcttcgatgcgcgcatccgcgaacttgtcgaaggcgctcccgacttagcggagatcatggggccgctgctgagtgccaggcagaaacttcgcgacgagttcacccggctacaccgcaaggtgctaaccatcgccaaggacgatgccgtctgcaatcgcctgatgactattcctggcgttggccccgtcacatctctcgcattcatcagcaccgtcgatatcccagctcgctttcggaattcaagggcggtaggcccagcgttaggactaaccccagtgctcaaccagtcgggcgaaagccagcgcgtgggccgcgtatcattgtgcggcgacgccaggatgcgcgcactactctatgaagcagcccaggtaatgctgacccgcgtgaagaaatggtcatggctgaaagcttgggccatgaacctggcgaagcgaggcggtgctcgcaaggcgattgtcgctttggctcgacgtatcgctgtcatcatgcataggatctggatggacggtagcgagttccgctggtcgcgggaaaccgctcccattcacatttgagcaactgagcgaaaagaaaggttccaccgccggtgggcagatgtccttcgcgggacgacggatgaagtgagttcgtgatttccgcagtgccgacagcatcctcgctgtcaggacgcttctcagattgaaccactcgtccttctgatcccatactgggaaggccctatgccgatcccgaagagaagcgagaccccgcgaaagacatcgaacccgacgaagcggatagctcaaagagccttgacctcaacacgccgaatagaga

SEQ ID NO: 1979 - DNA, 1421 bp, unidentified
  source 1..1421: mol_type = unassigned DNA; note = element_2b5f7d9
  misc_feature 1: note = core
  misc_feature 2..229: note = LE
  misc_feature 230..1408: note = CDS
  misc_feature 1409..1421: note = RE
  misc_feature 14..245: note = bridgeRNA
ctacgtgtttcattgacgtcaggatcgggcccggccaggctcggtctcaggtgaccggggtggccgctctcagtgcggctgcccacgccgtcggcgtgaggctcacatttggcctgcgtcgccccggtcaccgccagggccgggagaggctcgagaggggtttgcccagccgtacgtagcggtgccctcccagctcgacatcaccgttgtccgagcaagggagcacaacatggacgagcaaggtacccgggtcgtgatcgggatggacccgcacaagcgcaccgtcacgatcgaggtcatgaccagccacgagcaggtcgtcggtggcggccggttcaccaccgacgctgacgggtacgcccagctgctgggctacgcgcggcagtggccgcagcgtctctgggcggtcgagggctgcgccgggatcggcaagcacgtggcctcccggctcgtcgccgacggcgaggacgtggtcgacgtgccggcgaagatgtccgcgcgagtgcgggtcttcgccaccggccagggccgcaagaccgacgccaccgacgcccactccatcgccctggtcggagtccgcatgtccgggctgcgcccagtcgtcgacgacgagcagttggaggtgctgcgcatgtgcgtggaccggcgcgcctccctgggggccgagcacacccgcaaggtgtgccagctgcacaagcttctcctcgagctcatccccggcggggccaagcggtccctgtccgcggcccaggccaaggagctgctcaagaaggtccgcccgaccacaccggcgggcaaggtgcgcaaggcccacgcggccgagctggtcgaggacctgaccaagatctacgcgcgcaccaaggccgcggacaaggagctgaagtccctggtcaaagccaccgggaccggcctgatcgacctgcacggcatcggaccctccggcgccgcgcggctgctggtcgaggtcgtcgacatcacccgcttccccgaccgcaaccacttcgcgtcctggaccggcaccgccccggtcgacgcctcttccggggaccacacccaccaccggctctcccgcaaggggaaccggcagatcaaccgggtgctgcacatcatggccgtcgtacagctgcggcacgcgaccgagggccgtgcctactacgaccgaaaggtcgccgccggcaaaacgccgatggaagcgatgcgctgcctcaaacggcgcctgtccgacctggtctacaaggcgatgctcgacgacctcgcccgacgtgcgacgacgggcccgggagggcaactgggtaacgactctgactccagcgcgaccggctcacaacccgatgccggctcttcggacaagccacttcccggacccgccaccaccaagcctagaaccaccctcccagcggcgtcttgacacagaggggtgc

SEQ ID NO: 1980 - DNA, 1370 bp, unidentified
  source 1..1370: mol_type = unassigned DNA; note = element_2b629db
  misc_feature 1..3: note = core
  misc_feature 4..83: note = LE
  misc_feature 84..1115: note = CDS
  misc_feature 1116..1370: note = RE
  misc_feature 1140..1358: note = bridgeRNA
tgatgctgtggacggctccaccgcaggcatcgcagtgtgccatggaggttgtttgataaccgccaaaaggggagccgcccaagatgaaggttagcacgattggtttggatctcgcgaagagcgtttttcaggttcacggtattgatgcagcaggccaggtcgttgttcgccggcaattgaggcgacgccagcttctgggatttttcgagaagcttggcccttgtctggtcgggatcgaggcctgtgccacggcccattactggggacgcgagattgcggcgttggcacatgaggtacggctgatgccggcgcactatgtgaaggcctacgtcaagcgcggcaagaacgatgcggctgatgccgaagcgatctgcgaggcggttcaacggccgacgatgcgctttgttagcctgaagagcccagaccagcagagcatgctgatgctgcatcgaacccgggcattgctggtgcgtcagcgcacaatgctggtcaatgcattgcgcgcccatatggccgagtttgggattgtgacgcgtgttggcctgccgcagctcaaggagcttctggccgtgatcgcagacaaggatgatcgccggcttccgcctgatgcccgtgcctgtctggaaatcctcgggcggcagttcttgtcagtccacgaagagatctgcgcagctgacagtcgcctccacgcctggcaccgatctgatcccgtcagccagcgcctggcaactatccctggcattggaccggttaccgcgagcgcgttggcagcctccattaccgatccttcagtgttcaagtctggccgagagatggcggcctggattggacttgtgccacggcagaactcaactggtggaaagcagcggctcggcaaaatctccaaacagggagatccgtatctgcggtggctgctcgtcgccggggcgatgaccgtgatccggcacgccaagcggcgcggcagagcaaaccaaccctggctcgatgacctgatcgctaggcggccgaccaaggtggcagccgtggccttggccaacaaaatggcccggatggcctgggcgcttctcaggcatggaggcgcgtatcgaccgtcggctatcacagcgagcgtatgagctcaaagaaggcaagacagaacatcagtttggcgaggtgcaggtgaggtaatgcaaaatcggtcgaaccgagggtcgggaaaacccgtttgggtcagggtgcaacatcagcccgcgctaatgattgggacccggctccagcggatcgcattagggccagcggcacacagcgccgcatcaacaggccggacacatgacagcactcgaccagtttgcagccaaaatactccttgccaaaacggagccgtccacaca

SEQ ID NO: 1981 - DNA, 1381 bp, unidentified
  source 1..1381: mol_type = unassigned DNA; note = element_2b6d4ba
  misc_feature 1: note = core
  misc_feature 2..204: note = LE
  misc_feature 205..1113: note = CDS
  misc_feature 1114..1381: note = RE
  misc_feature 1145..1373: note = bridgeRNA
caatgggatggactcctcctccccctgagggcacgtaagtgccaaactggagtttccacacaaccggtttggaaagaaggagtccgccatgaagattatccgcgttggagtcgatttggcaaagaatgtcttccagcttcacggtgtagatcgctcggagaaggtggtctggcaatgcaagctggtccgtgagactggatcaaggtgctgctcgagaaaatcgagccgggctgcgagatcgggatggaagcgtgcagcggagcgcatcactgggcccggctgctgcaggcaaagggattcacggtccaattgattgctccgcagttcgttaagccctacgtcaaaagcaacaagaacggcgcgaacgatgccgaagcaatctgcgaagcgatgagccggccgagcatgcgctttgtgggcgttaaaaccgtcgagcagcaggatatccaggccgtgcatcgggtgcgctctggcctgatggaacagcgcaaggctaaagcgaatcagctgcgcggcctggcatcggaatatggcctggtagctgcgagagaattgccgcacctgaggtcggccatcccacgctggctcgaagatcaggaaaacgggctgagcgagcgatttcgtaagctgctgcgtgggctctggcaggacctgcaggttcttgatgagcgcgtagaagagcttgaccgagagattgtgcagcttgcccggcaagatccagtcgcgttacgtttgcagcaggtgcgtggcattggcccccttactgcaactgcgctactggcaacggttggggacgcaagtcagttcgccaacgggagacagatggctgcttcgtttggactcacgcccaaacaaaacagctcgggaggcaaggagcgattgcttggcatcagcaagcggggtgacgcatatttgcgcagcttgctcgtgcacggtgcccgagcagtgatccggacggctcaagcgaagaccgatcgattaagcatctgggccatgcgcattgcgacaacgcgccatccgaacattgccgcggtggcgttagcgaacaagactgcccgcgtagcttgggcaatgattactagaggcaccgattatcaggctcaacccgcgtaagcgccgcagtagaagtaccctgaagaagtatccaaaccacgattgcatgacaagccgcatgatggcccacaggtcgaaccggcgctgataaaacccgagaatgtctgaggccttcgagcccgtcgaagcgatagggagtcagcgcgcgaatagcccatcagggtccagcatctggaacaggtgcagtagtccgagaccggatatacgtgagcagtcgtacctcacggcctgacaacggattgtttgcaaaagaggaggagtccatata

SEQ ID NO: 1982 - DNA, 1457 bp, unidentified
  source 1..1457: mol_type = unassigned DNA; note = element_2b72218
  misc_feature 1..2: note = core
  misc_feature 3..221: note = LE
  misc_feature 222..1436: note = CDS
  misc_feature 1437..1457: note = RE
  misc_feature 6..218: note = bridgeRNA
ctaatggggcccgacggtgtgcgttggggcatgctgttcccgagccgccggcgggtgagcactcctgtctcctgagccaccgagagctctagggttagatcgtgtccccaccggccggcgagggggtctgacggctggtgggatggcgtgccttcgagcactgatccattaggtcgccgcgcacctcctccgggctcagcggcccctgggaaggaggagtcgtgatcttcgtcggcatcgactgggccgaggcgcaccacgacgtctgcatgctcgaccacgagggcggtgtcctgatcaaggggcgggtgcccgacggcgtggagggagtgagccggctgcacgccatggtgtccgagcatgctcaagaaccgggcgaggtcatcgtcggcatcgagatcgatcgagggttgctcgtggcggcgctcgtcggggcgggctaccacgtctacgcggtcaaccccttcgcggtctcgcgctaccgggatcgccacgcgagctccagggccaagtccgatcccggcgacgctaaggtgctcgccgacctggtccgcacggaccgccgcaaccaccgggagatctcggccgacaccgatctcgccgaagcgatcaagatcctcgcgaggacgcaccagtcactggtgtggtcgcgacagcgccagctgaatcagctgcggagcacgttgcgggagttctatccaggcgctcttcaggcgttcggccgtgacctcgcctctccggaggcctgcacgatcctggcgatcgcttccacccccgagcgcggccggcgcctgacgcccgcccggatctcccgctcgctcagggtctcgggtcgaaagcgccggctcacgcagcgggctacggagatccgtgaggcgctgcgggcttcgcagctcgagctcccctccgtcctcgcggaagcctacggggaggcggtgaggtcgctggtggcgctgatcgacgggctgaggcaacagatcgaccggctcgagcaagagttggcggcgcgttttgaaggacacccggacgccgagatcctgcgcagtcttcccggactcggcctggtcctcggcgcccgggtcctcgcggagttcggggatgacccgacccgctacgcggatgctagggccagacgctgctacgcgggaagcgctccgatcaccagggcctcggggacgcgcagagtcgtccttgcccgggtcgcccgcaaccggcgcctggctgacgcgtgctacctctgggcgttctccgcgctcagcgcctcgccgggagcgcgggcctactacgacgcccgacgggctcgcggagccacacaccatcaagctctgcgcgccctagccaaccgcctggtcggcgtcctgcacggatgtctcaagaaccggcagctctacggggaagacgtcgcctggccgaccgcgctcgaagctgtcgcttgacgggttccccccgtgggatgt

SEQ ID NO: 1983 - DNA, 1390 bp, unidentified
  source 1..1390: mol_type = unassigned DNA; note = element_2b7770e
  misc_feature 1..3: note = core
  misc_feature 4..87: note = LE
  misc_feature 88..1107: note = CDS
  misc_feature 1108..1390: note = RE
  misc_feature 1126..1377: note = bridgeRNA
ggatggggtggatggctcctgcatcatccggcgtcgcaatgcgccatagtgtagttgtcatgaactgcttatgagaggagccacccaatgcaagctacaacaatcggctttgatttggcgaagaacgtttttcaagtccacggtatcgatgatcatggcgaggttgttttcaaccgcgctctgagacgggggcaagtccttgcatttttcgaacgcatcgaaccatgtttgatcggcattgaagcatgtggaacgagccaccactgggcgcgcgaactgatcaaactgggtcatagcgtgaagctgatcccacccgcgtatgtgaagccatacgtcaagcgtggcaaatcagatgccgttgatgcagcggccatttgcgaggcagtcacccggccaacaatgcgatttgttgaggtaaagacaccagaacaacaggcgatacttgctgtccaccgcacgcgcgaccttatcgtcaggcaacgtacgcagaccatcaatatgctacgggcacagttggcggagtttggtatcatcttgcctcaaggcgtttatcacgccctgcaatttgccaaggactgcgtgaatgaaggaccgtctaacctgccaaacgacgctgaagaggttatcattgatctgtgcgatcaactgttgttcctacattccaagatcttacgtctttcccggcatatgactcagattgccaagcgcgagaaacgcgttgcactgctgcggacgatacccggtgtcggtccgatcacagcctcagcaatcgtagcgacggtcggcagcggcaagcagttcaacaatggcagagagtttgccgcttggttgggactgaccccgctcaacaaatcaagtggcggaaaggaacgcttaggccacatctcgaagatgggggatcaatacatacgccgtttattggtcctgggcatgacgtcccgtattcggtccatcaggtcgaagccagaaaagttcgacccatggtttgcagacatcctgtcacgcaagccaagcagagtggcagcggttgctatggccaacaaaactgcccgcatgatctgggccgtgcttagccgcaatgagccatacacagtgagaaccgtttgaacacaacaatctaaaaacaagagtttgcaagaccaatgaagtgatggaactttgtcagccctaaaaccaagacgccccgtgctttgtcctgaacgcttgctgttcgatgtgcggaatggggcttggttggtggaaaccatccactgcccggcaggcgatgcaagcatcgccgagagggagggccagcggccacgtgcgtcgcgtcaacaggccgaacacaagactgcttctgacaatgtatcaatcacaaaataggacttgcaaaaagcgagccatccacaca

SEQ ID NO: 1984 - DNA, 1553 bp, unidentified
  source 1..1553: mol_type = unassigned DNA; note = element_2b79778
  misc_feature 1..2: note = core
  misc_feature 3..268: note = LE
  misc_feature 269..1429: note = CDS
  misc_feature 1430..1553: note = RE
  misc_feature 3..247: note = bridgeRNA
cttgtatgatgatttcagaagctaaatcatcacattttcctttcttttagtgatgtgacagtacaatacattcagatgctgtggactttagatttgttcctgtagtccaactacttgaaggagtgtattgccacggttttatctgaattgtttataagctggatgttgccgggagatctgtctcctaagcacttatttcaatcaagtctatgaggataaacgcctgtggattgtcacagcatccaatacactcagaaaggaaggttttatgatctatgtaggcattgatattgccaaactcaaccactttgcctctgcggtatcctcagatggtgaagtaatgcttcagccgttcaaattcacaaacgactatgatggcttccataagctgaagtccagtctcgattccctcgatcctgaccagctcatcataggtcttgagtcaacggcccattatggcaacaaccttgttgaattccttgttcttagtggctacaaggtttgtgtcattaaccctatccagacttcgaccctacggaagaacaacatccgtaagaccaagactgataaggtcgataccttagtcattgctaaggctttgatgatgaaccctacacgtctctttacgaagtacgatatctctctgcttcatcttaaggaactcggcagattcaggatgaagctgatcaagaagcgtacacaggctaagatccagttgacttcttacattgatcaggcatttcctgagatccagtacttctttaacggagttcatcataagagctgctatgcgcttcttaaggaagcccctaccgccggtatggttgcttctatgcacatgactcatcttgctcatcttcttgaagttgcttcccacggccatttcaagaaggatacggcacaagagataagagttcttgcacagaaatctgtcggtatcaatgacagctccgttgctctccagattactcagaccatcgaattgatagagcttctggataagcaggttactactgtggaatccgatatggaatcgcttgttggatccctggattccgttataatgaccattcccggcattggtgcaatcaatgggggaatgatactgggggagatcggggatatatcccgtttctctaatccctcgaaggtactcgcatttgccggtctggatcctgctgtatatcagtcaggcaatttcgaagccaggcataccaagatgtctaaacgcggttcaaggccgctacgcttcgcactggtaaatgctgctcacaacgttgtcaaaaacaacaaaaccttcaatgattactatgctcagaagcgttctgagggtaaatctcattacaacgcattggggcattgtgccggtaaacttgttcgcgtcatatacaagatgctgacggacaacattgcttttgatctgaaataatacgaccgtttcatatggatttacgaaatcctcatccgatgaggattattaaggtcagccttttttacggtcatatcgctaaaataaatatttgctaatttatgcttgacttttcatagctggt

SEQ ID NO: 1985 - DNA, 1357 bp, unidentified
  source 1..1357: mol_type = unassigned DNA; note = element_2b7b85b
  misc_feature 1: note = core
  misc_feature 2..75: note = LE
  misc_feature 76..1101: note = CDS
  misc_feature 1102..1357: note = RE
  misc_feature 1125..1353: note = bridgeRNA
taatgagatggtcacccccgacatcctgcgaaggctacgctttcgtagggtgtttttaattcggagaccatcaccatgagcaatttggcactggtcggtatcgacctcggcaaacacaccttccatctgcacggccaagacaaacctggccgagagctgtttcgcaagaagctttcacgacagcagatgatgcggttctttgccaacctgcccgcgtgcaccgtggtgatggaagcctgcgccggagcgcacttcgtcgcacgcgaactgaccgccctagggcatcaggccaagctgatttccccgcagttcgttaagcccttcgtcaaaggcaacaaaaatgatttcgtcgatgcgcaggccatctgcgaggccgcttcgcgcccgacaatgcgctttgtttcgccgaagaccgaaggccagcagactctttcagtattgcatcggctgcgcgaatcgctgatccgagaccgcaccaaggcggtcaaccagatgcacggtttcttgctcgagttcggtatcagtctgccgcaaggcctggccgtgatgaaacgcctgtcggccgttctggcggagcatgagttgcctgttcggctgacggtgttgctgcaccgtctgcatgatcatttcgtctacttggacgagcaaatcaagcaattggataaagaattggcgggccaactggctgacgatgatctaggccgtcgcttgctgagcatgccatgtatcggcccgatcaccgccagcctgctggctgtggaaatgggcgacggacagcagtacggctgtagtcgagacttcgcggcttcgctaggcctagtgccaaggcagtacagcaccggtggcaaagccaacttgttaggtatcagcaagcggggagacaagaacctgcgaagcctattagtgcaatgcgcaagagtctatatgcggcatctggagcgccaaaagggcgggttggccgaatgggtgcgatcgctgctgacacggcggcattccaacgtggttgcctgcgcgctggccaacaagctggcccgcatagcctgggcaatttctgcgcaccacacccaatacgaagcagggccagacgtggtgaaagcctgatccttcggttgttgctgtaccacgattcacctttcaggttttgcgatagttgaacaacagatgatgtgaacggccaaccggcctggcgaagatcctggataaacatctggctttttaagccgcacgggtttttaaggatcgccaggcgcgactctcatcgtggcgcggggcttgccccaacagacgccggatagatttaagcaagccaccacatcgcccgttaatcagcattgcaaaaatgggggtgaccatagat

SEQ ID NO: 1986 - DNA, 1437 bp, unidentified
  source 1..1437: mol_type = unassigned DNA; note = element_2b88542
  misc_feature 1: note = core
  misc_feature 2..438: note = LE
  misc_feature 439..1422: note = CDS
  misc_feature 1423..1437: note = RE
  misc_feature 9..230: note = bridgeRNA
cgttactatctttgtgccccaacaactggggctttggccagccaggcccggcatgattgctgcccccagtcgcccatgatccggggggtgttgtcaccgggcctggtgggtggctggtgatcgctgataggggcttggccaggacttcccgaggccgtccgtaacgtggatgccgagacttgccaccgatgttgccagccaatgtgtttcattgcgtctcaccttcatgcaagaaccgcttcagcacaattccattgatgtctttgtgtcggcaagggccagcaccacgccgtcgcactcgatcgcagcggcaagcgcctgtacaacaaggcgctgcccaacgacgaagccaaactacgtgccctgatcaacgaactcaaggcgcacggccaacttctgttcgtcgtcgaccaaccagctaccatcggtgcgctaccggtggccgtggctcgcgacgagggtgtcttggtcgcctatctgcccggactggccatgcgccgcatcgccgatctgcatgccggcgaagccaagaccgacgcccgcgatgccgcgatcattgccgaagccgcccgctcgatgccgcataccttgcgctcgctgcggctggccgatgagccactggccgagctcaccatgctgtgcgggttcgacgacgatctggccgcccaagtcactcaaaccagcaaccgcattcgcggcctgcttacccagatccatcccgccctcgaacgagtgctggggccgcacctggaccatcccgctgtgctcgatctgcttgagcgctacccatcacccgccgcacttgccgcgaccagtgagaagaccctcgccaaccgcctgaccaagctcgctccgcgtatgggcaagcgccttgccgccgagatcgttcaagcgcttggcgaacagaccgtcgtcgtgcccggcacccaggccgcgactgtcgtcatgccgcgccttgccaagcagctcgccgccttgctgcagcaacgcgacgagatcgccagtgaagtcgaacgcctggtgcatctgcaccctctttacccggtcctgaccagcatgcccggagtcggcgtcaggaccgctgccagactcctgaccgaagtcgcgcacaaggccttcgcttcggccgcgcatctggccgcctacgctggcctcgcgccggtcacccggcgctcaggctcgtccatccgcggcgaacacccctccaggcgtggcaacaaggtgctcaaacgaaccttgtttctctccgcgtttgcggccttgcgagacccgatctctcgtgcctactacgcgcgcaagatccagcaaggcaagcgtcataaccaagccctcatcgcgctggccagacgccgatgcgacgtcctgtttgccatcctgcgcgatgggaccttttaccaaccacaaaccgcccctaacgcttgacgaaacacatagggg

SEQ ID NO: 1987 - DNA, 1308 bp, unidentified
  source 1..1308: mol_type = unassigned DNA; note = element_2b8a6e4
  misc_feature 1: note = core
  misc_feature 2..267: note = LE
  misc_feature 268..1116: note = CDS
  misc_feature 1117..1308: note = RE
  misc_feature 49..245: note = bridgeRNA
cctttggtctaacaaagataattttataaaaataatattgttgtttgtaaatatgggctggggggataaaaactaaagccttagtatgaaacgttatttaaaaggcagggtgaactttcgaactcactagtttagagaacttgttaacgtatcagtccctgccttttatgattgcccaaggcccaactagaatactttctttgcttcaacaaaggtgattggcaaaaggcaatttttttttgtaacgtaattaataagagtaaaagtatgaaaaactggaacattattttaggagtggatgtatcaaagttaacattagacgtatgctgggcagaacgtaagctgcatattagaattgataataatagtaaaggatttggggtatttaaaaagtggtgtaaaaccaatcagatcaaactggaagaaacgttagtagtaatggaatatactggaggttacgaataccggtttgttcagttttgtgagtcaggaaatatcgcttattgccgggtgccgggtttagagatcaagcaatcgatgggtatgaccagggggaagagcgatcaggcagacgcttatcgtatcggacaatatggtgaagaaaagcgtagacgtctggaaccttcaaagcctttgaataacaaggtattaaaattgaggcaactactatctttccggaaaagactgattcgtgaaacggcgggattagaatgtacgattaaagaacgtcaacacatgtacggggttgtgcaaactgataccattatccttgttgcccgggctaaaataaaagagaataaaaaacatatcgctcgagtggaggatgaggtcacagatctgatcaaaaacgatgagtcgatgttgcaaaactatcgtatcatcagcagcattaaagggattgggccggtaaatgcctggatgacgatagcttatacagagaattttaccagctttaccaatgcgcgaaaatatgcggtatatgttggcgtgatcccttttgagcacacctcaggctccagtattaaggggcgaaagcgggtaagccatatcgctcacaaagaactaaagaacgagctcaatcaagcagctaaagcggctatgacccacgactcgtaactcaacgcatatgcagaaaggaagcttaaagataaagcctacccattggtattgaacaatgtcaagttcaagttgattttacggatgttcgccctagtaaaacgaggggtaatgtatgtggaaaattatagaaaagctgcctgaaaaaaaacttttttgaattaaatttggatatatgagaaacctagaata

SEQ ID NO: 1988 - DNA, 1551 bp, unidentified
  source 1..1551: mol_type = unassigned DNA; note = element_2b8b1f2
  misc_feature 1: note = core
  misc_feature 2..514: note = LE
  misc_feature 515..1438: note = CDS
  misc_feature 1439..1551: note = RE
  misc_feature 14..247: note = bridgeRNA
tgtatgataaatatataaaatatttatctatacaacctcctttcatagtttattttatttattattttttatataatctatttatactgtggactttttatattcacttaaagagcttttgctacttttttagggagattactgccacactcttttaactcatatacttatagttggataagtctttaaactttcatttatcacaaggatgtattgtttttttagatgtggattccacagttattattttttaaggatgtgattttatgtttttactaggtattgatattgctaaacttaaccatgttgcttcttgtattgattcttccactaatgaaattgtttttctaattttaaattcaaaatgattttataggttttagtgctctttagataaaatcaaaacttttgatactaaaaatcttattattggcttagaatcaacttctcattatggagaaaatcttatcaatttttatttaaacaacattttaaagttgcgcttattaatccattgcaaacttcacatctaagaaaagccaacattagagatgctaaaaatgataatttaggctctcttaatattgctaaatctttaatttttgctaaacttaactttatttctgagaaaaatattaactgtttctctctaaaaaaacttactaggtttagaagtagcttaattaaacaaagaagtaaagctaaaattcagttaacatctttacttgatttactttttccagaattacaatatctttttaaaagtaaaattcacagcaaagctatttactctcttcttaaaaaatatccttcagcagaggagatagcagccctaaaagatgataaaatttctaatcttttatatgcttcttcaaaaggacatttcaaaaaagaaaagtccattgagcttaagagtcttgctaaaaccactgttggaattaaagatacttcaatatcattacatgtaattcagttaatagaattaattgaattatatgataaacaaattaaagatattgtaactaaaatagctgatacagttgataaattagatacaaaattattatcagttcctggaataagtattattgcttgtgcaataatattaggagaaacaaataacttcaataatttttctgattctacaaaattacttgcgtttgctggtcttgatcctaagataagacaatcaggtaattttaatgcttcatcttgtagaatgtctaaaaaaggttctccatatttaagatatgctttaatttttactgcttggaacattgttagacattcagaaaagtttaacaaatactattgtttaaaacgctcacaaggcaaatcccattacaatagtcttggacatgttgcgcataaactagtgagagttatatttacactgataaagaagaatattgtttatcaggaagaaaatttagaatagtatttattaaatttcaactattgaaaaaactaagagtttaaaactctaattttgttatgccaaaaattcttatttaaatttttttaaaaaagttcttgacttttcatagttgg

SEQ ID NO: 1989 - DNA, 1502 bp, unidentified
  source 1..1502: mol_type = unassigned DNA; note = element_2b93ef4
  misc_feature 1..2: note = core
  misc_feature 3..246: note = LE
  misc_feature 247..1482: note = CDS
  misc_feature 1483..1502: note = RE
  misc_feature 15..242: note = bridgeRNA
ctaataagaactaacgggttgagccttagggcagactcggtgccaggtggccgccggcaggtgagcactgttccgcccaggacctggagtcctaccgcaagatcgtgcccctgccggtgaccgggagagttgatcgctgctgggatgtcgtgcctgcctgattgggtgtgagcactgttttattagggcgctgatggttctcccgcaggccgctgacatgattcggcatcttggacgggagaggcgatgcgcctgttcgtaggggatgactgggctgaggaccaccacgatgtggaggtgatggacgaggcgggccgggtgctggcgaagaggcggctgccggagggcgtggccgggatcgcgcagctgcatgagctggtcggccgctgcctgcccgaagatgcgcaggacgcggaggtggcagtcgggatcgagaccgaccgcggcccgtgggtggccgccctggtcgccgccgggtacaccgtgtacccggtgaacccgctgcaggcctcccggtaccgggaccggcacggggtgtccggcgccaagagcgacggcggggactcgcacatgctcgccgacatggtgcgcaccgactcccaccagctgcgcccggcagccggggacagcccggaggctgcggcggtcaaggtggtggcgcgcactcataagacgctgatctgggagcgcacccgggccgtgcagcggctgcggcaccagctgcgcgagtacttcccggccgcgctggaggccttcgaggacctggatgcccccgatgctctcgagctgctgggcaaggcccccgagccggcccgcgcggcgaagctgacccgcgcccagatcgccgcggcgctcaagcgagcccgccgccgcggcatcgcggagaagaccgatgcgatcctggccgcgctgcgcggggagcatctcggcctacccgccccgctgactgcggcctacgccgccaccgcccgctccctggtcgcggtgatcaccaccttgaacgagcaggtcaagatcctcgaagagcaggtgagggagcattttggccggcacccggacgctgagatctaccagtcccagcccggtctggcagccatcctcggcgcccgggtgctcggcgagttcggcgacgaccctggccggtatgccgacgcgaaatcccgcaagaactacggcggcacgagcccgatcacccgcgcatccggaaagaagaaggtcgtcatcgcccggttcatccacaacgaccggctcatcgacgcgctcatgagctgggccttctccgcgctgaacgcctcacccggcgcccgtgcctactacgaccagctgcgcaccaaaggtatcgaacataatgatgcccttcggcgggtggccaaccggctggtcggcatcctgcacggatgcctgaagacccgcaccctctacgatgaggccaccgcctggggacaccgggaaaatctcggtcaatctcacgtcgcggcttgacatttaagctcctgggatgt

SEQ ID NO: 1990 - DNA, 1409 bp, unidentified
  source 1..1409: mol_type = unassigned DNA; note = element_2b967f2
  misc_feature 1: note = core
  misc_feature 2..305: note = LE
  misc_feature 306..1115: note = CDS
  misc_feature 1116..1409: note = RE
  misc_feature 1177..1401: note = bridgeRNA
taatggaatggtcgcccctccccaaaaaggcatctgagtgccaaagtggcgaatgtaagttcccactgatgagagaggcgaccaccatgaaggctacgactatcggcatagatctggcaaaacatctcttccaattacatggcgttgatcaacatggcaagacggtcctcaagcgacagttgaagcgggattagatgctctcattctttagcaatcttcctcctagcctgatcggcatggaggcatgcggcagtgcccattaatgggccaataaattgcaagggctggggcataccgtcaagctgatggcgcctcagttcgttaagccctatgtaaagaccaacaagaacgatgctgcggatgccgaagctatttgtgaagctgtgactcggcccaccatgcggttcatgccgataaagagcagcgaacaattggccatcctggccttgcatcgtgcccgacaaggcttcatcaaggccaggacagcccaagccaaccagatccggggcctgttagcagaatatgggttcatccttcctcaaggcatcacccacataggcaaacacgttcccgatctgctggaggacagtgaaaacggcttgccaggaacgtttcgccatttgttaatgcgacttcacgagcacctcaaggtgctcgacatgcaggtaaacgaattggaggactcgatcgttcgctggcataaggacagtgccgccagccaaaccttagcccagttgccaggtatcggccctatcaccgcaagcgcactggttgcttccatcggcaatgcgaaaaacttcaagaatggccggcaattggccgcgtggctcgggctagtgccacggcaacactccagcggtggtaagcagaacttgcttgggatcagcaagcgtggcgacagctatctgcgcaccttgttaattcgtggcgctcgggcggtgctacgagtagcagaacgcaaggagtcgttctcgggaagctggctggccggggtgatggctcggcgcaaccctaacgtggcggcggtagcgcaagccaataagacggctagaatcatctgggcattgctggcacacgacagaaaatatgatgcccactatggcatggccgcatgaaaaacaggtttggcaatgtaagggcggattgacagccctatgaccaaaaattagtaaggaagcaccgattgcacaggcaatcatgaagtgatggcgagacaggtcagaccgtggctggtaaaacccgagggaaacaaagtactccaagtacgtggcgttgatagcggagccagccagcgaattccatcagggatagaggctgtcgcctcgatcaaaatccggatctatggctgcaatctccacctaactcactttcatggattgagggcttggcaaaccgggggcgaccatcta

SEQ ID NO: 1991 - DNA, 1336 bp, unidentified
  source 1..1336: mol_type = unassigned DNA; note = element_2b98b6a
  misc_feature 1: note = core
  misc_feature 2..103: note = LE
  misc_feature 104..1108: note = CDS
  misc_feature 1109..1336: note = RE
  misc_feature 1117..1331: note = bridgeRNA
gaatgaaagggacttcccctactcgaagcgggccgtagctctcacggcatcggagtgccaagattgaatttcgcatcttcaatgtgaaacgagaggggaagtcatggaacagattactaccgtggggatcgatttggcaaagagcgtgttttcgctgcacggggtggatggtgcggggcgtgtggtgctgcggcgcacggtgcggcgcgagcagctggttgcgacggtggcggcgttgccgccttgtctgatcggcatggaagcgtgctcgggggcgcatgaatggggccggcggttcctggggctggggcacagcgtgcggctgatggccccgaaattcgtggcgccctacaggaagagcggcaagaacgacggcaacgatgccgaggcgatctgcgaggcggtgacacgcccgaacatgcgttttgttccggtgaagagcgccgagcagcaggccttgctcgcgctgcaccgagtacgccatggattcgttgtcgagcgaaccgctatcatcaatcgcctgcgtggcctgatagcggagatcggagtggtgctgccgctgcgttcgattacggtgcgccgccaggccgcggcagccgccgagagcctgcccgagcttgccaagcgagccatcggtgatttgctcgagcagctgcgcctgctcgacgagcgcatcgcaggctacgaccgggagatcgaagcccaggcgcagctgtcggaacctgcgcgacgcttgatgaagattcgcggcattggcgctaccaccgcacttgccattgtcgccacggtgggcaacgcccgggagttcaagaacggccggcagttcgccgcctggatcggcctcaccccgagtcagtactccaccggcggcaaaccccgtctcgggcacatcagcaagcgcggcgatgcctaccttcggaacctgctcgtgcaaggcgctcgctcggtgctcaatagcgccgcaggccaccaggaccgtatgtcgcgctggattctcgaattgcagccgcgccgcggctactaccgcactttggttgccatcgccaacaagaacgcccgcatcgcttgggcgctgctcgcgaaaaacgagacgctgcgtacagcctgaactcatctacccgccacgactgcaaatcgacgatgacgaaacggtcagaccggcgcccggagaacctgatcaaactagatggcggcaatcgacgccgactaacgagcgaggaccgggcgtgcggctttcatcagggccagagcggtaaatcgctcgcaaacaggccggttatagtgacacagtccgaccttcttacatcagccttgcagttccggggaagtccttata

SEQ ID NO: 1992 - DNA, 1579 bp, unidentified
  source 1..1579: mol_type = unassigned DNA; note = element_2b98d37
  misc_feature 1: note = core
  misc_feature 2..78: note = LE
  misc_feature 79..1140: note = CDS
  misc_feature 1141..1579: note = RE
  misc_feature 1342..1569: note = bridgeRNA
taatggaatggtccggccgtgctccagcccggccagcgatgcaagctggcttggggcaccaaagacaaggagcacgccatgtcaggtctcgattctagaatcgccgccatcggcatcgatatcggtaagaacgcgttccacgtcgtaggccaggatgggcgcggcgccctcgtgctgcgacagaagtggtcacgcggccaagtggaagcgcggctggcgaacttgccgccctgcctgatcggcatggaagcctgcgtcggcgcgcatcatctcagtcgtaagctgcaggtgctggggcacgacgcccggttgatgccggcgaagtacgtgcgcccttattcgaaaggccagaagaacgacttccgggacgcagaggcaatcgccgaggcagtgcagcgtccgaccatgaagttcgttgcaaccaagaccgccgagcaacttgacctgcaggcgctgcatcgtgtgcgcgaacggctggttggccaacgtaccggcattatcaatcagatccgcgccttcctgctggaacgcggcatcgcggtgcgccaagggctgcgctttctgcgggcggaattgcccaccgtggccacgcgcagcgacgccctgtcacctcgcatgctgcggctgatcgaggacctggcagacgactggcgccggctcgatgcacggattgaggcgatctcgggcgagattgaagagctcgcgcgtaaagatcaggcgtgcgagcggctgatgacggtgcccggcatcggaccgatcatctcgagcgcgatggtggctgcgatcggcaccggcgatgcgttctcgaaaggacgcgacttcggcgcctggctcggcctggtacccaagcagatatcgaccggcgatcgcacgatccttggtcccatatcgaaacgcggcaatcgctatctgcgcgccctgttcgtgcaggcggcgtgggtcgtcttggtcaagctgggaaagaagtgggagcgctatgggctcaggtcgtggatcgaggcagccaagaagcggctgcaccgcaacgtgctggcgatcgccctcgctaacaagctcgcccgcatcgcctgggcggttctccacagggggcgcgccttcgagtgcgccaagacagatgtgatggcgccccggtcagcgtgatcctcgcgccgtgctcgggcccgtccaggcgtggcctggagtcgtcagagcgggaggcaaggccagcgggacggccaagccttgacggtccctccgcgcggcgcgcctgacacgcgcaggtcgggacgaaggaacggccaccaggcacgaaccaaggaacaacactaagtgaggagataacgatgacctaataggttccttacccaccgaggtctgcgagaggatgagacgagatggaggatcggtcttcccggcgcatgcgaacactggtgacccattcggcccattcgaggccggtccgttaatgacgtcgcacgcgcgctgatatccatgatggtccggagccgcgatgagctccaatcagagaccggatacattgacgcaagaccgcatcaccaatcgacgaaatcttcttgcaccgcacggccggaccatacat

SEQ ID NO: 1993 - DNA, 1403 bp, unidentified
  source 1..1403: mol_type = unassigned DNA; note = element_2b9b495
  misc_feature 1: note = core
  misc_feature 2..141: note = LE
  misc_feature 142..1389: note = CDS
  misc_feature 1390..1403: note = RE
ctacttaatactggtgccagggcctgatcccggccaggatcgggtccaggtgcccggtgagaagctccctaatcggctgcccacccgcatcattggtgtggctctctattggcttgcagctcaccgggtgccgtgccgggaatggctgaagaggggtttgcccagctcgaagtagcggtgccttcccgcacggacctcacacgccgattcgggaaggacgcgccggtgtcagtcatcatcgggatggatccacacaaacgctcagccacgatcgagattatcgacctcaacggcgagatactggccacgggacgatacggcaccgacaacgccggatacaacgaaatgctcaccactgcacagcgatacaacgaacgggtgtgggcgatcgagggctgcaatggcatcggccgtcatatcgcgcatcgcctggtccacgatcgggaaacagtgatcgatgtgccggcgaaattgtcggcgcagattcgggtgttcgcgaccggcaacggtcgcaagaccgatcccgtggatgcgcattcggtggcattggcggcgttgcgggtaccggacctgcgtcgcgtccaggcggattcggagctgatcgcgttggggatgctcgccgatcgccgcgacgagctcggccgcgcccgcaccgacaccgtcaaccggctgcaccgactgctgctggagttgctgcctggcggagcgaagaagttccttaccgcaatgcaggcccggaagctggtcgcgaccgtcaaaccccgcgatccggcgggcaaggtccggcgccgcctggtcgtcgagttgatcggcgaactggaaacgatcgaccgaaagatcaaggccgcgaacaaagaactacgccagctcgtcaacgagcgcggctccagcctgaccgacctcaacggcatcggaccagccggcgcggcgcggttgctcgccgatgtcggagatattcaccgattccgagaccggaaccgattcgcgtcctggaacggcaccgcccctttggacgcatcctcaggccagcagcaacgccatcggctctcgcgcgccgggaaccggaagatcaaccgggtcttgcacaccatggccatcgttcaactgcgcaatcccagcgctggccgcacctactatgaccgccgcagagccgcgggcaagacgtcgatggaagcaatgcgggcattgaaacgacggctgtcgaatgtcgtctacaggcgcatgctcgccgaccagcgcagaggtgaaacggcaagcccgggagggcaatcggggacgactatcgactccagcgcgaccggctcaaccccgcataccggcacttcggacaagccacaacccggacttaccaccaaccagaatagccccgacctgcaaaccgcgtcttgacacgagaggggagc

SEQ ID NO: 1994 - DNA, 1466 bp, unidentified
  source 1..1466: mol_type = unassigned DNA; note = element_2ba12ba
  misc_feature 1..2: note = core
  misc_feature 3..246: note = LE
  misc_feature 247..1422: note = CDS
  misc_feature 1423..1466: note = RE
  misc_feature 3..226: note = bridgeRNA
ctcgtataataaaagtagtagtttttagagttcctctccaagaactatggtataatattgtttaggtgctgtggatcggtggctcactcctaccgcatgacggtttaacgaaaggctccgaccacagtctctatgcaatttgttgatcagttagataccgcctgacggtttatttagaacgaggttacaatcgcattgagtccctgtggatctaaacagcatcaatatatctttggaggtatcattatgatcattgttggtattgatgtggcaaaggacaagcatgattgctttatcatggattcggaaggtacggtgcttttcgatgtgttcactgttcctaacactcttgatggctttaatatcctgcttgataacatcaagtccgttaccgatgatctgggtaaaacaaaagtaggactcgaggctacgggacattacagctacgatctgttgggatttctgctgaacaacggcctgccaacctacgttctgaaccctttgcacactaatctttaccgaaaaagccttacacttcgtaaaacgaagacagacaaggtagatgcgcgcgtgatcgcttctatgttaatgtcttgcgtagaccttaagccctacacaagtacattataccagaacgaagaactaaaatcaatgactcgttacagatttgataaagtttctgagcgagctaagctcaaaacctctgtttcaaggcttgttaccattctctttccagagcttgaaaagcttgttccaacgctgcatatgaagtctgtctatgctttgcttgccgagtacccgtcggcaaagcatatcgctgatgcacatcttaccagactgactaatctgctttctgaggcttcaaagaatcgctatggaaaggataaagccattcagataagagaagctgcaaggcgttccataggctctgttatgtctgcaaagtcaatggagctcagacataccataaaactcatagcagaccttacagagcagatagatgaagttgaggctgagatcaagaagctcgttgatgaaagtggcacaactcttttgaccgtaccgggactcagctacgcaacagttgctgttattcttgcagaagttggagatttctctaactttgcaacgccggataaagtgcttgctttcgcaggaatgtcgccttctacataccaatcgggacagcttacaaactgctatgccagaatggagaagcgaggatcaaaatacctgcgttatgctctttacaatgctgccaaatatgtctgcacctgggacaagaccttcgccgattatctttccaaaaaacgagctgaaggcaagcactacaatgttgctttatctcatgcggtcaagaagctcgtaaggctcattttcgctcttgaaaagtctcatatgccttatcagccctcaatttagtttttttaaactttcaattttggacttgacttttaatagttagt

SEQ ID NO: 1995 - DNA, 1570 bp, unidentified
  source 1..1570: mol_type = unassigned DNA; note = element_2ba2406
  misc_feature 1..3: note = core
  misc_feature 4..249: note = LE
  misc_feature 250..1449: note = CDS
  misc_feature 1450..1570: note = RE
  misc_feature 20..269: note = bridgeRNA
tttagtaccataaaagtgtagttgacagagataactccctgcagctgcacttgttttatataataagggatacagttggtctggcggcctgttttttggatcgtagcatccgtcacgaaaactgtcagccatccccttattatatgagctcgtttaagcaggttgggaaaggctcccgtgtaacggactaaaatgagttgtaatgagtgtgggtggaagcaactgcaaatcaattcaaggaggttcgatatggtaagcgttggaatcgatgtttctaaaggtaaaagcacagtctgcctgatgaggcctttcggcgagatagttgcaggtcctatggagataactcatgtagactctgaactgaagacgttggtcaaactcatgaaaagcatgagagatgatgtgaaagtcgtgatggaatccacaggtatataccacttaccagtgctgacatatcttaaggaaaacggcatattcacagcagtgatcaatccgtaccagatgaagcaatacagagtgcaagggctaaggagagtcaaaaccgacaaagcggattcaatgactatagccaagtatggtctggataactgggatgaactcaaagattttgtaagttcggaggataagtacagggaactgactctgttgagcagacagtatcgtcactatatgcggatccatgtaacatcactacaggaattgacacatatcctggactttacgatgcctgatgtaaagaaggagttcaatagctggaatccggaaaatggtaaagacaagctctcagactttgtcgagaaatactggcattacgacaatatacgaaagaaatctgagcggcaatttgtggaaagttatcttgcgtgggcaaagaaaaagggataccgctgtaaccagaataaagccgctaagatctattcgatggctaaagaaggcatccctacattaccagcagatcaaaccaccaaaatgctggtaatccaggccattgaagtcctgagaagagtcgatgaaactctcaacacgatattagcacggatgcaggaaatcgccaagactttaccggaatattctgtagtacgatctatgggaggtgtaggtgatgtacttgctccaaaactgatagctgacataggtgatgttaggagatttcataacagcaaggcgttgatcgcctatgccggcatagatgcacctccataccaatccggacaattcattggtacgaatcgtagtatttccaaacgaggatcttctgccatacgtaaaactgggtatgaagtaatgcggtcattgaagtcgcatccgatgcccgaagacggagccgtgtaccagttcatactgaaaaaagaggctgagggaaagcccaagaaggtggcgaaaatggctggactgaacaagtttcttaggatctactatgcaagagtgatggaggtgtataactgttaaacgagtaaatacggtatgcatcgattaggttggcaaagcgaccagcctttttgtagtgcactaactgcaatagataaacctgctagcaaattcaatttagtacttgaattttgttagcagg

SEQ ID NO: 1996 - DNA, 1373 bp, unidentified
  source 1..1373: mol_type = unassigned DNA; note = element_2ba4e7f
  misc_feature 1: note = core
  misc_feature 2..80: note = LE
  misc_feature 81..1112: note = CDS
  misc_feature 1113..1373: note = RE
  misc_feature 1143..1364: note = bridgeRNA
tactgagatggtccgccggtggatcttccacgtgggtgtgggtgatcttgttggcaggttacttcaggaggatcatcgatatgcagattcgttcagttggcatcgatctcggcaagacgacgtttcacctcgtagctcttggcgataacggcaaagtgcttcttaagaagaagttcactcagaagcagctcatcaccttcactgcgaacctgcagacctcactgatcggtatggaggcgtgctcaggtgctcactttcttggccgtgccctgcgagaacaaggccatgacgtgaagctgattccagcccagtttgtaaagccgttcgtgaagtccaacaagaacgacttcattgatgctgaagcgattgccgaagcagtcgaccggcacaacatgcggtttgttccgatcaagaccgatgatcagctcgatctgcaggcgctgcaccgggtgcgggatcggctgatggcgcgaagaacctccgtgatcaaccagattcgagctttcctgttggaacgcggcatggtatttgcgaagagcccgattcggctgagggaggccatcccggaggtgcttgagaacgcgaacgagaacctcaccccgaggatgcgccacctggtcgcgatgctgtggtgcgagtggaaggacatggagcagcagattttggagatgaacgatgaagtggagcggattgcttcgagcgatgccgcttgcgtcaggctgcgtcagatcccaggcatcggaccgttagtggcgacggcgattgtggcttcgattggcaacggcgcagccttccgcaagggacgccagttcgcggcttggataggcctggtgcccaagcagcactcgacaggcggcaaggcgaagctatatggaattagcaagcgcggcaacctttacccccgcaagatcttgatccatggtgctcgtgctgtggtgttgcgatcgaagcgagaccgcatcgcgatgggtccatggatgacggcgctggggaggcgagcgccgcgtaacgtgttgatcgttgctatggcgaacaagctggcgcggatcgcgtgggcggtgctctcaaccggccaggactatcggactgttccgaatgcgatctctggttagccaagcgtaacaacgatcgattccaagctctcccaccaaggtctgcacaggcgagtgaagatgaaagaacagtcacaacggcgtgcctgaaacctgttttccgattgggccctcacacggccaaggggtttccaaggacaggcacgcggcgtatctcatcatggccaggagaaatacatctccacacataggccggatacattgacgcagactttcttcctctcaacacttttcccttgcagtcagacggcggaccataca

SEQ ID NO: 1997 - DNA, 1401 bp, unidentified
  source 1..1401: mol_type = unassigned DNA; note = element_2bac004
  misc_feature 1: note = core
  misc_feature 2..88: note = LE
  misc_feature 89..1123: note = CDS
  misc_feature 1124..1401: note = RE
  misc_feature 1173..1393: note = bridgeRNA
caatgggatggacgcccccaccttaagcggcacaaatgtgccaaagtggagttgcgtatcaaccacttaactgacaggagcgtccaccatgaaggctacaacaatcggcattgacctggcaaagaacgtgttccaggtccacgcagtgaatgagtacggtaagaccgttttgaagaagcaactcaagcgcgaccagatgactgaattttttgccaatctccctgctgccttgatcggcatggaagcctgcagcggagcgcactactgggctcgaaagttgacgggcatgggacatgatgtgagactgatggcccctcagttcgtcaaaccctatgtgaagaccaacaagaacgacgcagcagatgcagaagcaatctgtgaagctgtggctcgccccaacatgcggtttgttccgatcaaaaacatcgaacaacaagcggtactctcgtggcacagagttcgtcaaggcttcataagtgcgcgaaccgcacaggccaaccagattcggggattactcagcgaatacggaatcatcctcccacagggcatttcaaacataaccaaactggtacctgatcttctggaagatgccagcaatgagctgccaggaatgttcaggctgcttgtagatcgactgatggaccatttcaaggagttgtaccggcaagtcgccgagatagatgtgcagatcaaagcctggcaccgacagagtcaactgtcctgcaagttggagaagataccaggcgttgggcctgttacggccacagcgctggtggcaacgattggcgatgcaaagaattttgataatgggcgtcaagttgccgcatggcttgggttggtgccccgacagcattccagtggcgggaagtcaaatttgctgggcatcagtaaacgcggtgactcgtatttgcgaatgctgctaattcactgtgcccgtgcagtgatcttcgcggcaaagcgcaaaggagtacaggaggggtgggtgcatgagttggtaaagcgtcgcaaccacaacattgcggcggtggcgttggccaacaaaatcgcgcgcactgtatgggcactatgggcacacgacagggagttccgacccggctacacaaccactgctgtggctgtgtagcccggatcggtcaaaaaaatagaagcagaaaacgacgggagttagaaccaccgattgctcaagcgatcatgaagtgatggcaatataggttagaccgtggttggtaaagcccgagaatgtcggagcaccatcaagtgcgccatacctgtggggcaccaaccagcgaaacccatttgggacagcggctttgccgcaaacaaagtccgaatgtactgatgcaatctataccttaaggccaaaacgaattgaaagcttggcataccgggggcgtccatgta

SEQ ID NO: 1998 - DNA, 1361 bp, unidentified
  source 1..1361: mol_type = unassigned DNA; note = element_2bad09f
  misc_feature 1..3: note = core
  misc_feature 4..86: note = LE
  misc_feature 87..1100: note = CDS
  misc_feature 1101..1361: note = RE
  misc_feature 1111..1347: note = bridgeRNA
tgatgttgtggacggctccacccagacggcatttaatgtgccatgttggggttgttattgaccaacagaaaaaaggagccgtccacatggatattacgactgtcgggattgacctagccaagtccgtttttcaactacatggcattgatgccaatgggaacattgttttgcaaaagacgctgcgccggggccgtgtcctagcgtttcttactaagattccaccttgtttgattggtatggaagcttgtgcaactgcccactattgggcccgggagatcacaagcttgggtcataaagtacgcctgatccctccggcctatgtaaaaccttatgttaaacgccaaaaaaacgatgccgcggatgccgaagcgatttgtgaagctgtaactcgcccgaatatgcattttgtgccggttaaaacaaaggagcagcaaggtgtccttgttctgcaccggtctcgcgatttgttgatgcgccagcgcacaatgttactgaacgcggttcgggcacatttgtcagagtttggatatatcactgcacaagggccgaagagaacactcgatctgcttcaacgattggaagagggcgatgatattgagcttccggacacggtcatcacggctttgctgagcttaggagagcaactctcaactttgcaacgcgctattacaggaatagaaaaacgattgatgatatggcaccgacagaacacggcaagccaacgcttggaaacaattcctggcattggccttatcaccgcgacggcgttggctgccagcgtgcccgacccgacggtctttaaatcggcgcgtcaattttccgcctggcttggtttagtgccaaggcagaactcatctggcgggaaaactcgacttggtcgcatatcaaagatggggaatggatatttgcggaaattgcttgttgtaggcgcaacttcagtaaccaggcgtgctgctaacaatgaaacgcgaactggcgcctgggtcaggtcgctactggagcgaaaaccgacgcgcctcgtaaccgtcgccatcgcaaataagacggcgcgcaccgcatgggcccttatgataaagggagaagtctataaggcctactgaaccgaagaaacatacggcggataaacccgccgtaaggaatgcaagggcagaatgaatgatgatgaaacaaatgggaccgccaccgagacaccccgaggtgctgtctgggcttaatagctcgtttgtctgatagggactcggtatgcggacttcatcagggccagcggtaatagtaccgcgcaaacaggccggacacatgaccgctccccgctggatcatcaaagttcatttttatcttgcaaaaaaggagccgtccacaca

SEQ ID NO: 1999 - DNA, 1487 bp, unidentified
  source 1..1487: mol_type = unassigned DNA; note = element_2bb55be
  misc_feature 1..2: note = core
  misc_feature 3..234: note = LE
  misc_feature 235..1467: note = CDS
  misc_feature 1468..1487: note = RE
  misc_feature 6..230: note = bridgeRNA
ctaatggggtttgccgggtcgtcgtgtgggaggctcggacctgtagccgccggctggtgagcactctaaagatctggacttcgagtcctttccaagacagtgccccatcgggtgaccgggaggccctgaatcgctgctgggatgtcgtgcccgctttgcgtgagcactgctcattaggtcgctgatggtcctcctgacggctgctgacgattcgactttcaggacggggaccggatgcggctgttcgtgggggatgactgggctgaggatcatcacgatgtggagctgatggacgcggcggggcgggtgctggccaggcggcggctgccggagggcgtggcgggtatggcccggctgcacgagctgatcggggagcagctgggcgatgacctgggcgcggaggtggtcatcgggatcgagacagaccgcggcccgtgggtcgcggcgctggtcgcggcggggtacacggtgttcggggtgaacccgctgctggcgtcgcggttccgggagcggcacggggtgtcgggggccaagagcgacgccgcagacgcgcacatgctggcggacatggtccggaccgactcccaccagctgcgggcggtcgcgggggacagcgcgggcgcggaggccctgaagctgctggcccgcacgcacaagacgatgatctgggagcggacccggcaggtgcagcgggcgcggcacctgctgcgggagtacttccccgccgccctggaggccttcgacgacctggacgcccccgacgccctggagctgctgggcagggcgccggacccggcccgggccgcgaggctgacccgggcgcaggtcagcgccgcgctcaggcgcgccggccgctaccgcatcgcggaccgggcggaagcgatcacggccgcgctgcgcagcgagcagctgggccagccgcccgccctgaccgccgcctacgccgccgcgctgcgggccctgatcgcggtcatcatcaccctgaacgagcaggtcatgatcctccaggagcaggtggaggcggattttggccggcacccggacgctgagatctaccggtcccagcccggcatgggcgccatcctcggcgcccgggcgctcggcgagttcggcgacgaccctaaccgctacgccaccggcaaggcccgcaagaactacgccgccaccagcccgctgacccgcgcgtcgggcaagaagaagacggtgatcgcccggttcatccgcaacgagcggctcaccgacgccctgcgggcccaggccttcgccgccctgaccggctcacccggcgcccgcgccctctacgacgccgagcgcgcccgcggcaccgaccacaacgccgccctccgcaagctcgccaaccgcctcgtcggcatcctccacggctgcctcaagacccgcaccctctacgacgaggcaaccgcctggcccaaccacggaaaaacaccccaaacccgcttcgccgcttgacaccaaaacccctgggatgt

SEQ ID NO: 2000 - DNA, 1176 bp, unidentified
  source 1..1176: mol_type = unassigned DNA; note = element_2bbc682
  misc_feature 1..2: note = core
  misc_feature 3..207: note = LE
  misc_feature 208..1032: note = CDS
  misc_feature 1033..1176: note = RE
  misc_feature 3..183: note = bridgeRNA
cttgtatggtaagacttgaagggaggaggagggacttagttcgcttctgactgttcgcgcagtacagacccgtaggagatttcacccctcctcctttcacccaagcgccgataaagaatgcttaaggctcacaacctacgatagaaacaagcctgcgcctctgggtggccccttcaagtctgtaaaccttatccccgaggaggcgttatggcaatgcgggttactctggaaaaaccgatcatcggtgtagatgtcgccaagaatgagctggtgatctaccacgatcaatatgatcgacttgaggcaatccccaataccaaagtcgccatcacccaatggctgaaggccttggcgagcagatgcgccatcgccatcgaagccactaacgtctatcacgtcctgttcgcggatgcggcccacgaagcaggctgtgacgtttatatggtggatggctatcagctcagtcattaccgtaaaggcgtcaacatacgcgccaaaaccgatgcccaagatgctcgtttgttggcccgatacctgaaaaacgagcttgatgagttgcggccctggatacctgcgagcccgctttatcggcagcttctgagcctgttccgacgtcgtgcagccttggttcaggctcgtactggcctggtacaaagctggaccaacgagccttttctgagaacagcgttcgccaatcaggtcaactcgatgaaacgatttgaggcgctcgttgaaaagaagattcgcgatgtactgcaggaagccgggctgatgaggcaggtcaaccgctgtatgaaagtagaggggatcggctttctgactgcagctcgtttggtcacttcttttcagcgaggcgagttcagcggagcgaacgcctttatcgcgtttcttgggctggacctgagagtatccaaatcagggcaaagtgatggacctccgattgaccaaacgcggcgatccagaagcccgacggttgctgcacaacgcggctatgtccgggagccgtacgccggcctggaagcctttttatgaagagcggagaaagcgtggctttagtacaactcaagcgctggtcatgctctcccgaaagttggctcgagtagtcttcgctctgttaaagaaccagagcgaatatcaaacaaaagtggcttgagggctttcccaaaaccatagaat

SEQ ID NO: 2001 - DNA, 1180 bp, unidentified
  source 1..1180: mol_type = unassigned DNA; note = element_2bd6cf7
  misc_feature 1..2: note = core
  misc_feature 3..208: note = LE
  misc_feature 209..1165: note = CDS
  misc_feature 1166..1180: note = RE
  misc_feature 6..213: note = bridgeRNA
cttgtatgttcaggccagaccggcgcggtagagtctgattgccgttgaagcaatcggaccggaccgtgcagcctggtaggcccttgggcctttgagcccgtgactgagtaaatcgcgcacggacgccgcgctggtcttcaacaagcccgaacggttacgcgccccggccagcccgagggcgcattcacaaggaagggttacgaagaccatgtccgactactccgtggtgattgggatcgacgtcgccaaggcgcacgtcgatgttgcggcaatcggcgccgtgctggcgggcaaacgctttgccaacgataccgaaggccagacggcgctggtggccgcgctcgcgccgctgcggccggcggtggttctcatggaggccaccggcggctacgaagcggagcttgcctgcgcgttgcaggcagccggcttgccggtggcaatcatcaaccctcggcaggggcgcgagttcgctcgatcgatggggcaactggccaagaccgaccgcatcgacgcccaggtgctggccgagctggccgccgtgctcgcgcgccgcgacgacctcgagagctacctgcgccccctgcccgatgcgcagcagcaggacctggccgcgcttgttgcgcgccgaaggcaattggtcacgatgctcggcgccgagcgccagcgcctggcccacgcccgcgcagccattcgccctagcatcgaggccatcatccgggccatccgccagcagctcgatctcgtcgaaggcgaaatggccgagcacgtcacccgccaccatgccggcatcgatcagctcctgcgctcggcaggcggcatcggtccgatcgccagcgccaccctgatcgccgacctgcccgagctgggacatctcaaccgccgtcagatcagcgccttggttggcgtggcccccttcgcccgtgactccggggcaatgcgcggccggcgaaccgtcatcggaggtcgcgccgacgtgcgccgcaccctctacatggccacgctcaccgccacgcgctacaacccagccatccgcgacttctaccagcgcctgctcgccgccggaaagctgcccaaggtcgccctcgtggcctgcatgcgaaagctcctgaccatcctcaacgcgatggttcgcaaccagcagcatttcgtgtccgttcacggttgacaggaaagacggtta

SEQ ID NO: 2002 - DNA, 1181 bp, unidentified
  source 1..1181: mol_type = unassigned DNA; note = element_2bd7d43
  misc_feature 1..2: note = core
  misc_feature 3..227: note = LE
  misc_feature 228..1166: note = CDS
  misc_feature 1167..1181: note = RE
  misc_feature 23..202: note = bridgeRNA
cttgtatgtttcccgcggcaggtgcagaaagggcctgtcgggggcggagggacgaagctcggatctgacgtggctgcgtacagactgtgggagaaatcgtcccgccccctcaccttgagcgccaatcaggaatccatcggcctttagggaccgacgatcgagggcaagccagcgcgacggtgaggctccccgacaggtgaccgtgacactagcccggggaggcgatcatggcaatgcaggttgaaccacggaccgtcggcgtcgatgtggccaaggacgaactggtgatcagcatcgacggcgagaatcccttcacgctggagaacgcgcccgcggcaatccgcggctggctcaagggtctgcatggcccgctgcgcctggcgctggagtcgaccggcgtgttccatctcgaactcgcctgccaggcgcacgcgcgcggccacgcggtctacctcatcgacggctaccgcctcaaccgctaccgcgagagcgtcggcgggcgcgcgaagaccgatgccaccgacgcccggctgctggtgcgctatctgcgcaacgaaggcgccgatctgcggccctggataccgccgtcacgcgactaccaggcgctgcagcgcctgctgcatcgccgcgcgaccgtcgtgcgcgcacgcaccgcgctgcagcagagcctgcgtgacgtccccggcctcaggaccaccctgaaggccacgctgagccagctcgatcgcaccaccgtggcgatcgagcggcgcatccgcgagacgctgctgcgcgccggctggcagcaccacgcccggcgctgccgccagatcgagggcatcggcccggtcaccgccgcggcactggtgatggccttctcgcgcgggcgcttcgccaacagcgacgccttcatcgccttcctggggctcgacgtgcgtatccgcgactcgggcaaaaaacgcggccagcgaaggctcaccaagcagggcgacggcgaactgcgccgcctgctctacctcgccgccatgcaggccaaggccaaaccggcctggcgggcgttcttccagcgacacctcgagcgcggactcaccagaatccaggcgctcaacgccctggcccgaaaactcgcccgcgtcgccttcgccctgatgaaaaacgagaccgactatgtcccgaaaaccgcttgagggaagacatagaat

SEQ ID NO: 2003 - DNA, 1155 bp, unidentified
  source 1..1155: mol_type = unassigned DNA; note = element_2be70bf
  misc_feature 1..2: note = core
  misc_feature 3..180: note = LE
  misc_feature 181..1143: note = CDS
  misc_feature 1144..1155: note = RE
  misc_feature 35..210: note = bridgeRNA
cttgtcttatgactttctgcgccgctgaggcaaaaaggaccgctgggagagggtggcagccctctcgtcagcggcgagggacggatcgtgaaagcgcggaccgtttgacgggtcgacttagagtttgatcgccctcgtcttttcctttggcctgaacggatacccgggggagagccccggatgacaagcagaggcacggaaaagatgaagaatgataccatcggcgtcgatgtctcgaaagaccatctcgatgttcaccggctggccgacggcgcaagccagcgcttcgccaacgacaaacgcggccacaaggtgctgatcaaatggctggcgcagacgcctgttgagcgcgtcgtcttcgaaccgaccggcccctatcaccgggcgttggagcgtgcattgggtgctgccgacattcctttcgccaaggtcaatccgcggcaagcgcgccgctttgctgaggcaaccggcaagctcgccaagaccgaccggctcgacgcggcgatgctggcgcgcatgggcgcagtgctggagctggagacgcgtccggccagaagcgaggttttgctcgaacttaaggagcttcgccttgctcgcgaagccttggtgaaagaccgcaccgccgccaggaaccgcgccaaggcgctgaccatgtcacttctgaagcgccacaacacccagcgtctcgaacaaatcgagcgccagatcgtggcgatcgaggcggcaatcacccagatcatcaaagccgatgccgacctcgccgagcggttcgccatcgtaaccagcatcccgggaatctcgaagatcaccgccttcgccctgctgatcgaaatgccggagctgggaagtctggagccaggccaggccgcaagtctggccggcctcgcgccgatcgcccgccagtcaggacgttggaccggccgcgccttcattcgcggcggccgggccaacctccgccaagctctctacatgcccgccctcgtcgcgatccgcttcaatcccgacctaaaggccaaatacgatcagttcctcgccgcaggaaagccggcaaaaatcgccatcaccgcgatcatgcgcaaactcatcgttctcgccaacgcccttcttggcgaaggtcggaaatggcagctaaaatccccttgatcaacacggata

SEQ ID NO: 2004 - DNA, 1413 bp, unidentified
  source 1..1413: mol_type = unassigned DNA; note = element_2be9616
  misc_feature 1: note = core
  misc_feature 2..91: note = LE
  misc_feature 92..1123: note = CDS
  misc_feature 1124..1413: note = RE
  misc_feature 1177..1405: note = bridgeRNA
caatgggatggactcctcctcacctaaccggcatctatgtgccaaaatggtgagtagaccacaaaccatctaacgatgaggagaagcccagatgactattatccgtgttggtgttgatattgcaaagtctgtttttcatgttcatggtgctgaccgtcagggtaaaacctgctggcaaggaaaatactcacgcaataagtggctggatgcaattagcaagaaagtgcccattaatgctgaaatcggtatggaggcctgtgcttcctctcatcactgggcacgtgaactccaaaagcgtggttaccgggttcgtttgatagccgctcagttcgttaaaccctatgtcaaaagcaacaagaatgaccgtgttgacgctgaagccatctgcgaagccatgagtcgacctaacatgcggtttgtcactccaaaatcggttgaacaacaggatatccaagcgatgcatcgagttcgtgaagagctgattgctcaacgtacagccaaggccaaccagattcgaggtttagtcggtgaatacggcatcatcgcacctgttggtattcagcaactaaggcgtgctttacccagctggttagaagaggtagatagcggtcttacttattctttcagactgctgttgagtgaccttgcagaggaccttcgtcatcttgatggccgtgttcaaaggctggatgaacagatccttgaaagcgtccaacgtgatcctgttgccaagcgcttaatgacgttacgtggtgtaggccctttaactgccagtgccttggccggagcactgggagatggtaaagcctttaaaaaagggcgggatttcgcggcttctctaggacttacccccaaacagcatagtacgggtggcaaggatcgactgttaggcatcagtaaacgcggtgacggctatttacgcaaactactggttcacggcgcaagatctgtattgcatcatgtgaccggcaaggaagatggcctgagtcgctggttaacaggcctggcttcgaggaaacaccaaaatgtggccgtagttgctttagccaacaaaacagcccgtatcgcttgggctttgattaacaagaatattgattacaacgaaagcttagctgctgcctgagcattcgactgagtaaatagaaacatagaacgatgaattagttaggagttaaacctcaccacgattgcgtggcactttgattgatggcgaacaggtcgaaccggcactgaaaaaaccctgaaaaagcgaagagcttcaagctcgttgacacgattgggagtcagtgcgcgaatagcccatcagggtccgatgcctaatagcggcatcattaatgagaccggatacacgtaggcagtcgtaccttggcttcgatcaaacaaagtgcttgcaaaagaggaggagtccataca

SEQ ID NO: 2005 - DNA, 1310 bp, unidentified
  source 1..1310: mol_type = unassigned DNA; note = element_2bed105
  misc_feature 1..2: note = core
  misc_feature 3..213: note = LE
  misc_feature 214..1263: note = CDS
  misc_feature 1264..1310: note = RE
  misc_feature 34..196: note = bridgeRNA
ttgtatattaattaatcattctatttttgcataaatattcaacatcagagtgtggaataagaccgatgcttcgttggtcataaagaccgaaaaaaatgctttgtccccacacttctacgtcccaaaccggatagttcaatgggctttcgaccccgcattcgcaatgatggttcatgatgttctgatgttgttgctcaataaattattaaagctatgacctacgttggaatcgatgtcagcaaggcaacttttatggttgcttattcttccgccaaaagtggtaaaacaaaatctttcaagaataccacccaaggcgtccatgagtttattcagactttgtctgccggtgaacaccattgtgtcttagaagcaaccggcaactacagtgcccttctggtttatcttctctcacaggctggcataaccgtcagtttggagaatcccctcaagataaagaacttcgcacgtgtaatgctttccgttaacaaaaccgatgaaacggatgcccgtttaattgccttgtatggtgaaaagatacagccggctccttacaaactacgcagcgataccattctcattctaaagcagaaacgcacgctcatacgccaacttaagaagcaattcatagctacccgcaacttgaaaggatccatgcaagctcttcctttctttgaccctaaatgcaagaaaaccattgaaagcacaatcgcctttcttgacaagcaaatcaaagggatggaagaagagctggcttcgctggcaaaaaatgaatacaagaagcaaatggagctactcacttccattaaaggaatcggggttaccctggcaaccgcactcatcgtcgcaacaggtggttttacctactttgataatgccaagcagctaacacgatacttaggcttgtcccctacatatgaacaatccggtacctcagttaatatcaaaggtcacatcaatcgtaacggtgattcttccttgcgaagccaactgtatgtggctgcttttgcatccctgcgatgtaatgcgcaatgcaaggcatgttttgaccggttacgatctaagggcaagccgggaaaggtagcggtcatcgctgtcgctaacaaactggtaaggcaagccttcgctgttatcactcatgaaaagccctatgtggatgggttccactctgcaaaagtcataaactcatctgcggagggaacgccatgcggcaaggggctgagcactcagccccgacgagcttccaagagtgtgctaattgcataagtatgctaattattgttagccatatgcatttttcttattatagttca

SEQ ID NO: 2006 - DNA, 1296 bp, unidentified
  source 1..1296: mol_type = unassigned DNA; note = element_2c058f9
  misc_feature 1..2: note = core
  misc_feature 3..256: note = LE
  misc_feature 257..1282: note = CDS
  misc_feature 1283..1296: note = RE
  misc_feature 35..265: note = bridgeRNA
ccgacttatatctccggtagcggtttcgtggtcggggtagctccccgtagcgtgccgcagcgggccgggtggtttgactcctgaggttcctgtcgccggagaactcccggctgactctgcgggggtatgtcacgctacccggcctgcgttcgcggcgtgaccgaagagaggcatggccacaggtacgggcaaggtactggaagtcggattgtccgccgcggatccctacccattggagagaagggacccgctgttcatggttgtcatcggtgtcgatccgcacaagagcactcacaccgccaccgcggtggacccggctagcaacgccgatctcggttcggtccgggtcgaggcgaccatggccgagtatcggcgattgattgcttgggccaggccgtggccgcaacggacgtgggcggtggagaacgccgacggactcgggcgccacctagctcgatggctgatcgctcgcggtgaaaccgcgctggatgtcccgaccactgcaacggcgcgggtgcgggaactctcacgcggcggccgccgcaagaacgaccggatcgatgccgccgcagctgcgtgcgtcgtcgcgctccaaggtgaagagcgcccggtcgtgcccgacgagcgacgaaccaacttgtctaccaacagaactcgatcggtcgatcagctgcatgcactgctgcgtgaactgttggccggcggagcccccaccagcctgacagcgaacaccgccgctgcggtgctccacaggttccgggcacggacactgtcggatcgtgtccgcgtcggcctgtacaaggacctgatcgctgacgtccgccgcctggaccgccagctgtcgatcaaccagaaggacctcgacgaactgctcgacgagcacggcacccggctgcggacgatcgacggcatcggcccggtgctggcggctcggttgatcggccgaacaggtccagcaactcggttcccgagcgcggcggcattcgcgaactacaacgggaccgcgcccgtcgagatcgccagtgccgaccgtcggatccaccgactcagccgctacggcgaccgtcaactcaacgccgcgatccacaccatcgccatggtccaggtccgcatgaacggcaccgccggccgcgcctactacgaccgcaaagtcaccgccggatcgtcacaccgcgccgccatgcgctgcctgacacgccacctgtccaacatcatctggcgaaccatgaccgctgacgccacccggtgccgccgcgataccgagtcatgttctacgacttgactaatagagagaca

SEQ ID NO: 2007 - DNA, 1393 bp, unidentified
  source 1..1393: mol_type = unassigned DNA; note = element_2c18566
  misc_feature 1..2: note = core
  misc_feature 3..248: note = LE
  misc_feature 249..1286: note = CDS
  misc_feature 1287..1393: note = RE
  misc_feature 14..224: note = bridgeRNA
ctcctatgtttgttgttaatatcaaagataatagattagcaagataaaagtgaagggaaatgagagcggatggccacccaaacaaccataaggtatgtacaaagagagatacccgcctcatttctttttgctctttagagtttgaacagaatgtaaggaatattgctaagcattatatccaggatatccgtaaggagaaaaaacgaagaagagctattcactttgtaactatttaaacaaagtaactgatgacagaaattttaaaacaagcggcaggcgtggacgtgtcgcaagacgaattggttgtatccctggggcgggtgaccagatcactcgaaccggaaatttatgctttcaaaacatttgccaataagccgtcaggttttgcggccctggaggcatgggtaaacaagaatacagatcagcaggtgccagttcggtttgtgatggaggccacaggagtttatcatgagaaattagcttattacctgtccgaacagaaccgggaggtgagcattgtattgcccaataagatttgcaatttcgctaaaacactggaaacaaagacaattaccgataagaccgcatcacaggccatatgccggttcgggctggaaaagaagctatgtatatggcagccgcctaaaaagatattcagggatataaagcagctgatgcgtgaacgagaccaaataatagcagaacgtaccgtggccaaaaatcaactgcatgcagaaaatgcagaagcttttccaaataagaggagcattgcccggttgaatgaacgtatccaattgttcaaccgccaggaaaaggagatcaggtatgaaatagcagaaatcattaaacaggatgaagaacttgttgaaaggataaagaatgttaccacaataccaggcgtagctaagcttactaccgtaatagttttagcagaaacgaacgcttttgacctgattacaagcagaaaacaagcatccagctatgccggatttgacatcgtagaaaagcaatccggaacatcagtaaaagggaagcccaaaatgtctaaaaggggaaacaggcacttacgcaaagccatgcatatgccggcattagcagccataagacataatgaacgctttaaagcgattttcgtcagattggtatccaaacatggcattaagatgaaagcggcggtagcagtacaaagaaaattgttggagttgatatataccgtctggacgacgaatactaaatatgatccaaactatttacaaaagatgatcgaaaatgatacggctacttaaaagagttagagcggtaaacatcacaaagatgaaccgccctaaacaggctaacataaagccgccttaataaaacaaaattaaaaaatatttgataattaacacagaat

SEQ ID NO: 2008 - DNA, 1498 bp, unidentified
  source 1..1498: mol_type = unassigned DNA; note = element_2c1d87c
  misc_feature 1..2: note = core
  misc_feature 3..243: note = LE
  misc_feature 244..1485: note = CDS
  misc_feature 1486..1498: note = RE
  misc_feature 15..236: note = bridgeRNA
ctaataagacttaacgggtcggccatccggcagactcggtcgaaggtggccgccggcaggtgagcactggttgcgcccgggcttcgagccctgaccaaagactgtgcccctgccggttgccgggagagttgatcgctgctgggatgtcgtgcccgccgtgtggcgtgagcactgtgttattaggttgctgattgttctcccgctggctgctgacggaattcgacatcgttgacgggagtgccggtgcggctgttcgtgggggatgactgggccgaggatcatcacgacatcgaggtgatggacgaggccggcaaggtgctggcgaagcggcggctgcccgagggcgcggccgggatgacgcagctgcatgcgctgatcggccggttcctgccggaggacgcggatgacgcggaggtggtgaccgggatcgagaccgaccggggcccgtgggttgcggcgctgatcgcggccgggtacacggtgttcccggtgaacccgctgcaggcgtcccggtaccgggaacggcacggcgtgtcccgagccaagcgcgacggcggcgacgcgcacatgctggcggacatggtgcgcaccgattcccaccagctgcgaccggcggccggggacaccccggaagccggggccatcaaggtggtggcccgggcgcacaagacgatgatctgggaccgcacccgcgcggtgcagcggctgcggcaccagctgcgcgagtacttccccgccgcgctggaggcgttcgaggacctggacgcccccgatgtgctggaactgctgggcaaggcaccggacccggcccgggccgcgaagctgacccgcgcccaggtcgccgcggcgctcaagcgcgcccgccgccgggacatcgcgggcaaggccgacgcgatcctggccgcgctgcgcggcgagcacctcggccagccgcccgcgctgaccgccgcctacgccgccaccgcccggtccctgatcgcggtgatcaccaccctcaacgcccaggtcaagatcctggaagagcaggtgagggaccattttggccggcacccggacgctgagatctaccagtcccagcccggcctggcagccatcctcggcgcccgggtgctcggcgagttcggcgatgatccctgccgctacgtcaccgcgaaggcccgcaagaactacggcggcaccagcccgatcacccgcgcgtcgggcaaaaggaaggtcgtcgccgcccggttcatccacaacgaccggctcgtcgacgccctgatgtcctgggccttctcgtcgctgaaggcatcccccggagcacgcgccttctacgaccagcagcgcgccaaaggactccagcacaacgacgcgctccgcaggctcgcgaaccgcctcgtcggcatcctgcacggatgcctgaagacgcggacccctacgacgaggccaccgcatggagccaccgggaaaacctccctcaatcttccgttgcggcttgacatctaagctcctgggatgt

SEQ ID NO: 2009 - DNA, 1373 bp, unidentified
  source 1..1373: mol_type = unassigned DNA; note = element_2c3d419
  misc_feature 1..2: note = core
  misc_feature 3..78: note = LE
  misc_feature 79..1053: note = CDS
  misc_feature 1054..1373: note = RE
  misc_feature 1081..1360: note = bridgeRNA
cgatggagtggacgcgccctcccggcgccatcaaactgggtgtgttgacatggtctgccgcccttcgggaggagcgagatgaaacaggtccatatcatcggcatcgacttggcgaaacacggatttcaactccacggcgcgcgcccggacgggtcggtcgcgttccgcaagaagctgacgcgggggaaggtgttgggttttctggaatcgcagcctcagtgccgggttgcgatggaggcatgcgggagtgcgcactactggggccgcgagatcggcgaactcggccatgaggtgaagatcatgccaccgctatacgtgaaggcatacgccaaacggcaaaaaaatgacgcctcggacgcggaggcgatctgcgaggcggcttctcgtcccacaatgcgcttcgtggccgtgaagacagaagagcaacaggcccgggggatgctgtaccgcacgcgcgacttgctggttcgccagcggacccagacggtcaacgccttgcgcgggcacctggcggagttcggcgtcatcgcccccaagggcaccgcccacgtcgtacggctggcgtcggccgtcgcggctccggactcggggctgcccgagacggtccgcgaaccgggcaggcttctgctcgggcaaatcgccgacctgaacaggaaagtcggggaactggagagccggatccgctctggcgcttatgaggacgaggaagcgaggcggctgatgagcatcccgggaatcgggccgatctgcgcgtcggcgatactggccttcgcgccgccgatggcgagcttccggagcgggcgggacttctccgcctggctcggcctcgtgccccggcagaactccacgggcggcaaaacacggctgggcaggatatcgaagatgggccagcgcgacatcaggcggctgttgatcataggcgcgatgacggtggtgcgctgggcggaccggcgcggtgcgccgccgggttcatggctcgcccggatgctggcgcgcaagccgaggatgctggtcgcggtggcgctggccaacaggatggcgcgcatcgcctaggcgctgatgacgaaaagagaattctacagggagcctgcgccggtcatctgagcgggcgggcgaatatagccgggaggaatgtaagcaggtcggaggatagtgtaggggcaaacggtcaacgagactggatcgggaaaaccagggaccgaacggagagccttcaagctcgcgtaagcgatatggacccggtccttcgcatctccatacgggcccgcggcaaaagtaacgccgcaatcgagaggccggatacacgaatgcgcctgaccactttgcgccgaactatccaaaaccatgcttgcaatcctgggcgcgtccataca

SEQ ID NO: 2010 - DNA, 1345 bp, unidentified
  source 1..1345: mol_type = unassigned DNA; note = element_2c4be1b
  misc_feature 1..2: note = core
  misc_feature 3..71: note = LE
  misc_feature 72..1097: note = CDS
  misc_feature 1098..1345: note = RE
  misc_feature 1099..1335: note = bridgeRNA
ttatggatggcccgccccttcctccggcttccgtgtaggtttgccgatgtctgaataggaaggagcgaaccatgagcatcatgatcctgggcattgatctcggcaagaacagttgcagcctcgttggtttcgatgaagccggcgcggtcgtcatgagacgtcgggtgcggcgcgagaacttgatcgccttcacggcgaagcttccctcttgcgtgatcgcgatggaagcgtgctgcggagcccatcacgccggtcggaccatgcaggagcagggtcacgacattcgtctgatgtcgccggaatatgtccgcccttacgtaaaggcacagaaaaacgacgaccgcgatgccgaagcgatcgcggaagctgcgacgcggccgaccatgcggttcgtcgctctgaagagtgaggaacagctggacgttcaaactctacaccgggttcgcgaccggctcgttggcgaccgtacatcgttgacgaaccagatcagaagtctgcttctggagcgcggtcacgtcgtcgctcaagggcacgcgaagttgcgtttggcgttggcggatctgctcgaaggcgagactgataggctcggcgctcgcatgagattcctattggcggacatgcgcaggcgctgggacgaactggacgggcgggtcgccgccttcgacgcggaattcgccgcgatggccagaaacgacgaacgcgccaaacggctgacgacgatccccggcatcggccctctcaatgcaacagcactcgtggctgcggtgggagatgccgcgaccttctcgaggggacgagacctggcggcctggctcggacttgttccgcgacaggtgacgaccggcggcaagccgaaacttttggggatcaccaaacgtggttccaagtatctgcgcaagatgctgatccaaggtgcacgtgcggcgatgccgaccctgcgcggcatggatacggtcgtcggagcatggcttcgcggtcttttgacaagggcgcatcccaacaccgtcgtcgtcgctctcgcggcgaagatggcacggatcgtctgggcgctccttcggaacgcctgctcctacgaggtgcgaccgcagacggtctgacggaatcggttttcggcttcagtgccggaaccgatgaactgcgagtggtgaaaggaagatggcctgacagtcgatcggcgttctgaaaacctccggcgcaaaatggctcttcgaagccggcccctttatgaggatcagaacgcgcggatctccatcttggcagcggcacgaccgacatgccggatacgtttgtgcagactgctcacgcccttaaccaataactgcttgcaacaggggcgggccatacg

SEQ ID NO: 2011 - DNA, 1540 bp, unidentified
  source 1..1540: mol_type = unassigned DNA; note = element_2c50236
  misc_feature 1..2: note = core
  misc_feature 3..240: note = LE
  misc_feature 241..1434: note = CDS
  misc_feature 1435..1540: note = RE
  misc_feature 10..260: note = bridgeRNA
ttcgtactatataagagtagagaatattgtctctattcttatttttttgttatgatgaggttgattggctgacgtaatctatcaattgggacaccacgcccggaacaaaacttgtcagccagctctcattatcttacattcgcttcagcaagttgggacgttgctcccgtgtcacccacgaacatgagttgattttgagacgttggaaccaatcataataatacataaaggaggactatcatgattgctgtcggtgttgatgtttctaaatctaaaagtatggttgctattcttagctcagatggcgaaatacttgcagagccatttgaggtatatcacgttaacgattcattagataacctcatcaataatcttaatgctcttaacgatgatataaagattgttatggaagcaaccggacattatcatctccctattctaaaaaagttcttagatgcaaatctttttgtttctgttatgaatccatacttgatgaagaagtatggggataatcagattcgtaaggctaaaactgatcgtaaagatgctatgcgtatggctacttatgctttagaaaaatcctattctttaataccctatacttctttagatcaaaaatatcttgatcttaagttcttatcccgccaatataatcagcgtgtatctactaaagtgaaaaatagagtatatttaggtaatcttcttgatgaagctatgcctggtatcgaaaccatactaatgtcaaaagctacaaaacccgaaaataatatgctctacaactttattaacaagtatcataacttcgatactattaagaaaatgggagagaaaaagtttctcaatagttatactaaattagcagaaaaaaatggttgtcgtaattatcagatgaaagctcttaaaatttacgaactcgcaaccaatagtataataactcgaggtacggatgcttataccaatatagctatgcagcaatgtcttaacgtactaatccaagctgaaattgctgcaaacgagatattagttcagatgcaatcacttgcccaaactttgcctgaatatcctattgtcagaggaatgtatggagtaggagatcgtctagctccaaggcttatagctgaaattggtgatgtacgaagatttacaagcggtaaagcattaaatgcatttgctggaaatgacgctccaccattccaatctggacagtttgaaagccaaaataggcatatatctaagagaggtgctcctgctcttagaaaagcttgttatgaagtaatgcaatgtctaaagatgcataaaccccaagatgatcctgtctatctttttatgatcaaaaaagaagaagaaggaaaacctttgaatgttgctaagatggcagctataaacaagtttcttcgtatctactacgccagagtaatggaactatacaaataatatttgtttatattttacattctttctcatgaatatgaggtctattaaagttacccatttttacttcataaaaaatcaaaaaagtacttgacttttattagcaagg

SEQ ID NO: 2012 - DNA, 1388 bp, unidentified
  source 1..1388: mol_type = unassigned DNA; note = element_2c55e68
  misc_feature 1..2: note = core
  misc_feature 3..85: note = LE
  misc_feature 86..1123: note = CDS
  misc_feature 1124..1388: note = RE
  misc_feature 1155..1374: note = bridgeRNA
gatgaggtggatggctcccgctcacggcatctaggtgccaagatgggttgctgtcatgcaaacccgagcagaggagccatccgccatggagattaccacgatcggcctggatctggccaagaatgtttttcaggttcacgcagttgatgcagcgggcgatgtcgttgtgcgcaagacgcttcgtcgtgcgcagcttctgccgttcgttgcgaagacggggccgtgcctggtcggcatcgaggcctgcgggacgtcgcaccattgggcacgcgagctggtcgcgctcgggcacgaggtgcggctgatgccgcctgcctacgtcaagccttacgtgaagcgcgggaagaatgatgctgtcgatgcggaagcaatctgtgaagcggtcacgcgtccgacaatgcgcttcgttgcggtgaagtcgcgcgagcagcaggcggcgctggcactgcatcgaagccgcagcttgctcgtcggtcagcgaacgcagctgataaacatgatccgaagtctgctcgcagagtttgggatcgtcatcccggaagggcgggatcgagcgctggtcctggcacggcagatcgtcgacagcgagcgcaccccggaggtgcccgacgacgcagcaatgatcgtcgggatgctctcgcagcaagcactcgatatccatgcgcgacttcacgcgattgagcttcggctggcagttctccagcgtagcgacgaggtcgcgcagcgcctgtcgacgatccctggtatcggcccggtcggcgcaacggctttggcggcgtcggtcagcgatcctcaccagttccgttctggccggcagttcgccgcctggctcgggctcacgccgctgcaaaagtcgagcggcggtaaggagcggctaggacggatcagcaagatgggggataaatatctgcgccgactgctggtcataggcgcgacctcattggtccgccgcgcgaaatacaagcctgacacggcagacccgcgccttgtcgccctgctggcccgcaagccggtgagggtcgccacggtcgccatggcgaacaagatggcccggatcgcttgggcgctcatgacgcgcgggcaagtttatcagcgccatcatgccccgatgctggcaggataatagaaggagcttggctgaggagatcagccttacgatgttgtaagcgcgatgcgatgtgatggcgataccggtcagaccgggagccgggacaacccatggacagtcaaaggcgctatagcctgataagccgatcgggacccggttcgcggactccatcagggccagcagtccctaccgactgcatcaacaggccggacagacgactgcaaccgaccagaacgccgaacgtcaatttatgcttgcaacgcgggagccatccacagaa

SEQ ID NO: 2013 - DNA, 1535 bp, unidentified
  source 1..1535: mol_type = unassigned DNA; note = element_2c593ac
  misc_feature 1..4: note = core
  misc_feature 5..143: note = LE
  misc_feature 144..1394: note = CDS
  misc_feature 1395..1535: note = RE
aaaacattcatgatcgtctctctcccaacccgtgcatgaaaatagttccttcccgtccatattggtaaagacacaaacagttcataatacgtggctttttttggtggttcgaccctgaacacaaaactgtttgagtgaatttggtgttcaaccctttgttagctctttccaaatggaaggatgactacgtacagaaaaatgcttattttcaaattcactcactgtttgtgatcctatctttatggagtgattggatggaagtatttattgaaagatgtgcaggattggatgttcattcagaaaccatagtggcttgtgttctgattggttcaaaggatgatgaactaattaaggaaacagaaacctttccgactttgaccaaagatttattccggttgttaaaatggctcgaagaccatgatgtgacccacattgcgatggaaagtacgggagtctactggaaacccgtgttcaatatcttagaggacttcttcgatataaccctggcgaacgcccagaggattaaaaacgtacctggaaggaagacggatgtttctgacgctgaatggattgcaaaattattgcgccatggattaattgaaaagagttttgtccctccggtagatattcgggagctgcgtgatttaacaaggctgagaaagaaatggattggccacgtaacttctgagaagaacaggattcagaaagtattggaagcctcaaatgttaaattaagtacggtcatttcagatgtgtttggggtttcaggaagaaagctgctcaatcgcctcatcgaaaaaggatatgtagatgtaaaggatgttgaagaaagaattcatgggaaaatggcttcgaaaaagcagaggattgcggattccttatttggaacaataaacgagcatcagctttttctgattcgtcagtcctggcagcacattgaatatttggaatccctcatcaccgaaattgaacaaagaattgatgttttattacagaaatatcaggaagaacttcaattacttctaacgatacccggcattaagaaagacacagcagccgtcattatcgccgaaatgggtgtagatatgagtcagtttccaacatcacaacatttagcatcatgggcgggagtgtgtccagggaacaaagaaagtgcaggaaaacggtatagtacaaggacggtaaaagggaatccacctatcaaatccgccatgtgcgaggcggcttgggcagtgtcaagatgccgaaacagatggttagcagcaaaatattggtcattggcagcacgaagaggaaagaaaaaagcactcgttgccacatcgcatcgaatgcttcggatcatttactccatgcttatcaacaaggaggcttttaaagaaaagcaaattaactagtataaccaaagtcaaaaagatctatacaaagttacctaccacaggtagctctgctttcttattgacttttttcggtctttgtttaggtttgcctgcttccgcccgtaatatacgaggaaacctaggaaattattttcacag

SEQ ID NO: 2014 - DNA, 1130 bp, unidentified
  source 1..1130: mol_type = unassigned DNA; note = element_2c5ad8f
  misc_feature 1..2: note = core
  misc_feature 3..176: note = LE
  misc_feature 177..1115: note = CDS
  misc_feature 1116..1130: note = RE
  misc_feature 12..186: note = bridgeRNA
cttgtaacttggtttgcgcgtcttctgataggattgagggcgcggtagcggaggggacgccggctcgtcctcgggcgttggagcccgtcccttagcctggtcgcccctccgtttgtccgtcgacctcgaacagtcgcttgggccgcaagagcccggttgcgcaaggaaggggaaagatggagctgagatatattggaatcgacgtgtcgaaggatcggctcgacgtccatattttgcccgaggggacggcctttgccgtcgcgcgcgacggcaaaggcctggccgagcttgtcgagcgcctgagcgctgttcagcccgagcggatcgcggtcgaagcgacgggcggcttcgagaccgtcgcagcggctgcgctggcgggagcttcgctgccggtggtgatcgtcaatccggcgcaagtgcgccatttcgcccaggcggtcggccagcgcgccaagaccgatccgatcgacgcgagcatgatcgtccgcttcgtcgaggcgaccaagccggacgtgcggccgctcgccgacgaagcgacccagctgctcgccgacctcgtcgcgcggcgaaggcagatcatcgagatgatcgtcgccgagcgcaatcgggagcggcgcgtcgaggtcaagcgcatcaaaaagagcatcgcccgtttgatcgcggcgctcgagaaggagctctccgaaatcgacgcggagatcgacgcttccgtccgcggctcgccggcttggcgagacaaggaggacctcatcgcttccgggcccggcgtggggccgatcaccgcgcgcaccctcatcgccgagttgccggagctcggcgcgctcaacggcaagcaaatcgctagtctcgccgggcttgccccgttcacccgccaatccggccagtggaagggcaaagccatgatcgccggcggccgcaaagcggtgcgctccgccctctttctcgcaagcctcgccgcctgccgccacaatcccatcctcaaggccttccgccaacgcctcatcgacgccggcaagcccaaaatgctcgtcgccatcgccgcagcccgcaaactcctcaccatcctcaacgccatcctgccagacaaacaaccatggcgcccagaaatcgcttgaccgacaacacagtcg

SEQ ID NO: 2015 - DNA, 1375 bp, unidentified
  source 1..1375: mol_type = unassigned DNA; note = element_2c6e2c8
  misc_feature 1..2: note = core
  misc_feature 3..86: note = LE
  misc_feature 87..1115: note = CDS
  misc_feature 1116..1375: note = RE
  misc_feature 1119..1362: note = bridgeRNA
tgatggtgtggaacggcccttcgcaccggcatcgaggatgcctattgtggtgacgccatttaccacaagacagaaggaaccgttccatggaaaagattaccataatcggactagatgtggtcaagtcggtctttcagatccacgccatcactgaagacgggcacatagcggtccgccgtgctttgcggcgatcacaggtcctagagttttttcgtaacatcgaaccatgccttgtcggaatggaagcgtgcgggagtgctcactactgggccaacgcaatcagagaattcggccatacggtgcggttgatgccaccggcctatgtgaagccttacgtcaaacgcaacaagaccgacgcggccgatgcggaggcaatctgcgaggcagtcacgcgtccaacaatgcgcttcgtacccgtaaagtcaccggaagagcaggctgctgggatggttttgaagacccgagagttactcgtgcggcagcgaagtcagacggccaatgccatgcgaggccacatggctgagctcggaatcatcgccgcgactggaatgacaagcattgccaagctcactgcgattttgcgcaacgatcaggaagggcgtcttccgcattcagccaaggcggcacttcttgagatggccgatcagatcgaaaggctgacggaaaggattgaggtgctcgacagtaagattgccgcagcagtgaaagccgatgaagccgcacgtcgtttaacaaccatccccggcgtcggccctattattgcagccactgttcgcaccgcagttcaggatcctacagtctttcgaaccgggcgggacttggccgcttggattggcatcacaccaagagcgaactccagtggaggcaaggagcggctcggcaaaatctcaaagcgccgcaacaagcagctacgaacgctcttgattgtcggtgcgacgtcgatcctgaaacaagctcggagaggttcaaagttgcctgattggatcgtgtcaataatggcacgtcgcccctacaaggtggcagccgtggcgctggccaataagatggcccggacaatatgggcgcttctcgtcaaaggcggcacataccagacgccggcgatgacaaaggcgtaggaacagaattcccggcgtctgtgcgtcgggataaagcggcaaggtacgaagcgtgatgaacccgaggggcgataccttgatgtcgatcagaccgtctgactcagtgcgcctttgagcgcgagaaaatgattaggcgatcgacatcgcggatctcatcgtggccagcggtcgatgaccgcgctgataggccggacatatgactgcgaccgtccgatggcgattcacgacaaaaaaccttgctaaccgggccgttccacata

SEQ ID NO: 2016 - DNA, 1610 bp, unidentified
  source 1..1610: mol_type = unassigned DNA; note = element_2c6e35e
  misc_feature 1..2: note = core
  misc_feature 3..225: note = LE
  misc_feature 226..1485: note = CDS
  misc_feature 1486..1610: note = RE
ctattacaatacatttggacgaggaagccggacagccagtccggctttccctccatctcgtgcctaagctacaataagaggagtaatcggctaaccacttgacacttgggcacttatgcccgcagggtagactgttggtcatcctcttattgtagcattcgatttagcaggttgagcctaacgaaaaatcgtggagctcgcgtcacgtaatagtttgagtcggcaatgagagaagatgcactccgattacagtcattgcgcataggaggaatgtgtatgaactgcgttggtattgatgtttctaaaggcaagagcatgatcgctgtcatgcgcccctttggagaggtggtgatttcgccctttgaaatacggcacactaccagtgagctgagcgagttagcaaagcgtctcaaaagtctagatggcgaaactcgtgtggtaatggagtccacaggcaattaccatgtgcccgtagcatggttgctccaagatgcaggcctttatgtttccgtggtgaacgcacttttagtgcatgactatgggaacaatagtttgcgacgggctaaaactgacaagaaggatgctgtaaaactagctaattatggccttgaccactggcttaccttgactcgctatgttccagaggcaaatactcgtctgcttctgaagaactgctatcggcagtaccagcaatattccaaggtgcatactatgttaaaaaataatctaatttccttgctagatgccgtattcccggaggtcaatcgcttgttcagtagccctccgcgtgctgatggaagtgaaaaatgggtggatttcgtctcggccttctggcattgtcagtgcatttcaaggttaactctaaaatcattttctgctaaatacttgaaatggtgcaaaaaatacgggtacaaattcagccaggagaaggcgcttgaacttcatactaaggcatgcagctgtattggtgttatgccttccaatgatacaaccaagcttttagtacaacaaacaattgtacagctccaggcaacctctgccgcattggcctcactcaagcaggaaatgcagtctttggccgcttctttgcccgaatatcctgtggtcatgggaatgttcggcatcggccctatactcggcccacagcttatggctgaaattggcgatgtgcgccggttccactctaagaaggctttggttgcttttgccggcattgacgctcctccttaccagtctggccaaatggatatccgcagccgcagtatttccaagcgtggttccgctgctttgcgaaggactttgttccttgtgatgggcgtttatctacaaaatgctcctcaggatgagcctgtgtacaaattcatggacaaaaagcgttctgaaggaaaaccttaccgggtttatatgatggcttccgccaacaaattcctgcgcatctactatgcctcagtaactacttatctaaacacactggcacaaacctgatctcataccgatcacatttctggccgaccgccgtttcaattttgaattgctcagcggtctggcgttgtattgccttttttctaaattgaaatctcgaaatttttacttgacttttgttagcaggt

SEQ ID NO: 2017 - DNA, 1133 bp, unidentified
  source 1..1133: mol_type = unassigned DNA; note = element_2c73608
  misc_feature 1: note = core
  misc_feature 2..199: note = LE
  misc_feature 200..1117: note = CDS
  misc_feature 1118..1133: note = RE
  misc_feature 13..196: note = bridgeRNA
tgtaacttccctttatccgctcccggcgctgtaatgcctgttgcggtggcggatggaagaccgatgcacctttgggacaccaagcccgtgggagagcacgggtctccgtccgccgttccattgaacccgaacagtcgccggggccgcttgcgaaagcaaagcccgattaggcaaggatgggatcagatggagattgttgttgggatcgacgtttcgaaagagcgcactggatgttgcgatcctgccgcaagaagaggtctttgccgtcggcaacgaccatgccggcatcgatgaactggccgagcggctcaaaggcattggtgttgatgcgattgcgctggaagcgaccggcggcttcgagatgctggcggttgccggattgtccgcagccggattgacggtgctcgtcgtcgatccggcgcaagtgcgcgcctatgcccatgcgatcggccgcagggccaagaccgatccgatcgatgccgccgtcatcgccgccttcgttttggcgacgaagcccgagatccggccgttgcgcgatgccgagacacaggcgctttccgagcttgtggctcgccggcgccagatcgtgcagatggtcgtggccgaggagaaccggttgcgcatggcgctggcaaagcaggcgcagaaaagcatcaagcgcttgctgaaagccttgcggcgcgagctcgaaagcctcgatgccgatctcgacagccatatccgcaagtcgccggtctggcgggtgcgcgaggcgctgttgacctcggtgccgggtgtcggagcgacgacagcgcgcacgctgctggccgaactgccggagctcggcagcctcgaccggcgccagatcgcctcgctggctggtcttgccccatggacgcggcagtcgggaaaatggaaaggcaagagcttcatcggcggcggccgcggcaaggtacgcgccgtcctattcatggccgccctcgtcgccagccgatacaaccctgacctcaaggccttccgcgacaggctggtcgcggccggcaagcccaagatcgtcgccaccgtcgcaaccatgcgcaagctgctcaccatcctcaatgccatcatcagggacggacgaccatggcaaaacgcttgacaaacaagacagtcgc

SEQ ID NO: 2018 - DNA, 1320 bp, unidentified
  source 1..1320: mol_type = unassigned DNA; note = element_2c76e6d
  misc_feature 1: note = core
  misc_feature 2..69: note = LE
  misc_feature 70..1104: note = CDS
  misc_feature 1105..1320: note = RE
  misc_feature 1105..1310: note = bridgeRNA
tatgggatggcccgcccttccgaggacatcgagtatgatgtcgttttcttgaagggaaggagcctaaccatgcagatctccatactgggtatcgatatcggaaagaatagctgcagcgtcgttggtgtagatgcccacggcgcagtggttgcccgtcgaactatgcggcggcaaacattgatcgaattcgtcgagaagcttccaacctgtgttatcgcgatggaggcatgctgcggtgctcaccatcttggccggctctttacctcgaaaggtcatgaggtccggctgatgtcgccggaatacgtccgtccttatgtaaaggcgcagaagaatgacgacagagatgccgagggcattgccgaggcggcatctcgcccgacgatgcggtttgtcgaactaaagagccaggaacagttggatatccagacgttgcatcgggttcgatcacggctggttgcggagcgaacgaccttgatcaatcagctgcgtgccgttcttctggagagaggtctcatattcgccgcaggccgcgtgaagttcgagagcgctctggacggtctccttgccgaagctgatgagatgctatctccgcgcatccgcaacttggtcatcgaattgcggaacgaatggcgaatgcttgacgagaaggtcgaggccttgaacgcagagttcgtatcgctcgccaggcagaacagcgcaatgcgccgcctgacatcgattccaggcatcggcgtgctcaacgccacggcgcttgttgccgcaataggtgacgccggcagttttaagcatgcccgagatctgggagcatggttggggcttgtgccacgacagttcaccaccggaggcaaagcccgtctgcttgggataacaaagcgcggcaacacctatctgcgaacgttgttggtccacggcgctcgagcggcaatgcacacgctcagtcagagtgacacgccgatcgggcgatggctgcaggcgatgttgtcccgtggcatccagcgcaatgtcgtgatcgtggctcttgcaaacaagctcgcgcgtatcgcctgggcggtgttgcgcaaggggcagccctatgagcgggcctacggcgtggcggtagtctaagttattggttgctcgcaggagcagccgacgatgtttgcgagtggaaggcgttcagatagcccaggcgtggaaatggttcattgaaaccgtgttggttatcgtggctctggacgtgcggatatccatcttggctacggcctgaccgtaagaccgaatacgttgaagcagactgcacaggaaatcaaaaagcaacttgcaaacagggcgggccatacg

SEQ ID NO: 2019 - DNA, 1438 bp, unidentified
  source 1..1438: mol_type = unassigned DNA; note = element_2c7d6f5
  misc_feature 1..2: note = core
  misc_feature 3..82: note = LE
  misc_feature 83..1168: note = CDS
  misc_feature 1169..1438: note = RE
  misc_feature 1255..1376: note = bridgeRNA
taattggatggactcgcccaagccgaggcgtcaatgcgccacggtggcagtctaaacagccatcgacagcgagggcgagtccatgaaaaatcatagttcgaatgatcaatccctgtcttcttccgatttgtcggcctgcacaactttggcggtagatctggccaaacaggtctttcaggtcgctggtgaagatgtcctcggccaggtgcgctatgaacagcggatcaagtcgcgtgaggcgttttatgagtttctccaacagctgccgcctcatgtcgtggttttgatggagaccggtccgggagctcaagcctgggcccggcagttgcaagacaaaggtaatctggcgcggattcttccagccggtttggtgaccacacaccgcagtgggcctaaaaatgatcgcaacgatgcgctggcgattctgcgcgctggtcgcgatgaaaaaatctgcgcggtaccggtcaaaagcgttgctgcgctggcaatgcaagcgctgcatcgcgcccgtcagggctatgtgcgtcgacgcacggcggtcagcaatcagatgcgcggcctgctgctcgagcacggcgtggccttggcgcagggcgatgttgcgatcagtcagaagattccgcgggtactggaagatgcgacccagccactgcctggcctgctgcgtgaattgatcgacgaactgttggctgagtggcgccatttgggcgagcgcatcggcgtgttgacgggccgcctggaagtggccgctaacgccgacatgacagcgaggcgactgatgaccgtgcgcggcattggcccagtcattgccacggcactggtggccaaggaaaccaaccctgagcggtttcccaatgcccgcaagtttgccgcgtactttggcatggtgcctgaccagcacagcagcgggcagacggtccggctgggcgacatgaccaagcgaggtgatgtttatttacgcagcttgatgatccagggagcccattcggtcctgcaacaactgcgacctgattccctgcaacccgatgaccgccgcttgttgcggtggatgagccgactgggccgtaaggaggctgcgatcaggttagccaaccgcaacctacgaatcgtctgggtgcttctacagaatgaccagtcttatcgtcgtcatgctggtaatggtcagtaagcgacgataagccactgagcgaccgagttctgccaccgaggtactgactgtccgaccctttgctgaaaaaaattgaccccaggtaagaccggcgtggattgatgcctaagctcctactggccttcgaggcctgactgtaatcggcatgccacgagctcttccaattttggccagaggccgaagacggcttccacgaataggcctaatacatagatgcaacggggcgacagttttcaaaaaacgggtagacagtgggggcgagtccataca

SEQ ID NO: 2020 - DNA, 1496 bp, unidentified
  source 1..1496: mol_type = unassigned DNA; note = element_2c7e91d
  misc_feature 1..2: note = core
  misc_feature 3..202: note = LE
  misc_feature 203..1474: note = CDS
  misc_feature 1475..1496: note = RE
  misc_feature 6..202: note = bridgeRNA
ctgatggcactaccctcctgagtcatggggtcaccccctgggaacgcttgcggcacttgtcccttgaggaccgagatgagacggcgtcccagggggtcggccctggaggcccgacgcccacaagggtgtcgtcccgtgaggactggtccatcagcacggcgccacgcctccacccggatcggggtcgagcaaaggaggcagggtgcttggtgttgggatcgactgggccgaggagttccacctcgtcgccctgggacgccccgacgagggggtgatcgaggtcgtctgggtccagcacaccccggctgcggtcgaccagctcgcggcacgcatcgccgcgttggaagccgacccggccgaggtccgtgtggtgctggagacccgccacggcctgctggtcgaacggctggtcgacgctggctacaccgccctgccggtcaaccccgatctggtcgcccggcgccgtggaccggcgcgcaagaaagacgacgccgaggacgcccgcatcgcctgcctgctggcgctggaccgccacgcggccttgcgcccgctcatcccccacggcgagctggctggcgagctgcgcgccatcgcccgcgacgatgagcgcgccgcccgggatcagcgacggctgctcaaccggctgcgagccgacctcatcacgacctacccggctgcgccgcagatcgccgccgatgacctgggcacgcccatcatgctcaagatgctggaacgctggcccaccagcgcccagctcgcggccacctcccgcggcgagctgggtgccttcgcccgcaccgcacggcacggctggcccgaccgcttcgccgaccacctccaggccgccctggccgccaaggccgaccacttcaccccacgcgactacctggtccgcgccaaggccgccacgatccgcctgaccgccacccaactgctggccatcgccacccaacgccgcgcgtggcagcgacgcatggccgaactgctcctcggcgcccgcccgaccggcgaatccggccgacggcgagaggagcggcccgactatgcggtccctggcggcaaggtctacctgagctttcccggcctcggtgaccgtcttgccaccagggtcgccggcgagatcggcgaccacatctgccagtacgagtcgaacgcgctgcaatgcgacgccggcaaggcccccgtcacccgccggtcgggcaaggccgagctggtcgtggcgacccggctggcctgcaaccggcacttggccgacgcggtccagcagtgggcgtcctgcagcctgcgcggctccggctgggcgcgggcgttctacgacgcccagcgtgggcgcggcaagcaccaccacgccgccctcagagcgctcggcaaccgctggctggagatcttgtggcactgcctgcacaagggcgtggtctacgacgaggccgtccacgtcgccacccgcaaccgcgccctcggcaaggccgcctgaccgggaggttgccaaagggtgt

SEQ ID NO: 2021 - DNA, 1351 bp, unidentified
  source 1..1351: mol_type = unassigned DNA; note = element_2c80cb2
  misc_feature 1: note = core
  misc_feature 2..81: note = LE
  misc_feature 82..1101: note = CDS
  misc_feature 1102..1351: note = RE
  misc_feature 1129..1345: note = bridgeRNA
taataagatggtccgccgcttgcatcttctgggatgtgaggaggaaggtggtggcagctttatcctaggaggatcatcgatatggagatacattcggtagggattgatctcggcaagacgacgtttcacctcgtagcccttggcgccgcaggcaaggttctgttgcggaagaagttcacgcagaggcagcttattacgtttaccgcgaacatgcagacgagcctgattggcatggaggcatgttcagggtcgcacttccttggccgggttctacgagcgcaggggcacgacgtcaagctgattccggcacagtttgtgaagccatttgtgaagtcgaacaagaacgatttcctggatgccgaagccatcgcagaggcggtcgaccgacagaacatgcgcttcgtgcccatcaagacagacgatcagcttgatctccagtccatacaccgggtgcgtgaccggctggttgcccgtcgaacgtccgtgatcaaccagctgcgagcgttcctgctcgagcgtggcatggtctttgcaaaaactccttacaagttgaagatcgcgatgcccgagatcttggagaacccggagaggaaccttacgccgcgcatgcggaacctagtcggcttgttgtggagcgagtggaaggaactagaacgacagatcgttgtgatgaacgaagaggtggagcagatcgcgtgctccgatccagcctgccagcgcctcagacagattccgggcatcggcccgctcgtcgctaccgcgattgtcgctgccatcggcaacggagcggccttccgcaaggggcgagagttttcgtgctggctgggacttgtgccgcggcagcactcaacgggtgggaaggcaagactattcggcatcagcaagcgaggcaactgctacctcaggaagctactgatccatggtgcccgatcggccgttttgcgcgttaagcgagaacgatcaccgtttggctcctggctcgatgctctggagcgccgtgccccagtcaaggtcgtcatcacagccgctgccaacaagctcgctcgcgtcgcctgggccgtcctctccagcggtaacgactatcgacctgtctccgcataaaggccacggtctcaacagcgatctcaccgaagtctgcattcgattagttaggacgaaagaacagtcacaacggcgtgccgaaaacctggtgtcgcaaatggtctccgtgaccgtccgactttgaaggatcgatacgcgcgcatctcatcatggccagaagacctcgttttcacaaacaggccgcatacatttgcgcagacttgtcttctcaaacaaacttttcacttgcaggccagcggcggaccataca

SEQ ID NO: 2022 - DNA, 1582 bp, unidentified
  source 1..1582: mol_type = unassigned DNA; note = element_2c82f6b
  misc_feature 1..3: note = core
  misc_feature 4..250: note = LE
  misc_feature 251..1444: note = CDS
  misc_feature 1445..1582: note = RE
  misc_feature 27..270: note = bridgeRNA
tttcgtactatataagtatgaggagttattcgaagaatagcttgtcatacttttttcatatatgatgagagcgactggttgacgggctggtcttagaattgaaacattcggaataaaaaactgtcaaccatcactcactatcaagaattcgattaagtaggtggagttcaaacactcgagtaacaggcgaaaatgaatagatggtgtagtgaagggctatcagtcaaaaaagatagaggagcggggaaaggtgatttcagtaggaatagatgtagcaaaagaaaaaagtgtagtagccataatgaatgaagaaagaaaattactaaaaaaagttgttacattgaatcatacaatgagcgagataagtgcatttattgagcttttaagcttttatcaagaagacgaagaagtaaggataatcatggaagctactggttattaccatgagcctgtattgcagcttttatgcgaaagtggatttaaagtatatgtcgtaaatgcgttagttataaaaaaatataatgatgcgaagcttcgtcaagtaaaaacagataaacaagacgcaatcaaactggcagaatacttattaggcaatcattatcaacttagagagcataaagaggaaggttcaaaatatcaagaacttcgattttatgcgagggaataccataaaagtatggcaatcaaagtgaaaataaaaaatcagttaactcagttgatagataaatgctttccaggtataaaaaagatttatcataacaacatggaaggaactttattagatgtattagaaaagtatccaaccatagatcatgtctcaaggttggggcaaaagaggtttagtaatctatttatcaaatgggctactaaaaagggacataggatagcagagaaaaaagcagtacaaatatatgaattaaccctaaaaggtgtacaaacagtcccctcatcagaatgtgcagaaatgatgatgagactgctgattaagtcacttcgagagcaaatcgaaataaccacatctattttaacacagatgaaaacaatagcagagtctatccctgaatatggtgtagtaagagaaatgtctggtgtaggagatcgtacaggtccgagactcctagcagaaataggagatattagacgttttcgttcatcgagagcattagtagcatatgcaggaattgatgtatctccctatcaatctggtcaatttgaagcaagggaacgaaagataacgaaaagaggatcaaaatatttgaggaaggttctctatgaaattgtccaaagtttaaagacggtgaaacctactagagatagcgctgtgtatcaatatgttttgcgaaaggaactagaaggaaaagcttcaaaaaaagctaaggttgcaggaatgaataagtttctgcgtatatattacgcgcgggtaatggaggtttatcaactatagataaatcatgtaccttggtgtcttgaaaaataaaaatgtaaaaaagccgtacttacgtacggttatttgcgttggggtgatatccatgtgaaaaaaatatattttttattaatttttatcttgaaaataattagtagg

SEQ ID NO: 2023 - DNA, 1391 bp, unidentified
  source 1..1391: mol_type = unassigned DNA; note = element_2c87113
  misc_feature 1..3: note = core
  misc_feature 4..264: note = LE
  misc_feature 265..1116: note = CDS
  misc_feature 1117..1391: note = RE
  misc_feature 1087..1378: note = bridgeRNA
agatgggatggttgccgccctccccagacggcatcgcgatgtgccaggttggtggtgttgaacgccacgaaacggagaggacggcagtatgaaagatataatgatcggggtggatctggcaaaatctgtctttcaggtccacggcgcgtcgatgacggggcaggttaagttccgcaagaaactgtcgcggccccagtcccagaaattcatggcagagcaagcgcctgccatcgttgtgatggaggcctgtggcggcgcccattattggccaggcagatcttgaagcttggccatgaagtgaagttgatcgcacctcagtatgtccggcctttcgtgaaacgtcagacgaatgatgccgccgacgccgaagcgatcgttatcgcggcacagcgtccagaaatgcgcttcgtcgagatgaagtcggcagagcagcgggccaatgccgtactgttccgagcgcgcgagcgtattgtccatcagcgcacggagttggtgaatgctctgcgcgcggtactctacgaataccgtcacatcgttccacaggggctcgtccagctcaagcgcatcgaggcaatcctggccgagcgggacagtgaccttcccatgcttgtccgtgaggaatgccgggaccttctggcgcagatcgcagagaagacggcgcggatagaggcgaagacgaggaaggccagggaactggccgggggaaccaacatggcgcgtcggctgcaaaccatgccgggggttgggccattgaccgcactggccgttgaggccttcgcgccgaaaatggcgaccttcgcgcgcggccgggactttgcggcatggctgggccttgtgccacggcaacactcgtcgggtggcaaggaacggcttggacgtgtttcgaaggccgggcaggtcgatatccgtcggcttctaatcattggggcgatgtcgcgactgaactggcgcgggcgcagatcgattgatgaaggttcgtggttggcgcggatgctggcaaggaaaccgaggatgctggtcgcgatcgccttggccaataagatggcgcgggcaatctgggccatgctaacgaaggaaaaagattatcaggatccggcgttggccgtggctgcgtgacccacatgcagcgggatcggctaaaggcggtgaaaagggtgtgagaagtcgacgacctgaatgggcgcaatgatcgaacagatctggagcgggaaaaccaggacaaaggattgagcaaagagctcgctgttgagacttggtcccgttccgcagatcaccataccggccagcggcttctgacaatgccgcaaatcaaaaggcctgacagaaagaccgcactcgatcacacgctcataaagtcagaaactacttgcatcaagggcggcaaccccaga

SEQ ID NO: 2024 - DNA, 1559 bp, unidentified
  source 1..1559: mol_type = unassigned DNA; note = element_2c888ce
  misc_feature 1..2: note = core
  misc_feature 3..597: note = LE
  misc_feature 598..1437: note = CDS
  misc_feature 1438..1559: note = RE
  misc_feature 17..239: note = bridgeRNA
ctcgtataataatgttgtagttaataactaactacataatatatttttaaatctcatattttatgagataattaatctaatagatagaggttgtagttaacctccttgaagtcttatcttccttagttagactgacacctctttctttacttcaaatatgtgtatgagctgaatagtacttgttactgtatatctaacgaggttacatgatttaaagtttgaggtttcctctatctgaatttatctaaaataggtgattttatgtattatattggtattgacattgcaaagcgcaatcatgaagtttccatcattgatgttgatggtaaaagtttaagtaaaagtatttctattgctaattctcaaaaaggtttagatgattttaataactaccttagctcttttaatgttacctctcaaaattccataataggtatggaatctactaggtattattagcttaatctttattcatctttagttaatttaaatttcaatgtctttgtcatcaatcctattcaaacagatgcctttagaaaaaggtatattagaaaaatttaaaatgattctaaagattcatatattattgctcaaattatgtcctttggtgaattttcatcttctactatctctgatgagaatatatttgctataagacaactgtcaagataccgttcttctcttgttgatgaatgttctaactggaaaagaaaagttatcactatcttagatcaagtatttccagaatattcagatttgttttctgacacatttggagttacttctaaagaacttttatcaaaataccctttacctgaaaatatgctagaagtatcaacaaaagaattgacttcccttttaaataaagcaagtaaaggtagatttggaattgaaaaagcacaagaaattaaagaatatgctactaaatcttttggaatatcttttgcaaaagaaactttttcattccaaataaaacaaattattaatcaaatttctttcattgaatctcaactgaaagaacttgaagaaaaaataacaaacatcttaaaaactttaaattcagagataactactatcacaggtataggagatattttaggtgcttctatacttggtgaaattggagatatctcaagatttgaaaaagcttctcaattagttgcttttgcaggattagatgtagctattaatcaatctggagaatttacagggacagaaatgaaaataactaaacgaggttccccatatttaagaagatcaatatggatagctgcaacagttgcttgtttcaaagatccagctctatcagtttactataaaaaactaattgatagaggaaaaaaacatctaacagcagtaggcgcagtagcaagaaaaatgtgtaacattattttttctgtacttaagaataagaaaccgtatactccaaatatttagcaaaagtaaaatatagaaactttttaaatctaattttatttaggttattttgttctacaaaattaaataagttaaaaaattttaaattataaaaaaaaattacttgacatttaatagctggt

SEQ ID NO: 2025 - DNA, 1372 bp, unidentified
  source 1..1372: mol_type = unassigned DNA; note = element_2c8958e
  misc_feature 1..3: note = core
  misc_feature 4..88: note = LE
  misc_feature 89..1114: note = CDS
  misc_feature 1115..1372: note = RE
  misc_feature 1113..1359: note = bridgeRNA
tgatgttgtggacggcccctgtgtccggcgtcgagtgcgccatagagtggtcgttgctaacgcggccacagaacaggaaccgtccaccatgaagactatcacgatcgggctcgacctcgccaagactgtattccaagcccacggcgtcgatgacgcgggcactgtcaccattcgcaagaagctgcggcgatccgagctgctcaccttcttcaccgaccttcccgcctgcctcatcggcatcgaagcctgcgcgacggctcattactgggcaagagagctagcggccctgggccatgaggtccggctgatgccgccgacgtacgtcaaggcctatgtccggcgccagaagaacgacgcggcggacgctgaggcgatctgcgaagccgtgacgcggccgaccatgcggttcgtgccggtcaagagcgccgagcggcagagtattctggttctgcaccggtcgagggagttgctggtgcgccagcggaccatgctgatcaacaccatccgtggccactgcgcggagttcggcctcatcgtcgcccaaggtgcgcggcgcgcaatagagctggtcgaccaggtccgccaggcagatgacaggattctgcccgatctggcccgctccacgctcctgatgatggcggaccatcttcaggtcctggcggcgcagatccaccagctcgaacggcggcttctggcctggcatcgtcaggaccaggtcagtcagcgcctggcgaccattcccggggtcggcatcatcacagccaccgccctgtcggccagcatcagcaatccagcgctgttccgctcgggccgcgagttcgccgccttcttgggtctggttccaagacagaactcttccggtggcaaggatcggctgggccggatctccaagatgggcgacggatatctgcgcaggctcctggtcgtgggagcgacctcggtcatccgacgtgttcgaaccggagcgtccctcgcctcggcctcctgggtccagtccttgttggaacgccggccggcgcggcttgtgaccgtcgccatggccaacaagaccgcccggatcgcctgggctgtcatggcccggggtgagacctacaggatgccggtcatggcctgatcgagattgcggcgaccgatccggtcgtcgctgcaaactggaaggggcaaagggatgatggcgatcagatagcggccgcagtcaggacaacccgaggtgctgtcggagccttgtgctcgttggactgagagggacctgacccgcggactccatcagggccagcggtcatcgacaccgcgcaaacaggccgaacagatgaccgcaccccagatcgacatcaacccaaattccccttgcagcgatggggccgtccacaga

SEQ ID NO: 2026 - DNA, 1401 bp, unidentified
  source 1..1401: mol_type = unassigned DNA; note = element_2c8d888
  misc_feature 1..2: note = core
  misc_feature 3..116: note = LE
  misc_feature 117..974: note = CDS
  misc_feature 975..1401: note = RE
  misc_feature 1161..1396: note = bridgeRNA
agatgcggtaatgggcctctgccggaattcctggcggggtgactgtcttccagagtgatgttgggaaacggggtctgagctggtcagccccaagcatcattggaggacggacagctatggagcattttgccgggatcgacgtgtcattggaacagagcagcgtgtgcgtggtggatggcgccggcaggatcgtgcgcgagacgaaggtggcgagcgagccggaggccctggtccggttcttccgcgagctggggattgggatgacgcggatcgggctggaagcggggcctttgtcgcaatggctgcatgccggtttggtcgcggccgagtttgaggtggtgctgctcgagacgcggcacgtgaaggcagcgctgtcggctatggtgatcaagactgaccgcaaggatgcgcgtggcatcgcgcagttgctgcgcatggggtggttccgcccggtgcatgccaagtcgccgggagcccaggaggttcgtgcgttgctcgttgcccgcaagctgctgcagaccaagctgttagatgtggagtgcagcatccgcggcattctgcgcgggttcgggttgaagatgggtgaggtgagcaagggccggttcgtggcgcgggtgcgcgagctggcggccggacatccgatgttggagcggatcaccgagccgatgttgcgggcgcgtgaggcactgcggaccgaatacgccaggctgcacggtgagatgctggcgattgccaaaccggatccggtgtgccggcgcctgatgacggcaccgggcgtgggtgccttggtggcgatcacgttcaaatcggcggtcgatgatcccggacggttcactcggtcgagagcgctgggcgcgtactttggattgacgcccaagaagtatcagtccggggagaaggatgtgacgggcgcgatcagccgggttggcgacccgatggggtcactctctacgaggcggccaatatcatgctgagccgggtgacgcgattctccagcctgaagcgctgggctctcgatgtggcgaaacggcgcggcctgaagcgtgccaaggtcgctctggcgcgcaagctggcgaccgttctgtatcgcatgtggatcgatggcaccacgttccgttggggcaagcaggccgacgctgccgtgtaaccagaggagacgtctttcggggcggggccgaccggcttccgcctcccgaggtcccgctaccgggacgcggatccggtgaagccgttgggtcgacagtggccgcccacaaggcaggaccccgtgctcaagattggctcgccggttccccatctgatggcatgatgtggcgacccgcgtgtcgaccacggacggaagcacgatcacggtagcgaggtcatcactcgggggcttgacgcccaacggcccattacgga

SEQ ID NO: 2027 - DNA, 1333 bp, unidentified
  source 1..1333: mol_type = unassigned DNA; note = element_2c900b2
  misc_feature 1..2: note = core
  misc_feature 3..77: note = LE
  misc_feature 78..1115: note = CDS
  misc_feature 1116..1333: note = RE
  misc_feature 1090..1318: note = bridgeRNA
agataattggactcccccaactcctagagctgggttaatattttggctctcacacacaaaatattatggagtccaacatgcacaatataatcacaggtgttgatttagcaaaagaagaaattcaagtttgcgtctctaaacgcaacaaggtgcagtctaatcaggcaatgacaccgtcacaatttacttcttggttggcttcctcaaaatctatgacgattgtatttgaggcatgcagcacatcaaattattggaagcaatctgcattgaaatatgggcatgacgctcaaattatttctgccaaactggttgccacggtgagacaaaatcaaaaaacggataaaaatgatgctttggctgttgctcaggcagctcaacttttagacgtttcatttatcaacggtaaatcaaaagaacagcaagagctgcaaaccttagttcgattacgagaacttgctgtaaaacataaagttgccatgcaaaatcaaattaagtcattgttattagagtttaatattagggtatcacccagccaaggtggcttaaacggcgtcgttcaatcggttctggaagatgctgaaaatggcttttcgatggtttttcgccaagcattacatatggcgtggcaacaacttttgctctgtattgaatcgatacagcagtatgatttgtgcctagaaaaagcagcaaaccaacatccagcttgtaaagcgttacaagctatcgaaggtgttggcccattgaacgccattaatctttatattgctctaggctgtggggaaatggggacctttaataaaggtcgagatgcttctgcttgtattggcttaacccccatccaacattcttcagggggaaaagtgaaattgggctctatcggtaagcatgttaaaaacagtagcattcgaagttgcttagtcagtggtgcgatggcggcggttaatcaagcgactaaacgtcctgcaaaaacgaaaaaagacttatggatacagcaaatggttgagcgcaaaggaaaacggtgtgctgctgtcgcgttagccaacaaaacggtacgaacggcctttgctatgttggcaaatggtacagaatataaagcagagcttttggctgtttaaaagagttgttaaacaacaataatgctcaataaaagatgaaaatcagcttgtttagtcagtgcttcgcttagagccgttagctcgtccatgagatttgacaacaagttcgcgtaaatatcatagagcctgggatagcttccccaattagagctcgtacataagcacgcatttattctttaattgatctttaatgttgttgacaagggggagtccacata

SEQ ID NO: 2028 - DNA, 1331 bp, unidentified
  source 1..1331: mol_type = unassigned DNA; note = element_2c924f5
  misc_feature 1..2: note = core
  misc_feature 3..249: note = LE
  misc_feature 250..1047: note = CDS
  misc_feature 1048..1331: note = RE
  misc_feature 1098..1329: note = bridgeRNA
ttaatgagatggtcactccctccttcccggtactatgctgaggacaggctttcattcggagaactatcatggaaaacattgcgctcattggtatcgatctgggtaaaaactctttccatattcattgccaggatcgtcgcgggaaggctgtttaccgtaaaaaatttacccggccaaagttgattcgaatttttggcgacatgccccgctacaaccatcgcaatggaagcctgtggcggttctcactttatggcacgcaagttggaagagttggggcattccccaaagctgatatcaccacaatttgtccgcccgttcgttaaaagcaataaaaacgactttgtcgacgccgaagctatttgtgaagctgcatcgcgtccgtctatgcgttttgtgcagcccagaacggaatctcagcaggcaatgcgggctctgcatcgtgtccgtgaatccctggttcaggataaggtaaaaacaaccaatcaaatgcatgcttttctgctggaatttggcattagcgttccccgaggagctgccgttattagccgactgagtaccattcttgaggataatagtttgcctctttacctcagccagttattgctgaaattacaacagcattatcactatcttgttgagcagattaaagatttggaatcccagttgaaacgaaagttggacgaagatgaggttggacagcgcttgctgagcattccctgcgtcggaacactgacagcgagtactatttcaactgagattggcgacgggaagcagtacgccagcagccgtgactttgcggcggcaacagggcttgtacctcggcagtacagcacgggaggtaggacgacattgctgggaattagtaagcgaggtaataaaaagatccgaactttgttggttcaatgtgccagggtattcatacaaaaactggaacaccagtctggcaaattggcccgattgggtcagggatttactgtgccggaaaagcaactttgtcgtcacttgtgctctggcaaacaagctggccagaatagcctgggcccctaacggcacgacagcaaacttatgtagcataacggcagaaatacaccggtttaaagaattactgatctggttttgcgaatactgatattgatgatactaacggcccaccggcctgttgaggaacctgtaaaacggaaaggctcattgaagccgtatattttctggaggttcatcaggcgcggaactcatcaaggcgcgggaataaaatcccattcagacgccggatagattcaagcaagccaacttgtcgtcaaaatcggtgttgcaaaaacgggagtgaccataga

SEQ ID NO: 2029 - DNA, 1461 bp, unidentified
  source 1..1461: mol_type = unassigned DNA; note = element_2c973c6
  misc_feature 1: note = core
  misc_feature 2..406: note = LE
  misc_feature 407..1234: note = CDS
  misc_feature 1235..1461: note = RE
  misc_feature 24..235: note = bridgeRNA
cgttacctttttcatgacgccggtgtccgggaggatgaaggcgtaggtaaccagccggccccggcatgatgcctgcccccagttatcgatgatcgcaggcggtgtagtcaccggggccggtactggttcacacggaccgctaatagaagcacgacccgtcaggcggggctttgtaacgtggatgcgggtcagtgttccatttggtcacttcaacccaccctgtgacgaagaaggtgaccatgacggaccaccagctctacctcgggatcgacgttggtaagaccgatcatcacgccaccggcctgagcgccgcgggcagtgtcgtgtacgacaagcccctgccccaatccgacccaagatccgggcgctgcttcaagagctgaccgtagcccatggcactgttctggtggtcgtggaccagcccaagaccataggcgccctggtgattgcggtggcccaggacctgggcattgatgtggcttacttgcctgggctaacgatgcgccgggtcgctgacctgcacccgggccaggcgaaaactgatgcccgagatgcgttcatcatcgccgagaccgctcgcaccatggcccacaccctgcgtgggatcaccgtgaccgaggagaacatcgcggaactgtcgatgctgtgcggcttcgatgatgatctagcagcccagatcactcaggcccgcaaccggttacgcgggttcctcactcagatccacccggctctggaacgggtccttggcccccggttgggccaccccgccgtggttgctttgctcacccggtactcgtccccggcccggttgagaaccgccgggcgggctcatgtacgggtgttgttgaagaaacacgcgccccggttggcggagaaactcaccgaagagattttcaccgccctgagcgagcaaaccgtgaccgttgcaggcacgtcggcggcggagaagatcatcgggcgtttagctgaccaactttcccagctcgccacccaacgagcagagatcgaagccgagatcctcacggtggtcgatgctcaccctctcacccaggtcctgacctccatgcccggggtaggggtcaggacagcagcacggatcctcaccgaagtcgtgggcaaggacttcgccaccgccggccatctggcttcttacgccggaatcgctcccgtgaccagaagatccgggacctcgatccgtggggaatccccatccggcggggcaacaaggtcctgaaacgagcgttgttcctctccgcgttcgcctccataaacgccagccccgcttcgagggcctactacgatcgaaaacgatctgagggcaaacgccacaaccaagctgtgatcgcgctggccagaagacgaaccgatgtactctacgccatgctccgcgacggggccttctacaccgaacccaccccgccgaccgtagccctggccgctttacgaaaaccatagaagcac

SEQ ID NO: 2030 - DNA, 1368 bp, unidentified
  source 1..1368: mol_type = unassigned DNA; note = element_2c9ca5c
  misc_feature 1..2: note = core
  misc_feature 3..239: note = LE
  misc_feature 240..1103: note = CDS
  misc_feature 1104..1368: note = RE
  misc_feature 1136..1365: note = bridgeRNA
ttaataagatggtcagcctgaccgaaacagcccgatcggcttacgctgattgggctgtttcctttttgggggatcatcatggccaccgtctcgttgatcggaatcgatcttggcaagcattgcttccatttgcacgcgcaggatgcatcaggccgtatggtgttccgcaagaagctcacgcgtggccagatgctgacgctgctgggcaatgttcctcactgcacggtggtcatggaagcgtgcgcaggggcgcacgggtcgccaggcgaatcgaggcgctggggcatcaggccaagctgatttcgccgcagttcgtcaaacctttcctgcccggcaacaagaacgatttcgccgatgcccaggcgatctgcgaagccgcatcgcgcccgagcatgcgtttcgtgagtccgcgcaacgagacccaacaaaccctctcggccttgcaccgcgtgcgcgaggccctggtgcgtgagcgcaccggcacggtcaatcagatccacgcgtttctgctcgagttcggtgtgagtctgtccagggggcctgccgtcatcggccggttgccggccgtactggcagaacacgatcttcccccgcggctcatcgcgctgctcgaacggctgcaggttcacttcaagtacctggatgagcaaatcgccgagatagaacgcgagctgacgctgcaactgcgggaggacgagcgcagccagcggctgctggagattcccggcatcggccccatcacagccagcgtgttgaccaccgaattgggcgatgcccggcagttcgcttcggcgcgccagttcgcggcgtctgtcgggctggtcccgcgccagtacagtaccggcggcaagccaacgctgctgggcatcagcaagcgaggagacaagaatctgcggcggctgttggtgcaatgcgcgcgggccatcatgcaacacatcgaacgacgccacgaccagttgggggcgtgggtgcgcagccttctgggtcgacggcactccaacgtggtcgcctgcgctttggccaacaaattggcgaggatcgcctgggccatcctcgccagagggacacactaccaaggcgaacaggctgttgccgcagcctgacgcgctgcgccgcttacgttcccgtttttacccagtcacttcctggttttgcgacgcgagatacgtgacgacataaacgactcaacggccgggcaagcaacctgaccaataaaacagcgctagacgctgaggtttttttgaggtttgcccggcgcgactctcatcatggggcgggaacctgttcccacgtcgaccccggatagatttgcgcacgtccaatttatgccaacactgtcccgcttgcaaaagtcaggctgaccataga

SEQ ID NO: 2031 - DNA, 1619 bp, unidentified
  source 1..1619: mol_type = unassigned DNA; note = element_2ca1b3d
  misc_feature 1..3: note = core
  misc_feature 4..251: note = LE
  misc_feature 252..1487: note = CDS
  misc_feature 1488..1619: note = RE
  misc_feature 8..225: note = bridgeRNA
gttcgtattataaggtcagccagatatttctggttgaccattttttatatcgatatatgattacggtagccggggtagaacggaagcccccgtgggacttgatcccgtccattaaactgttcgccccctacttgtagaaacatgattgaggctggttgggactaggatcccgtataacaagcgaagctatgaaactgcaagatggatttaggggttaccggcaagtttattcataaggaggagattttagaatgaatccagtcgttggtctggatgtctctaaaggagaaagccaagttcaagcattcttggaaaaaggaaagcctcaccgaaagagtttcagtatcccacacactatagaaggacttgattgtctcgtagagtatcttgaggaaatatggtctcttactgggattagacctccggtcgtattagaatctacaggtcactttcaccttccagtcgttcaatatttggaggagcgtgattatctattaattattgttaatccccttgtctcctatagagccaaaagttcaaatttacggaaggtaaaaaccgatgtgattgatgcctatcacctatgtgagctgtattataaggaggagttagagccctacaaaaagagaggaatccaactcttgaaccttcggaatctcacaaggcaacatgagaatatcacagaacttcatgtacaggctaaattacaattccaatcactacttgatcaagtttttccggaatataaaggggtttttggcagcttatattcagtggtatcactactgacgttaaaggaatacccttcttcagaggatattttaaggacggaagaggaagatctttctgataagatagctgaattatgtaagtctcgatctaaagcatgggcaaaagaaaaagctactgaattgaaagaggcggcaaagcgtaatccaattcaaaaaacactttatcgaagccatatcttgagcatgaacatgtatattcatatgcttctacagtataaagagcatctatcaaagttggcagctgaaatagacgctctcgcaaaagaagtagaagaatatgaacttataaaatcaatccctggaatcggagaaaaaatcgcggcaacgattatctctgaaatcggggagattgaacggtttagtcaccccaaaaagcttgtagccttcgcaggaattgatccaagtgtctttgaatctggcaagttcagagccacgatcaatcgcataaccaaaagaggttcaagtcgtcttcgccaggcgttatttatggcggtgaagtgtgccattcgtgactgtcgcaaaaagaagatcaccgataaggttatccctcgaaacaaaaggttaagagccttttatgataagaagcgagacgaagggaaaccttacaaagtagccgtaatagcctgtgtaaacaaacttttaagatggatcttcgccattttaacaagcaaagaagttttccaagatatagattaaaagatagacttgtccactcaatacaaaaccttccataacaaacatagtggaaggctgtttggtatgcctaaatttagtgtaacatgttcattttgaacttttcattgaaaaatgttgacaaactattagctg

SEQ ID NO: 2032 - DNA, 1392 bp, unidentified
  source 1..1392: mol_type = unassigned DNA; note = element_2ca25ad
  misc_feature 1: note = core
  misc_feature 2..89: note = LE
  misc_feature 90..1124: note = CDS
  misc_feature 1125..1392: note = RE
  misc_feature 1164..1384: note = bridgeRNA
caatgggatggacgcccccacccgattaggcatcgatgtgccagagtggaggcgctaatcaaccactcgatacggaggaggtgtccgccatggagattaggacaagtgggatcgaccttgccaagagcgtgttccagctacacggcgtcgacgaacatggcaagaccgttctccgtaagcaactcaggcgtgaccaagtaaccaagttcatagccaacgtacctgcgtgcctggtcgggatggaagcgtgtggcagcgcacatcactgggcgcgcgtgctgcagcgcttcggacactcagtggggctcatgtcgccgcagctcgtgaagccctacgtgaagaccaacaagaacgacgcagcggatgccgaggcgatctgcgaggcggtcgcgcgcccgaacatgcgattcgtgccgatcaagagcgttgagcagcaggcggtgctgtcgttgcaccgcgtccggcagggcttcgacacggcacgcactgggcaggcgaaccagatccgtggattgcttgccgagttcggcattgtgctcccaaaggggatctgttcgctgcgcaatcagttgtggggagtcgtcgagaaagcaggcgatcagcttccggaagtgttccggcagttgatgcgccgcctctatgcacatctgatggagctggatcgacaagtgaacgaactcgaggcgcagatcaagcaatggcaccgcagttgtgggctcagccagcgcttggaagaaactcctgggatcggaccacttacagctacggcgttggtgacctcgatcgccgacgcgcgaagcttcaagaacggccggcaactggcggcatggctgggcctcgtcccgcgacagcactcaagtggagggaagcccactttgctgggtatcagcaagcatggtgatgtgtatctgcgaactttgctgatccacggagcgcgctccgcgattctggcggccaagcgccatgcgacgtcgaatatttggctgagcaacctgctcggccgacgaaatccgaatgtcgctgccgttgccttggcgaacaagaacgcgaggaccatctgggccttgctcgcttacgaccgtgagttccaggtcgattacgtgccgagactgacaggcgcgtaagcagaaccgaacgcacaaaagacagaacaggaagcacttccaccgattgcaccggcaatcatgcagtgatggcgaaacaggtaagaccgtggttggccaaacccatccggggcgacgcacttcgagtgcattgaatcgatctggacccgaccagcgcattccaccaggaacagcggctttgccgcagcgaaagtccgaatgtacggttgcaaccttgccttcaaaccatcatcacatgagagctgggcataccgggggcgtccatgta

SEQ ID NO: 2033 - DNA, 1586 bp, unidentified
  source 1..1586: mol_type = unassigned DNA; note = element_2ca77b8
  misc_feature 1: note = core
  misc_feature 2..250: note = LE
  misc_feature 251..1453: note = CDS
  misc_feature 1454..1586: note = RE
  misc_feature 6..224: note = bridgeRNA
tcgtattatgaggtcagccagtttttactggttgaccacttttgttatggtggtgtatttctcagtagtcgggcagatcggacgttcccctgggtctgtaacccgtcgctaaaactgatcgccccctacttgtagaaaccatgtttaagctggttgagacgacctagatctcgcataacaagcgatgttgtggaactatgaggtgttttaggggtaccgacattttcacttttaagggagggagtatttcatgaatccagtcattggtctggatatttcaaaaggtaaaagatatggacaagttttcttagacaaaggcaagcccatgggacaccctttttgttttcagcataaccaagtaggtcttagccaactgctagatgtcgtttcaactgtacaggatacagcaggcaaatccccagttgtgattctggaatcgacaggacattaccatcaggctgtaattcagtttctagaagaacacggtatcctatttttagttgtgaatcctctcatttcacatcaagccaaaaagtcaagtctacggaaagtgaaaacagatgcagtcgatgcctatcggctctgcgagctgtactacaaagaggaatttgaagaccatatgcaacgaggggttcaactactaaatcttaggcatctaacgcgtcagtttgactcgctcacacaaatgtatgtacaggtgaagcttcagtttcaggccgttctagatcaagtctttccggattatagaggtattttcggtgacctttattcaaaagtttcgttgctgcttctaaaacagttcatgactcctggggcatttcaaacagctggcgtatcaaccgtaacacacacaattacctgcctctgccctaggcgatctgatcattgggctagtgacaaagcaagctgtatcatggttgctgcagcaaataatccatttccaaaagtgagttatagtagccatctaataagcttagcactattcattgacttacttcttcaatatcaagagcatctttcccacctgcaaagtcagatcgatgcccttgctgaagaagttgaatcttatcagattatccaatcgattcccggaataggtagcaaaatcgctgcaacgattttgtccgagatcggggaaatccatcggtttaatcacgccaaaaagctggtagctttcgcaggaattgaccctagcgtctactcttctggtaagttcacagcgacaaccaatcgcattaccaaacgcgggtctaagaagctgcgtcatgccctatatctcgctgtactatgcggtctaaaaaagaccggaagcaagaggttacgtgaatattacgataagaaacgcgaagccggaaagccttaccgggttgccctcattgcctgcgtcaacaagctccttcactggatttatgcccttctagtgaagcaagaaaggtttgtcgatttagattagttaacacatttttcatccgcaagaacagccttccagcatgtacagagaaggttatttagtgcgcctatttttcagtataccgtcatcccgtactttatttaagagaaaaatgttgacaagatattagctggtt

SEQ ID NO: 2034 - DNA, 1155 bp, unidentified
  source 1..1155: mol_type = unassigned DNA; note = element_2ca9ee0
  misc_feature 1..2: note = core
  misc_feature 3..183: note = LE
  misc_feature 184..1143: note = CDS
  misc_feature 1144..1155: note = RE
  misc_feature 37..213: note = bridgeRNA
cttgtcttatgactttctgtgcccgatgggcgacaaaggaaccgctgggagggaggtaacgctccctcctcagcggcgagggtcggatcgtcatcacgcagaccgttcgacgggtcgagttaaagtttgatcggccctcgtcttttccattggcctgaacggatacgcgcagtgaagctgcgcatgacaagcagaggcacggaaaagatgacagaccataccatcggcatcgacatctcgaaagaccatctcgacgctcaccggttgatcgacggcaaaagccgccgtttcgtcaacgacaggagcggtcacaaagccctcatcgcctggatcggctgtgatgccgtgcgcatcgtctatgagccgaccggcccctatcaccgcaagttggaacaggctctggcggcggctgatctgccgctcgtgaaggtcaatccgcgccaggcgcgccgcttcttcgagggcgccggccagctcgccaaaactgaccggctggacgccgctatgttggccacaatgggatcgctgctggcgatcgcaccgcgcctggcgcgcagcccgctgctccacgaacttaaggatctccacatggcccgaacggccttggtgaaggacaggaccgccgcgaagaatagagccaagagcctttccatgcctttgctcaagcgccacaatggcgagcgcctcacgcagatcgagcggcagatggaggccatcgaagctgaaatcatgcaccgcatcaaggccgaccctgatctggcgcgcagcttcgccattctcacctcaatcccgggggtctcggatatcaccgccttcctcctgattattgacatgcccgaactcggtcggctcgaagccacagaagctgccgcccttgcaggcctcgcccccatcacacgccaatccggcacgtggcgcggccgcgcctccattcgcggcggacgcgccaatctccgtcaggccctctacatgccggccctcgtcgcaagccgcttcaatcccgatctcagcgccaaataccaacaactactaaccgccgggaaaccaccaaaagtcgccctaaccgcgctcatgcggaaactcatcgtcctcgccaacgctctgctcaaagccaaccgaaaatggacctctaagcctgcttgaccaaaacggata

SEQ ID NO: 2035 - DNA, 1379 bp, unidentified
  source 1..1379: mol_type = unassigned DNA; note = element_2cae2cd
  misc_feature 1: note = core
  misc_feature 2..89: note = LE
  misc_feature 90..1121: note = CDS
  misc_feature 1122..1379: note = RE
  misc_feature 1142..1371: note = bridgeRNA
caatggtatggactcctcctcccctaaacggcatctaggtgccacactggtaaacgtaatcaaccagtcaacggagaagaggagtcaccatgaagcttagtagagttggcgtcgatttggcaaagaacgtatatcagttgcacggtgttgatcgttttggcaagacgatctggaagcgccggctgaagcgtcatcaatggctcaaggtattgctggataagacggagccaggttgtgtaattggcatggaagcgtgcgccagtgcgcatcactggggtcgggagctgcagtcccgcggttacacggtcaggttggttccagcgcagtttgtgaagccgtacgtgaagagcaacaagaatgatgccagggatgccgaggcgatctgtgaggcgatgagccggcctaatatgcgctttgtgacggtgaagacggtagctcaacaggacatccaggcgacgcaccggattcgtgaagagttcaaggttcggcgtaccgccaaggccaaccagatccgaggtcttgtagccgagtatggcctggtggcaccgaagcatctgagttcacttcgtgctgcgatcccgtgttggctggaagatgcggagaatggtctgacgcattacttccgttcgctgctacagggtttgtggagcgacctgctggcactggatgatcgcatgtgcgagatggacaagacgatcaagcagctggccaaggacaatgaagactgcgtgcgattacagcaactacgcggtatcggtccgatgacttccacggccatgatcgccacggtgggcgatgcgcggcagtatcacaagagccggcagatggctgctggcattggcatcacaccaagacagcatagttcgggcgacaagcatcgcttgcttggtattagtaagcgcggcgatgtttacctgcgaacgctgatgatccatggtgccagatcggtggtaacaggagcgaaacataaagatgacccgctcagtcgctgggtcactgagattgcaaagcggcggcatccaaacgttgctgctgtggccttagccaacaagaacgcacgcatggcctgggccatactgcgcaacaagactgattacaatcctgagtatgcgataagctgagacaggaataataaggagccctccaagacgattgcttaagcaaactgcatgatggcaaacaggtcgaaccgacgtcagggaaacccggcaatgtccacgtacttaaaagtacgacaaagcgattgggactggcgcgcgaataaaccattatggcccggcatcaataaacgtatgccaacttcagaggccggatatacgtatgcagtcgtgccatgtctgccagatacagattgcttgcaaataggaggagtccatata

SEQ ID NO: 2036 - DNA, 1545 bp, unidentified
  source 1..1545: mol_type = unassigned DNA; note = element_2cbc968
  misc_feature 1..2: note = core
  misc_feature 3..75: note = LE
  misc_feature 76..1236: note = CDS
  misc_feature 1237..1545: note = RE
  misc_feature 1257..1478: note = bridgeRNA
agatcccatggggaggtggatagcgaccggcactctggcagagtgaggttgctaccacccactctggaggcgaccatgcaaaccgtagctgaccgaccggaagcatcgactgctatccgtactgatcttggcgcgatttttgtttcattggaactcagtcgatcgacatggctgatcacgtcgctgtcgccaggcggcggagagaagatgtcgaagcaagtggtgcgtggtggcgatgtggccgggctactggagcgctttgcgcgacttcgggagaaaacgcgggcgaggacggggaaggtcttcccgttcgtcgtcattcaggaggctggcctcgacggtttctggatcgatcgcgccctgcagaatgaagggatcgaaagccacgtcgtcgatccggcctcgattgcgacatcacgtcggcgccggcgggcgaagactgacgggatcgacggcgaggcgctggttcgcgcgctgctggcgtacaagcggggcgaacctcgggtgtgcgcgatggtcaaggcaccgactcccgaggaagaggaccgtcgccgcctctgccgcgagcgcaaggtgctgatcgtcgagcgggtccggcacgtcaatcgcgtcaaggggctgctgttctcacaggggatatctggctacgagccgctgcgccgcgaccggcgggagcggctggatacgctccagaccggcgatggtcgccggctaccggatcacctgaaggcgcaggttcgccgtgaactcgatcggctggaactgttgctcgagcagatcaaggcggtggaggccgagcgggacgtgctgcttgccgcgcaacgagtcgcagcgccggcggcgatgttgctcgacatcaagggcatcgggccggagttcgccgccatcctctggtcggaagggctcttccgacacttcgacaatcgacgccaagtcgcttcttatgctggcttggcgccgacaccctggcagagcggatcgattgatcgcgaacagggcgtgtctaaagcaggcaatccgcgattgcgaacaacgctcatccaactcgcgtggctatggctgcgccatcagccgcaatcggcgctggccctgtggtttgaagaacgggtcaggcgcaatggcggccgtcttaagaagacgacaatcgtggcactggcgcgaaagctgctggtagcgctctggaaatatgtgaccgcaggcgttgtcatcgagggagccgtgatgaaacgtacctgacgataaacgctgaccgaatccttaaatcttccaggacttgatcagtcctggcggatccaggtggacgaaccgcaccctcgcatggcctaaaaagcccgtcttcaagaatggtctcgtcttcctgagccccgaccgccgcaagcgggatattggtgcagccgtttcgcgcggcgaccgaatgtgaggttgatcgtgctcggaaacgagccgcgtcatgcaatcgggctcagacctcggataccgaacagatactggagatctgcggatgtcaccctaatacgacccccttgacctgaacctccccatgtg

SEQ ID NO: 2037 - DNA, 1398 bp, unidentified
  source 1..1398: mol_type = unassigned DNA; note = element_2cbfcd0
  misc_feature 1: note = core
  misc_feature 2..86: note = LE
  misc_feature 87..1121: note = CDS
  misc_feature 1122..1398: note = RE
  misc_feature 1165..1393: note = bridgeRNA
caatgggatggacgcccccaaccaaacggcatcggtgtgccacagtggagttgcgtatcaccacttcacggaagggagcgtccatcatgaaggctactaccatcggcatcgatctggcgaagaacgtattccaggttcatggtgtttctgagaacggcaagatcgtcttgagaagacaactcaaacgtcatcaggtggcaatattcttcgcgaaccttgcgcccgcccttgttggcatggaagcgtgcggaagtgcacattactgggccaggaagctacaaggcatggggcacacggtccgcctaatggcaccgcagttcgtcaagccctatgtcaagaccaacaagcacgatgccgccgacgcagaggcgatttgcgaagcggtaacccgtcccaacatgcgctttgtaccgatcaagaatgtcgagcagcaggcgatgttggccttgcatcgggctcgccagggatttgtgagcgctcgcaccgcgcaggccaatcagatccgtggcctgctcagcgagtatggattcgtcttacctcaaggaatcgcctgcattgcggaaaaggtccccgacatcattgaggacggctcgaacgagctaccggggacgttccggcagctcatacaacgcttgatggcacatctcaaagcgcttcaccaacaggtatcagaaatcgatgccgagatcagggcgtggcacaggcagagcgacttgtcctgcaagcttgagaagataccaggtgtcggacccgtgacagccactgcgctggtggcaacaatcggggacgcgaagcacttcaagaacggccgagagttggccgcttggcttggcctggtgccaaggcaacactcaagcggtggaaagcaaaatctgcttggaatcagcaagcgtggcgattcctacttgcggacactgttgattcactgtgcgcgctcagcaatcttcgcgtcacgacgcaagggtatggagcaaggctgggtccacgacgtggcgcgtcggcgcaatagcaacatagccgcagtcgcgctggccaacaaaatcgctcgaactgtgtgggcattatggaggcatgacagggagtaccgacctgcctacactcctgcggctgcagcagcgtaggcaggtctctcatttaaggcgtgaagcggtatcagtaggagaagcagaccacagattgctcaggcaatcatgaaatgatggcaagacaggttagaccgtggccggtaaagcccgacagcccccaagcacttctgagtgcggcaaatcgatagggatctggccagcgaaacccatcagggacagcggcggtgccgcagcgaaagtccgaatgtacggttgcaatccaccttccggtcatcattgattgagcgcttggcaaactgggggcgtccatgta

SEQ ID NO: 2038 - DNA, 1389 bp, unidentified
  source 1..1389: mol_type = unassigned DNA; note = element_2cd403a
  misc_feature 1..3: note = core
  misc_feature 4..87: note = LE
  misc_feature 88..1113: note = CDS
  misc_feature 1114..1389: note = RE
  misc_feature 1087..1376: note = bridgeRNA
agatgggatggttgccgccctccccagacggcatcgtaatgtgccaaggtcgtagtgttcaacaccatgcgaagaggaggacggcgaatgaaagatatgatgatcggggtggatctggcaaagagcgttttccagattcacggggccagtatggctggacacctgaagtttcgtaagaaggtgacgcggacccagttccggcatttcatggagaagcaggaacccgccattgtcgtgatggaggcttgtggcagcgcgagctactgggctcgtgaaatgatcaagctcggccatgaagtccggctgatcgcaccgcaatatgtccgacctttcgtgaaacggcagaaaaacgatgccgctgacgccgaggcaatcgtcgtcgcggcgcgacagccagagatgcggttcgtgtcaccaaaaacggaggatcagcaggccaaggcagtgatgttccgcggccgcgagcggctggtccgccagcgcaccgagctggtgaatgcgttgcgggccgtgctttatgagcatggtcatgtctttcctctcgggcttgttcatctcaagcggattgaggctcttctggaagattgtgacaacggcctgcccaagctgatcgtcacggaatgtcaggatctgctcgagcagatttccttgaagacggagaggatcaccgagaagaccgcgaaactgaagagcttggccgagcagacggagacggcgcgccgcctgcagaccatgcccggcgtcgggcccctgacggcgctggctgtagaggccttcgcgccagacctggcagggttcaagagtggccgggatttcgcggcttggttggggctcgtgccgcgccagcattcctcgggcggcaaggatcggctcggacggatctcgaaagccggtcaagtcgatatccggcggctcctgatcattggcgcgatgacacggttcacgggccgcacgcgcggcaaggtcccggccggaagctggatagcacggatgctggccaggaagccgaagatgctggttgggattgcgctggcaaacaagatggcgcggcaaatctgggccatgctgacaaaaggagaaaattacagggatccggcgctggcggcagcatgaccgtcatgtcgtgaacggccaccgctggagccgtgggggcgtgaaaaaggcgacgacctaaatgggcgcaatgatcgaacagatctggatcgggaaaaccagtgtggttcttcgagatgagatctcgcctacaagatttggacctgatccgcagatcaccatattggctagcggcttctcgaaaagtcgcgatgaaaaggccggagagaagaacgcactcgatcaccagccacagcgggttgaagaatttcttgcatcaggggcggcaaccagaga

SEQ ID NO: 2039 - DNA, 1319 bp, unidentified
  source 1..1319: mol_type = unassigned DNA; note = element_2cd62ba
  misc_feature 1..2: note = core
  misc_feature 3..188: note = LE
  misc_feature 189..1130: note = CDS
  misc_feature 1131..1319: note = RE
  misc_feature 29..198: note = bridgeRNA
cttgtgtcttgaaaatgtgccaaaaaggactgggccggcgcggtaggccgccgcgccggccctggagaggagagcccgttacccccttggcttaagaccgtgggtgagcaaggtgccttctctccatcttcacaagcccgaacagttgcacggtcacgaaggccgaaccgcaaggaagggatcggaagatggcacagatggtaacgaatgccggcatcgatgtcagcaagcaatggctcgacgtcgcgctttggccgaagcgtgacgaggtctcgcggttcaagcgtgatgctgccggtttggaagagctcgccttctggctcagggagcgccatgtggtgcgggttggccttgaggcctcgggcgggtatgagcgcgaggtcatcgacgcgctggaggcgcagggcttggaggtcgccctgctcaatccgctgcaggtgcgtcgcttcgcccaggccaagggcaggcttgcgaagaacgatcgtgtggacgcccgcacgatcgcgcagttcaccgcggtgatgatcgaggctccccaacccggccgccggcgcgaactggactcgttgagcgagcacctgttgttccgtcgccagctgcgcgcctggatcgacgattgcggcaaccggctcgagcacctgcgcgataaggcgctgcgccgcaagatcgaggcaaagcgggtcaagttgcgagccgagctcgcggcccatgacaaggccttggccaagctcaccgccgagcatgccgactggaacgggctcgccaagcggctgcgcaccgtgcccggcgtcggaccggtgctgtcccagacgctgatcgcgctcctgcccgagctcggccatttgtcgcggcgcgccattgccagcctggtcggtgtcgctcctttcgacaatgacagcggccagcgcagcggcaagcgccacatcaagggtggacggggggcggtgcgggaggtgctctatatggccgccctctcggccaagacccacaatccaatcattgccgaattcgccaagcggcttgccggcaaggaacccaaggtcatgctcgtcgcctgcatgcgcaagctcctggtcatcctcaatgccatgatgcgcgatggaatggactggcaggtcaaaaccgcatgacccccgaccatcccttggttcgaccggcgagcgaccatcccttcgtcccgacctgcgcctccgaaggccagcgctcgcagggacggtcaatgatggccgcaggccaccgccgcaggcggcgcaaagcgtcattgacggtcccgagaccgctggcccaatgacataatcgggagcccaaaatcacagttg

SEQ ID NO: 2040 - DNA, 1446 bp, unidentified
  source 1..1446: mol_type = unassigned DNA; note = element_2cdd456
  misc_feature 1..2: note = core
  misc_feature 3..236: note = LE
  misc_feature 237..1439: note = CDS
  misc_feature 1440..1446: note = RE
ctcctaccatgaatttgtatagaatggggtataatcggtttcaaggattagccgtattgttcatgggaaggcgggaggacatgctacttcctgggtgttagagctctcattacagtatgtcccaagcctctgtgaaccataataggttggttggacaattgaatccttgtcacgctggaggattggtctggaggcttaaatctgctttttccttcaccatgtatggaggttatgcaatgtcaggtttcatgtgtggttttgcaggttttgtcggcattgatgtttccaaagataagttcgatgcctgcgggataagaagtgatgaagccaagctctttcagttttcggcgacaatggatagaaagggttttgataaacttaaagggcatcttgctgctgtttccatctcgtccgttttaatcggaatggaatcaacagcatcctatcatgttaatctcttctcttacttggtttctgaggggtacaacgtcattctcataaaccctctgctggtttccagttacgtgaagatgcagctcaggaagaccaagacggacaagaaggatgcttttgtcatcgcccaatttctccgtgccaatggggataccctaactcaacgagtgactccgtctttgatttctgatcttcgggatctctcccgtcagcgggaaagtctggttgacgatatgaccgctctgaagatggaaataaagcgtctcctgaatatcacgtttcctgagttggaacatatgacagggatatttacgaaagctatccttaaacttctattgcgttatccatctgcacattctttaaaaggtgtcgatcttggtcatcttacacagatgttaatagctgattctcagggacgtaaaagggatgcctttgccgaagatctactaaaagcggcccaatcttctatagcgaccgacagccccgcaaaggatatgatcctgagacagaatatcatgctgcttctttatctcgaagacgcccttgaagagataaccgatatgttgattgagatgagccgcaatttgatggaagaagatataaatatcctaacctccatcaaaggtattggcgacaaagccgcagccacgtttctcatcgaaatgggtggcagcattaatcaatttgaacgttccggtaaaatcattgccatggcaggcttggatccgtctgtttaccaatctggtaaacatgaaggcaagggcaagataacgaaacgtggcaaccgtcatttgcggaagatcatatggctgatgacaaccaaagtgatccaatacacagacatttttaatgtctattatctcaaacgaaggaaggagggattgccttataagatggcggtactggcaactgcacataaattgatccgtgtcgtttatgctatgttgacacaacgaacaactttttctctacaggtgaattcttgatagttga

SEQ ID NO: 2041 - DNA, 1532 bp, unidentified
  source 1..1532: mol_type = unassigned DNA; note = element_2cdedd8
  misc_feature 1..2: note = core
  misc_feature 3..255: note = LE
  misc_feature 256..1419: note = CDS
  misc_feature 1420..1532: note = RE
  misc_feature 3..233: note = bridgeRNA
cttgtatgatatagtcagtgactaaaatcatactctcctttctttttattattatttatccattataatagaattagacactgtggactttttatttaaccctataacttgactattctaaggagtgtattgccactgtcttatttaaatcatttatagttggataagttttaaacttttatctcccgcaaggctatgagaataagactaggtggatcaaaacagttgtcaatttatctctaaggatgtggttttatgatttatgttggcattgatattgccaaacaaaaacactttgccgctgctatgactgctgatggtgaagtcttaattcaaccttttgggtttactaatgattcggaaggtttctctttgttagtgtccaaactcaagatccttgatcaggaaaattttctaattggacttgaatcaacttctcattatggagaaaaccttatttgttatctttacaatatgggttatcatattgctgttatcaaccctatccaaactgctactttaagaaagtcaaatattcgtaaaactaagactgataaggttgataccatcttaattattaaatcaatgattttaaacaaccataggatttttaccaaggctgacattgattcaattcgtctaaaaagcctttgtcgttttagagaaaaaactaaaaagtctaaagcaagacttaagattcaactcgtatcgtatgttgatattatctttccagaactacaatgcttttttaaatctggcattcacatcaacacttgttatgagctacttaaaagacattccaatccaaatgatatagctgccttacaccttacttatttaggtaatcttcttaaaaaggcttcccacagccgttttggtaaagaagaagctattgctttaaaaggtctggctaaatcatctgtaggcactggtgatgcctatttatttattcaaataacccaaaccatctctcaaattgagttattggaaaagcaaattaatgaactagatgaatccattaaatcgattatgattgaattggattctgtaatcttgactattcctggtataggatttcttaacggtgctatgattcttggtgaaatcggtgatatctctagcttttccaatccttcaaagcttttagcatatgctggcttggatcctactgttaaccaatctggtcaatttaatgctaagaccaccagaatgtcaaagcgtggttcaaagttactgcgttatgcattaataaatgctgcttggaatgtttccttaaataacaaaacattcaatgactattttatgcttaaaaaatcccaaggtaacaaccattatgcagctcttggtcatgttgctcataaattggttcgtgtaatttttaaaatactaaaagataatgttgctttcaatttagactaaaatcaccttattttaaatcctatatctgataggtttatttgagtgcgcctattttaggagaattatttaattacatattgtcaagaatttttgcttgacaattcatagttggt

SEQ ID NO: 2042 - DNA, 1382 bp, unidentified
  source 1..1382: mol_type = unassigned DNA; note = element_2ce7409
  misc_feature 1..2: note = core
  misc_feature 3..82: note = LE
  misc_feature 83..1111: note = CDS
  misc_feature 1112..1382: note = RE
  misc_feature 1085..1369: note = bridgeRNA
tgatggagtggatgcccctcctgccggcgcttacgcgtgtcagacatggaggcctgcgggttggccgcagtgggaggcgaacatgaacgacgtcaccatcatcggtatcgaccttgccaagcgggtcttccacgcgcacggcgcttttgctgacggctctgtcgcctttcggaaaaagctatcgcgaccgcaggtgcttccgtttctcgcgcaacagcatcgctgcatcgtcgcgatggaagcatgcgcaactgctcatgaatggggccgtgcgatccaggaactcggtcacgacgtgcggctgatctcaccagcctacgtcaagccgttcgtgaagcggcagaagaacgacacggcggacgcagaagccattgccgaggccgccgcacggccgaccatgcggttcgtcgtcgtgaagaccgaagagcaacaggccagatcaatggtgttccgaacccgggatctgctcgtgcggcaacggacgcagttgatcaacgccctgcggggccatctggcagaacatgggattatcgctccccatggcccggctcatgtgaaggttctagcagccgcgatcagtgacgccagcagatcgctgccggagctggtacgcgatatcggcgctatttacctcgaccagatcgctctgttggacggcaagattgcggagctggagaaagttcttcgccgtgaagcgcaaagcggcaccgaaacctgccgtcttcagaccatgccagggattgggccgatcacagcgatggcgatcgaagccttcgctccgccaatgactatcttcaagcgtggccgcggcttcgccgcctggctcggcctagtcccagtgcaacattccactggcggcaagcagcgcctcggccggacgtcgaagatgggccagcgagacatccgtcggctcctcattattggcgccatggctgtcatccggtgggcgtcgcgtcgaggagcgcgtgccgggtcgtggctacagcgcatgattgagcgaaagcccctcatgttggtcgccctggcgctggccaataagatggcccgcgccatctgggccatgctgacgaaacaagaggactatcgggatccgggagccgcgaccgtctgatcgaacgatgaggcgccaacgcatccggatggtaggcatgtgaggaggtcacgaacgtcaagggcaagcgatcggtctgatcgggatcaggaaaagcacagaggccccaagagcgaaaagctcgccgagttgatctgcaccggatccgcgtatctccatgacggccagcggcactcctgagcaccgcaccacaaggcctgacacatgaccgcacccgatcacatgccgtcgccgttcaaaaaccgcttgcatgaaacggggcatccacaca

SEQ ID NO: 2043 - DNA, 1279 bp, unidentified
  source 1..1279: mol_type = unassigned DNA; note = element_2cfcec2
  misc_feature 1..2: note = core
  misc_feature 3..268: note = LE
  misc_feature 269..1198: note = CDS
  misc_feature 1199..1279: note = RE
  misc_feature 42..215: note = bridgeRNA
cttgtatgttgaccctacacccaacgagagccgttatgctcacaggtgtgtcatcaagagatgtgtttctgggggaagccgatcgctcctgaaggcaagacgtgctcttgaccttgtctgtagagaggctcccccgcctcattgcccaccacgtagagtatcgagaagccgatgagtcggacttcgcattacaaggttgcagcggcatgaagttcgaggtcaggggaaccagaggccatcttcacctagttttcctggagttgaaagcatgaccattcatgtcggccttgatgtgggttcgcgtactacggccatggcctggcgccagaagggttcgcctgctgggacctgggtcattgatcaaacaccaaaaggtcgcaagatcgccctcaagaaactgctggccctcaagccgctttccgtcgtgatggaagccactggaatctattatctggaccttgcaatcgagctgagttcagcaggtttacctgtttcggtcatcaaccctaaaagcgcccgaaacttcgccagattgatgctgcagcacaacaagactgatgcgatcgatgcccagctactggccgagtacggcgaacgcatgacgccacgcctgtggttgcctccaagccccgtacagcttgagctgcgagcaatcgggcgccatatcaaccggttgacctctcatcgcaccagagccaagaacgagttgcatgcactgcaagtgaccgaaacgacttcgcctatgttgatcgaggatgaagaagaggctattgccatgttcgacaagcgcatcgagcgcttcagaaaggcggggcgagacttgatccgcaactgcacttcgctggatgccgatttcactcatatgctggcggcgcccggcatgggtgatgtctcgacgctggccgtattggctgaactgaccacactgcccgatacgctgaaatcatcacaggtcagccggcacgcaggccttgacgtacgcctgacacaatcgggcaccagcatcgataaaccaggtcgattgagcaaatgtgggaatgcttatttgcggtcagccttgttcatgccggcgttgtcggccatccgttgcgatcgatacgtgaaggcgttttacgagacgctggtgggtcgaggaaaacgcaagatgcaggctatctgcgctgtcatgcgtaagtacctgacaggcctgtgggcttgaatgaaaagcggcgaagacttcgacacagccaagcttttcagcgaaaaacacctgctaaaagcttgaccgtgaacagagtat

SEQ ID NO: 2044 - DNA, 1409 bp, unidentified
  source 1..1409: mol_type = unassigned DNA; note = element_2d01866
  misc_feature 1..2: note = core
  misc_feature 3..84: note = LE
  misc_feature 85..1203: note = CDS
  misc_feature 1204..1409: note = RE
  misc_feature 1174..1396: note = bridgeRNA
tgatggggtggatgccccacccggcggcatcacaatgtgccagaatgatagcagtttaaactgttacacaaaggaagagcatccatggagaatgttagcataataggaattgatttagcaaaacggagtttccaactgcacggggcgagccctgatggttctgtggtgttccgcaagaaactgtcgcggcctcagcttaccgcgttcctgagtgagcttccaaagtgcattgttgcgatggaggcttgcgccacatcccattattgggcgcgcgagattggcaagcttggccacgaagcgcgttttatcccacctgtttacgttaagccgtttgtgaagcgtcaaaagaacgacgcaaatgacgcagaagcgatcgcggaggaggcatcgcgcccgacgatgcactacgtctcggtcaaaagcgcagaacaacagtcgcaggccaaggtctttcgaacacgcgatttatttgtccgccaacgctcccagttggtaaacgctttgcgggggcatttagcagaatacggtgtcgtcgtcgctcaagggatggttcagtttagacgtatgataaccagctttgatgaagtcgcggttgacctgcccgcgcaaattctcaacctttgccaagcatacattgatcagatcgctctttttgacgaaaggatagcggtgctggatcatgagatcaaaggccgagcaaaaacagatgaagcaacatcacggcttatgacgatccccggagttgggcctatgtgtgccacgaccattcaggccttcgcgccaccaatggaagaattttctaataggcgtgagtttgcagcttggtgcgggcttgtaccaaggcagaagtcgaccggtgggcgacaaatcctgggtagaacctcaaaaatgggacagcgcgatataaggcgattgctgatcacaggcgcccctctcattcatgtaaacatgcactgccgggcagtgaatggccgtcatccgttgggccatccggaaaggtccaccacctggatcatggcttgccaagatgccggcgcgcaagcctcgtatgctggtggcgactgcactggcaaacaagcttgcgcgtactgtttgggcattaacaaccacaaaagaggactatcgaattccaccgctggctgcacaagctttgcaccatgcgttggagtaaaccggcaatgtgagaagggcgaaggagagtaaggaacaacggtcataagacggggttgggaaaaccagatagaagccaggagccttgtgctcgcatcaacgatttggacccgatccacggacaccatacaggccagcggcgtttgaaagccgcattcaaaggcccgacacacgactgcactgatcacttgttccaagcaatccgaaaaacttcttgcattgaaaggggcgtccacaca

SEQ ID NO: 2045 - DNA, 1591 bp, unidentified
  source 1..1591: mol_type = unassigned DNA; note = element_2d07510
  misc_feature 1..4: note = core
  misc_feature 5..262: note = LE
  misc_feature 263..1576: note = CDS
  misc_feature 1577..1591: note = RE
  misc_feature 22..243: note = bridgeRNA
ctcctatctttaagtcgttgcatttttaagccttttatcgaatgcttatggatgcaatgcagattctggcgggcagggttgccgacatgcagtgtgagagccttgcttctcgtaaaggagtctggcaacctgccccattcgggcgaggccgcggataagctggatgagggtggccctccgcgccattcctcggatctcttctaggaggctgcggtcccgggtgcggtagcaggagcccgccgccgagcagaaaggggaacccgtgatttacgcaggcgtggacatcgccaaggcggaccatgtgatcgccgccgtcgacgagacgggagccgaggtcgccaggcccatggccttcaagaacacggaggccggcttcgagagatgcgtagcgtggctggaatccatcgcgcagacggaagacgacgtcttcgtcggcatggaggcgaccgggcactactggatggcctgcttcgcctacctcacggccgccggctacagggcctgcgtggtcaaccccatgcaggtgagcgccatgcgcaggctcaagggcctctccggcgtgaagaacgaccgcatagactccctcctcgtagccgagacgctcaggcagggcgactacgaccagaccgggctcgccaccgacgaggtgcaggccctcaagcagctcacgcgctaccatcaggggctcaagcgggagctcgcgaccgtgaagacccaggccatctgcgtgctcgacgcctacttccccgagtacgcggggctgttctccgacatgttcggggcagcgtcgctcaaggtgctctccgaatgcccgacgccctccgaggtggcccgcaagcgcgcctcgtcgatagcgaagatgctgtcggagggctcgcacggcaggctcggggccgatagggccgcccgggtcaaggcggcggcgaggtcgtctgtcggcatcaggcttggagaggacgccgcatcgttccagataaagacgatggtatcccagatcgagttcctgaacgccacgatcgccaaggtggagcgggaggtcgaggggctgctcgagaggatcgagcccaacatcacgaccatacccggcgtctccatcacgaccggcgcgcagatcgtcgccgagatcggagacgtcaaaaggttcaagaacgccgcatcgatcgtgaagtacgcgggcctcaactccggagtcgacgaatcgggcaagttctccgccgagggggtccccataaccaagcaggggtcgccctacctgcgaaggtcgctctggctcgccgcgaaccgcgcgccaattcgatcccaggctcaaggccttctacgacaagaagcggcgggagggcaagccccatcgggtggccgtgaccgcctgcgcgaggaagctgtgccatgtagtctacgcggtcatgcgcgacggggagccctacgaccccgacaagtaggcaaggcgccatatccccgctcccatatcgcatgcgcgatgcggcccattgcgcccaaaagcattcgatatacggctgtcaaagtgcagaaacggatgatttccctagtgctcgaaaaacctcggatcatcccttgacttcatatagctggt

SEQ ID NO: 2046 - DNA, 1301 bp, unidentified
  source 1..1301: mol_type = unassigned DNA; note = element_2d08efb
  misc_feature 1: note = core
  misc_feature 2..260: note = LE
  misc_feature 261..1253: note = CDS
  misc_feature 1254..1301: note = RE
  misc_feature 63..249: note = bridgeRNA
cctttggttaagcaaagataatatctcaagaagctgctgttattgaaacggggggtcccggggggtgttaaaaactaaaaactttgtgaataagttaacataaaggcagggtgaactaatattcgctctagtcttcgaggactttcgtatgtataagcccctgcctttatgattgcctaaggcccaactagaatactttctttgctacaacaaaggtgattggcaaaaggcaatttttagaatacttaaccaacaaacgtatgaaaagctggaatgttattttaggtgtcgatgtatctaagctgacgctggatatctgttgtgctgaacgtcaactgtacttgaagattgacaatcaaacaaagggttttaatgtattgagaaagtggtgtaaggccaatgcaattgacttgaaggaaaccatggttgtattggagcataccggcgggtatgaatatcggttcatgcaattttgtgagtcatcatctattacctattgccggatccccggtcttgagatcaaaaactccatgggtatgacccgcggtaaaagcgaccggacagattcgttccgtataggccaatatggcgaggaaaagataaaaaggcttgtcccctcaaagccactcgacaagaacatattggcactgaagcaattgctttcctttcgtaaacgcctggtcagggaaaaagcaggatatgaaagtacggtacgggaacgcaagcacatgtatcaaagcaagaaaacggatacagttacccatgtagcacaatcgaaaataaaagagaacaccaagcatatcaggcagatagaacaggaaatcatggagatgataaaaagtaacgaagcctttttacaaacctatcgtatcataaccagccttaaaggaatcggaaatgtaaatgcctggatgaccatagcgtatactgaaaactttaccagttttgcagatgcacgcaaatatgcagtgtatgtgggcgtagtacctttcggccatggatcagggactagtataaagaaaagagatagagtaagccatcttgctcacaaagagataaaacaggaactgaatcaagcagccaaaacagcaattgtccacgacccggaaataagagcctatgcgacgcgaaagcttcaaaataagtgctatccattagtattaaataatgtcaagttcaagttaatcctgcgaatgttcgctctcgtaaaaagaggggaaggctttgtggagaattataaaagggttgcttaggaaaagcctttttgaaattaaatttggaaatatagtaaacctagaata

SEQ ID NO: 2047 - DNA, 1239 bp, unidentified
  source 1..1239: mol_type = unassigned DNA; note = element_2d121d6
  misc_feature 1..2: note = core
  misc_feature 3..214: note = LE
  misc_feature 215..1171: note = CDS
  misc_feature 1172..1239: note = RE
  misc_feature 40..195: note = bridgeRNA
cttgtatgataaaaataagtgaaattgcaataaaataaaagattatagcaatagcacaaaagaaagctagtatacagtagcgttcctaaggctaatagcctgttctatagataagtaactagcttttttaattaaaaaccggacggtattcttaggcaaaaagcctgtatttacaaggttggttttgagatatttaacataaaatttggtgattatgaatagtataattgtaggaattgatatttctaaagagacatttgatgcagctgtgttaattaataataaagttcaaacaagaaaatttaacaataattctgaagggtttaacaaattagtaacatggttaaaaagcagtagaactggacatgtttgtatggaagcaacaggtatctactggaaaaatttagctaaatatctgtacgattatggctataaagtgagcgtagtaaatcctgcccgtattaaaggttttgcaatgagtaaacttagtcgtacaaaaacagataaagcagacagtgtattaatagcagatttttgcaaagcaatgaaaccggaagcatggtatccacagcctctttatattcaagaactacagcagctagttaatcgcctgaatgttttaattaagcataaaacacaagaaacaaatagattagaagtagcttctaaagcaattgctaataatattcaaatgcatattgaatttcttgaaacacaaattaaagaaattgaacaactaatcaatgaccatattaaaaataacaaagatcttcataataaggctatgttacttgagtcaataccaggtataggagcaaaaacacaggctgtagttcttgcttttttagcagatattgagaaatttagttctgctaaacaagttgtagcttttgtaggtcttaatcctaagcatcgccaatctggcagttccgtgcggggggctagtagaatctctagaactggtaattcagatctacgtaagtctttttatatgcctgctatgtctgccttaagacataattgtattatcaagcaattttctcagtctgatactggcaaacccaaaatgcttatccttattgccgctatgcgtaagttattacacatcatttatggtgttttaaagcataattctccttttaatcctaatgtttcaatccttcagaaataataattttataaaaacttacatcttttttataaaattattatttcttttcttgattcttatcacggtat

SEQ ID NO: 2048 - DNA, 1481 bp, unidentified
  source 1..1481: mol_type = unassigned DNA; note = element_2d12cb6
  misc_feature 1..2: note = core
  misc_feature 3..233: note = LE
  misc_feature 234..1460: note = CDS
  misc_feature 1461..1481: note = RE
  misc_feature 7..229: note = bridgeRNA
ctaatgggtgtgtcccggtcgtcgtgaaaggctgggtccgagcggctgctgggtgagcactttcgccgaccgcaccacttgagtgctgggctcagactgtgcccctggcagcgtttcgggaggtccgcgaacagcaggtgggatgaagtgccattgcgagcaccagatccattagtcagctgcacggtcgtccttgctcaggtcccaagtggtcgaaccgggaggtggcagccgtgttgttcgtgggagttgattgggccgaggaccatcacgacgtgtgtgtgatggacgctgatggccgggtccgggcgaagggccgggtcagcaacgacctggccggcatcgctcggatccatgacctggtcgccggggccgcacccgatgaggtcgacgacagcgatgtcgaagtcatcgtcgggatcgagaccgatcgggggttgatggtccgggcgctggtcgctgctggctatcgggtgatcgcagtgaacccgttgggtgttgaccgctaccgcgaccgggcgcgggtgtcgggagcgaagtctgatccgggggatgcccgggtgttggcggacatggtccgcaccgacgcccaccagcaccgcgtcgtcgctgcggacagcgatctggctgaggcgatcaagcttgtcgcgaggtcgcatcagtcagcgatctggtcgcggcgccggttggcgaaccaggtccgctccgcgttgcgcgagttctaccccgcagcactcgacgcgttcgacgacctgacccacagcgacgcgttggcggtcctcgcgatcgcggcgacaccagagctcggtcgacgactgtcacgttcgaagatcgctgcggcgctacggcggggcggccgtcagctcaacatcgagtcccgagccgccaagatccaggcggcgctgcgctccgagcacctcacacaacccggcaccgtcgctgacgcctacggggcgatcgtgtcatcgctcgtcgcggtcatcgctgcgcacaaccagcagatcaccgagctcgaggcggtcctggccgaggatttcgaccagcaccctgacgcacgcatccttcgcagccttcccgggctcggagtggtcaccggcgccagggtgctcggagagttcggtgacgatcccggccgctacgactcggccaaagcccgccggaactacgccggcaccagccccctcaccgtcgcgtcaggaacgagacggatcgtccgggcacgccatatccgcaacaaacgccttgctgacgcgttgcactggtggtcgttcaacgcgatcacccgttccgagggcgcccgagcgctctatgaccaccgtcgcgctgtcggcgacacccacagcggcgcactacgagtcgtcgcgaaccgcctggtcgccatcgctcacggctgtctccgcacccgaaccctctacgacgagaccaccgcctgggcacaccgccacgacatcgccgcttgacccaccccgcacgtgggatgt

SEQ ID NO: 2049 - DNA, 1606 bp, unidentified
  source 1..1606: mol_type = unassigned DNA; note = element_2d1cf9d
  misc_feature 1..2: note = core
  misc_feature 3..443: note = LE
  misc_feature 444..1487: note = CDS
  misc_feature 1488..1606: note = RE
  misc_feature 13..299: note = bridgeRNA
ctactacaatatatttatggttaatatcccttacaaccagtaaggaattatccatcttgttgcttaagctgtataatgatggagcaatcggtatatcggcttcctttcttggacttcgcgtccgtaaaatagactgataaccagttcctcattcgcagcgttcgttttatgcaggttgaatcgttacaggcgcattcgtgtcacaccacagtagattgaataggcaatgagtaaaactggtacttatccattgcaataatcttaaggagtgacaaatttatgaacgcagtaggtatcgatgtttctaagggtaaaagtatggttgctatcatgcgatctttcggtgaaattgtttccacccctttgaaatcaaacacacaaccagtgacatccattcacttgtagaactcatcaactctgttgaaggtgagtcacgaatcgtgatggaacatacaggacgttactacgaaatccttgcccatcagctttcagaggctaaccttttcgtcagtaccattaaccccaaacttatcaaggattttgataatgattcccttcgtaaagtcaaatctgataaagcggatgctgttaagattgcacgctatgcacttgacaaatggcaaaatcttaaacagtatagtgttatggatgaattacgcaatcaacttaaaaccatgaaccgtcagtttggcttctacatgaagcataaaacagccatgaagaataatcttatcagcatccttgaccaaacctatcctggtgttaatacttactttgacagtcctgtacgcagtgacggcaaccagaaatgggttgattttgcatctacatactggcatgtggactgtgtccgtaaaatgtccctaaatgcctttatcgaccattatcaaaactggtgcaaacgcaagaagtacaacttcagtcagtcaaaagctgaagaaatctatggaaaagcgaaggaacttgttcctgtacttccaaaggatgccattacaaagcttattatcaagcaagctgtagaccagcttattagtgtctctacaactgttgagtcactacgcactctcatgaatgaaactgcatccaaactcccggaatatcctgtcgttatggctatgaaaggtgttggagcttcacttggtcctcagttgatggctgagatcggagatgtttcccgtttcactcacaaaggtgctattactgcatttgccggtgtagatcctggtgttaatgaatctggaacctatgaacaaaaaagtgttcctacctcaaaacgtggctctgccgatctacgaaagaccctatttcaagtaatggatgttcttatcaagacaatgccacaagatgatccggtatatcagttcttggataagaaacgtgctcaaggtaaaccctattatgtctatatgactgcgggtgccaacaagtttctaagaatctactatggtcgagtgaaagaatatcttgcatctcttccagaatcttaattatccactaatattttcagaccagcactggtgtggtggtcttattttgatacccaattttcaacctgtataaaattttcaatgttctttcaatttagccttgactttttatttgcagg

SEQ ID NO: 2050 - DNA, 1393 bp, unidentified
  source 1..1393: mol_type = unassigned DNA; note = element_2d1f882
  misc_feature 1: note = core
  misc_feature 2..97: note = LE
  misc_feature 98..1129: note = CDS
  misc_feature 1130..1393: note = RE
  misc_feature 1165..1391: note = bridgeRNA
taatgtaatgaaccgtccccaccctcgccgctagcccggtggggtcttccagactagatttagtctgatggaccttaaccttggatgggagatcgacatgactattagcatgctgggcattgatattgcaaagaacacctttcaactccacggcgccgataaatctggcaaggctgtttacaagaagcgcttggctcggcgtgaactggcagctcatgtggccaatctgccagcttgcacgattgtgatggaagcctgcggaggtgccaactactgggcgcgggttttccaaggcagtggtcactcagtgaagctggtcagtccccagtttgtaaagccgttcgtcaagaccaataagaatgacgccaacgatgcgctggctattgtcgaggcagccagtaggccatcgatgcactttgtaccgatcaaacaggttgagcaacaagacattcaatcaattcaccgaatgcgcactcgaatcgtcaagaaccgaaccgcgttgatcaacgagatcagaggcctgtgcatggagtacggtgtcatccttgcccctggcgcggcccgggtcaaatcatcactctgcgtagccattgccgacggcgataacgagctgaccgcctcatcgcgagaatctatgcagtatctctatgaggaactggtcgatgttgaaactcgggtgagaaagctggatatcagaatccgacagttatgtcgccaaaatgagaactgccagcgcattctgaagattccgggcgttggtgaactgaccgccacagccattgtagcggccgtcccagttccaggggagttccgcaatggccgccatatgtcagcctggttgggacttgtcccacggcaatcttccagtggagataagcagactctcctaggcattagtaaacgcggcgaccggtatttacggacattactgattcacggcgccagggctgtgctgagtcactataaagatcgagataatgactatacccgctgggttggtaggaaaaaggcaacgctgagccataacaaggcagctgtcgcattggccaacaaaaatgcacggatcatctggtcgatgctaagtacaggtaaggaatttgacatcggagtgcaagcaaccgctgcctgatactcaatatcgggcagcttcttttaacgaactggaaactatcacgagtttgcttaagttgatttgaatgatggtcaataggtcacactggctcctttagaacctgaaagttggtaaggccaatagaggccatggtattgatgaggtggaggagcgcggatttacatcagggcacaagctttgcttgaatgccgaatatatgactgcaactcagacctataacaaccatcagagatcaacttgcaaaaggggacggttcatata

SEQ ID NO: 2051 - DNA, 1325 bp, unidentified
  source 1..1325: mol_type = unassigned DNA; note = element_2d21ebe
  misc_feature 1..2: note = core
  misc_feature 3..68: note = LE
  misc_feature 69..860: note = CDS
  misc_feature 861..1325: note = RE
  misc_feature 1092..1323: note = bridgeRNA
ttaatgagatggtcactccctccttcccagtactatgctgaggacaggctttcattcggagaaccatcatggaaaacattgcgcttattggtatcgatctgggtaagaactctttccatattcattgtcaggatcatcgtgggaaggccgtttaccgtaaaaaattcacccgaccaaagctaatcgaatttctggcgacatgcccggcaacaaccatcgcgatggaagcctgtggcggttctcactttatggcacgcaagctggaagagttagggcattttccaaagctgatatcaccgcaatttgtccgcccattcgttaaaagcaacaaaaatgacttcgttgatgctgaagctatctgtgaagcagcatcacgtccatctatgcgtttcgtgcagcccagaaccgaatctcagcaggcaatgcgagctctgcatcgtgtccgtgaatccctggttcaggataaggtgaaaacaactaatcagatgcatgcttttctgctggaatttggtatcagcgttccgcgaggtgctgccgttattagtcgactgagtacccttcttgaggacagtagtttgcctctttatctcagccagttactgctgaaattacaacagcattatcactatcttgttgagcagattaaagatctggaatctcagttgaaacgaaagttggacgaagatgaggttggacagcgcttgctgagtattccctgcgttggaacgctgactgccagtactatttcaactgagattggcgacgggaagcagtacgccagcagccgtgactttgcggcggcaacagggctggtaccccgacagtacagcaggaggtcggacgacattgttagggattagcaagcggggcaacaaaagatccgaactttgttggttcagtgtgccagggtattcatacaaaaactggaacaccagtctggcaagttggccgactgggtcagggagttgttgtgtcggaaaagcaactttgtcgtcacctgtgctctggcaaacaagctggccagaatagcctgggcactgacggcgcgacagcaaacttacgaagcataaaggcagaaatacaccagtttaaacaatcattcatctggttttgcgaatactgatattgatgatactaacggcccaccggcctgttgaggaacctgtaaaacggaaaggctcattgaagccgtatattttctggaggttcatcaggcgcggaactcatcgaggcgcgggaataaaatcccattcagacgccggatagattcaagcaagccaacttgtcgtcaaaatcggtgttgcaaaaacgggagtgaccataga

SEQ ID NO: 2052 - DNA, 1275 bp, unidentified
  source 1..1275: mol_type = unassigned DNA; note = element_2d24103
  misc_feature 1: note = core
  misc_feature 2..213: note = LE
  misc_feature 214..1263: note = CDS
  misc_feature 1264..1275: note = RE
  misc_feature 4..218: note = bridgeRNA
actcagttcagaatacgcctcgaacgtcggatcgatctgacccgtgctgggattggccgagctgccttggcattgacctgtcgatcgagctccggcgttccccgagcgttgccgggcccagcgtttgtgacctgataggagctttgtcctgcaccgtgagtgtcctgtccagcgagtggggttggcgatgcgtccaccacgacggaaacacgcatggaacaacacgaagtcatcctgggcgtcgacacgcatctcgatacacatgtcggagcagtaatcagcgaaacaggaaagctccttggaaccctttcggtgccggccgagacggcgggatatctcaagctgctgacctgggcgaattctctcggtcacctgcgtcgggctggcgttgaaggtaccggcacctatggcgcaggccttgcccgcgtgttgcgcgatcacgagattgaggtgctggaggtcaatcgtccggatcgggctgcgcgtcgatcgcgcggaaagtccgatccgaccgatgcagaaaacgccgcgcgtgcggtcctcgccgggaaggcaactgcgattcccaaagagcaatctggggcggccgaagcaatgcgagctgtttccgttgctcgtcgcagcgccgtcaaagccaagacgcaggcgatcaatcagttgcgagccttgctggtgagcgcgccgcaggacatccgcgaacgccttctgaagacaaagaccgccgaatgcgttgccaactgcgcacggctgcgctcgttgggtaacacgccgatgttgcagactctgaccaccacgctgcgcttgttggcaaagcgctatctcgcgctggcggaagaactcacgacgctcgatgcgatgctcgaacaactaaccctcaagcatgccagacggcttcgggaacgattcggtgttgggcctcaaacggcggcagtgcttgttgccgttgcaggcgacaatccggaacggttgaaaagcgatgccgcgctcgccgcgctttgtggcacgagtccattgcaagcatcttccggaaaaacggtccgacatcgcctgaatcgaggcggcgaccgcgctgcgaacaacgccttgtggaccattgccatggtgcgcatgcgcagtgacccgagaacccgcgtatacgtcgagcgacgaaccaaggaaggaatgtcgaacaaggaaattcatcgctgcctgaagcgttatatcgtcagggagttgtacccgctcattcttgccgacttagctgattcagcccgtaccacttgacataggagcgtc

SEQ ID NO: 2053 - DNA, 1177 bp, unidentified
  source 1..1177: mol_type = unassigned DNA; note = element_2d254e8
  misc_feature 1..2: note = core
  misc_feature 3..199: note = LE
  misc_feature 200..1162: note = CDS
  misc_feature 1163..1177: note = RE
  misc_feature 6..204: note = bridgeRNA
cttgtatgtttaagtctgaccagtacggtaaagtctgagtgcaaccagactgaaccgtgtagtttgattcccgcttgggccgatgagcccgtttctgagtacagaacgcacggttgccgtgctggtcttcccgaaacccgaacggttacccgccccgagctgattgagggcgcatgcacaagcaagggatctgaagatcatgtctgcttcctcagtagtggtgggtatcgacgtcgccaaagagcatgtcgatattgcggtattgggcgccgaacgcgttgcgctgcgatgggctaacgatgccgacgcacattcggccctggcagcggccctgcaacccctgaacgtggctctggtcgtcatggaagccacgggcggctacgaagcggcgcttgcgtgtgcgttgcaggcggcaggcttgccggtcgccgtgagcaacccgcgtcaggcgcgcgactttgccaagtcgatgggacgtctggccaagaccgatacgatcgatgcccacatgctggccgagttcgcatcggtactggttcgtcgcaaggatctggccaacttcattcgaccgctggccgacacccagcaacaagcgctggccgccatggtcacgcgccggcgtcaactgctcggcatgttgctgtccgagcggcagcgtttgcagttggccattcctgtcgtacgcccgagcatagaagccatgatcgacgccatccgcgagcagctcgatgacgtcgacgcccagatggttactcatgtccgagagcactacagcgcactcgacgaactgctgcgctcggcaagcggcatcggcccggtggccagtgccaccttgatcgcggaactgcccgaacttggccggctcaatcgacgccagatcgctgccctggttggcgtcgctccgatggcatgggactcgggaactacccgggggcgcaggcgcattcaaggtggacggttcgatatccgtcgtgtcttgtacatggcagcgctcaccgcttcgcgacgcaatccccctattgccgctttctatcaacgactgatcgctgccggcaagccacccaaggtcgcgctggttgcctgcatgcgcaagctcctgaccgtgctcaacgcaatggtcaaaaccagcacaccttgggacagttcgcttcattccgcttgactcgctagacggtta

SEQ ID NO: 2054 - DNA, 1576 bp, unidentified
  source 1..1576: mol_type = unassigned DNA; note = element_2d25dc5
  misc_feature 1: note = core
  misc_feature 2..62: note = LE
  misc_feature 63..1121: note = CDS
  misc_feature 1122..1576: note = RE
  misc_feature 1355..1570: note = bridgeRNA
taatggtatggtccgtcgcctcaagcccggaggggtataagaggtgaacgaggaggcggtccatggagattgcgacggttggcatcgatttgggcaagacggtattccatcttgtaggtctcaacgcggcaggcgaaatagttgttcgaaagaagttctcgcgtgcgcagctattgcgtttcaccggcaaccttaaggtcggcttgatggggatggaggcctgcgcgggatctcattttcttggccgcgcgctgcgccagcaggggcacgaggtgcgcttgatgcctgcccagtacgtgaagccgtacgtaaagacgaataagaacgactacatcgacgcagaagcgatcgccgaagcggtgagccggtcgcggatgcgcttcgtgccgatcaagagtgatgagcagttggatatgcagtccctgcaccgggcgcgggaacgctgggtgcggacccgcaccgccctgttgaaccagacccgggggctgttgctggagcgcggcatcacgatcagaaaaggccgccgccatgccgaagaagctttgcccaccattttgcaggatgcggaggccaacctgacggggacgatgcgccagctgctggcgcggttgatgtcagagctcaagcaactgggcgttcagatctccgagatcgatgcgctgatcgccggtaaagcggacgatcacgaagcctgccagcggctcatggccattcccggcatcgggccgatcaccgcaacggccattgtctcagcagtcggcaacggcgcagagttccgcaagggccgaggcttttccgcctggctgggcctcacgcctgccgagtattccaccggaggcaaacagaagctgctcggcatcagcaagcgcgggaatggctatctacgcaaactcctcgtgcacggggcacgatccatcatgcagtgccgggaacagcaatctcctgctctaagagcctggctgggggagttggtttcgcgatgccatccgaacgtggccaccatagctctggccaacaagatggcgcgcatggcatgggcattattggccaaaggagagacatatcggccagccttgctgacaagcggtttggatgcggctgcgccgcaactggtcgcatgagtttttggaggcatgggcgatctttcgtccggtgatgttttcccggagacgaagtctgactttaacttcgcccccgggttttgctcaccgtctcgatgagtcgcggccgggtattcctcggcgggttggtctccaccagcgcccgcctccacttccccggctgccatcaggatgcaacaaaatgagcatgccgatcgagggattcgcgatgatcggcacgttcgacgaatctgccaggtctgctggcgaatgaaagatggcgaaaacggtcgaacccggcgctcttgaaacctgtaattgggaacaagccctcgaggctgcgaaactagtaaggacgagagcgcagcgcattccatcatgtgcccagagcatctgctcaccaaaaggccggatacatttgcgcagaccaacccgtcatccgatttttcgcttgcagcacggcgacggaccataca

SEQ ID NO: 2055 - DNA, 1393 bp, unidentified
  source 1..1393: mol_type = unassigned DNA; note = element_2d2c35a
  misc_feature 1..2: note = core
  misc_feature 3..258: note = LE
  misc_feature 259..1308: note = CDS
  misc_feature 1309..1393: note = RE
  misc_feature 43..238: note = bridgeRNA
ctcctatgtttgcaaagttataaatttaaaaagaagaaagctttaagtttgtaatcataaagtgaaaaaggatgagagtagatccgatagcaaatagctcaagaagtatattcgccgatagaaattgcctcatttttttttatcttttagagtctgaacagaatgtaaggaattaagcaagccttaatatccagaatatccagtcaggagaaaagacgaaggaagattcatcactttattaatttaaactttaaagttatgaaagaattaaaacaagtagtaggaattgatgtagcccaaaaagaattagttgttactttaggtagaatgttagaagatttatcaattgaattgtatgcttataaggtatttaaaaacaccgaaaaaggatttgtatctcttttagattgggttaaaaaattaaccaacgatgaagtaaaagttattttttcaatggaagcaacaggtatttatcatcaaaagtttgcttattatttagataaaaatgattatccagtttgtatcgtattaccaaataaaataagtaattacatccgaactttagacattaaaaccatcacggacaaaacgtgttcgcaagcaattgcccaatttggattggaaagaaaattagatttatggaaacgtccaaaaagtgtgtataaaaacttgcaacaactaactagagaacgagatcagatagtagcagagcgagttgtagtaaaaaatcaattgcacgcagaaatatcagaagctgagccaaatgaaaagagtttaaaacgaataaagacaagaatcaggtttttaaatagtcaggaaaaagagattaaaaacgatattaatgccattgtaaaaagcgatgaaaatttaaaaaaagaaatagacataatttgcacattgcctggagttggagaattaacagcagtaattgttttggcagaaaccaatggatttgaattgattagaaataaaaaacaattagttagttatgcagggctagatgtaaaagaaaaacaatcgggtacatcagtaaaaggaaagcctcgaatatcaaaaaaaggaaatagaagcctgcgaaaagcaatgcactttcccgcattggtagctgtaaaatgggatgaaaattttagagaattgtatgcgagattagtatcaaaacacggaataaaaatgaaagcgttggtagctgttcaaagaaaattgttagaaatgatttatacattattcaaaaacaaaagcacatacgataaagaatatgaaaacaaaaaacaagcacaaaaaaatagcgtgcaagcacaaatggcttaaacacgctatagagtctagttctatgactgacttattgacaaatttacaaaaaaattaatattttaattgaaaatcaacacagaat

SEQ ID NO: 2056 - DNA, 1352 bp, unidentified
  source 1..1352: mol_type = unassigned DNA; note = element_2d3464c
  misc_feature 1..3: note = core
  misc_feature 4..194: note = LE
  misc_feature 195..1337: note = CDS
  misc_feature 1338..1352: note = RE
  misc_feature 3..152: note = bridgeRNA
cttgtatgttgaagaagaagacgcggggaagccgagagatcctgaagccttgagcttgtggcgaagataggctccccgccctcttcaccaaggccgaagagtatctgaggcgtcggagccagcatttacaaggtcggcaggtgaggaaacagggtcgggaagcccgtgtcttgataacgcaggatggagtgcgaatgcaatcgatcaagacatgggcgggggtggacgtaagcgcgaagacgttgacggcgcagcgttggcgcaagagcgaggagacggggatcagggagttcaccaacgatgcgtcgggacatcgtgagttgcttgggtggatcggcagaaatgcgcgggtctgcatggaagcgacgggtgtgtatcacctgcaactggccctgatgctggtagccgcgggtgtggaagtgatggtgatcaatcctcgggtggccaaggacttcgctcgcgcgttggcgaatcggagcaagacggaccgagtcgatgcctggagcttgcttgagtacgttcggcggatggagttcatgccgtggaacgcaccgcgcgctgcggtgctggagctacgggagctcggacggcggttgagcgaactggtacgagccgcggcggaggagaagaaccgctttcacgcaaagaaggtggccgccatcagccggactgtggtgaacgacgtgcaggcccacgttacccagatcgaaaaacgggtcaaacagattgaaaagagcgctgtggctgtcattcgtgacgacgccggcttgcgcgagcagtttgagatcctgacgaagatccccgggattgcacgacgatcggcgatcctgttgctgaccgaactcgctgttctcgatccgacgatgaccgtcaagcagatcgtcggccatgcgggactcgacccgcgagagcatgaatcgggaagcagcgttcaaaagccgccgcggatcagcaagctcgggaatgcgcacttgcgcgcgatcttgtacttgccggcgctgaccgccattcgtcacgatcgcggcgctcggctcttttttgcccaactcttgtcacgcggcaagaaaaagatgcagggcatcgtcgccgtaatgcggaagctgctgcacggcatctggatcgtgttgcagcgtcgagtcacgttcgacagttcggtcctgttcgcggcctcgctggcgaaggccgaatcctccgattcggccgtagctgccaaccagccggagccgagtcaggatcacccgaagggccgtagcgaagcggaggagctgcgccagcagcttgatcctggctcggcgcaggctacacgcccgccaaaaagaagatcgaaagccgcttgactctcaacagagtat

SEQ ID NO: 2057 - DNA, 1448 bp, unidentified
  source 1..1448: mol_type = unassigned DNA; note = element_2d47fef
  misc_feature 1: note = core
  misc_feature 2..108: note = LE
  misc_feature 109..1134: note = CDS
  misc_feature 1135..1448: note = RE
  misc_feature 1197..1390: note = bridgeRNA
gaatgaaagggacttccccgtcccgaggctgcggcggaagccacgaatcggcatcaacgtgccatgatgaagtctcgaccttcatcaacaccacaggaggggaagtccatgtccattgtcaccatcggaatcgatcttgccaagaacgtctttgcggttcacggcgtggatgaagccggcaaggcggtattgatcaagccacgtgtctcacgcgatcaactggtcacgctgattgcccagttaccgccttgtctcattggcatggaagcctgctcgggtgcacatcactgggcgcggatgttccagcagtacggccacacggtaaagctgatggcaccgaaactcgtggcaccgtaccggatgtcaggcaagcgtggcaagaacgacgcagccgatgcagcggccatctgcgaagcggtgacccgtccgagcatgcgttttgtgccactgaaggacgaacatcagcaggccacgctgtgcctgcatcgaacacggcagggtttcatcgaggagcgcacggctatctacaaccgcatacgaggcctactctcggagttcggcgtagtactgccgcaaagtccggtgcgcttgcgaagagaaataacggcccatcttgatgtcttgcctggctgggccagacgttgcattgacgatctgctcgagcatgcgggcctccttgaggaccggctgatcgaatacgaccgggcaatcagcgaaatcgcgcgcgccgatgagcgcagcacgagacttatgcaactgcgcgggattggcccaaccacggcgagcgcactgctggcaagtcttggtgccggacatgatttccggaacggtcgccaggtggccgcgtggatcggactgacgccgggacagcacagcagcggcggaaaacagcggctgggcagtatcacgaaggcgggcgacgcctatctgcgcagcctgctggtgctcggcgcgcgttcgattatcgccaatctcggcgaaaaacaggaccggttcagccgctgggtacggaacctggtggagcgccgcggctactggcgcgcgtccgtcgcgatcgcggcgaagaatgccaggatggcatgggcaagcctgaaatacggcgatgatttcaagtacgaaccgactgcagcgtgaactcatcgcgaacacaactcctccgaaaaccaacagcatccatcatgagcggataaacgatcactttgcactgccagcggtgatgtgaagcgggttggacccgcatggggtatatctggcttatcgcgtgggattacattcccgaatgtcgaatgagatccccgtgcgcgtctttcatcagggtccgggcaattatgcccaacatgaccgtttgtagcatcgcagtccttcaccttctcacgtcgcaacggcaatgcagtacgtcacaacacacaaccgcgattgagcttgtgctcaacggggaagcccttgta

SEQ ID NO: 2058 - DNA, 1586 bp, unidentified
  source 1..1586: mol_type = unassigned DNA; note = element_2d4e5c1
  misc_feature 1..2: note = core
  misc_feature 3..268: note = LE
  misc_feature 269..1438: note = CDS
  misc_feature 1439..1586: note = RE
  misc_feature 3..246: note = bridgeRNA
cttgtatgatgaattacatagggaacatcatacattttcctttctttaatatcttagataaccctatactatctgcagacgctgtggcttggttgttacacctacggcgggattttcccgactgtttacttgtgaggatacaaccacagcattgcgcttaatttgtgattagttagataacgctcgacgttttatctcggacaaggctcaggtgcgtaatctctgtgggtaaaaacagcgtcatattcttggaaatgaggtgtttttcatgttgttcgtcggcattgacgttgccaaagacaagcacgactgctgcattcttagctccactggtgaagaacttgcttgcttcaccttttcaaatgaccgtgttggttttgattgccttatcagtacgatatcttcttttggcagcctggaagatgtaaaaatagggcttgaatcaaccggtcactacagtacgaacattgccaattttctcttgcaaaaacgtctgtgcgttaagatttttaatccgctcagtattcaactgatgcgcaaagcccagtcgcttcgcaaaaccaagacggataaatctgatagcaagtttttggcgggcatactgttttcagataattcaaagccctatcaaatgccagtataccagatttctgagttgaaaacactaacccgtaaccgccatcgtcttgttgccctgcgctccaagctaaaactatcggtttcccggctgatcaccatccttttccctgaactgccttctgccgtttattcggtaaatcaaaaatctacatatgccttgctcttgagatcccctacagcaaagtcaattgcgagcacccatctgacaagcctgataaagcttttatcggataattctcatggccgctacggtaaggataaagcgcttgaaattcgtgccatggctgcgaattccatagggttagacagctgcgctactgggttggaattgcagcaaaccattcgcattatccaaaacatccagtctgaaatcgacgtcttagacaaagaaatcaaagcactgatgaaggagcttaattctcccatactcaccattcctggtatcggctacatcttaggcgcgatcattgtcgccgaaataggcaatgccaataattttgctaatcacgggaagttgttggcttttgccggattagaaccttcaacttatcagtccggtaagtttactgccaacaagactccgatggttaagcatggcagcgcctatttgcgttgggcattacttcaggctgcccggctagcagcttaccgtgatgaaactttcggccgctattatgccaaaaagaaagccgaaggtaagcatcattttgttgccctttcccatgttgccaaaaagctggttagagttgtttatatgcttcttagatcaaaccaggcgtttatgcctcaacaagcataaactgcttatttactcctaagcctaatagtcagccttctacgcacttgattcaaaagggcgcgcgtcagcatgttcatttcacccttgatattttgaggtaattttttattatctttttctataaagatcttgacttcatatagttagt

SEQ ID NO: 2059 - DNA, 1571 bp, unidentified
  source 1..1571: mol_type = unassigned DNA; note = element_2d5550f
  misc_feature 1..4: note = core
  misc_feature 5..298: note = LE
  misc_feature 299..1561: note = CDS
  misc_feature 1562..1571: note = RE
ctcactggtccaccatcgtcgtgtcgacgttctccgatagggcgtcgatgcaccccgggtgccaccaggtcactgccctgctcgcttgacgccgaggacgtccacgatgagatctgcaggagctggtggttgcccgggacgtgtggaccgtcgatagggctgtgcgccaaggctggagcatctggctgcgagcgccgatcagtgagcgaaccggcaaacacgtcccggcaccaacgacacccgaaccatcacaagatgagggtgcctccccactgggtctagcagcgaggaggctgacgtgaagtctgccaccaacacacctaacaccgcactgcccgagtccccacccaacgacgtgaccgcgggcgtggactgggcccgcgacgaccacgccgcatgcatcgtggacggtcgcggccgcaaggtcgcagcaatcatggtcgagcacaccaccgccggtctgcacgaccttgtcaccttcctgggccgccacggcgccggcgaggtcgccatcgaacgccccgacgggcccgtcgtcgacaccctcctggctgctggtctgaccgtggtcgtgatcagcccgaaccaggtcaagaacctgcgcgggcgctacggatcggccggcaacaaggacgaccggttcgacgcctacgtccttgccgacactttgcgcaccgaccgtgcccggctgcggccgctggttcccgacaccgagccgactatcgcgctgcgtcgggcctgtcgagcgcgcaaggacctggtcaagcaccgtgtcgctgcggccaatcaactccgtgcgcacctgcgcaacgtcttccccggcgcggtcggcctgttcgccgacatcgactccgagatcaccttggcgttcctgacccgcttcaccacccaggactgcgccgactggctcacgcccaagcgcttgggccagtggctggccaagcagggctacagcggccgcaccgaccctgcggtactgcaccagcgactgctggacgcggcccgcggagcgagcggtgaacacgccaccagccaggcgcacatcaccgccagctacgtggcgctgttgcggaccctgctggagcagatcaaggccctcgccgaccagatcgaccgccagctcgaggcccacaccgacgcgcacatcttcaccagcctgccccgctccggtcgcgtccgagccgcccgcctgctcggcgagatcggcgactgccgcgccaggttccccaccccggaatcgctgacctgtctggccggtgcagcaccctcgacccgccagtccgggaagctgcgcgccgtcggcttccgatgggcctgcgacaagcagctgcgcgacgccgtagtcgacttcgccgccgacacccgactggtcaatccttgggcagccgacctctacgaccgcgccagagcacgcggccacgaccacgcccacgccgtacgaatcctcgcccgcgcctggctccacatcatctggcactgctggcaagacggcgtcgcctacgaccccgccaaacaccgcgcactccagcgattcctcaccagcccagaccaggcggcttgacatagggctt

SEQ ID NO: 2060 - DNA, 1470 bp, unidentified
  source 1..1470: mol_type = unassigned DNA; note = element_2d632f4
  misc_feature 1..2: note = core
  misc_feature 3..238: note = LE
  misc_feature 239..1282: note = CDS
  misc_feature 1283..1470: note = RE
  misc_feature 15..186: note = bridgeRNA
cttgtatcttccgaaattgagcgtgaggatagactcacgtttcggcggagaggccgtccccgtccttaggccagagcaatctgagcctgtgagctagataggccgccgtccctctgtatgtacgccgtggagaatcggaggccttttgagcctgcatgttcaaggttggcgcagccagtgagtccgttagtgcggatagggacagcagccgagaccatcttagcgcccaaggaggtctatgaacaatccatccggagattcaccagcaaccgtgttttgcggcattgatgtaagcgccgcgacgctggccgtagccgtcatcgagcaagatcaagccgcacagcagcgcgagtttcccaaccagcccgcaggtcacaaacaacttctcctatggctggctaaatgtcaggcctgcgtgcgcgtatcgctggaggcaactggcatctactcgctcgatcttgccttggcgctcgatgcggccccgcaggtggaagtggcagtgctaaacccaaagctcgtcaaccgctttgcgcaaacgctgtctcggtctaaatccgatgccgccgatgccctcgtgcttgcgcaatacagccagcgcatgccgttcataccctggtccgcgcccagctcgggcgggcttgccctgcgcacggccgcccggcacatccatgcgctggttgtccagcaaacccatgagcagaatcgcctccatgccgttaaagcatcacgcacagcaccgcgcgcggtggtcaacgacctcgcgcaagctctgcgatcgctcgcctgccgcatagcaaaaatgcgaaaagcggccagagaaatcatccgcgccgatgccccgctcaacgagtgctatcatctgttggtcgccatgcccggcatcgcagacgtcagcgccatctacttgttggccgaaaccgcgctgctgtcaccgcaactcactgcacgacagtgggtggcgcatagcggactcgatccgacgcatcacaactcgggaacttcggtccacaagcgtccccgcatcagccgtgccggcaaccgccatctgcgccgcgccctctacatgccggctctggccgcggtgcgctgggacccgcatatgaaagccttctacgaagctctccaacaacgccacaaaaccaagctgcaagcactcatcgccgtcgcccgcaaaatcctccacgccatctatggaatcttcaaaacgcggactccgtacgacggacgaaaactctttccgcggctcgccatcgcgccggagttacaatcggcttccaggtgaaacacaagcgggctctgctgggaagcaaccatgccgagggatagcctggcgggctcatcgtaaggatgaaccgtgggcaagcgggataacctcgcttgcccaccaagagaacatccgagcgatagacccgtcatgctttgaaaatccaaggcccgcccacagaaaatgcttgactcccaagagagaat

SEQ ID NO: 2061 - DNA, 1410 bp, unidentified
  source 1..1410: mol_type = unassigned DNA; note = element_2d67245
  misc_feature 1: note = core
  misc_feature 2..63: note = LE
  misc_feature 64..1116: note = CDS
  misc_feature 1117..1410: note = RE
  misc_feature 1189..1404: note = bridgeRNA
taatgggatggtccgccgcctttgaccaagagattggtacaagggtgagcaaggaggcgtcccatgaaattgcatacaatcggtatcgatttgggcaagacggtctttcatctggttggtctggatcagtctggcgaagtgatagtgcgcaagaagttctcgcgcacccagcttcttcgtttcactgcgatcgttcaagtcgatctgattggaatggaagcctgtgcaggttctcatttccttggccgtgctctgcgggaacagaggcacgatgtgcgcctcatgcccgcgcagtatgtaaaaccgttcgtgaagaccaacaagaacgacttcatcgacgcggaagccatcgccgaggctgttagtcggcctacgatgcgctttgtgccgatcaagaccgacgagcagttggatatgcagtccctgcaccgagtgcgcgagcgttggatcatgcggcgtactgcgatcgtcaaccagatccgcggcctgctgctggagcgtggcatcacggtgcgagtgggcaggtgccatctggatgcggccttgcctaatatcctcgaggatggctcgacgtccctgtcgggaactcttcgctttctgctggtcgaactgaagcaggaactggaacaactggccggccacatcgaacaagccgaggcgctgattcagagagccgcacagcagagcgaagcttgccggcgtctggatgcgatcccggggatcggcccactaacggccaccgcgctcattgccgcgatcggaaacggcggagcgttccgcaagggccgggagttcgcagcctggcttggactggttccccgcgaacactccaccggtggcaagcagaagcttctcggcatcagcaagcgcggcaacggttatctgcgaaaactgttcgttcagggcgcgcgtgcggttctcaagtatagagacaagcagtgctccggcctgcggcactggctcgcagaactgtcatcgcgcagccactgcaacgtcgtcggtgtcgccctggccaacaaactggcccgcatggcatgggccgtactcgccagcggagatgcctatcggcctcccgtactggccgacatgaccggtctgcagatggcgcctgcctaacgacaggcttggaaatcgctgcgcgattcccacatctgcaaaccagcgacgactgcgaagtcttgaactctgccaggtctgctggcgaaccatgagatggcacaacggtcgaacccggcgctccccaaacctgcaaccggaaaaagtccttcgagactgagtaattaatggggaacggagcgcagcgcattccatcctggccaggagcctggactccgacaaaggccgaatacatttgcgcagaccaaaccgtcactctcatttttcgcttgcggcaaagcggcggaccataca

SEQ ID NO: 2062 - DNA, 1644 bp, unidentified
  source 1..1644: mol_type = unassigned DNA; note = element_2d68738
  misc_feature 1..2: note = core
  misc_feature 3..299: note = LE
  misc_feature 300..1481: note = CDS
  misc_feature 1482..1644: note = RE
  misc_feature 59..276: note = bridgeRNA
ctggtatattgttgaagactcataaaacaagtcatcacaatatacacaatcctttctatcaatcttgcttagccgtgattgattacggtttgttgtatcttgtattattgaaatatgtgaatgtggatttgtgtgtctccttgtggctttgactactttagaaaggatcttaccacaccttattccagaataatgattagttagatgagtctttgaattcgtattttgcaccaggttttgtagtttaagtgttgtggtattaaacacatcgcatatattttttgaaaggatgtatttttatgtttttagttggtattgatattggtaaactcaaacactctttttgtctcattgaaaaagaaactagcgaaatccttgttgaacctatgttcttcaacaataacaaagatggttttaatgtacttttatcttctttcaaagatcttccacaaaaagatattcttattggtatggaagatactggacactaccatttggccttactcaaatttcttttagataagcattatcaagttgctttgatcaatcctgttgctactgatcttatacgtaaaatgcagggcggtatcacaaagaacgataagctcgatactcttactatttgtgatgtattggcctctaatcaacgtgtcaaatcgtaccgtattacgaaagtagatagatttgatctatatgagcaaaagcagttaactagagagcatcacaatctaaaagaagaattgaatcaatactcaaatcgtttacaaaagtgcattgatatcgtatttcctgagttcaatggtctattcaattccaaatatggtgttgtatacatgaacatactgaaagactttggtagtgctgatgttatttcacatacagatatccgttctttacgtaagtgctttgacattggtagaggtaagcatatctctcttactgctgaagaattaaaggaagctgctaagaattctattggctttccttctactgcagatgtcatccaaatcaaacacttagttgcacagattgaattgatcaatgagcaaatcgctgagatagataaaaaaatagaagagttctcaatccaaaacaactctcctatcctaaccatcccaggaatttctcatttctctggtacttcgattttagcagaattaggagatatacacaactactcaaagccttctcaaatcatcaaatacgcaggtgtagcgccattaacgtatgaatcttctcagtttaccgcacaacacactgcaatcaccaagaaaggctgtaaatacctcagaaaaactctgtatcagatcatcacaccagttattcaatacaaccctgtatttaaagaattctatcaattaaagatatcacaaggaaaaggacaccgatgtgcacaaggtcattgtgttagaaagcttttacgagtgatttatcacttactaaacacaaacacacaatttgatcctgcactattgcgatgaacatagaaacaaatgaatccaaaatcaatgcttcatctgaagttgttttcatcatgcctgaatattcacattttcaaagaacagatactctagcatctaactttattaacagattccatttttaaacttttccatcaatatctgttgacttttatatagttag

SEQ ID NO: 2063 - DNA, 1436 bp, unidentified
  source 1..1436: mol_type = unassigned DNA; note = element_2d69c17
  misc_feature 1..2: note = core
  misc_feature 3..119: note = LE
  misc_feature 120..1154: note = CDS
  misc_feature 1155..1436: note = RE
  misc_feature 1189..1390: note = bridgeRNA
agatggggtaatcggctggcgttaattatgtggaagattgtgggtgctgcgcttcaggctgatggtgaaacgaggtcaccgtggttacgggcctcaagcatcagaaggagaagcgcagcatggaccattttgctggactggacgtatcggtcaaggagacgagcgtctgcattgtggatgacacaggcaggatcgttcgggaagtgaaggtggcgagcgagcctggggctctgctgcaggagctcgcgaagtccgcctaccggttcaagcggattggtctggaagccgggccgttgtcgcaatggctgttcagtgggctcgccgaggccggcttgccggtaatctgtgtcgagacgcggcacatgcgggcggttttaaaggcgcagatcaacaagaccgaccgcaacgatgcacgcggcatcgcgcagatgatgcgagcggggctttatcgcccggtgtatgtgaagacgctgcgcagccagaagctgcgcatgctgctgacccaccgcaagctgctgcagtcgaaggccattgccatcgacaacgacctgcgcgggaccttgcgcaacttcgggctcaaggtgggtgtggcgggggcggtcaagtttgaggcacgcatcagggagcttctcggcaacctgcccgatctggccgcgctggtcgaaccgctgctcattgtccggcgggtgcttcgccagcagctcggcatcctgcaccgccgcttgctggccatcgtccgggacgatgaggtgtgccggcgcctgatgacgatccctggcgtcggcccggtggtggcgctgacctatcgcgccaccgtcgatgtgcccgcccgtttccggaactccaaggcggtcggggcggtgtttgggctgacgccgtccacgcatcaatccggcgagagcgagcgcaccggcggcatatcgcggtgcggggacgagatgatgcgggtcatgctctatgaagcggcccagatcctgctgacgcgttcggcaaaatggtcctggctcaaggcctgggcgatgcagatcgccaggcgccgcggactgaaaaaggcgatcgtggcgctggcgcgccggctggccgtcatcatgcatcgcatctgggttgatggcaccgagttctgctggacccggcaagagcctgcagcagcatgatgacgatgcaagatcaagcctgataggagaaactcgagctccaccgtgcggtggaatgatgtccctcgcgggacgatggatgaggcgagatcgtatgtccgcttgaacctgccgtcggtctgacggcaaggccgccccttagattggtccgcttcgttctcgaatcccatgctggaagggccttggtgccgattccgaagagaagcacgagcccgtgagcgacatcgacactggtgtggtggatagtctgaaagcgcttgaccccaaccggccgattagaga

SEQ ID NO: 2064 - DNA, 1415 bp, unidentified
  source 1..1415: mol_type = unassigned DNA; note = element_2d6f62f
  misc_feature 1: note = core
  misc_feature 2..242: note = LE
  misc_feature 243..1058: note = CDS
  misc_feature 1059..1415: note = RE
  misc_feature 1182..1406: note = bridgeRNA
taatgagatggtccgccgccgagtaggataaccggctcggcagttttacataaggaggatcatcgtatgcgcatcgcatccattggcatcgatctggcaagaccacttttcacctggttgcattgggagagcgtagcaaggttctgcttcgcaagaagttctcacgggcacaactgttggcctataccgcgaacctgccttcatcactcatcggcgtggaggcctgtgcaggagcgcactgcatgggagccgcgttgcgagagcaagggcaccaagcgcggctcattcctgcccagttcgtaaagccctaccggaagtcaaacaagaacgactttctggatgccgaagcgatcgccgaagccgtgaccaaggagaacatgcgtttcgtggcgatcaagacccaggatcaactcgacctgcaggccatacatcgcgtccgtgaccggctggtacaacgtcgcaccgcactaatcaacgagattcgcggatttttactcgaacgcggcatcagcttcgcggcagatcccatacacctccgcaagaacctccccggagtgatggaagatgccgagcagaatctgagcccgcgcctacgctggctgctggaacgcatgtggcaggagtcgaagcagatggagatcgacattaaagcgatcacggatgagatagagcgaatcagcaacgaggacgcactctgccggcgtctgcgccagatccccggcttcggtccgctggtctctaccgcaaccgtggccgccatcggcaacggggctgcctttcaccggggacgcgacttcgcggcctgggtcggcgtggtgccacggcagtactccaccgggcaagcaaaagctgttcggcatgagcaagcgtggcaatgtctatctgcgtcgcatgctgatccacggagctcgtgcggtactgtttcgcatcaagtacgacactggagggttcgggcagtgggtgcaccggctagcgcagcgtgctccacgcaacaaggtcgtcgtggccatcgccaacaagttggcccgcatcgcctgggcggtgttgtccagcggtaaaaactatcaacatcagccgctgcagatgatctgcagcctgatggccgtggaaaagacgctgcgcttggaaagcgcagaacgctttccacttttccaccgccacgacggcgaacttgaaccacgttccaccacggtctgcggagcagagaaggagacgaaagaacagtccaacggcgtgtcggaaaacctggtcgcgataatgcgtccctcgtgaccgagcgatttataaggaccgacacgtgcggatcatcatcaagtgtccggagagcgattctccaccaagaggccggatacatttacgcggactgtccctttgtccaacttcaaacctcttgcagtccggcggcggaccataca

SEQ ID NO: 2065 - DNA, 1389 bp, unidentified
  source 1..1389: mol_type = unassigned DNA; note = element_2d738aa
  misc_feature 1..2: note = core
  misc_feature 3..90: note = LE
  misc_feature 91..1107: note = CDS
  misc_feature 1108..1389: note = RE
  misc_feature 1146..1387: note = bridgeRNA
cgatgagatggtctcctccctcctttaaacggcgtcgcaatgcgccaagatggaagtacgaacaaccatcgaacgaggagagagaagaccatggctaagattacgacgattggactggatctggcaaagcaggtgtttcatgtggtgtgttgcgatgcacggggcaaaatggtgaggaagcggatgctgcggcgtgcccaggtaggggcgtattttgcgcaattggaagctgcactggtgggcatggaggcgtgtgcgagtgcgcaccactgggcgcgcgagcttgaggcgctgggtcacacggtgaaattgctgccgccgcagtttgtaaaggcgtatgtgcgtggcaacaagaatgactacaacgacgccctggcgattgccgaggcggtggtgcggccggaaatgcgcggggtagcggtcaagacagcggcgcagcaggatatccaggcactgcatcggctgcgtacacagtgtgtggcgtcacgtacggcgctgtgcaatcagttgcgcggcctgctgggcgagtacggtgtggtgatgccgcaaggcgtgcgtacgctcaggcgtcggctgccggaggtgctggaagcgggcgagaatggcctgagtgatcttttccgccgtctgctggcaaacggttaccagcgcttgcaggagcttgatcgccatattgatgcttacacggcggagctggaacggcatagccaggaggaggatgcgtgccaacggctgcagacgatcccgggtttcgggccgattgtggcgagtgcctttcacagcgccgtgggggatggccagagctatcggcgcgggcgtgatgtctcggccgccttggggctggtaccgcgccagcacagcagtggcggcaagtcggtgctgttgggcatcagcaagcgcggtgaccggtatctgcgcagcctactggtgcatggtgcgcgggcggtggtccgccaggcggcacacaaggatgaccggctgagccggtggatcaacaagatccgggcacagcgcggctacaacaaggccagcgtcgccctggccaacaagctggcacgcattggctgggcggtgttgtacaaccgcagcgtgtaccaggcggcctaaggctggggtagaagccagcagaacgcgtttgtgggaggtaacctgccgaagattgcgaagactcagtgaaccatgatgacaccacaggtcagaccggcgtatcgaaaacctgcacagcccgacggcagcaccagcatgccgataggtcgaaaaggacgatacgcgcgcatttcatcgaggccagaggacaaatgttcctcgccaacaggccggatatacggaagcaatcctgtccctgtcacctgaatcactcagtcttgcaaaccgggaggagaccatata

SEQ ID NO: 2066 - DNA, 1434 bp, unidentified
  source 1..1434: mol_type = unassigned DNA; note = element_2d77968
  misc_feature 1: note = core
  misc_feature 2..175: note = LE
  misc_feature 176..1420: note = CDS
  misc_feature 1421..1434: note = RE
ctactagagacttcccgcaggaccggtgtctggccagactcggtccaggtgtccggcggaacgctcaattttgggctgcccacctgcttgcgggtgtggctctatttcggtttgcgaccgccgggcaccgtgacgaggcgtggctcaagaggggactgccctgctcgtagtagcaatgcccacctcgccgtcctatcgattctcgggccgagaggaagaggcattgagcaaggtcatcatcggggtcgatccccacaagctgtccgcgacgatcgaggtgctcgatgaacgcgagagcgtcttgggctcgggcaggttcaccacggacaaggccgggttcgcggcgatgcggaagtacgtgaagcagtggtcggagcgtgagtgggcggtcgagggcagcctgggtgtcgggcggccgctggcgcagcggttgttggaggccggcgagcgcgtggttgatgtcccggccaagctcgctgcccgcgccagactgttggacaccggtcacggtcgcaagaccgacgcccatgatgctcattcggccgcggtcgctgcggtccgcgcgaaggacctgcgggtgctcgcccccgatgcgcagctcgaggccctgcggatgctcgtcgaccatcgtgaccagctgtcgaaccaacgggtggcgacggtgaaccggctgcaacggttgctcgccgagctgacccctggccaagcgaagaaggacatcactgccctgcaggcaaaggcgattctcgccagcgtgcgcccccgcgacatcgccgggaaggcccgccgccggatcgcggtcgacgagctggccgcgtgggtcgcgatcaacaagaaggtcaaggagttgaccctcgagatcaaggcgatcgtgaaagagcgcggctccaacctgatggacctcaacggcgtcggtccggtcgtggcggcccgtgtcctggcagatgtcggtgacgtcgcccgcttcgccgaccgcaatcggttcgcgtcctggaccggcaccgcgccactcgatgcgtcctcaggagagcagactcgtcaccggctctcccgcgccggcaatcgccggatgaaccggatgctgcacatcgtcgcgaccacccagctccgctacgacagcgaaggccgcacctactaccggcgcaagctcgcagccggaaagactcggatggaagccatgcgctgcctgaagaggcgcctctccgatgccgtctaccgacaactcatcgccgatgcacgactccacgccgcgcttgatggcacgggtccgggagggcactgcggggcgtctctgacatccagcgcggtcgacctgcccccgcacatcgacacttcggatcagccacttcccggacccgcaacgccgacgctacaaccccctcgccgaccccggaaagccgtcgccctcaaggctggttgacaacagaggggagc

SEQ ID NO: 2067 - DNA, 1458 bp, unidentified
  source 1..1458: mol_type = unassigned DNA; note = element_2d7c6aa
  misc_feature 1: note = core
  misc_feature 2..240: note = LE
  misc_feature 241..1443: note = CDS
  misc_feature 1444..1458: note = RE
  misc_feature 9..241: note = bridgeRNA
cgttaccgttttcgtggccccgcaatggggttcccggtctccgggtccggcatgacttgcgccccttgtcgatcatggtcgaaaaagtggtgtcaccggctccggaggcatcggcagaccgctgatcaggggcatgaccgctcaccgagctcgtcggggtgaagcaggccttcgtaacgtggatgccggcacgctggtgccgcagatgaggccgggaaggaacctgctggggaggggtgcgtgggcggcgaggacaagattgatgtctacctcggtctggacgttggcaagggcgagtatcacggcaccgccctgactccggcgggcaaaaaagtgctcgacaaaccgctgcccaacagtgaaccgcgattgcgtgagctgttcgagacactgcaggccaggcatggaacggtgctggtcgtggtggaccagccagcctcgattggggccctgccgctggctgttgcccgcaacgccggctgccgtgtcgcctatctgccagggctgaccatgcggcggatcgccgacctatatcccggtgaggccaagaccgacgcccgcgacgcggccatcatcgccgatgccgcccgcaccatgccacacacccttcgggacctggccccggacgacgagaccgtcgccgagctgcacatgctcgtcgggttcgatgacgacctggccggcgaggtcacccgcacaaagaaccgcctgcgcggactgctgacccagatccatccctcgctcgagcgcgtcctgggcccccgcctggatcacccagccgtcctgttcctgcttgaacgctatggctcaccagcccagatacgaaaggccggcaggcggcggctgatatccatgttgcgaccgaaggcaccgcgcgtggccgaacggctcgtcgaggacattttcgacgcactcgacgcacagaccgtcctcgtgcccggcaccgacgctgcggcgttgatcgtccccagcctggccacctcactcaccgccgtgctcgaccagcgcaaactcctcgccgccaggatcgaacaactgctggaggcacaccctctttcacgggtcctgacctctatgcccggcatcagggtcaggaccgcagctcgcatcctcatcgacgtcggtgacggcagaggcttcgccaccgcaggccacctggccgcctacgccggactcgcgcccgccacccgccgatccggctcctcgatccgtggcgagcacccagcccggcgcggcaacaaacagctcaagcgagccttctacctcgctgctttcgcctctctctcgcagccggactcacgcgcctactacgacaagaaacgccgcgagggaaagcaccacgtcgcggccctcgtctgcctcgcccgccgtcgcatcgacgtcctcttcgccatgctccgcgacggcacgttctacgaaccgcccaagatcgctaccgcttgacgaaagccatagggg

SEQ ID NO: 2068 - DNA, 1595 bp, unidentified
  source 1..1595: mol_type = unassigned DNA; note = element_2d9ff80
  misc_feature 1..2: note = core
  misc_feature 3..264: note = LE
  misc_feature 265..1473: note = CDS
  misc_feature 1474..1595: note = RE
  misc_feature 12..284: note = bridgeRNA
ctattacaatatatttggacaaggaagccggtcagccagtccggcttcctttccatctcgtgcctaagctacaataagaggagcaactggctgacccttgactccttgggctttcatgcccgccagaaagactgtcagctatcctcttattgcagcgttcgatttgagcaggttgagccatagagttcgtgtcacccaatagattgaatcggcaatgagaaaaagatggattccggttgcggatgatttattggaggaatgagaatgaactctgtcggcattgatgtctcaaaagggaaaagcatgattgccgtcatgcgcccctttggagaggtggtctgctctccgtttgtagtatctcactcgcccagtgaactgagcaatctggcaaagatgctcaaaagcctggacggcgagacccgcgtggtcatggaggcaacaggcaattaccatttacccatcgcaattgcgctccacgaagcggggatctatgtttctgtagtcaacgctatgctggtgcatgactacgggaacaacacattgcgccacgccaaaaccgataaaaaggatgctattaagctggcaaactatggtcttgaccgctggctgaatctcccgaggttttcgccggaggataaaatccggatgcagttgaaaacctgctatcggcagtaccagcagtattccaagattcagaccatgcagagaaacaattttatttctctgctggatactgtgtttccaggagtaaactacctgttttccagccctgtaagaggggatggcagcgaaaagtgggtagatttcgttggaaccttctggcattgtgaatgcgtcagcgagctgtctcagaaggtgtttgaaaagaaataccagaaatggtgtctcaaacacggctactacttccgtgaagccaaggcgctggaaatttataccgctgcctgcggagccgttggggtgatgccgagaacagaaacaacacagctgttgattacccgagctgttttgcagctgagagctacttctgcagctctggcagagcttaagaaggagatgatgcgtttagctaagtccctgccagaatacccaatcgtgcagaagatgtacggtgtcgggccgacactgggaccgcagctcatggccgagattggcgatgtgcggcgattccactcaaagaaagcgctggttgcttttgccggtattgacgctccaccaaacgattccggacagatcgctggcaaccacaaggctatgagtaaaatcgggtcacccgcacttcgcagaacgctattcctgattatgggtgtgttcctccagaaagctcctgtagacgagccggtgtaccagttcatggacagaaagcgagccgaaggcaagccctacagggtttacatgatggcttctgcaaataagttcctgcgcatctattatgccacagtgagggcatacctcaacgctttggaagcagcataatcctgtgcatatgttactggctggccgccgtttcaaaaaagagatgcgaagcggcttagattggtgcacccattttgcgctgcaaattttctgatatttctacttgacttttattagcaggt

SEQ ID NO: 2069 - DNA, 1424 bp, unidentified
  source 1..1424: mol_type = unassigned DNA; note = element_2da15f6
  misc_feature 1..4: note = core
  misc_feature 5..207: note = LE
  misc_feature 208..1410: note = CDS
  misc_feature 1411..1424: note = RE
  misc_feature 1..194: note = bridgeRNA
ctccgtaagttgttgggtggcccgggagggccggatgtggcttatggctccttgccgttcgtggctccccaggagtggccgtccggctctccggggcgccctgactgctgattgagatgtgcgcgccgtgtgcggtcgctgattacggagatgacagcggggtgttcctcgggccgacggcatgtcgtgcggaacgaggaggggcgagtgagcgagcgacaggcccaggtctgggccggtatcgacgcgggcaagggccaccactgggcgacggtggtcgacgagaccggcgccacgctgtggtcgaagaaggtcgataacgacgagtcggcgattctgaccgcgctcggtgagatcctcggcctggcggacgaggtccactgggcggtggacatctccggtacgtcctccgcgctgctgctggcgctgctggcggcgcacggccagcaggccgtctacgtgcccggccgcacggtcaaccgcatgtcgggcgcctaccggggcgaagcgaaaaccgacgcccgcgacgcctacgtcattgcggagaccgcacgtcagcgccgtgacttcgccactatcgacgtgcccgcccagctcgccgccgacctcgcgctgctgaccgcccaccgctccgacctgatcgccgaccgggtgcggatgatcaaccggctccgcgacgtgctgaccggtatcttccccgccctggagcgggcctttgactactccgcccacaagggtgcgctggtgctgctgacgggctatcagaccccgaccgccctccgccgccgcggacgcgcccggctgacagcctggctggccagccgcagcgtccggggtgccgacgcggtcgcggccaccgccctggaggccgcgcaggcccagcagaccgctctgcccggcgaggacgtcgccgcacagatcgtcgccggccttgcggtgcagatcctggctcttgacgaccggctcaagcgcatcgacaagcaggtcgcgaccaccttccgcagccacccgcaagccgggatcatcgagtccctgcccggcatgggccccatactcggtgccgagttcgtcgtcgccgccggcgatctcgcggcctacaacgatgccggccacctggcgtcggcggccgggctggtgcccgtcccacgcgactccgggcgccggacgggcaatctgcaccggcccaagcgttacagccgccgcctgcgccgggtgttctatatgtccgcgcagacgagcatcatccgcgaggggccgaaccgggacttctacctcaagaagcggaacgaaggactcaaacacatccaagccgtcatcgccctggcacggcgtcgggccagcgtcctgtgggcactcctgcgcgacaaccgggtcttcacccccgaactgccagtcacgcaggcggcttgacttcgtcattgaga

SEQ ID NO: 2070 - DNA, 1455 bp, unidentified
  source 1..1455: mol_type = unassigned DNA; note = element_2da1b81
  misc_feature 1..2: note = core
  misc_feature 3..245: note = LE
  misc_feature 246..1448: note = CDS
  misc_feature 1449..1455: note = RE
ctcctaccatgagttcgtgtataagactctttaatctggtattgtaagctttaagaatgaactatggaaaggcaggaggacttactaacttcctgggtcgatgaatccttactacagtctgtcccatgccttcccaaaccatgataagttgattggatcattgaatccttgttacgatggaggattggttggggaggcttcggtactctgcttttcccttttttacggcaaggagtattaataacatgaataagacatcattttgcggttttctgggcattgacatttcaaaagacaagtttgatgcctattgcatggacatgaagggagagaagcatttttatatttcatgctctatggacagaacggggtttgaaaaattaatgagccgcctggagatattacctatctccaaggagggccttctgatcggcatggaatcgaccgcctgctatcacatgaatctgttttcgtttcttcttgtgagcggatatatggccgtcatcatcaatccattgctcatttctaactttgtaaagatgcagctacggaagacaaagacagacaagaaggatgctttcgtcattgcccattttttatctatgtatgcggatgggttgattcaatcaagtgtttcaactcacatttccgatcttagagatctgtctcgtcagcgggaaagcctgctcagtcagatgacagcattgaagtgcgatatgaagcggatattgacaattgtctttccggagctggagagactgacaggcgttttcacgaagtccattctgaagcttttgggccgttttccatctgcccatgccattgtgcaggcagaccccgcagagataactcaacttctcatcgatcattccatgggaaaaaactctgcaaaggccgctgagatcataatcaaggcggcccgttcttcagtcggtacgacgagtccagcaagggaagtgatcctcaagcagaaggcagaagtgttgattcatcttgatgggcatctgaaagaactgacggcattgatgattgagctgtgccgttcggatatgggtgatgacattgagatcatgacttctctccggggtattggtgataaaacggcaacaaacttccttgtggagatgggaggtgatatccgaaagtttaaagatcacaaaaagctgattgctatggcgggaattgatcctgcaatataccaatccggcaaacatgatgggcaaggtaggattaccaagcgaggaaaccgtcatctcagaagggttgtctggcttatgagcataaaggtcatccagttcaacgactttttccgcaattactataagaagagaatgcaggatggacttcccttcaagaaggcggttcttgctaccgcgcataaacttctgaggattatttttgccatgctcacgcaaagaacactatttcgctgtgtggtgaactcatgatagttga

SEQ ID NO: 2071 - DNA, 1572 bp, unidentified
  source 1..1572: mol_type = unassigned DNA; note = element_2da463d
  misc_feature 1..3: note = core
  misc_feature 4..239: note = LE
  misc_feature 240..1460: note = CDS
  misc_feature 1461..1572: note = RE
  misc_feature 12..259: note = bridgeRNA
tttagtaccataaatagtgtaagaaagaggaaactcttacttgcactatttttatataatgaaaaggtagtatgacgaggctctttttggattatagatatccgtcacaaaaactgtcatctaccgattcattatcagtattcgattaagcaggttggacaaaaagtccgcgtaacgagctaaaatgaatggaaatgggtgcaggtagaaactacaaataataatgaggaggacaagggatgatttctattggcattgatatttctaaagaaaaattcaccgcatgtgcattagagcaaggaaataaagtgatttggaaatcatatgatgtaatgaattccaaatctgaaattgaaaaatttctcagacgaatggcagatgtaacagatgtaagaattgttatggaagccacaggtaaataccatctgcccattttatataccttaaaggcaaatggatactttgtaagcgtagtaacccccctaaagatgaagcaattctgtcgatcaataagttttagaaaagctaaaaatgatcggcttgatgccaaacagatagccgaatacggtttaatctactggaacaccctagaaaattacaatctagataatacaaactaccaagaactaaagcatttaaaccgttcttatcaacactacatggaactaagggtctgtcaaatcaattttattgaccatatcattgaccaaacatttcctggcataaaaaaattaattccgcacggctcacaagacttttcgaaagacaagttactagactttcttgaaaaatggtggcataaggataaggttctagaactatcaaaagaagaatttgtaaaaaaatatcaaatctgggcaaaagaaaagagataccatccgaatacacaaaaggctaagtccatctatagccttgctcaggaaggtatctccactcaaccctctaacagcccatatatagaagcggacgtacaagagagcattaagctggttaaaggaattaaccaaagcttacatcatatattatcacaaatgatcgaacttgccgagccattagaagaatatcaagaagcaaaaaaattttcaggaatatccgataaattagccgttcaaataacggcggaatttggagatttaagcaagttcaggaataagaaatgcctaatatcctttgttggaatagatgccccgccctatgaatcagggaacttcaaagccacccaacgaaaaatatcaaaaagaggaaattcaatcctgagaaaagtcggctaccaggcaatgaaatgcatgatgagtgcgaaaaatcaagacaatgagatttacttatacatgataaagaaagaaaaagaaggaaagccaaggaaagtatgtaaatttgcaggtttgaataaatttctgcgaatctattatgcaaaagtcatgcaagcaaagttgagaacggagcaaagaaaagcagcataaacttcaaataaaacaaattacctagctgattttattgattttaatcagcttttttgtcatgcacaaaaaacaaaagtcaaagtgaaaaaacaccttgacttttgttagcagg

SEQ ID NO: 2072 - DNA, 1148 bp, unidentified
  source 1..1148: mol_type = unassigned DNA; note = element_2da4e27
  misc_feature 1..2: note = core
  misc_feature 3..193: note = LE
  misc_feature 194..1132: note = CDS
  misc_feature 1133..1148: note = RE
  misc_feature 35..202: note = bridgeRNA
cttgtatgtcgggaaaggagcattgtgagggctgacaggggctgagtcgtcatagctcagcccccgtcgcgactggaagcccgcaggcgcctcggatgtcaaaccgcgattgagcttggtgctccagtcgcttcttccatgcccgaacagttgccagggcacgagcccgcatcagcaaggatgggatacgaagatggccatgctctctttttgcggtatcgacgtgtcgaaggaccgcttggacgtggtggtgctgcctgaggggtggttcttttcggtgagtaacgacacagccggctgggccgagctggtcgcaaggttgcgcccgctcacagtctccgcgattggccttgagccgagcggtggttacgagcgcgggatcatccgtgccctgctcgcggcggggctgtcggtgcgacgtatcaacccgaacaagcttcgtcagttcgcccgcgcccgcggcgtgctggccaagaacgaccgcctcgatgcacggctgatcgcagagtacgtcgcgatcatgccgacacgagttgtgcagcgggacgctgcggtcgaaaaactcgccgagatcgtgaccatgcggcgacagctgtgtgacgagcatgttgcggccgagaaccaggcggctcatctcgaagatgccatgctcaggcggctcagcaaacgacgccagatacgactggaggccgatatccgcctcctcgacaagcgcctggccgagatggttgccgccaatggtgctctcgctcagcgctatgatctgctgacctcgatgccaggcgtcggcccggtgctggccttcacgctcatcgccctgttgccagaactcgggaagatgagccgcaaacagatcgccgccctcgtcggcctcgcaccctatgacttcgacagcggcaagcttaagggacaccgcagcatctacggtggtcggatgtcggtccgtaatgtcctctacatggccgccctcagcgcgagccgatacagtcccgccctcaaaaccttccacaatcgcctcgccgacgccgacaaaaaatccaaggtcatcatcgtcgccgtcatgcgaaaaatgatcacaaccctcaacgcgatgctccgcgatagtgctgcatggcagccgcgatccgcctgagccaacaacacagttg

SEQ ID NO: 2073 - DNA, 1510 bp, unidentified
  source 1..1510: mol_type = unassigned DNA; note = element_2da82a9
  misc_feature 1..2: note = core
  misc_feature 3..251: note = LE
  misc_feature 252..1490: note = CDS
  misc_feature 1491..1510: note = RE
  misc_feature 6..244: note = bridgeRNA
ctaatggcttctgccgggactgtttggcaggctcggttctggtagcggctggcgggtcagcactcccgggcaccgatcttcgttggaggtcttgcaacagaccgtgcgcccgctggtcgtgaggaggcgtaaccgctgctgggatgtcgtgccccgggcgttgttgtcggtgagcacttgaccattaggacgctggatgtctcctccacgctgctgatctatgaccatgaccaagcgtgcgggaggttgcggtgttgttcgtcgggaacgactgggctgagggtcatcacgatgtggagatcgtcgatgagcagggccgccggttggctcgtagacggttaccggaaggtctggaggggatcacccggctgcatgcgttgatcgcgcagttcgttcccgagcagtgggctgagcttgaccctgccgaggcggcatctctggtgaaggtggggatcgagaccgagcgtggtgcgtgggtggcggcgttgatcgcggctggctatgaggtgttcgcgatcaacccgatgtcggtggcccgttaccgggagcggcattcgacctctggtgcgaagtctgatgccgccgatgcgcacgtgctggccgagatcgtgcgtctggaccgcgcacatcaccgctcggtggccggggactccgaactcgtcgaggcgatcaagctggtggcccgcagccaccagagcctggtctgggaccggacccggcacgtgctgcgtcttcgtggggtgttgcgggagttcttcccggcagcgctggaggccttcgccgatctggatgctgccgacaccctcgagctgctcgcgttcgcgcccgacccggaccgggccgcccgcctgtcgaaggcgaagatcactgcggcattgcggcgggccaaccgccgcagcgtcgaggacaaggccgcgcagatccagtcggtgctgcgcgcgccggcgctgcgccaatccggtcaggtgcagtcggccttcgcagtgatcgtgactagtcaggtccgcttgatcagcacgctgaacggcgagatcgcccaactgggcgaggtggtggccgaccattttggccggcaccgggacgctgagacctacaccagccagcccggcctcggtgtcatcctcgcggcccgcgtcctggccgagttcggcgacgacgacacccgcttcgccgacgccaaggcacgcaggaactacgccggcacctcaccgatcacccgcgcctcgggcacccgcaagattgtgctggcccgctacgcccgtaacagtcggctcggcgacgccgtccagcaatgggccttcggctcactgaaaggatcccccggcgcccgcgcctactacgacgcgctccgggcccgaaacatcggccaccaggccgcgctacgtcaactcgccaaccgcctcgtcggcatcctgcacggctgcctcaagaccggcaccctctacgacgaaaccaccgcctgggcacaccaccacaccgccgcagcttgacatcaaaaatcctgggatgt

SEQ ID NO: 2074 - DNA, 1502 bp, unidentified
  source 1..1502: mol_type = unassigned DNA; note = element_2daea0f
  misc_feature 1: note = core
  misc_feature 2..263: note = LE
  misc_feature 264..1478: note = CDS
  misc_feature 1479..1502: note = RE
  misc_feature 12..239: note = bridgeRNA
ccccgttatgtttttggtggtcccgcaacgggaccactggcctgcgggcccggcatgactgtcaacccgtgtcgaagacatgatctgaagcgtggtgtcaccgggcccgtcaggtgccgtcagagccgctgatgagaggtctggccaccgcccggccgggcgcaatgcccagccaccccaaggacggaaggcctgcataacgtggatgcgccagcacgacaccccgcccaggccagaggcacccacacccctggaaggccacgatgaccgataccgaccacatcggagtgttcctcggcctggacgtgggcaagagcgcccaccacggccacggactcacccccgccggcaagaaggtcttcgacaaaccgttgcccaacagcgaaccgaagatgatggccgtgctcgacaagctcaaagccaagttcggcaccgtgctggtggtcgtggaccagcctgcctcgatcggggccctgcccctgaccgtggcccgccagtccggctgcgaggtggcctacctgcccggactggccatgcgccgcatcgccgacctctaccccggccaggccaagaccgacgccaaggacgcggccgtgatcgccgaggccgcccgcaccatggcccacaccctgcgctcgttggagacaaaggacgaaatcaccgcggagttgaccgtcctggtcggcttcgaccaggacctggccgccgaggccacccgcacctccaaccgcatccgcggcctgctcagccagttccaccccgccctggaacgcgttttgggcccgcgcctggaccacccggcggtgaccaccctgctggagcgctacggctccccctcagccctgcgcaaggccggacgctcccgcctggtcgaagtgctgcgccccaaggccccgcgcatggctgcccggctggtcgaggacgttttcaccgccctggatgagcagagtgtcgtggtgcccggcaccgacaccctggacctggtggtgccctccctggcccggtccctggccgcggtgcatacccagcgccgccgcctgggtgagcagatcaaccagttgttggaggcccaccctctttcgcaggtcctgatctcgatgcccggggtcggggtcaggaccgcagccgtgctgctggtgactatcggggacggcactgcctttcccagcgctgcccatctggcttcctatgccggcctggcgccggccaccaggagctcgggcacctctatcagcggtgaacacgccccacgggcagggaatcgccagctcaaacgcgccatgttcctgtcagcgttcgcctgcatgaacgccgatacggcctcgcgcacctactacgacaagcaacgcagccgcggcaagacccatacccaagcgctactgcgcctggcccgccaacgcatcaacgtgctgttcgccatgctgcgggacggcaccttctaccaatcacgcccaccagcggtcgatctggctgcgtgaggggcttgacgaaaaacatagagg

SEQ ID NO: 2075 - DNA, 1382 bp, unidentified
  source 1..1382: mol_type = unassigned DNA; note = element_2db412c
  misc_feature 1..2: note = core
  misc_feature 3..85: note = LE
  misc_feature 86..1120: note = CDS
  misc_feature 1121..1382: note = RE
  misc_feature 1151..1370: note = bridgeRNA
tgatgctgtggacggctcctccaccggcacgtgagtgccatgaaaatgggtgctgttaaggccccacgattcagaggagccaatcatgcaagcagtatttaagacaatcggtctggatatcgcgaagtcggtttttcaagtgcatggcgttgatgctgatggccaggtggtcattcgccgcaagttgaagcggcgctatgtgttggctttctttgcgaaggtgccgccatgccttgtcgggatggaggcctgcgcgacctcgcatcattggtcacgggaactgcaggctcttgggcatcgggtccgcctgatgccgccggcctacgtcaagccctacgtcaagcggcagaagaatgatgccactgacgccgaggcgatctgcgaggcggtcagcagagccaacatgcggtttgtcgagaccaagacggtagagcagcagagttgcctggtgcttcatcgcacacggcatctgttcatccgtcagcagacctcggtgatcaatgcaattcgagcccatcttgccgagttcggcatcgtcgcgccggtcggacgcaaaggcgttgaacaactgctcgatgtcgtcgccaatacagaagaccaacggatcccggacgtggcgcgcgcgtgtgtcgcggctctgggtgcgcaactgcgggcgctaaaggcgcagatcctggagttcgatcgtcagatcatgatctggcatcggtctcatgagacgagcaaacggcttgatgaggttccgggtgtcggtccagctctggccacggccctggttgcgagtgtcgccgatccgaaggccttccggtcagggcgtgacttctcagcgtggatcggactggtgccgaagcagcattcgagcggcggcaaagacaaactcggcagtatcagtaagcaaggtgaccgctatctgcgcagcctgttcgtggcgggcgcgctggctgtgatccgctacgccaaaatctacggcaccaagcatcggccttggctcacggcattgttggcgcgacgcccgaccaagatcgccgccattgcgctcgccaacaaactcgcccgaatggtgtgggccatgatgaccaagggtgaacgttacaaggaaccggtcgcgctggcggcctgaacgagatcgcgccggccatctggcgtgatgtgaaggttggaaagggcaaacagcacgtaatgcagacgagtcgattccgtgatcgggacaacccacttgggccagagcatcaatcgaatgcgagcttttgaccgggacctgatccgcgaagggcattatggccagcggcccggtgtgccgcactcaaaggccgaacacatggccgcaccgaccaatgctgcaacgtgaagaaagttcttgccaacccggagccgtccacaca

SEQ ID NO: 2076 - DNA, 1358 bp, unidentified
  source 1..1358: mol_type = unassigned DNA; note = element_2db5655
  misc_feature 1: note = core
  misc_feature 2..73: note = LE
  misc_feature 74..1114: note = CDS
  misc_feature 1115..1358: note = RE
  misc_feature 1133..1349: note = bridgeRNA
taatgggatggtctgctcctccctctgatatctatactcagcaagggagatcgcaaaaacaaggagaccgaccatgtctagttcaaatgtgcatatttacggtatcgatcttggaaaaaactggtttcacatagtagcaatggaccgtcaagggcatattctctggcggaagaagcttaatcgaagccaacttaaaacctttgtgattaacactccacctacaattgtagcggttgaagcttgtccgggctctcaatactggggaagattgtttaatgatgcagggttctcagtaaaaatcattcccgctcagtttgttaagccgtacttaaaatcaaacaagaatgacttcaatgatgctgccgcaatcgctgaagcaggcagccgtggcactatgcgctgtgttcccataaagacacacgaacaacttgccttgcaagcgactcatcgagtgaggcagcgttttattgttgagcgcacagcaacagtcaatcaaatgcgggctttactacttgagttcggcattacagttcctgtaggtcgcaaagtttttgaacgtaacttacctagcatattggaggatgcggaaaatggactgcctgattttatccgtgctttagtgttccgcttacgagagcgttggcaatatcttgatgttcaaatcgatgagatgagtgagcaactacaacaggcctcaattgcgtcagagaaatgccaacttatatccagcattccaggtattggcccaattgtcgccactgggttaattgctgcggttggctcaggcactcaatttaaacgaggccgagatatgtctgcatggttaggcttggttcccagacagtactccacgggtgggaaaagcaaccttggtggtataagtaaaagaggcaacgtttatctacgccgtcaggtgatacaaggggctaaagcattaaagatacacatgaagcgagataaatccgcactcgggcagtggatagccaagttggaggcgacacatcatcaccatgttgttttaattgccttagctaacaagataatgagaatttgttggaaggtattgacctcagggcaggagtatcaaccttatccagcttcggctacgaaatagcatacaacgaattataatttccatagattttgcgagagacaagctgatgacagaagcgttaaacccacgatgttaaagcctggctaaaaaagcagtcttttatgactgagcgctttattaggacaacaacgtgcggatcccatcaaggccagaacactagatggttcacaaacaggccggatacattgacgcaaacgtattctgacagcgagcttttacttgcaaaaacagagcagaccataca

SEQ ID NO: 2077 - DNA, 1606 bp, unidentified
  source 1..1606: mol_type = unassigned DNA; note = element_2dc78e8
  misc_feature 1..2: note = core
  misc_feature 3..277: note = LE
  misc_feature 278..1498: note = CDS
  misc_feature 1499..1606: note = RE
  misc_feature 16..300: note = bridgeRNA
ctcctaatataaaagtgtagtggttatactccccaacagccagttgagagtatagtcctctcattgcttaggctgttagaatgtagtggcattggtttggacgggcacctccttggacttagcgtccgtatgaaagtctgtctgccaaccactcattcgcagctgttcggtttacgtagattgaaccacgtcttgtgcgttcgtttgatacccaggagattgaataagcgatgaggaacggttgacccactgcaaatctatcttcggaggtatatctatgttgaatgctgttggtattgatgtttcgaaaggcaaaagctctgtcgctgtcctgcgtcctgctggagaggttgtgcgcaagcccttcaatgtttctcattctgtcaaggaactctccgaactggtctcttatgtcggatgtcttgatggtgagaccagagtcgttatggagacaaccggtcattaccatgaacctgttctcaaagcctttcttgatgccggtatctttgtgtctgctgttaatcccagcttaatcaagcatcatgacagtgatgaaaatcctctccgcaaagtcaagtcagatcctgccgatgcgaagaaaatcgccaagtatactcttgacaagtgggaatatctgcgtcagcattcagccatggataatactcgaacacaactgaaaacattaaatacgcagttccacttcttcatgcagcagaaggtcgccctgaagaacaaccttatctcccttcttgatctgacataccctggcgcgaacgctctctttgacagccctgtacgctctgacggaagcgagaaatggattgattacgttcactccttctggcacgtggactgtgtccgcaaaatcggcttaaaagccttcacagagcgttatcagaacttctgcaagcatcacggctataacttccaacctggcaagccggaagaacttttcaatgcttcgaaggaacttatcgccgttgtacccaaggatgcggtatacaagcagttaattctcagtaacatcgagcagctgaatactgtctccaaacagatcgaggaattccggcgcaccatgaaccagcttgcatccatactcccggaatacaacaccgttatgtccatgtatggcgttggtcccacttatggtcctcagcttatggccgagattggcgacatctctcgcttcgatcatcgctccgccattacggcatttgcaggtgttgatccgggtgttaatcaatcaggaaccatgaactatgagagcaaccgggcttcgaagcacggggctccgcgtcttcgcaagacactctttcagatcatgagtaccttgcttcaacttgcaccaacggatgaccctgtctatctcttcatgatgaaaaagaaagccgaaggaaaaccatatcaggtctacatgactgccggagcaaacaagttcctgcgaatttactacggcaagattaaggagtgcttagcttctcaaccgtccgaggtttaacagttactttcattcttttgctgaccagcgatatcggtggtctttttgtgatacctccatttctgtctactaatttttcaaatttccgcttgactttttattagtaga

SEQ ID NO: 2078 - DNA, 1695 bp, unidentified
  source 1..1695: mol_type = unassigned DNA; note = element_2dd616f
  misc_feature 1..3: note = core
  misc_feature 4..270: note = LE
  misc_feature 271..1428: note = CDS
  misc_feature 1429..1695: note = RE
  misc_feature 17..244: note = bridgeRNA
cttgtataatatatttaggtttttaaaaggttacccataaacctttatataacaattatttcatgatataattgttatgttaacactgtggattcttatttctccttgtagctttgactacttaggaaagaatattgccacagttttattattaattggtaattagttagataaaactttgatttttcatttcacgcaaggttacaagtaataaaactagttgggtgttgtcacagttgttgataaattttattacaggaggtaaacactatggtttacatcggcattgatattgccaaatttaaacactttgcgtctgttgttagctcagatggtgaagttatcgtaaaaccttttccttttgaaaattctcgtcagggttttatggaattagttgaagaaattgagaattttcaagactgcttaattggtctagaatcaactggtcactatgcagaaaatcttatctactttctatatgaacgaggttatcgaattggtgttattaatccaattcaaactgatgcacttcgtgattctaatattagaaaaacaaagaccgataagattgacactaaacttattgttcaatgtcttatgcttaaaaaatattcccttgtcaattctcaagatattaatattattaagcttagacgtctttcaagatttaaacttgaaactattgggcagcaaactagaattaaaactcaattaacagcttgtttagatattgtttttctagaactttctagtttttttaagggtaatttgcatttaaaagtttcctatgccttacttgaaaaatatccttctgcaaaggctattgctcactgtagaatagatggtctaactaacttattgtatgacaattctagagggcattacaatcaagataaagccttacagttaaaagaattagctaaacaaagtattggtctagataatcctgccattgaattacaaatacaatgtttaattaagcaattaagattatatcaaaagcaaatcaaagatattgatttagctattatgacactaatggaattactaaattctccaattctcactattcctggtgtcggttatactcttggagcaatgattattagtgaaattggcgacataaaaagatttagcaacccttctaaattgctagcatttgctggtttagatccagttgttaaacaatctggagattttcaagcctcatcaatgaaaatttctaaacgcggttctacttatcttcgctatgcaatttatagagttgcttttcttattatatacaataatgagacttttcacaactactatatttcaaaacgtgctcaaggtaaaactcatagagtagcattaggacatgtttgtaacaagttggttagagttatcttcaaaattctaactgatgaaacaccttttaatttaagctaacataaatttttcaaagtacatatttgcaacatttgttgcttacaactgcttaagtgccatacatctgaatacctgatatatgtcaatacttgattttatatcaatgcattttagtattgacatatatcaagtattcagataaactaattcttacagttgcaacggttgcagaagtttttaaaaaatggcttaaaaacttctatttgttatgcaattttttatctaacaaaaatttttttgaaaaactattgacaattaatagttagt

SEQ ID NO: 2079 - DNA, 1523 bp, unidentified
  source 1..1523: mol_type = unassigned DNA; note = element_2dd856f
  misc_feature 1..4: note = core
  misc_feature 5..259: note = LE
  misc_feature 260..1513: note = CDS
  misc_feature 1514..1523: note = RE
ctcactggtgcaccatccttatgtcggcagttgtgaggctgctgatgcacccgaggtgccaccaggtcaccgccctgctcgcttgacgctgttgacgtccgagatgagttctgcgggatctggtggttacccgggacgcgccgaccgtcaacagggctgtatgcgcaggtgagcgccgaacagtgagcggacaggcagccgcgtcccggcaccgcgcataagggtgcctccccactgggctagcagcgaggaggctgtaatggagtatcccccgaacacgctgcccgcagtcccgccaggcggcgtgacgtgcggcatcgactgggccagcagcgatcacgccgtctgcctgctcgacagggccggccagatcgtgcagcagttcatcgccgggcacaccgctcgcggcctgaccggcctggtgcgccggctgcgccgggccggcgtcggcgaggtggcgatcgagcggcccgacggcaaggtcgtggacgcgctgctggaggccgggctgaccgtggtggtcatcagcccgaaccagctgaagaacctgcgcggccggtacggatcggcgggcaacaaggacgaccggttcgacgcgttcgtgctcgccgacacgctgcgcaccgaccgggccaggctgcgcccgctgctgccagacagcccggccaccgtcatcatgcgccaggcctgccgggcccgcaaagacctggtcgcgcaccgtgtcgcggtatgcaaccagctgcgcgcccacctccagatcgccttccccggcgcggtcggcctgttcgccgacctcgattccccgatcagcctggccttcctgagccgcttcgactgccaggaccgcgcggactggctgtcgcccggccggctggccgcctggctgcaagcccagggctacagcggccgcaaggacccggccgggctgcacgcccgcctggccgccgcgccccgcggcgccaccggccacgacggcaccgccagcgcgcacatcacccgcgcgctgctggccgtgctgaccagcctcgtgacccagatcaaggccctgaacacccagctcgccgagcaactggccctgcaccccgacgcgcacatcttcacctcgctgccccgctccggcaccgtgcacgccgcccggctgctcgccgagatcggcgactgccgggcccggttccccacccccgaagcgctcatctgcctggccggagtcgccccctccacccgcaagtccggcaagaccaccttcgtcgacttccgctgggccgccgacaagcaactccgcgacgccgtctgcgacttcgccggcgactcccgccacgccagcccctgggccgccaggctctaccacgacgccaccgcacgcggcaaagaccacccccacgccacccgcatcctcgcccgcgcctggctctacatcatctggcactgctgccaagacagcacccgctacgacccggccagacacaaagccctccagcgcatcctcgccgcagacacaccagcggcggcttgacacagggcta

SEQ ID NO: 2080 - DNA, 1409 bp, unidentified
  source 1..1409: mol_type = unassigned DNA; note = element_2de034a
  misc_feature 1: note = core
  misc_feature 2..88: note = LE
  misc_feature 89..1129: note = CDS
  misc_feature 1130..1409: note = RE
  misc_feature 1179..1401: note = bridgeRNA
taatgggatggtcgcccctccctaaacggcaccggatgtgccaaagtggagatgtgcggacaaccgcgaaccggaagaggcgactactatgaacattacgacaattggcgtcgacctggcaaaaagcgtgttccaggtgcatggcgtcgacgggcacgggaaggcgggcctgaggaagcagttgaggcgggcgcaggtgctgccgttcttcgccaacctgccgccgtgcctggtcgggatggaggcctgcggcggcgcgcactactgggcgcgcgagctggccaagctggggcacacggtcaggctgatggccccgcagttcgtgaagccctacgtgaagacgaacaagaacgacgcggcggacgccgaggcgatctgcgaggcggccgggcggccctcgatgcgcttcgtgccggtcaagaacgccgggcagcaggcggtgctgtccctgcaccgcgcccgcgagggcttcgtcaaggcgcgcaccgcgcaggcgaacccgatccgggggctgctggccgagtacggcatcgtcatgccgcaggggatcggcaacatcgccaagcgcctgccggaaatcctcgaagacggcgagggcgggctgccgggggtgttgcgccagttgctccagcgcctgggcggccacttgaaagagctggaccggcaggtcgacgagctggacgcgcagatacagcggtggcaccgggacaatgcggcgagccgcaggctggccgcgatcccgggcatcggcccggtcaccgccagcgccctggtggcctccgtcggcgacgccaaggatttcgaggacgggcggcagttggcggcctggctcgggctggtgccccggcaacgctccagcggcggcaagcagaccctgctgggcatcagcaagcgcggcgactgctacctgaggacgctactgatccacggcgcgcgggcggtggtccgggtggcggagcgcaaggccgagaaagccgacggctggctcacacggatcatggccaggcgcaacaagaacgtggccaccgtggcgctggccaacaagaacgcccgcgtcgcctgggcgctgctggcccacgaccgggagttccagcccggctacgcggcggcggccgccgccggtgcttaaaccttaaccaatcgagccgccgcaacacacagaacagagaggaaccactccaccgattgcacaggcaatcatgacgtgatggcaagacaggtcagaccgtgacggggacaacctatccagggcaaggggcatcaaagcccgcgcgattgatcaggagcccgtcagcgaattccatcagggactggggctgcggccccgatcaagtccggatctatggccgcaatcatctccttcttgctaacatcgattgaacgcttggcaaaccgggggcgaccatcta

SEQ ID NO: 2081 - DNA, 1405 bp, unidentified
  source 1..1405: mol_type = unassigned DNA; note = element_2de6584
  misc_feature 1: note = core
  misc_feature 2..89: note = LE
  misc_feature 90..1124: note = CDS
  misc_feature 1125..1405: note = RE
  misc_feature 1175..1397: note = bridgeRNA
caatgggatggacgcccccacccgtaacggcatcaatgtgccaaagtggaagtgtcaatcaaccacttgaaccgagaggagcgtccgtcatgaagattacgacaattggcatcgacttggcaaagaacgttttccaggcacatggtgtgaacgagcacggcaagaccgagaagaaaaggcagctcaagcgcggccaggttgcggagttctttgcgaatctgccgccgtgcttgattggcatggaggcgtgtggcagcgcgcactattgggcccgtaagctggaaaggttcgggcatacggtcaagctgatagcgccacagttcgtcaagccgtatgtgaagaccaacaagaacgacgcggccgacgccgaggccatttgtgaggctgtggcccgaccgaacatgaggttcgtcccgatcaagaacgtcgagcagcaggcggtgctgtcactgcaccgcgtgcgtcagggcttcgtcaaggcgcgaacagcccaggccaaccagatccgtggtcttctcggcgagttcggcgtcatcatcccgcaggggatcaccaacatcgccaagcgggtaccagagctgatcgaagatgcctccaacgatttgcccggttcattccggctgctggtgcagcggctgatggatcatttgaaggaactcgacaagcaggtcgatgagctcgaggtgcagattaaagcctggcaccgtgtaagcgccgccagctgcaagctggagaagatccccggcatcgggccgatcacggccagtgcgttggttgcgagcattggcaacgcgaagaactttgacgacggcagacagctcgctgcgtggctggggctggtgcccaagcagcgttcaaccggtggcaagtcgaagttgcttggcatcagcaagcgaggcgactcgtacttgcgcacgctgctgattcacggcgccaggtcggtgatcctgagcgcctcgaaaaaggtcgacaagggcggctggctgcgcaaacttatggagcggcgcaaccccaatgtggcggccgttgcactggccaacaaaaacgcccggattgtctgggcgctgctggccaacgaacgagagttccggtctgattacacgcccgctcgtgcggtcgcgtaatcagaccggctgaaggaagtaactgcgacagcgcacaggagattcaaaccaccgattgctcaagcgatcatgaagtgatggcaaaacaggtaagaccgtggttggcaaagcccatatcccccggagcaccccgagtgcactttgccgattgaggagccagccagcaaatcccatcagggacagcggccaagagccgcacgcaaagtccgaatgtacgggtgcaatctttaccttctaggcatcatgaattgagaacttggcaaaccgggggcgtccatgta

SEQ ID NO: 2082 - DNA, 1387 bp, unidentified
  source 1..1387: mol_type = unassigned DNA; note = element_2df1b26
  misc_feature 1: note = core
  misc_feature 2..75: note = LE
  misc_feature 76..1134: note = CDS
  misc_feature 1135..1387: note = RE
  misc_feature 1152..1378: note = bridgeRNA
taatgggatggtccggccgtgctcctgccccgccagcgataagctggccaggggcgccaagacaaggagcacgccatgcctgcgacagcacagactgcgatagccgtagtcggcatcgatatcggtaagaactcgttccacattgtcggcctggacgatcgcggcgcaattgcgctgcgtcagaagtggtcgcgcaaccaagtggaggcacggtttgccaacatgccaccgtgcctgatcggcatggaggcctgcgtcggtgctcatcatctcagtcgcaagcttaacgcgctcgggcacgatgcgcggttgatgccggcgaggtacgtgcgcccctattccaaaggccaaaagaatgacttccgtgacgctgaggcgattgccgaagccgtgcagcggccgacgatgaagttcgtggcgacgaagaccgccgatcagctcgacctgcaagcgctacatcgcgtgcgtgagcggctcgtcagccagcgcaccggcatcatcaaccagatccgcgcctttctgctggaacgtggtgttgctgttcggcaaggactgcgcttccttcgaatcgagttgccgggcatcctcgccgcgccgtctgacgccctgtcgccacgcatggtgcacgtcctcgaagacttggccggggactggcgccggctggacgagcgcatcgagggtttgtcgaacgagatcgaggccatcgcgtaccaggatgcgggctgcgatcggctaatcagcgtgcccggcatcggccccatcatttccagcgcgatcgtggcggcgatcggcgcaggtgatgtgttctccaagggccgcgacttcgccgcctggctgggtctcgttcctagacaaatctcgaccggggaccgcaccatcctcggcaagatatcgaaacggggcaaccgctacctgcgggttctgttcgtgcaggcagcatgggtggtgctaatcaagcccaagagctgggagcgccacgggctcaaatcctggattgaagctgccaaaaagcggctgcaccgcaacgtgctggcgatcgcgctggccaacaaactggcccggatcgcctggagcgttcttgcgcacggtcgacacttcgaggcgatcaaacttggcggagcaatcgcgcaatgatgtagcccatacccctcacccgccgaggtctgcgagaggataagaagagatggaggatcggtcttcccggcgcatgcgaacactggtgacccaaatggcccgttgaggcctgtccgctaacgagatcgcaggcgcgctgatatccatattggtccggagcaaacaggctccaatcagagaccggatacattgacgcaagaccgctgacgccagctcgacgaaaacctcttgcgacgcacggccggaccataca

SEQ ID NO: 2083 - DNA, 1446 bp, unidentified
  source 1..1446: mol_type = unassigned DNA; note = element_2df1ccf
  misc_feature 1: note = core
  misc_feature 2..256: note = LE
  misc_feature 257..1090: note = CDS
  misc_feature 1091..1446: note = RE
  misc_feature 61..221: note = bridgeRNA
gctctagtcttgcacggtcgataaggagttgcttccttgtcgagtgatagatcactgaagagaactgagcctggccgtgggtgaaccaactccgcagatagggaacagccctatgagacctatcggtacccatggtcatctcaggtcttaggctcggatagaattgcaggcgtaagggcctattagagtcatggagcatcggacctgtcgctcagcctctccagcgatcgtttgtacaacccaaatgtaactgttgatggaacattggataggcattgacgtgagcagcgcgacactagacttcgcactgctggatggaaaaggcacgcaccttgagagcgtgcaaatagagaacgaccgcaaggcggtgatgaagttgatgggtcagtggagtaagcgtcacggtgtggaggtgggcaagagtttgatctgcttggaagcaaccgggcactacacactgatgatgctgaacctgatcgttgggcagcagtggcatgcttggttggcgcaccccaacgacatccagcagagcatgggtatcaagcgcgtgaagaacgacaaggtggatgccctgcgcatcgcgcagtatgcacgcaccttccatgagaaagccagattgttcacagcacagaacctgaagctggaccggctcaagcatttgatcacacgtaggaaccacctagtgcgtagccgggccaggcataggacacacatcacggacctgaaccgctatatggaccgccagctaaggaccgagttcgatcgcatcgacaagcgacagatcaagctcgaggaccaactcgtggcccatgtggatgccttgatccttgccgagatcaggaccgatccacagaccgaacggcagtacgatctgttgcgcaccatacccggcgttggcccgcagctcgccgcatacctggtggcctgcaccgatggctttgcacgcttcaacacgccgcgccagcctcgtgccatgccggtgtcgcacccttcgagcgcagctcaggcagcagcgtgcgtggccgcacccaagtgtcgcatcaagctgataagtcgctcaagaccttgctgcacatgtccgcgctggtaagtgtgcgcgaacccggtgaactgcgccagtacttcgagcgcaagcgtgctgaaggcaagaagccgatcctggtggtcaatgcagtgcgcaacaagctcgtgcatcgcgtgtgcgctgtgatccggaacaacaggccctacgaacggcgaccgataacaacgacctgaaccactagttgcaactttgtgcatcgcgcccaaacggaagtaggctctgctggagagcaacctgccagggataggcgcgatgaacgacgggcatgaacatgtgtcgggggcacgtcgcccttggcacatgcctggagttcctcatgcctaaaataaactcatcgtaatgcttgcaaatgacatagaata

SEQ ID NO: 2084 - DNA, 1226 bp, unidentified
  source 1..1226: mol_type = unassigned DNA; note = element_2df4159
  misc_feature 1..2: note = core
  misc_feature 3..239: note = LE
  misc_feature 240..1211: note = CDS
  misc_feature 1212..1226: note = RE
  misc_feature 6..212: note = bridgeRNA
cttgtatctcgactatcgctccgtcaggagcgatagttctcgactgatcatcgagggagggacctggaagccgtgcagctccttaggctttttgcctgtgatgtagattgtgctccaaccctccacactcactcgtacagttcgaacggtatcttgggcccgtctttggcgagagcccgcattcacaaggttggacagagtgcagtgatgatcgaaaacggatcaatggagagacgcttatgtccagttttgtcggtgtcgatgtcgctaaaaacacctttgatatcgccactcatctgccaaacggcaaacacaaaaccaaggccaaactggccaacgaccccaagggtttcaaggaatttgaagcctggttgcagaagcaggtcgaaccttcggcgctgatcgtgatggaagccaccagcgtttatcacctggagttagccgagttcgtctacaacaaaggttatcgggtttgtgtggtcaatccggccacgacccatgcctacgctggcagtgaattgcgtcggatcaaaaccgataaaagcgatgccaaactgatcgctgacttcgcccgcgaaaagagtgagaagcttcagctttgggctccggagccgctcaagtatcgccagttgaaagccttggtgcgccgcctggacgatctccaagagatggagcaaatggagcgtaatcgtctggacgtgtccgatgaaaaggttaaagcctcgatcaactcggtgctgcaccatatcgaaaaggaaatcgccgaaacccacaaggcgatcaaaaaacatatcgacgacgacccggatatgcgcgagatgcgtaatttgatcgtgaccattgatggtatcggggaaaaaacgattgagcggctgctggccgaactgggcgacctgcgcaagtatgacgatcctcgcaaactggttgctgccgcagggctgaacccgaagcttcacgactcgggcctgctcaaggggcgcactacgatttcaaaaatcggctcagtgcgtgtgcgcgcgggcctctacatgccaggcctggtggccttgcaacacaatgaggcgatcaaagccatgaaagaccgcctgaaggccaacggcaaggcccccaagcagatcatttgtgcagcgatgcgcaagctgctgcacttcgtttatggcgtgctcaaatcgggccagccttatgacccgaaacttgcgcttgctcggtgaggttcaagacggtat

SEQ ID NO: 2085 - DNA, 1608 bp, unidentified
  source 1..1608: mol_type = unassigned DNA; note = element_2dfdce6
  misc_feature 1..2: note = core
  misc_feature 3..279: note = LE
  misc_feature 280..1491: note = CDS
  misc_feature 1492..1608: note = RE
  misc_feature 13..305: note = bridgeRNA
ctactacaatgtatttatggttaatatcccttacagccagtaaggaattatccatcttgttgcttaagctgttataatgatggagcaatcggtatatcggtttcctccttggacctcgcgtccgtaattaagactgataaccagctcctcattcgcagcgttcgttttatgcaggttgaactgccttcggtacgttcgtgtcacaccacagtagatggaataggcaatgagtaaaactggtacttatccattgcaataatcttaaggagtgacaattttatgaacaggaacgcagttggtattgatgtatccaaaggcaaaagcatggccgctattcttcgcccttatggggaaattgtttcctcgccctttgaaatcaagcatacatctggtaacatccaatctctgattcaacagatcaaatccatcgaaggggaatcccgcatcgttatggagcacaccggccactattacgagcctctggcccgtgaactctctctggcaggtctttttgtgactgccataaatcctaaactcattaaggatttcggagacaattctctccgtaaagtgaaatcggataaagctgatgctgtaaaaatagcccgttacactcttgacagttggacggaattgaaacaatatagtcttatggacgaaatacgcaatcaattaaagactatgaaccgtcagtttgggttctatatgaaacacaaaacagctatgaagaataacctcatcggtatccttgatcagacttacccgggggttaatacttactttgacagccccgcccgtgaggacggcagccagaagtgggttgattttgccgctgcatactggcatgtggactgtattcgtaaaatgtcattaaacgcatttgttgaccattatcagaaatggtgcaaacgtaagaagtacaacttcagcagagataaagctgaagaaatctatggagctgccagggagcttgttcctgtacttccaaaagatgatttaaccaagctgatcgtgaagcaggccatagaacaattaaacactgcttccaagaccgtggaagaactccgcaccctaatgaatgaaacagccgccaagctgcctgaatatcccgtcgttatgggaatgaaaggtgtcggtccgtctcttggcccccagcttatggctgaaatcggagatgtcacacgtttctcccataaaggggctatcactgcatttgctggtgtagacccagatgtcaatgaatcaggaacctatgaacaaaaaagtgttccaacttccaaacgtggctcatcttcccttagaaaaaccttattccaggtcatggactgtctcatcaaaacaaaaccgcaggatgaccctgtatatgcgtttattgataagaaacgtgcccagggaaagccttactatgtctacatgaccgcaggcgccaataagtttctgcgaatctattacggaagagtaaaagaatatcttatgtctcttccagaataagggataccacatcctttcagaccagcggataacggtggtctatttgttgtacctgaaattcaatcaacaataaattttgaaaatttttcattttcctattgactttttatttgcagg

SEQ ID NO: 2086 - DNA, 1379 bp, unidentified
  source 1..1379: mol_type = unassigned DNA; note = element_2e04ae8
  misc_feature 1..2: note = core
  misc_feature 3..79: note = LE
  misc_feature 80..1105: note = CDS
  misc_feature 1106..1379: note = RE
  misc_feature 1104..1366: note = bridgeRNA
cgatggggtggacgctcccactcaacagcaccttcgtgccagaatggtcgtgttgggaccatcacaggagagagcgtccatggagaaggttagtatagtcggcctggatttggccaagagcatcatccaagttcacggtgccagtgttgatggctcggtcctcttccggcgaaagatttcgagtaagaaattgctcgacttcttatcgaagattgatccctgcatagttgcaatggaagcatgtgccggaagccaccattgggggcgcgagattgcaaagctcgggcaccaggtcaaattgatcgcgccgatctacgtgaagccctttgtgaagcgacagaagaatgacgcggccgatgcagaagccatctgtgaggcggcgatgcggccaacgatgcgttttgtggcagtcaaaagtcaggagaagcaggcttcagcgacggtatttaaggtgcgtgaccttctcgtgaggcaaaagacgcaagttatcaatgcgctgcgtggtctgatggcagagtttggcattaccgttccgcaaggccccgcgcatgtcggtattctgatcagtcaagttgaaggggattgctcaagcctgacggaggccgcgcgcgcgccttgcttggcattgattgcaacgttgcgcgcactcatggataaagtccgggaacttgatcaggagattggccgaagggcacgacgggatgatgttgccaagcggctgatgagcattccgggtattggacctgtcattgcaacagcgctcgaagctttagctccgcctgcagagacttttacgcgaggtcgagatttctctgcgtggatgggtttgacaccgcgccagcactcatctggtggaaaagcccggctgggtaaaacctccaaaatggggcagcgtgaccttcgacgactgttgataattggggcagcagcggtcgttcgctgggcatcaaggcgcggagcgatcgaagggtcttggttgtcgcgcatgattggcaaaaagccgccaatgctgatcaccgttgcactcgccaatcggatggggcggattgcttgggcgcttatgacaaacggaggtcgctacgaggagaaaaggctagcagcataagatcacctctggcggagaggacatctcaccgtcattgcgagtgtaggcaggtcgaacgaaggatatggacaaacggtcaagagacgggattaggaaaaccagttctaccggacggcaccttgagtgcgcgtgagcgtgttggacctgatctgcgaactcccatatgggcccgcgacgtttgaggtcgcaacgagaggccggacacacgtcagcacccgaccactgttcaagactgagtgaagattttgcttgcattcgagggagcgtccacaca

SEQ ID NO: 2087 - DNA, 1414 bp, unidentified
  source 1..1414: mol_type = unassigned DNA; note = element_2e0b09b
  misc_feature 1..2: note = core
  misc_feature 3..124: note = LE
  misc_feature 125..1168: note = CDS
  misc_feature 1169..1414: note = RE
  misc_feature 1184..1409: note = bridgeRNA
agatggggtaacgggcggctcctgcgctcagccacttgaggctgggcggtcgtccctcaggatggtggcgtgatcaacctcgacgccggcgttggccgcgtcgctcgtcagccgggagacaagcatgaagcagtacgccgggatcgatgtctcgctggaaagctccagcgtctgtgtagtcgacgcggaggggcggatcctccgcgaggggaaggtgctcagcgatcctgaggcgctgatcgcctggctcagggagcacgcggatccggccgagcggattgggctggaagccggtcccctctcgcagtggctctatgcgtggatgacggctgccgggctgccggtcgagctgctggagacacgccacgtgcgcgccgccttcaagaccatgccggtgaagaccgacaagaaggacgcccgcggcatcgcccagctgatgcggctgggctggttccgtccggtgcactgtaagtcgcttgcagcgcaggaggtgcgcgcggtcctaaccgcgcgaaaactcctactcagcaaactccacgacgtggagatgagcatccggggaattctccgcggctttggcctgaaggttggcgctactacgccgcgcacctacccggctcgggtgcgggcgctggtcgaaggccaccctaccctcgagagcctcgccgaagcgctgctgcgagcgcgggcggtgttcggggacgagctgcgcggcctggagcgccagatgcgcgcgatcggccgccaggacgagcgcgcgcgccggctgatgaccacacctggcgtaggcgtggtcgtcgcgctgacattcgtctcggggatcgacaaagcggaccggttccgatcatcgcgcatggtcggcgcgcacttcggcctgaccccgaagaaataccagtcgggcgagatggatcgttcaggccgcatctccaaatgcggcgacgccgcggtcagagccgcgctctacgaagccgcgaatgtgatcctgacgcatccggtcaggggctccgacctcaagacctgggcgctcggcgtggcccagcgggccggtccccgcaaagccaaagttgccctcgcgcgcaagctggcggtcgtgctgcaccgcatgctgcgcgacgatgccgacttcatcgctcatcccacggcgccgccagcgatgaccgcggcttaacaggagacccaatgctcttcgggccaggctcaccgtcgcccgcccgcagctgagtcccttcgccgggacgaaggaccggtcagcgcgccagcttctccgcagggcttcgccactgcgccgattagattgcgcggccgatctcatcttaccccatcgagcagcagctcagcctgactgcggacagaagcgtgacgccggcgaatggatgaggctcaaggggattgactgggaaaggcccgttacaga

SEQ ID NO: 2088 - DNA, 1803 bp, unidentified
  source 1..1803: mol_type = unassigned DNA; note = element_2e0d4a6
  misc_feature 1..2: note = core
  misc_feature 3..352: note = LE
  misc_feature 353..1654: note = CDS
  misc_feature 1655..1803: note = RE
  misc_feature 91..383: note = bridgeRNA
ctcgtataatattttttgtgaggttttgattggttaatttccagttaaaaacctccagtggatttatcatttatccaaaaaataactggaaatttgcttagatctttgacatgtgaatgttcttgctattgaactttactaatgctcgtgtcacaatctcattaagctattgaggacggttctgaatttctcctgtagggcactttgtgtcgcttctgataaagtccgttcccctggcctgatgttagctttaaaccgctgggtgtttgtctggctggcttctctcctgtatggcagttcaaggagtcgtgcatagagcctttcagagcgtattctaattgcgaggatgttgatgcgtcaggtaccacgggcattagtaaagttcaatagcttcactttcactcggaaggaggtgattatcgtgtcgaattcattactggttggtattgacgtaagcctcaacgacaacaaggttcgtatcctccatcctgatggaaccagcctttcaaagtttactgttcctaattccgttcccggtgcaaaaactctctcccaaaagattacaggggttatggaaaagaacagatttgatgatgttgtcatcggccttgaatctacttctgtctatggtgatcctcttgtttacttcttaaagcaagacgcctctgtaaatagattcaacaccaaaatccatgtacttaatccaactcaggttaacaagtttaaaatgttttaccccgacctccctaagaccgatgatatagatgcatgggttattgccgagcatctacgcttcgggcgtattaacaaggaggtctacatggatgaccggtacaaggctcttcagaagcttacaagagccaggttccatactgttcaaagcctttccagggagaaaaactggttccttaacaatctatttctgaagttctcttccctcacccaagagaagatattttcagacaggtttggtgctacatcttccagcatcattgaggaattcttctctgttgatgagatatcctatatgcccatagaagagcttgtggatttcatcaacaaaaaaggtaaaggccgattcgaaaaccccgacgagatcgctaaagctgttcaaaaggctgccagaagctcgtatcgtcttcctaaaaccgttacggactctgtgaatcaggtccttgccgtatcctttctagctattaaagcctacaaggagcagcttaaaatctttgacaaggccattgaagaacagtttaagcttatccctaatacattaatgtccgtcaagggtatcgggcctgtttacgctgccggtattgtagcagagattggtgatattcatcgtttcaaggatcaagcggctctagctaaatttgcgggtattgcttggactaagcatcaatcaggtaactttacggctgcgaacacccatttaattaagtttggcaacaggtatttgcgttattacatcatggaagcgacaaacaaagtgagaatgcacgatcctgagtttaaacgcttctatgatttaaagtacagccaaactcctaaaacgccccataaaagagcacttgcactaactgccagaaaattcgtccggcttgtttatgccctgctgcatgacaaccggctatataccccgccaaaaggagagtaatttccagttggcattccacttcctaccataattttcaatcgtgacttggtaggcttattggggagtccttcttttgtgcttttttggcttaaaacaggccttttctcaaaaacttttttccagttggctcttgacatttaaccgctgga

SEQ ID NO: 2089 - DNA, 1354 bp, unidentified
  source 1..1354: mol_type = unassigned DNA; note = element_2e1556a
  misc_feature 1..4: note = core
  misc_feature 5..83: note = LE
  misc_feature 84..1112: note = CDS
  misc_feature 1113..1354: note = RE
  misc_feature 1119..1342: note = bridgeRNA
atgatggggtggacggcccccacccggcatcggtgtgccacactggttctgggcaaacagcaaccagtcagaggggaccgtccatggaaaaggctagcatgatcggcatcgacacgtcgaagaacctgttcgaactgcacggccgcaacgagcgaggcgaggtggtgctgcggcgtcgcctgaagcgtgaacaggtcgagagcttcttcgccgagcatcctgcggcgacgatcggcatggaagcctgtggtgcagcccaccactgggcgagagggttgagccggctcggccatcaggttcgcctgatgccgccggcctacgtgaagccctacgtcaagcgcaacaagaacgatgcgatcgatgccgaggcctgctgcgaggcactgagccgtcccgggatgcggttcgtgccggtcaagacggtcgatcagcaggcggccctggcgctccatcgaagccgtgagctgctggtgcgccagcggacccagatcagcaatgcgctgcgcgccctgctggccgaactcggcatcgtggcggccaaggggcgtgagggtcttgggcgcttgatcgcggatctgcgcgagaacgtgcacggcctgccgccggcggttcagacagcggcgctggtgctggcggatcggcgagccgaactccaggccgggatcgatgccctggagcgccacatcgttgccgaggccaaggctgatccggcggcgaggctgctgcagaccgcgccgggggtcgggcctttgaccgcacacgccctgctcggcaccgtgcccgatccggcacgcttcgacagcggccgcgacttcgccgcctggctcggcctgacgccgcgcgagaactcgaccgcaggcaagcgacgcagcggggccattaccaagcagggcgatcgaaccctgcgacgactgctggtgcttggcgccaccgcctggcttcgccaggtcgcggcccggcccgacaagggctcgccctggctgctcggcttgatggcgcacaacaggaccaagaagaagctcgtcgccgtcgcccaggcggcgcgcaccgcccgcatcctgtgggccatgctcacgcacaaccagccctatcgcgcgccggccgccggctgacgcgccaacccttcgcaaggagcaagcagcgacagatggcgaaaacggtaggcataccggaccgggcacactccgaagtgtcatcgcgcaccaagcgcgtcgggatgatgggagagcacggccacggataccatcggggccagcggcactatcggccgcacaaataggccgcatacatgaccgctcctacttcacgccaaacctcgttgctgaaaaccttgcgaaacgggggccgtccatac

SEQ ID NO: 2090 - DNA, 1428 bp, unidentified
  source 1..1428: mol_type = unassigned DNA; note = element_2e19f59
  misc_feature 1: note = core
  misc_feature 2..62: note = LE
  misc_feature 63..1100: note = CDS
  misc_feature 1101..1428: note = RE
  misc_feature 1205..1422: note = bridgeRNA
tactgggatggtccgccgcctaagcccctggagggtgtagaggtgatcacaggaggtgttccatggagattcgcacaattggtatcgatctaggaaagacggtctttcaccttgtaggtgtcaacgcacggggtgaagtcgtggttcgcaagaagtgctcgcggactcagctactgcgctttacatctaaccttcacgagtgcctgatcggcatggaggcctgcggaggatctcattttctcggccgcgctctgcgggaacagggacatgatgtgcgcttgatgccggcacagtatgtgaagccgtacgtgaagacgaacaagaacgactacatcgatgccgaagccattgccgaggctgtaacccgtcccacgatgcggtttgtgccgatcaagaccgacgatcagctcgacctgcagtcgctgcaccgagtacgcgaacggtgggtcgtgcgccgcaccgcggtgatcaaccagattcgcggattgctgctcgagcgtggcatcacgatgcgcaagggacgcgagcatcttgaagcctctctccctcccatcctggaagacgcagacaacaagctatcgggtgggttacgagtacttctgacacaactgcagatagagatgcagtacctgcacagacagatcgaagaatccaacaaactgatcgtgcgcatcgccagcgaacttgaaccatgcaggcgcctgatcgcgatccccggaattggaccgctgatcgctacagccacgatcgcggccatcggcaacggggcagccttcaagaagggccgcggatttgcagcttggttaggagtggttccgggtgagcactccaccggcggcaagcaacagcttactggcaccagcagacgtgggaacaaatacctgcgaaagctcttcgtgctaggagcacatacagtgctactgcagaggacgaagcaatcttcgggcctgagtacgtggctggccagtctcaccgcacgtaagcgcaaacaggtagcgacagtggctttagccaacaagatggcacgcatggtctgggcggttctatgcaaaggagaggcttatcggccgccgcttttaccacaaccagtcacagcctgatgggctgcacatgacgcctggcacaagcgccaggcttggaaatcgctgcagcgattcccacatctgcagtccaacgacgacggttccaagttttgagattcctgccaggtttgctggcgaaccatgagatggcacaacggtcgatcccggcgctcccgaaacctgcattcggaaaatacctccaaaggcagcgaaactaaataggacgagggcgcagcgcattccattcaggccaggagatcgctactccaacagaggccggatacattcgcgcagaccaattccgtcttcctcatctttcgcttgcaaaacggcggcggaccataca

SEQ ID NO: 2091 - DNA, 1504 bp, unidentified
  source 1..1504: mol_type = unassigned DNA; note = element_2e25c89
  misc_feature 1..2: note = core
  misc_feature 3..213: note = LE
  misc_feature 214..1482: note = CDS
  misc_feature 1483..1504: note = RE
ctgatggctctaccttcctttcgcacggtggatcccggcagggagtgcttttggtgcttgtcccttgaggactgtcgtgagacggcgcccctgccgggccccggcgaaggcctgacgtctaggagggtgtggtcgcgcgaggactggttcctcagcacgacgtagcgccttcccggtccgccgagcacgatgttcgcggcgatcggagggcacgtgctgggaatcggtatcgactgggcggaagagttccacgacatcgccttgggaacacacgagaaaggagtgatcgagcagttccgtagcgaccacggcccagccggggtcgcctcgctgatcgagcgtgcgttgcggctggaacccgatccggccgagattcgtgtcgtgttgcagactcgccacggtctgttggtcgaagcgttggtcgacgcggggttcactgtggtgccggtccatcccgacgtggtcgcgcgccggcgcggcccggcccggaagaaggacgacgccgaggacgcccggatctgctgtctgctcgcgctggatcggcacgccgcgctcaaaaccttgatcccgcacggggagatcggcggcgagctgcgcgcgatcggccgcgacgacgaacgcgccgcccgggaccagcgccggctgctcaaccggctgcgcgcggacctgcaaaccacctaccccgccgccttggttctggccggtaaggacctgggcgcgccgacggtgctgcggctgctggaacgttggcccacccagcctgagctggtcggagcctcccacgacgagctggtcgagttcgcccgcctgggccgccacggccggcccgaccggttcgccgagcgggtcgccacagcgctcgcagcgccgatgttgccgacccgggactacctcgtgcgcgccaaggccgccgggatccggccggccgcggtccagctgctcgccctgcacgaggcccgccgcggagggcaggcccggatggccgagctgttgctgggcggaccacgcaccgggcgcgatcacacggtgaaaaatcccgacccgggaaaagcgttcccgggcggtgagagctacctgagcatgcccgggctcggggacctgctcgccgcccggatcgcgggtgaaatcggtgaacacatcaaccagttcgaccatcccagcggactgcagtgctacgccggttccgcaccggtcacccgtcgatccgggaaaagcgactttgtcgtcgctcgccgcctggcccacaaccattacctcggcgccgcggtgcaccaatgggcgttctgcagcctgctgcgcagcgcctgggcccgcgagttctacgacggcaagatcgcggccgggaagaaccaccacgcggcgctgcgcgccctgagcaaccggtggctcgaagtgctgtggcactgcctgaccaagggcgtgctctacgacgaagccgtgcacgtggccaaccgcagccgggccctcgggcgcgccgcctgagccgggggttgacagagggtgt

SEQ ID NO: 2092 - DNA, 1615 bp, unidentified
  source 1..1615: mol_type = unassigned DNA; note = element_2e2b6fa
  misc_feature 1..2: note = core
  misc_feature 3..449: note = LE
  misc_feature 450..1496: note = CDS
  misc_feature 1497..1615: note = RE
  misc_feature 14..303: note = bridgeRNA
ctactacaatatatttatggttaatatcccttacaaaccagtaaggaattatccatcttgttgcctaagctgtataatgatagagcaataggtatgtcgtcccctttcttggacttcgcgtccgtaaataagactgataaccagctcctcatttgcagcattcgttttatgcaggttgaatcgccttaggtgcattcgtgtcacaccacagtagattgaataggcaatgagtaaaactggtgcttatccattgcataattaaatcttaaggagtgacaaatttatgaacgcagtaggtatcgatgtttctaaaggcaaaagtatggtcgctatcattcgcccccttggtgagattgttgctgcacctttcgggatcaaacactcggctagtgacattaagtctcttgttaatcttatccattccgttgagggggtaatcccgtattgtcatggagcacaccggacgttattatgaagtcctggcacatcaactttccaaggccgaccttttcgtcagcgccatcaacccaaaacttatcaaggactttgacaatgactcccttcgtaaggtcaaatctgacaaagcggatgccgttaagattgcacgctatgcacttgacaaatggcaaaatctaaaacaatatagtgtcatggatgaattacgcaatcagcttaaaaccatgaaccgtcagttcaacttttatatgaagcacaagacggccatgaagaataacctcatcggcatccttgatcagacctatcctggcattaatacttactttgacagccctgcacgtagtgacggcagccagaaatgggttgattttgcatccacttactggcatgtggactgtgtccgtaaaatgtcccttcatgctttcatagaccactatcagaagtggtgcaaacgaaagaagtacaacttcagcctgtcaaaagctgaggaaatctatggaaaagcaaaggagcttgttcctgtacttccaaaggatggaattactaaactcattatcaagcaagcggttgaccaacttaacagtgcctctgtaactgtggaagaattgcgttccctcatgaacgaaacagcctctaaactcccagaatatcctatcgtcatgcagatgaaaggcgtaggtccatcacttggtccacaactcatagccgagattggcgatgtaacccgtttcactcacaaaggcgcgctcacagcttttgccggcgtggatcctggtgtaaatggttctggctcttatgagcaaaagagtgttcccacttccaaacgaggctccgcagctctgcgcaagactctgtttcaggtaatggatgttttaatcaaaaccatgccccaagatgatcctgtttatcagttcctcgataagaaacgagcccaaggtaaagcttattacgtctatatgaccgccggagccaataaatttttacgaatctactatggtcgggtgaaagaatatctttcatcacttccagaatccgaatagtttcataacacttctcttcagaccagcacgagtgtggtggtcttgttttgatacctatttttcgacctgtataaaattttcaattttcataaatttagccttgactttttatttgcagg

SEQ ID NO: 2093 - DNA, 1414 bp, unidentified
  source 1..1414: mol_type = unassigned DNA; note = element_2e2d8b4
  misc_feature 1..2: note = core
  misc_feature 3..203: note = LE
  misc_feature 204..1268: note = CDS
  misc_feature 1269..1414: note = RE
  misc_feature 7..219: note = bridgeRNA
tcatttagatttgcaccagtcaagattaatccttatctttgcatatatatacaaaaaggattaaccaccgagttacaagtgaactaacttccgctctaagacatagtcttattcgcagaaatagtcttgcaactcacgaggctgaatgctctaactagatttttaggacacgaccttttaaatgatttagctagttcaacccaatgtggttaacccataaatataatcatcgcaaaggtatgaaaaaatcctattacatcggcatcgacatctccaaaaagacacttgatgcatccatttttgttgagaacatgaacgaaaaacggtatccgcatatcaaagaggacaacgacaaggcaggtttcaagagaatcctgaagtgggcaagcagcgagaaggtagatctcaaggattgcctgttctgcatggaacacaccggtaattacggacttgagctgtgcctctttctggaacagaaacacatcgaatattgtgccgtcagccctctcgtcatgaagcgagccatgggtatttcccgagacaagaacgacaagattgacagtgccaggattgccactttcgcattcgagaaagcctacaaaatgaaaccatcgaaaatggcttcagaagacatccttgcattgaagaaacttcaagcggaacgcaacctgcatgtcagggagagggcaaaatacaagggctatctctcggacaagtgcaccaagaatgacggtctccgcaaaagaatgacaatcatggtcaaaacccttgactgtcagattgaagaagtagagaaggaaatgcaggcaatcattcagcggaaccaagagctttcttccaactacgaactgcttctttccattcccggagtcggaaaggtcatcgccatttcgaccttggtatataccaacaacttcaaggcattcgacaatgcccgccagtatgcctgttatgccagcgtggcacctttcgtccatacctcaggctccagcatacatggtgcaccgacggtttccaagatgggtaattcccagataaaatcagaactgtcaatgggggcattgaatgctatgttcaatgatccgcaaatgagcgaatatgccagccgcaagcggaaagaaggcaagcacaacggtgtcatcctgaatgcaatcaagttcaaactcattgaacgcatgtttgccgtcatccacagagggacaccctatgtggcgacacatgaatacaagacattgcgacaccccaatcgcgtttccgaggcgtcttaacgcctcggaaacccaggccgcgagaaacccaggccgcaaggatattgtctctatttgtcatcctggaatgacagacgaatgaaattcttagaatattcaactatttgaataaaatttcagaaaaattcttggtcgtgtcctagatt

SEQ ID NO: 2094 - DNA, 1400 bp, unidentified
  source 1..1400: mol_type = unassigned DNA; note = element_2e443c5
  misc_feature 1: note = core
  misc_feature 2..87: note = LE
  misc_feature 88..1116: note = CDS
  misc_feature 1117..1400: note = RE
  misc_feature 1168..1392: note = bridgeRNA
taatggaatggtcgcccctactctaaccggcatcaaagtgccaaagtggtgaatgtgacatcccactatacgagagaggcgaccaagatgaagattacaacagttggtattgatttggcgaaaaacgtgttccaggtgcatggtgttgatcaacgaggtaagccggtggttgaaagacggctgaaacgcaagcaagtgttggcgttctttgcgcaactgccgccttgtctgattggcatggaggcctgcgggggtgctcactactgggcgaggatgttgcaagcgcagggacacacggtgaaactcatggcgccacagtttgtgaaaccgtatgtaaagaccaacaagactgatgcagcggatgcggaagccatctgcgaagcggtcactcgacccaacatgcgatttgtgccgattaagaatgccgatcaacaatcggtactttcattgcaccgtgccagacagggctttgtcagagcgaggaccgcgcaggcgaaccaaatccggggactgttagcggaatatggcatcacccttccacagggcattggccatgtcactaagcaactaccggggattattgaggataccgagaacgacctgccgggtgtgttccgagaattgctaaaacgcctgggcgcccacctgagagagctgaatcgtcaggtgaaagaactggaagagcagatcaatgcctggcatcgagcgaacaaagagagtcagaagttagcacatattccaggtatcggaccgctaacagcaagcgcattgatcgcatctattggggatgcaagaaatttcagaaatggtcgggagttggccgcgtggcttgggttggtgccacgtcagcactcaagcggtggcaaagtgctgctgcaggggatcagtaaacgtggtgactcgtatcttagaacgttactggtccacggcgctcgctcagtgatacgtgtcgcggaaagcaaaacgacgcctacggaccgttggtcgatggaaatcctcgggcgacgccacaagaatatcgccgctgtggcacgggcaaacaaaaacgcacgagttgcttgggcgttgttggcccatggacgggactacaacgctggctatgaactgacttcatagccagcctacagcaacactaactggtaacagtaactaaaacacaaggagcactccacgattgctctggcaatcatgacatgatggcaaaacaggtcagaccgtggcaggtcaaacctatttcacacagagagcgaaaagctcgtcagactgataaggtgcctgccagcgaattccatcagggacagaggcttgtggcctcgatcaaaagtccggatctatggctgcaatctttacctgcttaccatcatcgattgagagcttggcaaaacaggggcgaccatcta

SEQ ID NO: 2095 - DNA, 1490 bp, unidentified
  source 1..1490: mol_type = unassigned DNA; note = element_2e45d2e
  misc_feature 1: note = core
  misc_feature 2..250: note = LE
  misc_feature 251..1477: note = CDS
  misc_feature 1478..1490: note = RE
  misc_feature 14..261: note = bridgeRNA
ctacttgtttcattgacctcaggaccggtgcctggcgaggctcggtccaggcgctcggctcgttgctctgattgcggctgcccacgctgactcggtcaggtgattgggcgggtcccgtgtggctctcgcatggcatgcgcgggccgggcgtcgccagggtcggaagaggctcaagaggggtctgcccagctcgaagtagcgttgccctcccgactcgaagtccggctggatcgacgacgaggagaggcgcatgcagcagcaaccaggacagcaggcagaaccgcacgctggacgtgtggtgatcgggatggacccacacaagaggtcggccacgatcgaggtggtgaccgccgacgaaaccatcctcggcaccggccgtttcggcaccgatgaggccgggttcaccgcgatgaggcgttacgtcaaggagatccggcccgtggtcggggaccgggtgtgggcggtcgagggctgcaaggggatcggtcaccacatcgcatccaggctgcttgctgagagcgagcacgtggtcgatgtgccaccgaagctgtcggcccggatgcgggtcttcgcgaccggtcagggccgcaagaccgacgccaccgacgcacactccgtcgccctggtcgggacccggatggccgggctacgcccggtcgtggacgacgagcagctcgcggtgatcgggatcctggccgaccggcgccgagcactcggtgaggaccacaccaggatggtgtcccacctgcatcacctgctgctggagctgatcccgggcggcgcgaaacgggacctgtcggctgcgcaggccaaggcgctgctcgcgaaagtgagacctcgtgacgcggccggccaggcacggcgtcgggtcgcagccgagctcatcggcgacctcgagcggatctacacccgtcgtaaggccgccgacaaggagctgcgtgagctcgtcgccgcgaccgggaccggcctgttggacctgaacgggatcggcccgtccggcgccgcccggctcttggtcgacgtcggtgacatcacccggttccccgaccgggcgcacttcgcatcctggaacggcaccgcacccatcgatgcctcctcaggtgacgtggtgcggcaccgactgtcgcgggccgggaaccgtcagatcaaccggaccctgcacatcatggccaccgtgcagctgcgcaaccccggcatcggacgtgactactacgaccgcaagaaggccgacgggaagtcatcgatggaggcgatgcggtgcctgaaacgccggctgtccgacctcgtctatcgaacgatgctcgacgacaccgtcgccgccaccatcacggcaggaaggacgggcccgggaggacaacggggaaacgactctgactccagcgcggccggctcacatccccacaccagctcttcggacaagtcacttcccggacccgccaccacgaatcctagaaccccactcccggcagcgtcttgacacagaagggagc

SEQ ID NO: 2096 - DNA, 1309 bp, unidentified
  source 1..1309: mol_type = unassigned DNA; note = element_2e4efb6
  misc_feature 1..3: note = core
  misc_feature 4..215: note = LE
  misc_feature 216..1181: note = CDS
  misc_feature 1182..1309: note = RE
  misc_feature 36..198: note = bridgeRNA
cattgtataatttttaatcgttatatatttgcataaagtttcaacatcaaagtgtggaataagaccgatgtttccttggtcataaaggccgtgagttatgtttcgtccccacacttttacatcagaaaccggatagttcaatgggctttcgaccccgtattcgcaatgatggctcacgatgtacagatgttgtcgttcaataaatcattaagactatgacctacgttggaattgatgtcagcaaggcgactttcattgttgcttattcttctgccaagagcagcaagaccaaaacgttcaagaacactaccaaaggcgttcacgagttcattcaaaccttgtctgccaatgagcatcattgtgtgctggaagcaaccggcaattacagttccctgcttgtttatcttctttcgcgagcaaatatcacagtgagtctggagaacccactcaagataaagaacttcgcccgtgtgatgctttcggttaccaagacagatgagacggatgcacgcctgatagccttgtatggggagaggatgcagcctgctccttacaaacttcgtagcgatgccatccttaccttgaaacagaagcgaacagtcatacgccaactcaagaagcaacttatagccacccgtaacttgaaaggttccatggaagccctccctttcttcgaccctaaatgcaagaaagccattgagaagacaatcgtctttcttgaaaagcaaaccaaaggattggaagaagagttagcagccttggcacaaagtgagtacaagaagcagatcgacttgcttacctcaattaaaggtatcggcgtcacgctggcggcagccttgataatggctacgggaggcttcacctactttgataatgccaagcaactcacccgatacttgggcttatctcctacttaccaacaatccggtacgtcagtcaatgtcaaaggtcacatcaaccgcaacggtgattcttccttacgtggtcagctttatatagctgccatggcatctctgcgatgcaatgccgaatgcaaggcgtgttttgaccgattgcgttctaacggcaagccgggaaaagtggcggttgttgcagtcgccaacaaactcgtaaggcaagcctttgcggtagtcactcaagaaaagccatatgtcgatggattcaagtccaaaaagccataatagctcctgcggagggaacgccatgcggcaaggggctgcgcagtcagccccgacgagcttccgtgaatgagataattgcatatttatgctaattatcgttaaccgtagtcagttttcgtattatagtt

SEQ ID NO: 2097 - DNA, 1473 bp, unidentified
  source 1..1473: mol_type = unassigned DNA; note = element_2e554e2
  misc_feature 1..2: note = core
  misc_feature 3..239: note = LE
  misc_feature 240..1259: note = CDS
  misc_feature 1260..1473: note = RE
  misc_feature 17..185: note = bridgeRNA
cttgtatcttgcggggtgaggcgtgaggatgaattcacgtttcggcggtgaggccgtcaggtccttaggccagctcgatcagagcctgttcgaagatcggcccccgtccctctcttttgaacgccgtggagaatcgaaggccttttgagcctgcatgttcaaggttggcggaaagagcaagtccgttcgtagcggacgcgggacggtgccgaagctcagaatagcgccggaggaagtggatgagcaagcaaccgagtttcgcgcagggcctggtgttctgcggcatcgatgtcagcgccaagactttggcggtgtcggtactacaacaggatcagccgttgcgacagcgcgagttggccaacacggctggcggccacaaggcgttaatcacgtggctgcgcaaggccaaggctactgtgcgggtttcgctggaggccaccggggtctactcgctggatctggcgttggctctggatgcggccgagggcatcgagctgtccgtgctcaaccccaggcgtgtgcaccagttcgcacagacgttgcggcgctcgaagaccgatgcggccgacgcgttggtgttggccgagtacagtaagcggatgccgttcgtagcttggcggcggcccagtcaaagagcgctggagttgcgcgcggttagccgccatctggcgaccctgaccgaagagcgggcacggttgcacaaccgtctgcacgcggccgaaagctccctggcaactccacgctgtgtgcgagaagacctgaagcgctccctggccggtatcgataagcgaatcctgcgactgcgcaaggcggccgtcgcgctgatcgagcgggacggggagatgcaacgcaagttccggcatctgaccgggatcaccggtatcgcggagaccagcgccgtgcacctgttgggggaacttgccacgctggccccggagatgacggcgcgccaatgggttgcccatagcggcctcgatcccgcgcaccggcactctggaacctcagtcaatctgccttcaagaatgagccgtcacggcaacagccaactgcgccgcgcgctctttatgccggctctggccggcgcccgtttcgacccgcacatgagggccttttacaccctgcttcagcaacgcagaaagagcaaaatgcaagcgctaatggccgtagcgaggaaactgctccatgctatctatggcatcttcaaaacaaacactccctatgaaggaagcaagctgttcccgcagttgaaggtcgcctgaacgctacaatcggcacaccaggagaaacggaagcgggcgctgctgggaagcaaccatgccgagggataacctggtgggctcatcccgacgatgaaccaacggccgggcggggaaatcctcgcccgaccacaacaaacatcggaggaatagacccccatgccttgaaaatccaacctgtctccatcacgaaaatgcttgacgcgcaacagagaat

SEQ ID NO: 2098 - DNA, 1460 bp, unidentified
  source 1..1460: mol_type = unassigned DNA; note = element_2e581ea
  misc_feature 1: note = core
  misc_feature 2..245: note = LE
  misc_feature 246..1445: note = CDS
  misc_feature 1446..1460: note = RE
  misc_feature 44..221: note = bridgeRNA
cgttaccttgttgacaggtccggatcggcgggtgttgattgggattatcggtcagccgtcccggcatggtgtcttgcccctgtctattgaatgatccggggggtgttgccaccggggctggttgacagtacgtgatcgctgatgaggggctcggcaccacgaatggatgcctgtcgtaacgtggatgtgagacacactgtcatggctcgaccgactgctggcacagagcaaaggagacgattgccatgaccacagcaaaacccagaatctacctcggtcttgatgttgataaaaccgatcactgggcgtgcgccttgaccgaggacgggcaggtgctttggaacaagactctgcccaataatgaagcaaaaattattgatatctacaccaagctcgccacgcagggacaggtcttagtcattgttaatcagcccgccacgatcggtgcccttgcgactgctgttgcccaacacatgggaatcgacgtcgcctacttaccgggactgaccatgcgccgcatcgctgacctgtatccaggtgaggcgaagaccgatgagaaggacgcttttattatcgctgacaccgcacgcactcttcctcatacgctgaggtccttaaccacaacggacaaggacgaagctagcttagcgatgctcaccgggtttgaccttgatctctcccgtcaagtcactcaagtcacgaaccggatccggggcctctatactcagattcaccccgaacttgaaaaagtcattggtagccggctcgatcatgatgccatccttcaggtcctcgcgacctggcccactgcacaggcactgaaaaaggcaggtaaagcccgagttgatgcgaaactcaagaaacacggggcacgtcgccacgccacgtggacgaccgaactctttcatgctcttagtaggcagactgtgacagtgaccggcaccgaagcagccgagttagtgatcccgcacctggcacgccaactaataagcctgcatgctcaacgtgccggcgtcgcaacccaggtagaaacgattgtcgctacccaccctctttacccggtcctgagatcaatgcctggcatcggcctcaggaccgccgccgtcatcatcgccgaactctcaggaaaaactttcaccagcgcagccgcactagcgtcctccgctggccttgccccaacaaccagacaatcaggatcatccatacgatctgaaagagtgagccactccggtaacaaacgactcaaacgcgccctcttcctatcagcctttgccatcatccggaccgaccacaccagcagggcctactacgaccgcaaacgagcccaaggaaaacgacacaaccaagcaatcatcgccctcgcccaccgccgactcaacgtcctgtacgccatgctccgagacggcacactctacgacagtcccgaaaccctcctcgcagcttgacacacaacatagggg

SEQ ID NO: 2099 - DNA, 1620 bp, unidentified
  source 1..1620: mol_type = unassigned DNA; note = element_2e58e06
  misc_feature 1..3: note = core
  misc_feature 4..250: note = LE
  misc_feature 251..1486: note = CDS
  misc_feature 1487..1620: note = RE
  misc_feature 8..225: note = bridgeRNA
tttcgtattataaggtcagccagaaaatatttctggttgaccattttttatatggttttattataacggtagccggggcaaaacgtacctgctcgtggggatagaccccgtcaactaaacagtttgccccctacttgtagaaacatgattaggctggttgggacgtagatctcgtataacaagcgaagctgtgacactgcaaggagaaataggggtaccggtaatccactagattaggaggagatttagaatgaatccagtcgttggtctggatatttcaaaaggggaaagtcaggttcaagcatttttggataaggggaaaccttatcaaaagagttttaaaataactcatactgttgaggggcttaatttacttgtagcgtttcttgaggatgtaaagaaagtgtctggtcagaagccttcagtcgttttagaagccactggacattatcaaactccagtcgttcattacttggaagaacgaggatatttattgattatcattaatccattgatttcatataaggcaagaggatcaagcttaagaaaggtaaaaacagatgccattgatgcctatcttctctgtgagttgttttataaagaagagttagagccatataaaaagcgtggagtccagttattgaaccttcgtaatctcacaagacaacatgaaaacataactggcgttatgattcaaacaaagcttcaatttcaggcagtgcttgaacaagtgtttcctgaatataaaggagtttttggagatttatattctgtggtgtcactcttaactctttcagagtttccctcttcagaggacattttgaaggcaagtgaagaagcaattacagcaaggatatttgagttatgcaagagtagatcaattaaatgggcaaatgaaaaagcgattcagcttaaagctgcggcagctcgtaacccttttgaaaagacagtctatcagagtcatattttaagccttggtatgtatataaatattcttcttcagtacaaagagcatctatcaaagttagaggcagagatagacgccctcgctaaagaaattgaagaatatacgatcctcaaatctatcccaggtatcggagaaaagatcgcggcaacgattatttctgaaattggtgagatagatcgatttaataatcctaaaaaacttgtagctttctctggagttgatcctagtgtattcgaatccggtaagtttacagctaccaaaaatagaatcactaaaagaggttctagcagacttcgacatgccttatatatggcggttcgttgtgctattcgtgattgccggaagtctaagacaactgatgaaattatccctcgaaataagaagctacgcgtgttttatgacaagaaacgcgaggaaggaaagccttataaggtagccgtcatagcctgtgtaaataagctcttacactggattttcgctctattaaagaacaaaatgactttccaagatattgtttaaaatttatatttaactaaaaagaacaaaaccttccaaatgagagtctgaaggaaggttatttggtatgcctattattagtatatcacgtatgtttttatctttttattgaaaaatgttgacaaactattagctgg

SEQ ID NO: 2100 - DNA, 1366 bp, unidentified
  source 1..1366: mol_type = unassigned DNA; note = element_2e69dd6
  misc_feature 1..2: note = core
  misc_feature 3..86: note = LE
  misc_feature 87..1151: note = CDS
  misc_feature 1152..1366: note = RE
  misc_feature 1111..1352: note = bridgeRNA
tgatggggtggacggtccccgctcccggcatcgatgtgccacaacgtggtcgtccatgaacgccacaacgagaggagccgtccaccgtgcagattaccaccatcggtttggatctcgccaagcactggttccaggtccacggggtcgacgcaaacggacacgtcgtcgtccgtcggcggctgcggcgcagcggagtaatcgcctacttccggtcgctggagccgtgcctggtcggcatggaggcctgcgcgacagcgcattattgggcgcgtgagctgagtgctctcgggcatacggtgaaactgatgccgccggcttacgtgaaggcttacgtcaagcgtaacaagaacgacgccaccgatgcggaagcgatctgcgaggccgtagcgcggccgtcgatgcggttcgtgccggtgaagggcgccgagcagcaatcggtattgatgctgcatcgagcacgcagcctgctggtccggcaacgaacgatgctggtcaatgccttgcgtgcgcacatggccgagttcggcattattgcgccacagggtcggcggcatgtcgagatcctgaggcagacaattgctcatcaacaagagcggctcccggagctcgcgcgctcgatcctgcagacgattgcggaccagctgaacgacacgatggagagggtccgggagatcgaggtgcgtctggtcaggttacaccggcaaaacccaatcagccaattgctcgcgacggtgcccggggtcggcattatgagcgcgagcgccatcgccgccacgacatccaacccgacgctgtttcgttcgggccgggagttcgctgcttggctcggcatgacaccgcggcagaattcgagcggcggcaaggaccgcttgggacgtaccagcaagcgcggcgacaaatacatccgcagcctgctcatcgccggagcggttgcggtgctgcgccatgcacggaatcgaccggcgcgcgacggcgagtgggtccgcgctctgctggcgcgcaaacccaccaaggtcgctgcggtcgcactggccaacaagaccgcccgcatcgtctgggcggtgatgatgcgcggagatggttaccaggccaaggcagttctcgggcagccggcagagtggccgtccgctcatttcagcatgcgagggtgaagaggacgtgatggcaagcggtcgagccgcaggttgggaagacccgagaaaatcaaggcgcaaagcagcgcgcaatcttgatagggacccgatcagcgaactccatcagggccggcggtcatatgcaccgcatcgaagggccggacatatgactgcacccgaccatttcgccaaaatctactcagcatccttcgcaggcgggggccgtccacata

SEQ ID NO: 2101 - DNA, 1375 bp, unidentified
  source 1..1375: mol_type = unassigned DNA; note = element_2e6d70c
  misc_feature 1..2: note = core
  misc_feature 3..251: note = LE
  misc_feature 252..1301: note = CDS
  misc_feature 1302..1375: note = RE
ctcctatgtttgtaaaagaagttaattgatatataaatttagcaataataaagtgaagaaagtgagagtacacacgcaactaaataactctagaagtatattgttggttagaaatcacctcacttttttttatcttttagagtttgaacagaatgtaaggaataattataaaaagttatatccagaatatccaactaggagaaaaaacgaggaaagatagtcactttatatgctttaaaaaatcatgtaaaatgaaacaaattttaaaacaagtgttgggcgttgacgtagctcaaaaagaattagtggtaactctagggaaaatgcataatgatttcacgttagatctatatgcttacaaagtctttaaaaacaataaaacaggctttgctaacttatttaaatggttaaatcccttaataaatagagatgtaaatccacagtttgtaatggaagcaacaggtgtttatcatcaaaaatttgcttattatttagatgaaaaaggatgtaatttaagcattgtattacccaacaagattagtaattatatgcgaactctagatgtgagaaccattaccgacaagacagcttcacaggccatttgtcagtttggtttagagcgaaaattagagtgttggacaaaaccaaaaaaagtgtacacagaactacagcaacttacaagagaacgtagccaaatagtagatgaacgggtaattgtgaaaaaccaactgcatgcagaaaaaactgaagcagaacctaataagagtagtttaaagcgtttaaacgctaggattaaatttcttaatcaacaagaaaaggagattaagttagaaattcaagacatagtaaataaggatcctgaattaaaaaaagaattagaaaacatctgtacaatccctggtgtaggcatactaacagcggtaattgttatagcagaaacaaatggatttgaactgattaggagtaaaaagcaaatcacaagctatgcaggcttagatataaaagaaaaacagtcaggaacctctataagatctaaaactaggatatcaaaaaaagggaaccgtaatttgcgaaaagcgatgcatttaccctcattatctgcagtaaaatataataaaaaccataaagaattatatttaagattagtttctaaaagtggtataaaaatgaaagggttgatcgctgttcaaagaaaactattagaattaatttacgtcgtttataaaaacaaacaagggtttaatcaaaattatgagcaacaaaaaagggcaactctattagaaatagaaactgccctttagaaactagcttaaagccgttttgaaaaacaaaaataaaaaaaatatgggttttttgttgcatactaacacagaat

SEQ ID NO: 2102 - DNA, 1390 bp, unidentified
  source 1..1390: mol_type = unassigned DNA; note = element_2e6f4e4
  misc_feature 1..2: note = core
  misc_feature 3..89: note = LE
  misc_feature 90..1118: note = CDS
  misc_feature 1119..1390: note = RE
  misc_feature 1089..1377: note = bridgeRNA
agatggtatggttgccgccctccccatacggcatcgcaatgtgccaaagatgtggtcgtacacggccacgctagagagaggacggcaatatgattgatacaatgatcggtgtagatttggcaaagaatgtctttcaactgcatggggcttcgttgacaggggaggtcaaatttcgaaagaagctctcgcgcgctcagtttcggaagttcatggaaacccaacccgcaagtatcgttgtttttgaagcttgcggcggtgctcatttctggacgcgggagatacaagaacttggacatgcggcaaagctgatcgctccacaatacgtgaagcctttcgtcaaacgccaaaagaacgatgcggcagatgctgaagcaattgttattgcagcgcaacgcccagagatgcggtttgtggcacccaaaagcaacgcgcaaatcgcacgaggtgttgtattccgttctcgcgatcgcctggtgcgccagcgcaccgaacaaatcaatgcgctgcgatcagttctttatgaacagggccaggtcttcccgaccggtgtccatcagatgaagaagatcgcagcgttcctgcaacaggccgacaacgggctgcttgctttggtccgagaggagtgtgaggaactactcgcttccatttacgatcttacggcccggattgacgccaagacgctgaagctcaaaaagctatcgcagcagtcagagatatcacgacggcttcagacgatacccggcgttggcccgttaaccgcaatggcggtagaagccttcgcaccatctatggatatctttcggtgcgggcgagactttgccgcctggctaggattggtacccaagcagcattcatcgggcggcaaggagcggctcggaaaggtctccaaggcaggccaagttgatattcgccgcctccttatcattggcgcgatgacgcgcattgcgtgggtgggtcgaaagcctgttcgggaaggttcctggctggaccgcatgttgaaacgcaaaccaaagatgcttgttgcaattgcactggcgaacaagatggcacggaccatctgggcgatgctgacgaagaatgaagattaccgagatccggcgacgattgtgaccgcctgacaatacgcaggagacgcaatctgaagccggaaaatgggagtgagaagacgatgacctgaatgggcaaaatgatcgaatagatctggattgggaaaaccagttttgggctccgagcctcaagctcatctgagagatttggacccaatccgctgatcaccataccggcccgcggcttctgaaaatgtcgcacgaagaggcctgacagaagaccgcactcgatcactccaccaatcagtcaaaaaacttcttgcttccagggcggcaaccacaga

SEQ ID NO: 2103 - DNA, 1398 bp, unidentified
  source 1..1398: mol_type = unassigned DNA; note = element_2e7c6ae
  misc_feature 1: note = core
  misc_feature 2..218: note = LE
  misc_feature 219..1385: note = CDS
  misc_feature 1386..1398: note = RE
  misc_feature 14..233: note = bridgeRNA
ctacttgtttcattgacgcacggccggtgcctggcgaggctcggtcgaggtgcccggctcgtcgctcgcaaatcggctgcccacgcttggtcgtgtggctctcacatggcctgcgcgagtcgggcatcgctgggcgggagaggctcaagaggggtttgctctgctcgaagtagcggtgccctcccgactcgacgatcggactcgagcgaggaggacatgtggcggcagtggtgatcggcatggacccgcataagcggtcggcgacgatcgaggtgatggccggcgacgagactgtgcttgacggtggccggttcgccaccgacaccgacggctacgacgcgatgctgcgcttggcccgccgctttgccgagcggacctgggcgatcgagggctgccaaggcatcggccgacacatcgccaaccggctgctcgcagacggcgagagcgtggtcgacgtcccgcccaagctgtcggcgcgggcgcgggtgttcgcgaccggtcagggccgcaagaccgacgccaccgacgcccactccgtcgccctcgttggcacccggatgagcggtcttcggccggtcatcaacgaccagcagttggcggtgctgcgcgtgctggtcgaccgccgtcgctcccttggcgaggaccacacacgaatggtgtcccagctgcacctactgctgttggagctcatcccgggcggcgcgaagaaggacctgtccgcggcgcaggcgaaggcgctgttgtccaaggttcgaccccgagacgctgccggcaagacccgccgccgggtcgcagccgaactgatcgccgacctcgagcgcatctacgcccgcaagaaagcagcgaacaaggaactcaaggcactggtcgaagccaccggcaccagcctgatggacctggagggcatcggcccctccggcgccgccaggctcctcgtcgaagtcggcgacgtgacccgattccccgacaaggcacacttcgcgtcctggaacgggaccgcacccatcgacgcatcctccggcgaccaagtccgccaccgtctctcccgcgccgggaaccgccagatcaaccgcgtgctgcacatcatggccaccgtccagctccgccacgccaccgaaggacgcgcctacttcgaccgcagagtcgccgaagccaagacacccatggaagccatgcgcgccctcaaacgcagactgtccgacatcgtctaccggcacctcatcgacgacgccatcacccacacgatgacgggcccgggaggacaaccgggacacgactctgactccagcgcgaccggctcacatcccaccgccggctcttcggacaagtcacttcccggacccgccgccagccaccctaaaccccacctcccagccgcgtcttgacacagaggggcgc

SEQ ID NO: 2104 - DNA, 1404 bp, unidentified
  source 1..1404: mol_type = unassigned DNA; note = element_2e881e7
  misc_feature 1: note = core
  misc_feature 2..89: note = LE
  misc_feature 90..1124: note = CDS
  misc_feature 1125..1404: note = RE
  misc_feature 1173..1396: note = bridgeRNA
caatgggatggacgcccccacccgacacggcatcaatgtgccaaagtggaagtgtctagcaaccacttgaaccgataggggcgtccaccatgaagattacgacagttggtatcgacttggcaaagaacgtgtttcagattcacgcggtcgatgagcgcggcaagacggcgttgaagaagcagctgaagcgcggccaggtcgctgaattgtttgccaacctgccggtctgcctcattggtatggaggcctgcggcagtgcccatcactgggcacgcaagttggcgggatttgggcatacggtacggctgatggcaccgcagtttgtcaaaccctacgtgaagacgaacaagaacgacgcggctgatgccgaggcaatctgcgaggccgtgtcacgaccgaacatgaggtttgtgccgatcaagaatatcgagcagcagtcggttctggcgctgcaccgggtgcgacagagctttgtcaaagcgcgcaccgcgcagtcgaaccagattcgcggactgctggcggaattcggcctcatcgtcccggtcggaattgccaatattgccaagcgtgtgccggagttgatcgaggatgccaccaacgagttgactggctcattccgtctgttgatagctcggctgatggatcatctcaaggagctggacaggcaggtcgatgagctcgaggcgcagatcaagtcatggcaccgtgccagcgatgccagttgcaagcttgagaaggttcccggcatcggcccgatcaccgcgagtgccctggtggccacgatcggcgacgcgaaaaacttcgatggcgggcgacagatggcggcgtggctcggattggtgccccgacagcattcgacgggtggcaagtcgaacctattggggatgagcaagcgcggcgatacgtacctgcgaaccttgttgatccatggcgcgagatcagtgatcttccgtgcccagcaaaaggtcgacaaagctggttggctgaacgagctggtccaaaggcgcaacaagaatgtggcggccgttgccctggccaacaagaacgcgcgaatcatctgggcactgctggccaacgacagggagttccagtcgaactacaagaccgccagcatggcggcgtagtcgaccaagctgaggcaaaacggcgacaacaaacgggagattcaaaccaccgattgctcaggcgatcatgaagtgatggcaagacaggtcagaccgtggttggcaaagcccgcgccagacgaggcacccagagtgcgtgtaagcgatcgaggcgtcaaccagcaaatcccatcagggacaggcggcccaaagccgccactcaagtccgaatgtacgggtgcaatctttaccttcgagccgtcatgaattgagaacttggcaaaccgggggcgtccatgta

SEQ ID NO: 2105 - DNA, 1495 bp, unidentified
  source 1..1495: mol_type = unassigned DNA; note = element_2e8b24b
  misc_feature 1..4: note = core
  misc_feature 5..262: note = LE
  misc_feature 263..1474: note = CDS
  misc_feature 1475..1495: note = RE
  misc_feature 21..259: note = bridgeRNA
ctaatgggtgttgatcggcgtgcctcgaacggataaccgtccagcgcggggacgctgatcaccgagccgctggccggtgagcactcctgccgcctggaacgatggtcgatttctagggttagatcgtgccccggccggttggtgaggtcatctacagcgctcatgggatgtcgtgccggttcgagcactgatccattaggtcgccgccagatgtccttcggctcgaacggtttcatccacatcgagccaaggaggcgatgcgatgctcttcgtcggagacgactgggcagaagaccaccacgacctgtacctgatgaacgaggccggcgacaggctggcctcacggcggctgcccgaggggctggccggaattcgactactgcacgatctcatcgcggcccacgccgatgaccccgctcaggtcgccgtcggaatcgaaaccgaccgcggactgtgggtggaggcactgaccggcgccggttatcaggtgtacgcggtcaatccgctggctgtggcccgctatcgcgaccgccacgcggtgtcgggagccaagtccgatgccgccgacgccaagctgttggccgatctagtgcgcaccgaccgacacaaccaccgtctgatcgccggcgacacacccgacgccgaagcggtcaaggtcctcgcgcgggcgcatcagaatctgatctggacccgcaaccggcacaccaacgcactgcgctcggcactacgcgagtactaccccgcggcgctggaggccttcgacgatctgtccgaccgcgacgcgttggcgatcctcggacatgcacccgacccccgacaagcatccagcctgagcctggccaagatccgctccgcactcaaagctgctgggcgccaacgcaacatcgacatccgagcccaggagatccaggccgcactacgatccgaacaactcgcagcaccggctgcggtcaccgcggcgttcgcagcgacaacgcgggccaccgtcgggctcgtcgtcgagttgagtcgtcagatcgacgacctggagaacgaactggccgcgcattttgagacgcacccggacgccgacatctaccgctccctgccaggacttggtgtcatcctcggcgcccgggtgctcggtgagttcggggacgacccgaaccgatacaccaacgccaagtgtcgcaaaaactacgccggaacctcgccattgaccattgcgtccggcaggaagcgcgccgtactggcccgccacatccgcaaccgtcggctctacgacgcgatcgaccagtgggccttctgcgcgctaacccgaagtcccggagctcgacagttctacgaccatcgccgcgctgaaggcgacctccatcaccaagcactgcgggctctgggcaaccgcctcgtcggcatcctgcacggttgcctacgccaccggacccgctacgacgaacacaaagcctgggcacaccgcacacctgccgccgcttgacaacttacgcacctgggatgt

SEQ ID NO: 2106 - DNA, 1172 bp, unidentified
  source 1..1172: mol_type = unassigned DNA; note = element_2e8bb8e
  misc_feature 1..2: note = core
  misc_feature 3..212: note = LE
  misc_feature 213..1157: note = CDS
  misc_feature 1158..1172: note = RE
  misc_feature 39..207: note = bridgeRNA
cttgtatcttccgatccgtcagtttcgtggctacagtgaaccacgaaacggacggtgacgggcaacagctcgatgccccctgggtcgcgcagaccgcacggtagcctgggcgttgcccgtccgatactcagagcccgaacagttgcgcgggaaccagcccgcatccgcaaggttgggccaacgtcgtcgtaccgtccggtggaggtgtgcccatgacgcaacccggacccgtggttggcattgacgtggcgaaggccgagctggtggtggccgtgcgtcccggggacgcccggtggtgtgtgcccaacgatgcgctcggcctcgagcgccttcgggcgcggctccagcagctggcgcccgccctggtcgtcctcgaggccaccggcggctatgaacgggcggccgtcgccgccatcgcggcgacccagctgccggtcgtggtggtcaacccccggcaggtccgggacttcgcccgggccaccggccaactggcgaagacggaccgtatcgacgccgacaccctcgcgctgtttgccgaacgcgtccgtccgaccccgcggccactgcccgatgcggtctcggccgcgcttgaggccctgctcctgcggcgccggcagctcgtaggcatgctgggcgccgagcggaatcggctcgagcacgcggtgggccccgtccgacaggacatccgccaacacatccgttggctcgaacgccggctcgccaaggtcgatcaggacctcgacgaccggatccagcggagccccatctggcgcgccaaggacaacctcctccgctcggtgcccggcgtcggccccatcgtgagtcgcacgctcctgggggagctcccggaactcggccagttgaatcggaaacgtatcgccgcgctcgtgggcgtcgcgccgctggctcgcgacagtgggacgctccgcggcaaacggatcgtctggggtgggcgcgcccccgtccgcgcggcgctctacatgagcgcgctcgtcgccgcgcaccacaacccggtcattcgcgccttctatcggcgcctggtggcggccggcaaaccgaagaaagtcgcgctcacggcgtgcatgcggaagttgctcacgatcctcaacgccatgctgcggactgagaccaagtggagccaccgcgagatcgcttgactttcaagacagttg

SEQ ID NO: 2107 - DNA, 1402 bp, unidentified
  source 1..1402: mol_type = unassigned DNA; note = element_2e94eb4
  misc_feature 1..2: note = core
  misc_feature 3..197: note = LE
  misc_feature 198..1163: note = CDS
  misc_feature 1164..1402: note = RE
  misc_feature 1176..1361: note = bridgeRNA
acatggggtaatcgcgggagcgagtcgccgagatgtctttccgcaggtattgaagaggaggtggctgctctccgataagatggaagtacgggctcacgactggacgccgggcccaagcatctagcggagaacagccatggaagagtatatcggattcgacgtgtcgatgaaagagaccgcagtttctatccgtcgtgatggcaagcggatttggcgcgggaagtgcgcgatcagatcctaaggtcttggcagaccttgtccgcaagcgggctccccatgccaagcgggtcgtatttgagaccggtccgctgtcggtatggttcttccatgccctgaaggcagaaggtgtacccgcgatctgcatcgatgcacgccacgccaaagctgccttggatatggcgccgaacaagaccgatgcgaacgatgccgatgggctggcgcatttggccgaggtgggcttcttccgcgaagtgcgcgtgaagggctttgagagcatgctctcgcgtacgcgcatggccgcccgcaacaggctggtgcggatttcggttgagctttccaaccagatccgcgggctgatgaagacgttcggcctgatcgtcccttccgccaagggaggcaaattcgatgaacatgtttgccgtctactggatgagcgaggcgaccttccacgtattatgatgccgatgcttgaggcgtggcgcagcatccgagttcgagctgcagagcttggccgtcaggtccttgctgatgcgaggcaaagcgagacatgccagcttctcatgtcgatccccggcgtcggcgccatcaccgctacagcgttcacaagcgccattgaggatcctgcaaacttcaagaaatcacgttctgttggcgcgtggatcggactcacgacacggcgctatcaatcaggcgaggtcgattatgacggccacatctcgaggcgcggtgacgcacatttgcgcggccttctctatgaagcagcaacagtcattatgacgcgctcagcggcagacagtgatctgcgaacttgggggattaagctgcgcgagaaaatcggcttcaagcgcgctgctgtggccgtcgcgcgcaagctcgcggtgatcatgcatgccatgctcgtatccggcgagttcttcgaaagaaaaacaactaacacagtctgaacatttcacggctcacgcacccccaagggggtgtagaggcgtccttgccaggacgtggccgaaccattccgccgaggctgttacacttccttccaggaacgtgcgtttcacacattggaaggttctcccgcgaagccccatgatgcggcaaccaatgttgaccgcgaagacgacagtgctccgggcaagttcatctctatcacgcacttaaggcttccaatccgggccgcccttagacg

SEQ ID NO: 2108 - DNA, 1488 bp, unidentified
  source 1..1488: mol_type = unassigned DNA; note = element_2e963d2
  misc_feature 1..2: note = core
  misc_feature 3..243: note = LE
  misc_feature 244..1467: note = CDS
  misc_feature 1468..1488: note = RE
ctaatgggagctacggggccggggaatgctcggttccgtagccgccagcaggtgagcactatcgccgccggaagcagtcgagttctggtgtcagaccgtgcccctgctggtggccgggaggccagaccgctgatggggtggcgtgcccgccccgcggggcgtgagcactggatccattaggccgcgcgccgcgccttccgcaggctacgacgcggtgtccagaacgtgcttggggaggacttgttgctgctgatcggtgacgactgggccgaagaccaccacgatgtcgagctccaggacgagaccggccgcaggctcgcggccgcgaacctgcccgagggtgtggcgggcatcgccaggctccacgaactcatcgcccgccacggcggcgaactggatcccggggacgtggtcgtcggcatcgagaccgaccggggctcgtgggtccaggccctgatcgcctccggctaccaggtctacgcgatcaacccccggcaagtggcccggttcaaggagcggtatgcctcctcgggggccaagagcgacaagggcgacgcgcacgcgctcgccgacatggtccgcatcgaccgcgaccgtctgcgtccggtcgccggagacagcgaccaggcccaggccgtcaaggtcgtcgcccgtgcccaccagaccctgatctgggaacgcacccgcaccttccagcggctgcgcagcacgctgcgcgagtacttccccgccgccctgaccgcctacgccgacctcaccctgaccggcaccgatgccctggaacttctgatcaaggcgcccaccccggccaccggggcgaagctcacccgcacccaggtcaccaccgtcctggcccggcatcgccgacgcaaccgcgaggcgaaggcggccaccgtccaggccgcgctccacgagcggcagcccgccctgcccgagcaggtcaccaccgcctacgcggccgccgccaccgcccacgcccggctgatcatcgcgctgaatgagcagatcgccgcgatggaggagcaggtgaaggcgcattttctgaagcacccggacgctgagatctacctctcgatgcctggcatcgcggagatcaccggggcccgggtgctcgccgagttcggagacgacccgacccgatacgcgtccgcgaaggcccgcaagaattacgccggcaccagccccgtcacccgggcctccggcaagagccacaccgtccaggcccgctacgtccgcaacaaccgcctggccgacgcgctccagacccaggccttctgcgcgctgcgggcctcacccggagcccgccgctactacgacaaacaacgagcccgcgaggccggctacaaccccgcgctccgccagctcggcaaccggctcgtcggcatcctccacggctgcctcaagacccgcaccacctacgacgaagcaaccgcgtggtcacaccacgcctaccctcagcccgcttgacaccacaacgacatggggtgt

SEQ ID NO: 2109 - DNA, 1538 bp, unidentified
  source 1..1538: mol_type = unassigned DNA; note = element_2e9d52c
  misc_feature 1..2: note = core
  misc_feature 3..246: note = LE
  misc_feature 247..1422: note = CDS
  misc_feature 1423..1538: note = RE
  misc_feature 3..223: note = bridgeRNA
cttgtattatagagtagtagtgattaatgtccctctccaaggacagtatgctacactgtagaggatgctgtggattggtttttgtctcctaccacacgatggttctaggaaggttccaaccgcagccctttgcaggtttgttaatcagttagataccgccagacggttgatgtagaacaaggttacacgagcaaagtgttctgtgggcaaagcagcatcggaatcttaccgttggaggatttacctatgatttgcgttggaattgatgtggccaaggacaagcacgactgcttcatcatgagttcggagggtgaggtgctcacagatgtcttcgctgtcgccaacaacatggatggcctgaggtgcttgctggaacatatccaggcctgcgccacatcacagggtaaaattaaagtagggcttgaggcaaccggacattacagctacaacatcctggggtttctgctggacaaaggtcttcccacctatgtcctcaacccgctgcacaccaacctctaccggaaaagcctgaccctgcgaaagaccaagactgaccgcgtcgatgcgcgaaccattgccgctatgctcatgtctgatgtgggcctcaagccctacacagacacagcttaccacaatgaggagctaaagtcactgacaagataccgattcgacaaggtcagggagcgggccaagctcaagcagtcggtctctcgcctggtttgcatactcttccccgaactggaaaagttggtgcccacactccatatggcctcggtctatgcattgctggatgattttccgggtgcccagcaggttgcgggttctcatctgacacgcctgaaaagcgttctgcatcaggcctccagaggccattatggcagagacatggccgtgaccatccgagaggccgccagggcctccatcggctcggtgatgcctgctaaatctctggagctgcggcacaccatccgtctcatccgcgaactggatgctgagattgaggaaatcgaaggagcaatcaaggccattatggacacgctccactcgcccatcaccaccatccccggcatcggtttccgcatgggggccatgatcctggccgaggtcggtgacttctcacgctttgactcacccgacaaggtgctggcctacgccggtttgtcgccctctacctatcaatccgggcagcttaccagcggctacgctcgcatggagaagcgaggctccagatatctgcgatacgccatctacaacgccaccaagtatgtttgtcattgggattcgaccttcgccgcctatcttgccaagaaacgcgccgagggaaagcattacaatgtcgcactctcccatgctgccaaaaagctggtgcgtctcatttatgccatggagaagtccggggaagcttaccgcacagcggcgtaatccccgctagataacctgtcggcatcctcagcgatgcctgctttgctataccctttcttgagccatcatcgttttgcagcattctccattttcaggcttgacttctaatagttagt

SEQ ID NO: 2110 - DNA, 1617 bp, unidentified
  source 1..1617: mol_type = unassigned DNA; note = element_2ea7a81
  misc_feature 1..2: note = core
  misc_feature 3..283: note = LE
  misc_feature 284..1477: note = CDS
  misc_feature 1478..1617: note = RE
  misc_feature 57..261: note = bridgeRNA
ctggtatattataattgactcatttaattgtcagtttaatataccttttcctttctttcaacatagtaagttgaatatttttaattgatttgatatatttagtgtgtgaatgtggatttgtaaaactccttgtggctttgactacttctgaaaggttctcaccacaccttacaccaaaataatgattagttagatgaatctcgaattcgcatattgtaccaggttttgtggtttaaggatcgtggataacacatcaccaacaataatgaaaggaaatattattatgatcttaatcggaattgatattggtaaacttagccatacattttgtattctaaatcaattaactggtgaagaaattgtcccacctaccaatattgaaaacaacaaaagtggttttgactttttaatagataaagtcaaatgctacaaaaacgaggacatgttattcggtatagaagataccgggcattatcattttgcattactaaaggcattgctctcaaaaaattatactgtagctttaataaatcccgttgctacagatttaactcgtaaaatgcaaggcggtatttctaaaaatgataatttagactctttaactatttgcgatgttatttcttctaattctagaaagaaaccttatcgtataacaaaagttgataaatttgaattatttgaacaaagagaactaactagacaccatcataaccttaaagaagaattaaatgtatatactaatagattacaaaaatgtatagatattgtttttccagaatttaattctctttttaattctaaatatggcattgtttatactaatgtacttaaatcatttggtagtgcctttaatattgctaatgcagatatcagaactattcgcaaatgtttcaactacaaaggtaaaggattgcgtatttctttaactgctgaagacttaaaagatgcagccaaaaactctatcggtatccaatcaacttctgaagtgattcaaattaaacacttaattaatcaaatagaactaattaatgaacaacttgctgaaattgataaaaaaatagaagagttcagcattcaaaccaactctcctatactttccataccaggaatttcgcacttttctggtacttctattttatcagagtttggaagttttagcaactattcaagtcataaaaaattaattaaatttgctagagtagctccatatgaacatcaatctagtcaatttaaggctgaacatacagcaataactaaaaaaggatctagatatttaagaaagactttatatcaaattatacttcccgtgataaatcataataaagtatttaaagattattataatttaaaattatcacaaggtaaaagtcatcgttgtgctcaaggacattgtgttagaaaattacttagggtaatatatcacatttgcacaagtacagatgataatattaaatttgatgctaatttattaaaataactaggttttactttaataaactttaaaaaacagcctttaattaggttttttcagtatgcctatttttacaaattcacatttttaaaatttaaaagctaacgaaaattttttatcaaatcacttgttttttatatagttag

SEQ ID NO: 2111 - DNA, 1342 bp, unidentified
  source 1..1342: mol_type = unassigned DNA; note = element_2eac8f4
  misc_feature 1..2: note = core
  misc_feature 3..82: note = LE
  misc_feature 83..1093: note = CDS
  misc_feature 1094..1342: note = RE
  misc_feature 1091..1329: note = bridgeRNA
tgatggggtggatggccccctaccggcatcagcgtgccaagctggtggctgtcgaagcgcaccaggacaggagccatccgccatgcagattacaacgatcggcctcgatctggccaagcacatcttccaggttcacggcatcgacgcgaacgaaggcgtcgtcgagaagcggcgtcttcgccgtggacaggttctgagctatttcgccaagctagcgccgtgtcgggtcgggatggaggcctgcgccaccgcccatttttgggcgcgggagctgcgtcggctcgggcacgacgtcctcctgatcccccctcagtatgtcaaggcgtacctcaagcgcggcaagaacgatgcggcggacgcggcggccatctgcgaggcggtgacacgtccctccatgcgcttcgtgcctatcaagaacgaggagcagcaagccgtgctggtcatgcatcggtcgcgcgaccttctcgtcaggcagcgaacgcagctgatcaacgcgctgcgcgggcatctgtctgagttcggtctgatcgaggcgcagggcccttcgcatgttcgacggctgctggagagcatgcaagctgattcgaccgtgccgcaactagcgcgagacactctcgctctcctcgcttcgacccttgatgcggtatcggtgcagatcgacgcgatcgaggcaaagatcgcggcgtggcacaaagtgaacccgaccagtcagcggctggcgacgatccccggcatcgggccgcttatcgcctctgccatcacggccacggtcaccgatccggccgccttccgcggcggacgcgagtttgcggcatggctgggtctgacaccacgtcaaaagtccacaggtggcaagcagcgcctggggcggatcagccggaagggtgaccaatacctacgacgcttgctgatcatcggtgcgcagaccgttctcctgcgctcgaaggcggctcgggccaatccatggattcagggtcttctcgcgcgctgtgcgcgattgaaggtggcggtggcgttggccaacaaaacagcaaggatcgcctgggcggtgatgatgcgagaagaatcctatcagccggtcgcggctgactaacaaggcgacgcggctagctatgagaagcttgcgagagagaaggtgatggaggtgtcggtcgcaccgaaggctggatcaacctggagaagagatgggcctcgaacccgaggatctgatgaggctccagcccgcggacgtccatcgtggccagcggtcgtttacgccgcgcgaacaggccggacacatgactgcaagcacgccgtccatttccgtcaactttttgcttgctaggcgggggccatccacaca

SEQ ID NO: 2112 - DNA, 1542 bp, unidentified
  source 1..1542: mol_type = unassigned DNA; note = element_2eafdc4
  misc_feature 1: note = core
  misc_feature 2..262: note = LE
  misc_feature 263..1432: note = CDS
  misc_feature 1433..1542: note = RE
  misc_feature 2..240: note = bridgeRNA
ttgtatgataaaagtatagtaaattatttatcatacttcctcctctttatatttattttggtatataattaattattgaaactgtggactttttatttattcctattgagctttcaagctacttttttaaggagactactgccactgttttttctcaaacacttatagttggttaaaattttatttttaatgtttgcaaggatgtgttgattaaaactttgtggatgcacagtttcttatttctcttaaaggatgtgagtttatgttattattaggtattgatatcgcgaaattaaatcatgtggcttctcttgtagattctgaatctggggaacttgttttttctaattttaaattccagaataatatgcctggattcttctcactttatgaaaaaattgtagatttctcaattaaagatattattattggtttagaatcaactgcacattatggagaaaattttattaattttttctttcaaaaaggatttaaaattgctgtaatcaaccctttgcaaacttcacatttacgtaaagctaatattagagatactaaaaatgatcatttagattctattactgttgctaaagctttactttttgataatttcaaatttatttctcaaaacaatgtttctaattttgcgctaaaaaaacttactcgttttagaaaaagtttagttaaacaaagatctagaagtaaaattcagctcgtttctttattagatattatttttcctgaactacaatatgtttttaaagctggtattcatactaaagctctttatgctcttcttaagaaatatccttctacagaaaaaatagctgctttaagagaaaaatcattattttctattttaagtaaagcttctaagggtcactatgacctagatagtgctttgcttttaaaaagtcatgctagatcttctgtaggtgtcaaggatacatctatatctatacatatccctcaattaattgaactaattgagctgttagataagcaaattaaatcaatagaagaagaaattgaagattctcttgataatgaatcaccagttcttactattccaggaattagtaatgtagcagctgccagcataattggagaaattaatgatatttctaattttgattcaccatctaaattgcttgcctatgcaggacttgatcctaaggtaaggcaatcaggaaattttaatgcatcctcatgtagaatgtctaaaaaaggctctccatatttgcgctatgcattaattttcactgcttggaatttagtaagaaacagcaaaagatttaaagagtattatttaatcaaaagagcacatgggaaatctcattacaatgctttgggtcatgtagctcataaattagtaagaactatctatactttacttaaaaagaatatttcttatcaagaactcataatttaaaaatttttttaagttaattaatttattaagagttttatgaactctaattttgtaatgtagaaaaattgaaatgaaaattatttatttttgtcttgacttttcatagttgg

SEQ ID NO: 2113 - DNA, 1597 bp, unidentified
  source 1..1597: mol_type = unassigned DNA; note = element_2eb24df
  misc_feature 1..2: note = core
  misc_feature 3..265: note = LE
  misc_feature 266..1486: note = CDS
  misc_feature 1487..1597: note = RE
  misc_feature 33..285: note = bridgeRNA
ctgatacaatatatttgaccgagaaagtgcggtatttggattggcactttccaagttccgttacctaagctataatggaaatgtatttaaggtctgacgataacctccttgtgcttttacgcacgaataaaagactgtcagccggctttccattatagcgttcggtttttgcaggttgggcttcgcgtccgtgtaactaatcagattgaataagtaatggctcttgtcggtcacctttttacaaatccatttcttagaggtagttatgaatgctgtcggtatcgatgtttccaaaggtaagtctaccgttgccgtcctgcgtccgttcggcgaaattattgtttcaccgttcgaagtgtatcacaatccaaaggaactttccgagttggtcactctcctcaaaagtttggacggcgataccaaaattgtcatggagtacactggcaactactaccttcctgttgctctgtttctccaaaatgttggtttgtttgtctccgttgtcaatcctattcttgttaaagaatacagcaacaaatctttaactgtccgcaaaggtaaaacggataagaaagactccataaagcttgctgcctttgctttagaccgttggaacgagttgcctgtcttttcctctcaatctgacacaagaacattgctcaaagcctttaacaggcaatacaaccagtacaacaaacttaaaattatgctcaaaaacaatcttatctccatcctcgatcaagctttccctggggttaatactttatttaatactcccgcaagaaaaaaggacggacacgaaaaatggattgatttcgtactcaaattccctcattgcgattgtatttcaagaaaatcatattccgttttttctaaatgctatctttcatggtgcagaaaatacggctactatttctatgaaacaaaagcaaaagaggtttatgcgtttgcttgtaactgtgctccgtccttagtcgattcagaagccgctcatgcgcttgtttctaccgcaattttgcaacttaatacgcttaatgaaactcttgcctctctgcaaaaagaaatggatcttttggcaagcactctgccggaatatgataccgtcatgagcctatacggcgttggatctgtactctgctcgcaactcattgccgaaatcggtgacgtgtcgcgcttcacaaacaaaaaagcgcttattggctttgccggcattgacgctccgcctttccagtctggcaatttcaatccgcagtcccgaagtatctccaaacgcggctctgctgctctgcgcaaaactctgtttcagatcatggctgttatcctccaacacgaaccctctaacgaacctgtattccttttcatggataaaaagcgttccgagggaaaacacttctatgtctacatgatggcgggtgccaataaatttttacgcatttattatgctcgtgttatggaaagactgaactcagcacaaaccgcagcttaatctttgttttttgctgccgttcgcacgaacggcttttttccatgcgcttttttagtcagcaaaaaatcttatttttttctgcttattttcccttgacttttatttgcaggt

SEQ ID NO: 2114 - DNA, 1582 bp, unidentified
  source 1..1582: mol_type = unassigned DNA; note = element_2ebf921
  misc_feature 1: note = core
  misc_feature 2..391: note = LE
  misc_feature 392..1447: note = CDS
  misc_feature 1448..1582: note = RE
  misc_feature 6..224: note = bridgeRNA
tcgtattatatggtcagtcagtcattgtactggctgacctattttaataggttttatgcttgaggaagccggggtaggacgctcgcgcccgtgggacactgatcccgtccgcaatactgtccaccccttccttgtagaaacatgtttgaggctggttgggacgcgatcccgtataacaaacgaagctatgagactacaagggatctgaggggcgcaccggcgaatctatcaaaggagttgtgatttctatggatcctgtcatcggcctggatatcgccaaagagaaagccaggtccaagctttcttacaaaggaaaaagacttataagcaaagctttaaatttgagcaccatctacaaggacttcatgcgttttatcgtttctatcaggaagtggaacaggtctccggtcagtctccggctgtcatctttgaatccaccgggcactatcatgagcctgtgctccaatttcttgaggatcatgatataacatattatttgatcaatccggtggtttcttatgaggcaagaaaaaccagcctgcgcaaggtgaaaacggacaaaatcgatgccttccatctgggtgagttgtactacaaagaggatctggaagtctttcagaagaaaaccgaacaatacctgaatctgcgtcaattaaccaggcagcacagcgctctaacggatagctatgttgaaatcaagcttcagtttcaggctgctgtggatcatattttcccggaatatcatggggtcttcagtgatctttgtggcaacctctcgttgaatacgttacttcattatccgactgcttcggatattcaaaaggtctctcaacagacgttagccgtcgagatgcgtcaattcggggcgaaacgttcctataaatggtttttggacaaagcagatcaattaaaggctgcagcgaatcgcaatccctttcagcatcctgtctgtcatggccatatcgtcagcctgcagatgtacattcaaatgctttttcaataccaggagcacctatccaagctaaaaaaagagatagatgccctggctcaggcttttgaaaactgtggattgatccagtcaattcccggcattggagataagattgcagcaaccattacctccgaaatgggggatatcaatcagttccctcatgccaagaacttgactgcctacgcaggactggatccaagtgtttttgagtcaggcaaatataaagcatccattaatcgtatcaccaaaaggggatcatcaagattgcgtcaggccctttatacggctgtgcaatgcggtctggccaaaaaccgaaacaagaaacttatagcctattatgattgcaaaagaaacgagggcaagccacacaaggtcgctgtgattgcctgtgccaataaactcgttcactggatccatgccatgttaaaacgtcaagaagcctttgtagatcaataataaacaacgtattaactccaaaattttccaatcccttatcggtttaacggtaaggctatttggcatgcccaattttagtgtaacatgtttttttgaacgttttcacctttaaatgttgacagctattggctggta

SEQ ID NO: 2115 - DNA, 1589 bp, unidentified
  source 1..1589: mol_type = unassigned DNA; note = element_2ec4b7f
  misc_feature 1..2: note = core
  misc_feature 3..507: note = LE
  misc_feature 508..1470: note = CDS
  misc_feature 1471..1589: note = RE
  misc_feature 12..299: note = bridgeRNA
ctactacaatatatttatgggtaatccccttacttccagtaaggatttatccatctcattacttaaactgttagaatgtaggatgcaatggtatatcgacttcatcacttggacctcgcgtccgtactttagactgataaccggctcctcattcacagtgttcgttttatgcaggttgaatcacattaggtgcattcgtgtcacacacagtagtttgaacaggtaatgagtaaaattggtatttatccattgtaatattttttaaggagtgataaatttatgaacgcagtaggtatcgatgtttcaaaaggtaaaagtatggttacaattctgagaccatttggggagattgtatcctctccttttgagattaagcacacatccagtgatatccattctatcgaaggtgaatcccgggttgtaatggaacataccggccgctactacgaagcacttgctcactagctttcagcagcagatctctttgtcagtgctgttaatcccaagttggtcaaagattttaataacgattctcttcgcaaaatcaagtccgacaaagctgattctgtcaagattgcccgctacgctcttgacaaatggcaaagtcttgaaccgtatagtattacagatgaattacgcgctcagctaaaggtcatgaatcgtcagttccatttctatgtgaaacaaaaaacggctatgaaaaataatcttattggcctcattgaccagacctatccaaatgcaaatacttatttcaatagtcccacccgcagtgatggttcccagaaatgggtcgattttgtctctacatactggcatgtagattgcattcgtaaaatgtctctaaacgcttttgttgaacattatcagaactggtgcaagcgcaaaaaatatgccttcaataaatcaaaagcggaagaaatttacaccaaaacaaaggaacttgttccagtatttcctaagaatgaaataaccaaacatatcatcagacaagctatcgatcagctcaacagtacttccgttactgtcgaaacaatacgcactctcatgaacgagactgcctcaaagcttcctgaatactcaattgtcatgcagtttaaagggattggtccatctctcggtccacagcttatggctgagatcggtgatgtaaccagattcacgcataaaggagcccttactacattcgccggagttgatcctggggtaaacgaatctggttcctatgcacaaaaaagcgtcccaacatccaaacgtggatcttcaaatttaagaaagactctttttcaagtaatggatgttcttatcaaaaccatgcctcaggatgatcctgtatatcaattcatggacagaaaacgcacccagggtaagccttactatgtttatatgactgcaggtgctaataaatttctcagaatatactatggacgagtgaaagaatatctttctgttcttcctgatccaagctaattcaaaacttttactttcagaccagcactggttgtggtggccttattttaatgcctaatttttaacctgtaaagttttttaactttcttcaattttagtattgactttttatttgcagg

SEQ ID NO: 2116 - DNA, 1548 bp, unidentified
  source 1..1548: mol_type = unassigned DNA; note = element_2ec50b3
  misc_feature 1..2: note = core
  misc_feature 3..266: note = LE
  misc_feature 267..1445: note = CDS
  misc_feature 1446..1548: note = RE
  misc_feature 21..236: note = bridgeRNA
ctcgtataatatatttaaatttaattttattaattttcattcctatctcattttctatgtgagataatctgattaaagatagaggtcgtagtatcactccttggaacggtgttttcgtcaaaaaggcttacgcctctactttatgtctttatatgtattagctggatagcatacataattgctgtatatctaacgaggttatatcggcataaagttaaagaggttcttttctctatctttaaactattaggaaagtaggtgttatcatgtattatatcggtattgatattgctaaaaataaacacgaagtgtctataattgatgcttctggaaaattattaagtgaaagtatttctttttcaaatactattaaaggttttgaaaaacttataaagtatctctcttcttataatgtttattcagacaattgtatagttggtatggaagctactggtcactattggctttctatttactcatatctcgtagagtgtgagtttaatactttcgtcataaatcctatacaatcagaagcttttagaaaaatgtatataaggaagactaaaactgattcaaaagattcatttgtaatagctcaagttatgagatttggagagttttcatcatctccgctttcagacgaaagattgtttgaacttaaaaatcttactagatatagatttagtcttgttgatgaaagttctgattggaaaagaaagctaatcgctcttcttgaccaagtatttccagaatacaataaacttttttctgatatttttggtgtaacatctaaaaatttattatcaaaatatccacttcctgaagacatgttaagtataagtacagaaacactagcagaattattatctaaatgtagcaatggtagatttggcttcgccaaagctgaagaaattcaaaattcagctttaaatacatttggcgttaaatttgccaaacgctcattttcatttcaaataaagcaaataatagatcaaatttcatttttagaagaacaattaaagtttcttgaaaaagaaatagaatatcttcttaatgatataaaccctattattacaactattacaggaattggttctgttttaggagcttctattattgctgaaataggagatatatctcgatttgaaaaagctagtcaattagttgcttatgcaggtcttgatgtttcagttaaacaatctggagaatttaatgcaattaattcagcgaaactatctaaaagaggttctccttatttaagacgagcaatttggttagcttcaactgttgctgcatttaaagacccggctttgtctgtatactatacaaatcttcgtaatcgagggaaagctcacggtactgcgatgggagctgtcgctcgtaaattaaccaatataatatttgctgttttaagagataataaaccttatattcctaatatttagttttaaattttaactagccgttaggcttttttgtgatgcaaatttttatttttaatttaaaatattattattttattacagctattgacttttaatagctggt

SEQ ID NO: 2117 - DNA, 1392 bp, unidentified
  source 1..1392: mol_type = unassigned DNA; note = element_2ec7b73
  misc_feature 1..3: note = core
  misc_feature 4..91: note = LE
  misc_feature 92..1117: note = CDS
  misc_feature 1118..1392: note = RE
  misc_feature 1139..1378: note = bridgeRNA
tgatggtgtggacggccccattccccggcatcgaagtgtgccatatggtggtcgttcaacgaacacaccattagaaatggagccgcccgatatgaatattactacagtgggcctggatttggccaagaacgtttttcaggtgcatggcatcaatgccgctggcgaggtcgtcgtccgtcgccgccttcgccgatcacaggtttgcgcatttttcgctgatctggaaccttgcctgatcggcatggaggcttgcggcacggcacacttctgggcgcgggaattggcggcactgagtcatgatgttcggattatgccgccatcctatgtaaaggcctacatccggcgcggcaaaaatgatgctgttgatgccgaggcgatctgcgaggcggtgatgcgaccaaacatgcgttttgtgccgatcaagacagaagagcagcaggcagccctcatgttgcacaaggcccgtgaacttctgatacgccagcagacgatgctggtcaatgcgcttcgggcgcacatggcggagcttggcatgatcacgccgcaaggtcgaggcagggtcgaggacatcattgccgtgattgaggatgaccaagacgagagcattcctgggttggcaaaatctgcattgaagccgctggtgacgcaactgcgcgcggcggaagaaacgacagcttccctcgatgccgagatcatgtcctggcacaagagcaatgaggccagtaaacgtttagcgacaattccaggtgttggtgtattgacggcatcggcgatagcagccacggtgcctgatccatctttcttttgctcgggtcgtgagttttcggcatggctggggctgacgcctcggcagaattccagtgggggcaaggatcggctgggccgaatatcaaaacaaggaaatcggtatatacggcgacttttggtcatcggcgcaaccagtgtgctgcgccatgcccgcgccaagagcgctccgggagcggactgggtgaatggattgcttgaacgccgtcctccccgtctggtcacggtggccatggccaacaagacggcgcggatcgcctgggcgttgctgaccaagggagaaacataccgagccccgattgccgtagtgtgaaagaacaagaaccacggaatacaaaaagtcagaggaagccgtacagtgttttgtaagggtaaaaaacaacttgatgccaaccggtcgaaccgggggtatggacactccgttccgagtcaagcgctacgagcgcgttcaaatgattggaaccatatccgcgaatttcatcagggccagcggttataataccgcatcaacaggccggacacatgagcgcacccgaccgagatggcaatcaagtaaattttccttgcaatacaggggccgtccacaca

SEQ ID NO: 2118 - DNA, 1498 bp, unidentified
  source 1..1498: mol_type = unassigned DNA; note = element_2ed53b8
  misc_feature 1..2: note = core
  misc_feature 3..251: note = LE
  misc_feature 252..1478: note = CDS
  misc_feature 1479..1498: note = RE
  misc_feature 7..250: note = bridgeRNA
ctaatgggtttctgccgggtctctgggaggcttggttctggtagcggctggcgggtcagcactcatctcttttctgaccccgtttgggtaggtctggcggcagactgtgcgcctgctggtcgtgaggaggcggggatcgctgctgggatgacgtgcccccggctggttgtgggtgagcacttgggccattagatcgccgagtcgtctcctccgcgctgctgactgctggatcgagcaaccaggaggcgggcatgttgttcgttggtgatgactgggccgaggaccaccacgacgtcgagatcgtcgatgagtccggccggacactggccagacggagattccctgaagggctggtcgggattacccggctgcacgggttgatcgcggagttcgtgcccgagccgtcggggggcgaggtgctcactgaggtggtggtggggatcgagaccgaacgtggcccgtgggccgcggccctggtggccgccggctatcgggtgtttgcgatcaacccgctgtcgtcggcgcgatatcgggaacggcattcgacgtcgggggcgaagtcggatgccggcgatgcgcacatcctggccgagatcgtccggctcgaccgggcacatcaccggcaggtggctggtgacagcgcgttggtggaggcggtgaagctgacggcccggacccaccagtcgttgatttgggaccgaaccaggcaggtgttgcgtcttcgttcggcgttgcgggagtcctttccggccgcgttgaaggcgtatggcgagctggacgcggccgacacgttgcagctgctgcggctggcacctgatccggaccaggccgcccggctcaccaaacgccaagtcctggccgcgctggccagggcgaagcggcgcaaccctgaggtggtcgccgaccagatcatggccgtcctgcgggccgacgagttgcggcaggcaactcccgtgcaggccgcgtttgctgcgatcgtcacggcccaggtcgaggtcatcgccaccctgaatgaccagatcgacactctcggtgaggtggtggccgaccattttggtcgtcacccggacgctgagctgatcaccagcctgcccggcctcggtgtgatcctcgccgcccgggtcctcggcgagttcggcgacgaccccagccgctacgtcgacgcgaaggcccgcaaggcctacgccggcaccgccccgatcaccagggcctcaggaatcaagaaggtcgtgatggcccgctacgcccgcaacaaacgactcggtgacgccctgcagcaatgggcgttctgctcgatgcgcggctccgccggcgccaaggcctactacaaggaactccggggccggaagatcggccaccaagccgcgctgcgccaactcgccaaccgctgggtcggcatcctccatggctgcctcaagaccggccagccctacaacgaaaccctcgcctggaaccaccacaccaccgccgctgcttgacatcgaaaagcctgggatgt

SEQ ID NO: 2119 - DNA, 1481 bp, unidentified
  source 1..1481: mol_type = unassigned DNA; note = element_2ee5ce1
  misc_feature 1..2: note = core
  misc_feature 3..295: note = LE
  misc_feature 296..1249: note = CDS
  misc_feature 1250..1481: note = RE
  misc_feature 40..271: note = bridgeRNA
ctcgtattatatagtagtagtttttagagaccctctccaaggtctttataactattcagtcatagtcttttctttaccttttctataggttcgactatgatatttaagatgctgtggattggttattatttcctaccacttgatggttttagaaaggatccaaccacagtctctttgttcatttgttaatcagttagataccgcatgacggtttatttagaacgaggttacaatcgcaaagagcaccctgtggttctaaaacagcattaatacatttcaaaggagatttatttttatgatttacgtaggaattgatgttgctaaggataagcatgattgctttattacaaactctgatggagaagtattattcaaagtatttaccataacaaacaacctagatggtttcaatgatctttatcaaagaatcgagtccgttatggatgatataacaaaagtaaaagtaggactagaagccactggacactatagttacaatcttttaggatatctcattaataaaggtttgcccacctatgttatcaatccgttacatacaaatctgtacagaaaaagtctaagccttagacagacgaaaacggataaagtagatgcccgcacaattgcttctatgctaatgtctaatgtgaacttaaagtcctactcagacacattttaccacaacgaagaattaaagtcattaactcgttatcatttcgataaaattaaggaacgtgccaagcttaccaatctactttctgaatcatcaaaaggtcgatatggaaaagaaacagcaataacttttagagatgccgcaagaaactccattggttcaaacatgcctgcaaaatctttagaattaaaacacacgattaagcttattcaagagatttcttgtgagattgacgaaattgaaaatgaaatcaaaatcatcatggataaaatcaattctccaattcttagcatccctggaattaactatcgtatgggagctatgattattgctgaaatcggtgatttcaaccgattcaattctcctgataaaatcttagcttatgctggtttctcgccatctacataccaatcaggccaactagatagtgcttacgcccatatgaaaaaacgtggctccagatatttgcgatacgcactatataatgcggccaaatatgtctgtcattgggatccaacttttgctgaatatctagccaagaagcgatccgaaggtaaacattataatgtcgtgtaaaaaagctagtacgagtcatttatcatctcgaaaaaacaaatcagcaatacattaaagcatcttaactttttctaattcaatactccttttttgagcacctacatagatgctctttttgtcatgcagttttcaaggttcatagaactccaactgagttcaaaatatatctaaaatgcgtttctgcactttaatcaaaaaatatcattttttaacttgacttttaatagttagt

SEQ ID NO: 2120 - DNA, 1390 bp, unidentified
  source 1..1390: mol_type = unassigned DNA; note = element_2ef8b8a
  misc_feature 1..2: note = core
  misc_feature 3..89: note = LE
  misc_feature 90..1142: note = CDS
  misc_feature 1143..1390: note = RE
  misc_feature 1089..1377: note = bridgeRNA
agatggggtggttgccgtcctccccagacggcatcgcaatgtgccaaaaggtagttttggaagagccactaaacgaggaggacggcgagatgaaagagacaatgattggggtggatttggcaaaggctgtgttccaactccatggtgcatcaatgacgggtgagctgagataccgcaagaagctaacgcggatgcagtttcaaagatttatggcagacgaggcaccttcagtggtggtcatggaggcttgtggaagcgcgcactactgggcgcgtgaactggtcaagctgggccacgacgttaagttgatcgcaccgcagtatgtccgaccttttgtcaaacgtcagaagaatgactctgccgatgccgaggcgattgtgatcgcggcgcaacgtccggagatgcgtttcgtggcgccaaagtcggaagagcagcaggctaaagcggcgatgttccgcgcgcgcgagcgcttggttcatcagcgtactgagtcggtgaacgcgctgcgcgcgatgctctatgaatttgggtatgccttccaaaaagggatcggaattatcaaacgaattgaggcgcttctggaggatccgaactgcgatctgcccgcggtggtccgctgcgaatgccaggatatagttgaacaaatctctgaacaaacgatccggatcgatgctaaaacaaggaccgcaagagagatggcggccaccgccgccactgcccgactactacaaacgatgccaggggtcggtccgataacggcgctggcgctggaggcatttgctccaccgatgcaaaacttcaaatgcggtcgcgactttgccgcatggctaggccttgtgcccaggcagcattcgtctggcggcaaggagcgattagggcgcgtctccaaagccggtcaagccgatatccgacgtctgttaattatcggagcaatgtcacggctgaactggatgggtcgcaaaacgattatcgatggatcgtggctggcgcggatgttggcaaggaagccacgcatgttggtggcaatcgcgttggcaaacaagatggcacgaggaatctgggccatgctgacaaagaacgagaactatagggatccggcgcaggccgatgcggcattatcaacatgtgcggcgacgacctgattcggtgatgggggtgtgagaaggcgacgacccgaatgggcgcaatgatcgaacagatctggatcgggaaaaccaactatggacgtcgagccaacaaagctcgtttgtaagatttggacttgatccgcagatcaccataccggccagcggctcctgaaagcgctgcacaaataggcctgacagaagaccgcactcgatcacgcgttcaaaaggaagaaacttcttgcatcacggacggcaaccacaga

SEQ ID NO: 2121 - DNA, 1437 bp, unidentified
  source 1..1437: mol_type = unassigned DNA; note = element_2f09a15
  misc_feature 1..2: note = core
  misc_feature 3..230: note = LE
  misc_feature 231..1421: note = CDS
  misc_feature 1422..1437: note = RE
  misc_feature 10..223: note = bridgeRNA
tccctacgttgttccgcgggatgtggtgagcccctcgtatggttgacccgcccaggggtgccgggtgtggttcaaaaggctctgccgcttgtggcttccactgattggccgcccagtaccccacgacgactcggctgccaattaggaattgcgaatgatcgctgagtagggaatcgacagcgaggtcgtccgtcgggaggcgccagcagcacaccgcacggaggcaccacatggccatgatctgggccggcatcgatgcaggcaagacccaccaccactgcgtcgcgatcgacgagagcggccgcaggctgctgtcccgacgcgtcgccaacgacgaacccgaactcctcgaactcctccgcgatgtcctggccttgggcgacgaggtgacctggggcattgacctggccgacggcggtgccgctctggccatcacgctcctgttcaaccacgaccagccggtgcactacatctccggccgggccatccaccgtgcctccgagagctaccgcggcgagggcaagaccgacgccaaggacgccgccgtcattgccgaccaagtccgcatccgccgcgacctgcatcccttacgcgccggcgacgagaccgtcactgatctcaagatcctcaccggccggcgcacggacctcgtcgccgaccgcacccgcatcgttaaccggctccgcgcccagctcaccggtattttccctggtctggagcgggcactggacctgaccaacaccggtccgcttgtgctgctgaccggctaccagactccggccgccattcggcggatcggggtcaaacggctggagacctggctccgcaatcgcagggtccttcgcgctgaccggctcgccgagacagccgtcgaggccgccgaacgccagcacaccagcctgcccggagagaaactgaccgcccagctcgtgcacacgctggcggcggaggtgatggccctcaaccagcaggtcgccgagctcgacaagctcatcgaggcccggtttcgcgaccaccggcacttcgaggtgatcaccagcatgcccggcctgggcgtgatcctcggtgccgagttcctggccgcgaccggcggcgacctgagtctgttcggctctcctgaccgcctcgccggcttcggcggcgttgctcccgttccccgcgactccgggaagatcagcggcaacctccgccgcccacgccgctacaaccgccgactccaacgagtcctctacatctccgcattgttcagcatccgaagctgcgaggactcccgccggttctacgaacgcaaacgctccgagggtaagcgtcacatccaggccgtcctggccctggcccgccgccgcgtcaacgtcctctgggcactcctacgcgacggacggacctacgaggccgcgccacccaccaccctcgccgcttgacagacagcattaggaa

SEQ ID NO: 2122 - DNA, 1376 bp, unidentified
  source 1..1376: mol_type = unassigned DNA; note = element_2f11435
  misc_feature 1: note = core
  misc_feature 2..85: note = LE
  misc_feature 86..1111: note = CDS
  misc_feature 1112..1376: note = RE
  misc_feature 1140..1368: note = bridgeRNA
taatggaatggtcgccccctctcagaccggcatccaatgtgccaaagtgggacgatgaatcgtcactgtgagtggagcgaccatcatgaaggctaagactatcggcatcgatttggcaaaagaggttttccaggtccacggcgtggatgaacacggcaaacgcttgttcaacaagcagctcaagcgttcacaaatgacgatcttttttgccaatttgccaccgtgtctgattggcatggaagcctgtgcgtcggctcacttctgggccagtacgctgatatcgttggggcacactgtcaaactgatggctccccagttcgtcaaaccttatgtcaaaaccaacaaacatgatgctgccgatgcggaagccatctgcgaggccgtcactcgacctaacatgcggtttgtgcctatcaaaacgcctgagcaacaagcggtgctggcacttcaccggatccgtcaggggtttattaagcagcgaaccgcccaggccaatcaaatccgtggactactgagcgaatttggcatcatcgttccccaaggtatccatcacttgcggcaatgcctgcctggggtcctggaggatgctgataaccggttacccagcctgttccgtgaacaattgagtctgctacagaaccatatggagtacttgttcgatatagtagccacgttcgataagcaaattgagcagtgccatcagcagaatgagctgtgtcaacgtatcggcaagatccctggcattggacctattaccgccagtgcgctagttgccactatcggcaatgccaacaacttcgaaaatggccgacagcttgccgcctggcttggactagtaccccgccagcattccagtggtggcaaacaagtcttgcttgggattagcaagcgtggcgatacctatttgaggaccttacttatccatggcgccagggccgtcttacagtcagtcaaacggaaacaggatgggctatctagctgggcctgtcggctattggaccggaggaacaacaacatcgcagcggtggcactggccaacaagaatgcgcgtatcgtgtgggcgctattggccaaaaaccaggagtattgtgcacggccgataaacgcgtaagcacgcaattcagtaacacagagcaacaccaccgattgcctaggcaagcaaggagtgatggcaaaacaggtcagaccttgatggggaaagcccgctttgatcttggctcttgaaagagcgtcttgttgatagaggaccccatcagcgcattccatcagggacagaggtaatttgattacctcaagacagtccggatctatggctgcaatcgaagacctgctcgcctgaactgtttgttagcttggcaaacgggggcgaccatcta

SEQ ID NO: 2123 - DNA, 1366 bp, unidentified
  source 1..1366: mol_type = unassigned DNA; note = element_2f1658c
  misc_feature 1..2: note = core
  misc_feature 3..73: note = LE
  misc_feature 74..1090: note = CDS
  misc_feature 1091..1366: note = RE
agatgggatgaaaggggcgtaccttcctgatacgtgctcaaggcacactgacagcagaggaggaagatacgccatgaagacccacgtaggagtagatcttcaccaacgattttgttacttaaccgcggtgaacgcaagcgggaaggtgtttaagcaaagccaggtggcgaacgacggagcggctttgcgagcctggttgcggccgttgcccgttcctcggcaggtggtggtggaggccagcggattctggccggcgtttgcgcgtggcgtagcgccggagtttgagcggctggtgatggtgcatccgctgcgcgtcaaggccattgcgtcggccaagctgaagaacgaccgggtggattccgagacgctggcgcatttatcgcgatgcgacctgctgcccgaggcgtggatggccgatgtgccgacgcaacagttgcgcttactggttaggttgcggatggcgctgggccgtcagcgggcacgggccaagaaccagttgcaggcggtgctgcaccaggagggattcaagaagccggtgacggacgtgttcggcaagcgcggacgggcgtggctgaaggggctggagttgagtgcggcggggcgcctggtggtggacacctggctacgcgaggtggaccatctggacgttgaactggccgagcagacacgagaactggaacggctggccaccgtcgatgcccgcgccaggtttctgcaaacggtgccggggatcggcccgtatgcggcgatggttatcctggccgagatgggcgatgtggaacgcttcgggaacaagcgggcattggccagctatgcgggattgacgccggtggtgcgggagtcggcgggcaagcggaaacgcggcgggattacgcaccagggatcgaacacgctgcgctggatcatgctgcaggtggcgcaggtggccgcgcggtgctcgcccggggcgcgcagttattacgccgggctgcgggcgcgcaaaccggcgcaggtggccaagatcgcgttggcgcggaagctgctgaccgtagtgtgggcgcttctgcatcacggagtatgttacgacgaggagttattcatccgcggctgaaagcaggccatggaaaagtggaaagctgaagaacgcttcccactttcccacagccacgacggcggctacgggcagaaggtatttgcgacggttgcaaggagaacccggccagctcgttcatcctatgtccaccgggaataagagcaagaccccgggagggccttctcagatggagcggccgggattcgaatcacccttgtgtgccacgagcacgaatagaagtctgtcagcaactattcgcaaataccactggacaggtgcggcctttttcataga

SEQ ID NO: 2124 - DNA, 1199 bp, unidentified
  source 1..1199: mol_type = unassigned DNA; note = element_2f22274
  misc_feature 1..2: note = core
  misc_feature 3..232: note = LE
  misc_feature 233..1177: note = CDS
  misc_feature 1178..1199: note = RE
  misc_feature 26..207: note = bridgeRNA
cttgtatggtttcccggcgagtcttaaaaggaaaagacttgtcggggtggagggaccaagcacgcttctgacccttgggtacagactgtgggagatatggccccaccccgcaccttcaaacgccgataaggaatccatcggctgagcgcacactcagaccgacgatactttgcaagccagcgttacggtgcgccccgacaagcccgtttaacctagctgagaggggcaccccatggcaatgccggcaagccgcccggagatcgggattgatgtagccaaagacaacctggttatccatcttcagggcctcaatcaaaccctcaccatcgacaatactccccaggccatccgccaatggctggctacccttcccaaaggctgtgatatcgccattgaggcaaccagcacctatcacatggacgtcaccgagcgcgcacacaccaagggccatcgggtctatgtggtggacggctaccgcctcagcaattaccgcaaaggcgttggcgggcgggccaagacggatctggccgatgcccagttgctggcccgctatctgcacaacgagaaagacgagttacgtcagtggagcccgccccccaaggcgtaccggctgctgcagagtctgctgcgccgccgagcggccttggtcaaagcccgcacggcgttatgccagagcctgagcggagaaccggcgctcaaggcccctctgcatgccctgatcactgagatggatcgcattgacagtctgatccaaaaacgcctcaagaacgcggtgaaggaggctggcttacaggatcaggttcaacgttgcgaggcgatcaatgggatcggcgagatcaccgccattgccttggtcatggccttcctgagaggggacttcaagaatagcgatgccttcgttgccttcctgggattggatgtcagagtccgtgactcgggcaaactgacaggcaaacgcaagctgaccaagcaaggggatacagaagtcaggcgactgctacactgcgccgccatgagtgcatcacggcaccccgtctggcgcgccttctatcagcgctatcgggatcgggggctgaaaaccactcaagccttggtcatcctggccaggaagatggctcgcaccgcattcgccctgatgaagcagcaacaggcgtattgccccgcaaagctcttttaactgttgcgaggcaccatagaat

SEQ ID NO: 2125 - DNA, 1402 bp, unidentified
  source 1..1402: mol_type = unassigned DNA; note = element_2f222e7
  misc_feature 1: note = core
  misc_feature 2..76: note = LE
  misc_feature 77..1102: note = CDS
  misc_feature 1103..1402: note = RE
  misc_feature 1165..1399: note = bridgeRNA
tactgagatggacccggcgccacctttgaaggaaactgggcatccgttgtcaaccgttctcatcaggaggttcatcatggaaatcgatcttctgggcattgatctggccaagcgtgtctttcaactccacggtgccgaccgccgtggtcacgtgcttcatcgcgccaaggtgtcgcgagccgcgctcgttgacactgtgcggcaattgcgtcctcgcgtcatcgccatggaagcgtgcagttcggctcatcactgggctcggcgcttccaggagctgggcgccgaggtgcggcttatcagtccgcagtacgtcacgcccttcgtcaagacgaacaagaacgaccgcaacgatgccgaggcgatcgtcgaggccgcatgccgtccggcgatgcgctttgtaaccgtaaagtcggtcgagcaacaggacatgcaggcggcccaccgcgtccgcgagctgctggttcagcagcgcacggcactgatcaaccagtgcagaggtttgctcggcgagcgcggcatcacgattgcccagtcacctgcagcattcaagcgtgccgtaccggaaattctcaaggagtgcgaaggcgaaatcaccagcttttgccaggcgctcatgatggagttgctcgagcaggtccatgccatcgaagaacggattgcaacctcggaagcctggataaaggcgtttttgaaacgctcagcattatgcaaaaagattgctgccattgacggcatcggcccgatcactgccacggccatcgttgcggctgtgggcgatgccaaggcgttcaaaaatggccgacacctggcggcctggctcggtctggtgcccaggcagtattcatcgggcggcaagtcgcggctccagggcatcagcaagcgcggcgataaatacctgcgcacgctgctgatccatggtgcgcgttcagtgctgcgctacgtcgccaacaagacagacgcgcgcagccggtggttgcaggaactgatcgcgcgccgtggctataaccgtgcagcggtggcgctggccaacaaaaacgcccgcgttatccaggtgctgctgagcagcgaggttgcctatcaccccaggggcatttcggtctgagcggttgccagccgacgagcccaaagacaactcgttttgaaggaggaaggactaccccaacactggtttgcgaagctttttgaacgtgatgacgaaaccggttagaccagctccctgaaacctgttagatgtgccggctggacttcaatgttcaagccgtcagactgctaaggacagggtgcgcgaatctcatcgaggctgcgggcatggatgtgacattgcccagatgcaagccgtatacatgcctgcaaactgtttctagtcacaaaaaagcttgcaaaagtgcgtcgggtccataca

SEQ ID NO: 2126 - DNA, 1465 bp, unidentified
  source 1..1465: mol_type = unassigned DNA; note = element_2f2e30c
  misc_feature 1..5: note = core
  misc_feature 6..244: note = LE
  misc_feature 245..1450: note = CDS
  misc_feature 1451..1465: note = RE
  misc_feature 10..236: note = bridgeRNA
tccttaagttcgtaggtgcagttacttcgcgttgttacgttgtgctgtgacccgggtgggtcgggtgaggcggacgtagggcttgccggcctcgagggggtgcggcttgaaaggactggccgcccggcctgcctggacttcctcgggccgctgattgagatctgcgacgtgatcgcttgtttaaggaaatgccggcgaggttgtccgtggggatgatgttggcagacaagcgaataggagatcgatggcaacgggtcagttgtgggctggtgtggatgtcggcaaggaacatcactgggtgtgtgtggtcgacgacgtcggcacggtggtgttgtcgcgcagactcgccaacgatgagcaaccgatccgtgcgctcgtcggcgagattgactcgttgggtgatcaggttgcctggacggttgacctgaccacggtgtatgccgccctgttgttgaccgtgctggccgatgccggcaagtcggtgcgctacctggccggacgtgcggtctggcaagcctcggcggtctatcgcggtggtgaagccaagaccgacgccaaagacgcccgggtgatcgctgatcaatcccggatgcgcggcaatgacctgccactgctgcatcccgacgacgatctgatcaccgaactgcgcctgctcaccgcccatcgtgccgatctggtcgctgaccgcacccgcaccatcaaccggctgcgccaacaactcgttgcggtctgtcccgctctggaacgggccgcccagctcagctccgaccgtggctgggtggtgctgctggcgcgctaccaacgcccgaaagccatccgccaaagcggtgtttcgcggctgacccggatcctcgccgatgccggggtgcgcaatgctgcggccatcgcggcggctgcagtggcggccgccaagacccagacagtccggttgcccggcgaagaagtggccgccggactgatcgctgatctggcgcagggggtgattgccctcgatgaccgcatcaagaccaccgatgctgacatcgagggccgatttcgccgccatccgctcgccgaagtgatcaccagcctgcccggcatcggatttcggctcggcgcggaattcctggccgccgtcggcgatcccgcgctgatcggctcggcagaccagctcgccgcctgggccgggctcgcacctgtctcgcgggattcgggaaaacgcaccggacgactgcacacccccaagcgctacagccgtcggctgcgccgggtgatgtacatgtccgcactgaccgccatccgctgcgacccggcctcccgcgcctactaccaacgcaaacgagatcaaggcaaacgccctatcccggccacttgcctggcacgacgtcgcaccaacgtcctctacgcactcatccgcgacaaccgcacctggcaacccgactcacccccgatcactcagtcggcggcttgacatcaacattgagag

SEQ ID NO: 2127 - DNA, 1404 bp, unidentified
  source 1..1404: mol_type = unassigned DNA; note = element_2f3bdbb
  misc_feature 1: note = core
  misc_feature 2..88: note = LE
  misc_feature 89..1120: note = CDS
  misc_feature 1121..1404: note = RE
  misc_feature 1173..1396: note = bridgeRNA
taatgggatggtcgcccccttctgaaacggcatcgatgtgccaaagtggagttgtgacacaaccacttgaacgaaaggggcgaccgagatgaagcttacgacgattgggattgatctggcaaagaacgtgttccaggtgcatggtgcagacgagcgggggcgggcggtgctgaagaagcagctcaagcgagcgcagatgctgccgttcttcgccaacctgccgccgtgcaggatcggcctggaagcctgcggcagcgcccactactgggcgaggaagctgcaggcgctgggccacacggtgcaactgatcgcaccgcaatacgtcaagccgttcgtcaagcggaacaagaacgacgcggccgatgccgcggcgatctgcgaagccgtgacgcgaccggacatgccaacggtgccgatcaagagcgtcgagcagcaggccattctgagcgtacatcgtgcccggcaaggtttcgtcaaggcgcgcacggcgcaggccaaccagatacgcgggctgctggccgagtacggcatcgtcctgccgcaggggatgagccacgtcctgcggcgggtgcccgagatcatcgaggacggcgagcgcgacctgcccggcagtttccggctgctcatcgatcgcctgctcgatcaccttaaggaactcgaccgccaggtcggcgagctggctgccgaaatccagacctggcaccggcaggacacggccagccagaagctggccaggattccgggcgttgggccgctgacggcaagtgccctggcggcctccatcggggatgccagaaacttcaagaacggccggcaactggcggcctggctgggcatcgtgcccaggcaacactcgaccgggggcaagccaacactcctgggcatcagcaaacggggcgatgcgtacctgcgcacattgttgatccacggcgcgcgggcggtgattcgaaccgctgaacgcaaaccggatgccgacccctggctcaaggcgctgctggccagacggaacacgaacgtggtggcggtggcggtggcgctggcgaacaggaacgcgcgaaccatctgggcgctgctggcgcatgaccgggagtaccaagcggattaccgcagggcggcatgaacatcctcgcggcgtaacagtacgacacgaaccggcttcgaaaggagaccctccaccgattgcacaggcaatcatgacgtgatggcaagacaggtcagaccggggcctcgccaacctggtaaaagtccagcgcttcgagcgcgtacgactgataaggacgaggccagcgcaatccatcagggacaggggcttggggccccgatcaaagtccggatctatggccgcaatctctacctacttaccgtcatcgattgaaggcttggcaaaccgggggcgaccatcta

SEQ ID NO: 2128 - DNA, 1592 bp, unidentified
  source 1..1592: mol_type = unassigned DNA; note = element_2f3d8c9
  misc_feature 1..3: note = core
  misc_feature 4..271: note = LE
  misc_feature 272..1489: note = CDS
  misc_feature 1490..1592: note = RE
  misc_feature 13..291: note = bridgeRNA
tttagtacgctgtaagtgtagtcggacagtaccagccaggtgctgattcgctgcacttattttaagataagggagtaatccggcctgacgagggctctttggagtaactgcctccgaacaaaaaactgtcagccactcccttgtcttaactgcattcgattgagcgagttgggtctgaaagaacacccaggtatcctgctaaaatgatcaaagataagtgtaagtggtcgccgattacacgcagtacaacgcagaaaggagatcactttttatgtacagcgttggcattgatgtttccaaaggcaagagcacagtgtgcattcttgcaccactcggcgaggtgatccgatcgccgtacgagatcacgcataccgagccggatctgaaggaactggtaaagcgagtcaggagctatggcggcaagaatgatatccgggttgtcatggaagccaccggttcctacagcctgccggtgcttcactatcttctggatcaaggattgtttgtatgccaggtcaatccgctggcgatgaagaagtatcgctccgacatcaacttccgaggtgtcaagacagatcggatcgatgcgctgtcgattgcacagtatggcatcgataagtggcagcagctctgtgagttccagcgtgcagaccagacgtatgaggcgatgaggctgctgtccagacagtatctagcctatcagagaccgcatgtgcttcttacacagaacctggatcatgtggtggatctggtgatgcctggcatcaaggatgagtttgacggctatgaccctgccacaggaattgaccggctgtctgactttctggaggaattctggcattacggatgtattacttctctggggccaaagaaatttgaagaccggttcaggagatgggcaaagaaaaagggataccgttcacgtgctgataagccttccaggatttatcagatcgcaagtgaaggaatcccaagtctggcatgtgaccagatcacgaagcagatggttcagcacaccatcgaagcgcttcgcggcctgaatcacgtgctctatgaaatattagcacagatccgcgaactggccgagcatagaccagagtatcaggcggtcagggcaatgtctggggtcggtgaggtcatggcaccgctgttagtcgcagaagtcggagatccgcgcagataccactccggaaaggcgctggtcgcctgcgtgggtattgatgtgccgccctatgaatccggacagttcaaggcaaaggagcgccgaatcacccggaaaggatcaaagcagctcagaaagcttggatatctggcagtacagggacttgacaagatcaagcccacaaaagatacagctgtgtacgataagctgatgaagaagcgtgcggaaggaaagccatacaagctggccattgtagcggcgatgaacaagttctatcggatctactatgcaagggccatggaagcttacgaagcaataggacaatagtcgttcttacattctgacccgaaaaaaaccaatccgtaattggactggcttttcctcatgcctgagtattgattggaatttactgttgacatcccttagcgag

SEQ ID NO: 2129 - DNA, 1346 bp, unidentified
  source 1..1346: mol_type = unassigned DNA; note = element_2f48f9e
  misc_feature 1..2: note = core
  misc_feature 3..83: note = LE
  misc_feature 84..1103: note = CDS
  misc_feature 1104..1346: note = RE
  misc_feature 1119..1332: note = bridgeRNA
gatggtgtggatggctcctgctccatcggcgtcgcgatgcgccatagtgcaggtgatgtcatcagcgagagaggagccaccccatgcaagttaccaccattggcctggatctggccaagaatgtctttcaggttcacggcgtcactgaggtgggcgagatcgtcttcaaccgttcgcttcggcgcgcgcaaatgcatcgtttctttgagagcctgccgccttgcctggtcggaatcgaagcgtgtgggacgagccattactgggcgcgggagattgcaacgctcggacacgaggtgcgcctgatcccgccggcctatgtgaagccctatgtgaagcgtggcaagtcggatgcgatcgatgccgcagcgatctgcgaggcggtgacacggccgtctatgcggttcgtggcgatcaagacgccggaccagcaagcggtcctcgcgctgcaccgtgtacgggacctgattgtccgtcagcggacgcagatcgtgaacatgctccgcggtgtgctggccgaatttgggattgttgttcggcaaggcgccggccacgccatagcctttgcgaagcattgttttgaaggcgttgaacaggacttgccggacccggcccgggatatcgtgaccaatctcagccaccagctcgtggctctgcaccgccgggtactctggtacggtcgtcagttgaaccgggctgcaccccttgatgcgcgcgtcgcccgcctgcggacgatccccggcgtcggaccgatcaccgcctccgccatcgtcgcctcgatcggggacgggcgtcagttctcaaacgggcgcagcctcgcggcctggctcggcctcacaccgctcaaccgatcgagtggcggtaaggaacgtttgggacgcatctcgaagatgggagaccgctacatccgccgattgttggtgctcggcatgacgtcccggatcaagcagatcagacaccgacctgatcaattcgatccttggttctccgaaatccttgaacgtaagcccgcaaagctggcagccgtcgcaatggccaacaaaacggcgcggatcatcagggcggtgctgacgcgcgagcaggactacaaggtcagaaccgcgtaacgactgaaaggatcaaccaaataacaagacgcaggatgtgatggacatggtcagcccaacgatcaagacacaccgtgccttgtcccggacctcacgtgtccgctctgcagaatgggaccctgtctgcggaacccatcagggccagcggtcagacgcagcgcgcaaacaggccggacacaaggccgcttctgaccaaacacccctcacggaaaaagtcttgctttgcaggagccatccacacag

SEQ ID NO: 2130 - DNA, 1556 bp, unidentified
  source 1..1556: mol_type = unassigned DNA; note = element_2f4e71f
  misc_feature 1..2: note = core
  misc_feature 3..258: note = LE
  misc_feature 259..1437: note = CDS
  misc_feature 1438..1556: note = RE
  misc_feature 3..238: note = bridgeRNA
ctcgtataatataaaagtagtagtttttcacgtccctctccaaggacgagcaaaaagtgctatactgttgtaagatactgtggatcagttacttttacctatcgcaagacgatttaaaggaggctctgaccacagtctctttgcttatttgttaatcagttagtttccgcatgacggcttatcaacaacgaggttacaaccgcagagagattcgtggtatctttacgcagtatcaattctcacaaaggagtactctccatgatttatctcggtatcgacgtttccaaggacaagcatgactgctgcattctctctcaagacagggatttgcttaccaaacctttctctgttcccaattcccgcgagggttacgaaaaactcttttctctcgtttcttctttcgagaataatcccgaaaaagtaaaagtaggacttgaagccaccggtcattacagcttcgccattttgggttacctgttggaaaaggggtttaattgcttcgtctttaaccctttgcacaccaatctctaccgtaaggctctctctttgcgaaaaaccaaaacggataaggttgactccaaaaccattgcgaatatgctgttttcttcggtgggcctcaagccctactcaaaagcattataccacaatgaacagttaaagtcactctctcgttacagattttccaaagttcgtgaaagagctaaactcaaacaacaacttgcaagattggtaaatatccttttcccagaactggaaaaactcgttccaacccttcacataagctccgtatatgcacttttggaacaatttcctggcgcttcctttgtcgctaacgctcaccttactaaactcacaaatttgttgactacggcttccaaaggtcattacaagaaagagaaagcaattcagatccgagtttcggctgcgtcttctgtcggttgtttcatgcccgcaaagtctttggaactaaaacataccattacgctcatccgcgtactttccaatgaaattgcggaaattgaatccgaaattaaaaaacttatggacgaatcgcattcaccgattacctctatccccggtatgagctaccgtatggctgccatgattctttccgaaatcggcgacttttccaacttcgattcacccgacaagattcttgcctttgcagggctttctccgtctacttaccaatccggtaaactcgacaatgcctattctcacatggaaaaacgaggttcaagatatctgcgatatgccctttataccgctacttcttatgtctgcgtttgggacaagtcttttgccgtttacctgcacaaaaaaatttctgaaggcaaacattattatgtcgccatatctcacgcaattaaaaaacttgttcgtttgatttacgctttacaaacttcaggacaacaatatattcccgccgtagcctgaaacaaaccgacaatttcctcctgagcagccgtatgggtgctctttttctcacgccttttttactaaccaattttttcctttactttttgccattttttgcttgacttttaatagttagt

SEQ ID NO: 2131 - DNA, 1595 bp, unidentified
  source 1..1595: mol_type = unassigned DNA; note = element_2f55761
  misc_feature 1..3: note = core
  misc_feature 4..264: note = LE
  misc_feature 265..1473: note = CDS
  misc_feature 1474..1595: note = RE
  misc_feature 13..284: note = bridgeRNA
tctattacaataaaattggacagggaagccgggccgccagtccggctttctttccatctcgtgcctaagctacaataagaggaacaaccggctgaccaccaccttcttgggcttgtatgtccgtaagaaagactgtcagccatcctcttgttgtagcgttcgatttgagcaggttgagccatagagttcgtgtcacccaatagattgaatcggcaacgagaaaaagatggattccggttgcaaattcgtataggaggtagaaccatgaactctgttggtattgacatttccaaaggcagaagcatggttgccgtcatgcgtccctttggagaggtcgtcgtctcaccctttgaagtgcgtcacaccgacagtgaactcagcgaactggcaaagctgctcaaaagcctggacggtgaaacccgcgtggtcatggaggccactggaaactaccatacgccagtggcttggctgctccacggcgctggcctttatgtctccgttgtcaatgccaaactggtgcatggctacgggaacaacgatttgaggcgtgtcaagaccgacagaaaagatgccgtaaagttggcaaactacggccttgaccgctggcttaccttgccgagatacattccagaggaagatacccggctgctgttgaagaactgctatcgtcagtaccagcagtattccaaggtgcaaaccatgctgaaaaacaacctaatctccttgctggataccacttttccaggcatgaaccgtttgtttaacaccccagcccgcgcagatggcagcgagaaatgggtggacttcgcggcggatttctggcactgcggatgcgtctgcgaatgctctgaaaaagtgttcatgaacaagtaccagcgatggtgccgaaaacacggctacaacttcagcgagagaaaggctcttgacatttacaccgaggccagtggacacattggcgttatgccaatgtccgataccacaaagttacttgtggctcaggccgtgtcccaactcagagcaacctcagccgcacttgccgtactcaagcaggagatgcaaacactggcttcccaactgccggaatatcccattgtcatggagatgttcggagttggtccagcccttggcccacaactcatggccgaaattggcgatgtacgccgtttccactctaagaaagctcttgtggcctacgccggtattgatgccccaccgaatgattcgggcgatgtgacaggcaggcacaaaggtatgagcaaggtcggcgcgccgtctctgcgccggacgctgttccttgtcatgagcgtctatttgcagaatgcaccccttgatgaacctgtttaccagttcatggacaggaagcgagccgagggaaaaccttaccgtgtctacatgatggcttccgctaacaagttcctgcggatctactatgcctctgtgaaagcctacctggaaactttagagcggttctaactttgctacaataccattgactggccgtcgtttcaattttgaaatgcgaagcggcttagtttggtgtggcctttttcaatccagtcttaccttgatttttctacttgacttttcttagcagg

SEQ ID NO: 2132 - DNA, 1354 bp, unidentified
  source 1..1354: mol_type = unassigned DNA; note = element_2f5879b
  misc_feature 1: note = core
  misc_feature 2..69: note = LE
  misc_feature 70..1101: note = CDS
  misc_feature 1102..1354: note = RE
  misc_feature 1132..1348: note = bridgeRNA
taatgagatggtccgccgccttgatcagccctggtgggatgatcgggcacagacaaggaggatcatcgcatgaacatcgcctctgttggtatcgatctgggcaagacgaccttccatctcgtcgctctcgacggtcacggcaaggtagtcagcaagaagaagttctcccgcaagcaactactggtctacacggcgaacctgcaaccggcgctggttgggatcgaagcctgttcgggggcacatttcatcggcgctgcgcttcgccggcagggtcacgacgtgcggctaatcccggcacagttcgtcaaaccgttcgtaaagtcgaacaagaacgatttcatcgatgccgaggccatcgccgaagccgtcacccgggaaaacatgcgcttcgtgcccatcaagaccgacgatcagctcgatctgcaggccttgcaccgggtgcgcgaccgactggtgcatcgacgcacggccgtgattaaccagatccgcggcttgctgttggaacgcggcatcaccttcgccaagggaccggcgaagctgcgcaaccagatccccgcgctgttggaagacgccgatcagaacttgacgcctcgactgcgcaacctgctcggtcgtgtctggcaggagtggaagcaactgcaatccgacatcgaaggtgtgagtcaggagatcgaagtcatctccagcgaggatgcggcctgccaacgcttgcgccagataccgggagtgggaccgctggtcgccaccgcgaccgtggccgccattggcaacggagcggccttccacaaagggcgggagtttgccgcctggctcggactggtgccccgccagcactcgaccggcggcaaggccaggctattcggcatcagcaagcgcggcaacatttacctgcgacgcatgttcatccacggtgctcgcgccgtgcttctgcgagtgaagtacgacaccggcgggctcgggaggtgggtgcatcagcttgaagcgcgagcgccgcgcaatgtcgttacggtggccattgccaacaagctggcacggatagcatgggcggtattggcaaagggtgaggattatcgcgccgcggcggcagtcggagcagcgtgacctaagcaacgttcggatacaccgttcccaccaggtctgctgaggagaggacaggacgaaagaacagtcaaacggcgtgccggaaaacctgagttgagaaatggtttgccataaccgagcgatttatcaggaccagcacgcgcggatcatcatcgtggcccggagaaaaatctccaactagaggccgaatacatttacgcagactgtacgtcgtcccaacaatctcccttgcagtcaggcggcggaccataca

SEQ ID NO: 2133 - DNA, 1649 bp, unidentified
  source 1..1649: mol_type = unassigned DNA; note = element_2f5f7d5
  misc_feature 1..5: note = core
  misc_feature 6..421: note = LE
  misc_feature 422..1639: note = CDS
  misc_feature 1640..1649: note = RE
ctcattgggcatcctccccaccttgatcgccgttcgatgagcttcgatgcagggttgtccacggggcttggttgtggacaacgcgccggcccttcaacaggccaagtggctcgttgtccacaactgcgaagcacccggtgggcaacccgtgttcgatgcccgacggtggatgtggatcggcattgacgctggtcaggagatgcgccgatggtgtgaaccgacttccgtgcccctgcggtgactgcctgtggtgcttgccttcgatggcccgcatgagacctgcagcaccgcggggtgccggaaggccgcaacgggccactgggtgtagcgccaggctggccaagctggagcgcctatcaatgagcttcccgccgcgccttccgacacgggcagtcataccgcaactccaaggagcttgtccatgagtaccgatgtcttctgtggcctggactgggccagccgcacgcacgcggtgtgcatcatcgaccccgccgggcgcgtgctcgagcgcttcgagatcgaccatgaccgcgacggcctggccgagctgctgcgccgcttggcgcgctatggcgcgcgcgtgcgcaccgctatcgagcgtccttcgggcctgatcgtcgatgccctgatcgaggccggccatcaggtgttcccgatccaccccaacgcagtcaaggccagccgcccgcgctaccgcagccacggcgccaagagcgacgcctcggatgcctatctgctggccgacctgctgcgcaccgacggccaccgctgggcgccgctgttgccgcagtccgattcgatccgcgcactgcgtgcgctggtgcgcgcccgcgacgacctggtggctacacggctgggcttggccaatcagctgcgcgccacgctcgatgccttttggcccggtgcggccagcatcttcgccgccgtggactcgcccatcggtctggcgttcctgcgccgctatccgtcgcccacatctgcggcgcgcttgtccgaggccgcgctgggccgcttctgtcgcgcccagcactacagcggccatcgaactcccgctcaactgctggcccgcctgcgcgcggctgctcaaggtcatgcgagcaaactcgctggcgcagccatggccgaggtggtgctcgccttggtggctgtgctcaagccgttggtcacgcaactcggcgcattgacgcgacgcatcgaacatttcgtcgcctcgctgcccgacgggcagatcatcatgtcgttcccgcgcgccggacatgtctgcgccgctcagatcctggccgaactcggtgaggtgcgcgagcgctacgccacgctcgatcagctggccggcgaggccggcgtcgtacccctgacctaccagtcgggcaagtctcgctgcgtggccttccgctgggcttgcaaccaccggctgcgccgcgccatcacgacactggccgacaactcgcgtcacgccaacgtctgggctcgcggcatctacacagccgcgcgcgcgcgcggctgcgaccatccccatgccgttcgcatcctcgcgcgcgcttggctgcgcgtgatctggcgcgcctggaccgatcgcaaggcctacgaccccgcgctgcatctgggcgcgctcaaagcctcttctgactcggggggttgacactgggtgt

SEQ ID NO: 2134 - DNA, 1406 bp, unidentified
  source 1..1406: mol_type = unassigned DNA; note = element_2f6e78e
  misc_feature 1..2: note = core
  misc_feature 3..84: note = LE
  misc_feature 85..1158: note = CDS
  misc_feature 1159..1406: note = RE
  misc_feature 1151..1393: note = bridgeRNA
tgatgcggtggaacggcccgctccggcagcatcatcgtgctaagacgtggtcgttgttcgaacgccacaaggagggaccgttccatgaaacaggttagcaccatcggattggatttggcgaagcacattattcaagttaacggcgcgggtggcgatggctcaccggtgttcaaccggagactacggcgcagcgaagtgctgcatttcttctcgaagcagccagcctgccttgtgggaatagaagcctgtggcagcgctcattattgggcacgagagattgcaactctcggccatgaagtgcggctgatcccaccagcttacgtcaaaccgtttgtgaagcgtggaaaaacggatgcggcggatgccgaggccatcagcgaggctgtgactcgcaagaccacgcgcttcgttccgatcaaaacggctgagcaaaaagccgcaatgatgttcctgaagagtcgcgcacctctggtcaaacagcaaacgcagacgatcaacgccctgcgctcgcatctggccgagttgggcatcattgccggcgccggccgaacaaaggtcgaggcgttggttgcaatcgtacgggatgtagcagatatccgcttgcctacggcagcgcgcgtcgccctgacggcagttgccgatcaaatcgaggctcaggcggaccagattgacaagctcgagcgagccattgttgctgcggcaaagaccgacaaggacatgcgccgactgactacgatccccggcattggagccattacagcagcgaccatcaaggcgctggtgccagatcccggcggcttcaaatcctctcgtcactttgctgcctggctgagactgacgccgcgacggcattcgagtggggggcaaggagcggatgggacgcatctcgaagatgggaaaccccgaacttcggagcctcctcgttcttggggcgacatccgtcctgcgaattgcccggaaggccgatcgaacgcggccatggttgaaggcgctgctcgccagacgtccgtacaaggtggcagcggtcgcgctggccaacaagacagcgcgaattgcctgggcgctcttgaacaggggcgggatttatcggcatcgggagacgctagcgacgactacggctgccgctcgatgaatacagcagttgtcaaagagatctgaccggcgcgggccggcagagggcaaggagcaataacaggcgatgaacccacgggacgaaatcccgacacgagtgaggctggcgcgacaatgcgcttcaagcgcgtctgattgatttagccccttgtgtcgcggacttcatcgaggccagcggtcatgcgccgcgctttacaggccgtatacatgaccgcaccgctcccatgtgtgaagtcgattgagaaagctcttgcgcccgcgggccgttccataca

SEQ ID NO: 2135 - DNA, 1285 bp, unidentified
  source 1..1285: mol_type = unassigned DNA; note = element_2f7ba2d
  misc_feature 1..3: note = core
  misc_feature 4..194: note = LE
  misc_feature 195..1145: note = CDS
  misc_feature 1146..1285: note = RE
  misc_feature 32..172: note = bridgeRNA
gattgcatgatggggtcgccatcctgttggatggggcgccggcggaccctcgagtactggattggtcctgcaagaccgtgggtatcttgggaccgccggcgttacggtctgacacgcgcacggtagagagggcctgagcccgcattgcaatccggcgtgccgaccagatgcatatactgtcggagatcagcaatatgggcaagatgatgatcggggtggatgtcgccaaggagtggatcgacgttgcgatcgccggtgacggtcgggtcaagcgaatcgtgaacagtgagcaaacgattgctgcctggcttgtgcagaccggagccgggtcgatcggcttagtcgcattcgaaccgacgggtggttatgagcggcatctgcgccggtgccttctccgggcgaaggttgcctcaaagcaggtgcacccgaacgaggtcgtcgcctatcgcaggcggcgcggcatcaaggccaagacggaccgcatcgacgccagactgctggccgattttgccggcgaggaactggctcgccgcgagttcgagccagttccgcaagccgatgaagtcttacgcgaactggcatcgcgacgccgacaattgcaggctctgctgcatgccgagacctgccggtgtgacgtggccgacagcgccattgtgcgcaaaagcctgcaggcggtcattgccacccttgagcgttcgctcgctacggtcgacaaggccatcgccgaacacattgcaagctccgcacatgccgaaaccagccgacggctacaaaccttctgcggtgttggccccgctatctcggaaacattgatcgcggacctgcctgagctggggcatctgtcaggcaagaaaatcgcggcgctgtgcggcgttgccccgcacacgcgcgatagcggcaagcagtgcgggcatgcgaccaccggtcatggccgcccaggtgtgcgcaaagtgctcttcaacggcgcccgcagcgccatccagcacaatccggtcatgaaggccttctaccggcacctggtcgacgacaatcaccgcttcggcaaggtcgcgctgactgccgtcatgcgcaaaatgctggtgacgctcaacgccatggtccgtgacggatcagattggaagcacgcagccgggcctgcagcatgagccttcgatcatggaaagccagcgcggcaacgcgcgcagccggtcaaggccggcttcgccgccgcgcagcggtcgccttgaccggcgagcacgatgccgcactctcgccggcgatcgaacccttgacgaacatcacggta

SEQ ID NO: 2136 - DNA, 2144 bp, unidentified
  source 1..2144: mol_type = unassigned DNA; note = element_2f7d692
  misc_feature 1..2: note = core
  misc_feature 3..271: note = LE
  misc_feature 272..1471: note = CDS
  misc_feature 1472..2144: note = RE
  misc_feature 20..246: note = bridgeRNA
ctcgtataatgtatttacggtgtttttgataaggacaccgtatgaaaaacttgttatcctgctgtggatgtgggataataagcgtaacagacagagggcgcagtctccctccttggggtatagcctcgaacgaaagaattgcgcctctgtccttacggttagatgcgaatgagctggatagcgataatgcgctgcatatctaacgaggttgtgttgccgtaagaatcagagggtaaccctgtctgtgtatctttacatgggagggttattattgttttactgcggaatcgacattgccaaacgtaatcatgaagcctctgtcatagacgcggagggtaaacccctgcttgacagcatcacaatcactaatacgcaagagggctgcgagaaactgttttcactgtttgaacggctgaacatctgcaaagattctatcatcatcggaatggaagcgaccgggcattattggctgtcggtgtatgagcatcttaatgagcaaggctatgatgttcgggtaatcaatcccatccaatcagacgccttccgtaagatgtacatacgtcagaccaagaatgacagcaaggatagctttatcatcgctcaggtgatgcggttcggacaatactcagagataaccctgtcggatgagaacaccgttgccatgcggcaactcacgcggttcagaatggcgcttgtggacaactgtggcgactgcaagcggcgtattatcgcgctgctggatcaagtattcccagagtatgcagacctgttttcagatacgtttgggacaacctcaaaggaactgttgctcaactatccgacgccagatgatatgctggcggtatccacccgaaaactgaccacattcctgaacaaaaccagtcacggtcgattcggagaggaaaaggcgaaagagatacgctccgccgcatccaattcatttggagtaggctttgccaagaacgccttcgcgttccagattaaacagcttgtcgagcagctcgtgtttcttgaagcccagattgaagaattggacgagcagattgcccacttgctaaaacagacgaatcaggttatcaccaccattccgggtatcggcgatacgctgggtgccatcatcatcagcgaaattggcgatatcaaccgtttcgacgctccgaataaactagtggcgtttgctggacttgatgtgaaagtagtgcaatccggcgactttactgggacaaagcagaaaatatccaagcgaggctcgccctatctcaggcgggctatttggcttgccgccaaccgtgcggctttttgcgatcctattttgtccgaatactatcaatccctgaaagcgaggggaaaacaccatctgaccgctgtgggcgcggtttctcgaaaaatgtgcaatatcatctttaccattctaagggagaacagaccgtacgaagctacgccgccaaagaaaggaaatgttgaatcatgaaatttctctatatctcagcttcaaatatggtaaatgtaaaaagcaaagaaagcacatcgtacaaaatctgtgagattgctaagaatgctttgcaggataaaggtgtggacgcgagacattccattttggaactaaagaatcatcatttgctgccctgtattggttgcgggaaatgctggaactcccatcgttgcgtattgaatgatgattttaacaatatttacacccaaatcattgattgtgatttgcttttaattgcctcgccacattatgctcctattccagctaaacttgcggctttactcgaaagaatggagcaaattacttttttgcattggggcagcgataattcatataaatccgaggtctacggcaaaccaacaggtgtaatatcgcatggcggtggagaagattgggccttaaaaagctacaaaattatggttaacgatacgattgccaatgccctggataccatccagctaaagctaatcccgttcaacgatgaatggaatacggggatatctttacccgtacgcaaagcctctttttcaggtgcctctatctttccgactcaagaatacgattgggataagcttactaaactaatctctgattacattgatgtgctcattcaaaatatttaacttttccctcttgactttttatagctggt

SEQ ID NO: 2137 - DNA, 1536 bp, unidentified
  source 1..1536: mol_type = unassigned DNA; note = element_2f7e062
  misc_feature 1..2: note = core
  misc_feature 3..240: note = LE
  misc_feature 241..1362: note = CDS
  misc_feature 1363..1536: note = RE
  misc_feature 11..215: note = bridgeRNA
cttgtattatagagtagtagttattagagcccctctccaagggctgtgctacaatgtaagggatgctgtggatcggtgtaatccccctaccacaagatggttcaagaaaggttccaaccacagccccttacaattttgttgatcagttaaataccgccagacggtttatatggaacaaggctacaaagtaaggagcactgtggatgcagcatcacatatttatcgttggaggtatttgttatggtggtttctgttggcatcgatgtctcaaaagataagcacgattgctttattgtcagctctgatggtgaagtcctggcggatgtgttcacaatttccaataccttggatgggttccacggcctgttgcagcgaatccaggaatgtagcgcaccgcggacaaaattaagagtagggcttgaggctaccggacattacagctacaatctgctcgggtttctccttgacaacggtctggccacctatgtcctgaaccccttgcgcacaaatctttaccgaaagagcctcagcctgcgaaagaccaagactgaccgggtggatgcgcgaacgattgcttctatgctgttatccgatgcgggcctcaaaccctacactgatacagcataccacaacgaagaattaaagtcactgaccagataccgtttcgacaaggtaaaagagcgtgccaaactgaaaagttccattgcccggcttgtctgtatcctgttcccagaactggaaaagctggttccatctctgcacattgcctctgtctacgctttgctggaagagttccccggcgctaaacaggttgctgcagcccatttggcaaggctgaaagcactgctcgaaaccgcctccaatggtcactacaaacgggatatggctcttgaaatacgagataccgccaaaaactctattggctctcagatgcctgccaagtcccttgaattgcagcacaccatccggctcatccgtgaactgaatcgtgaaattgatgaaatcgaagagcaaatccaatccattatggatgagcttcattctcctatcaccactatcccagggctggggttccgcatggctgccatgatcctggctgaagtcggcgacttcacccgctttgactcccggacaagctgttggcttatgccgggatgtccccctccacttaccaatccggacagctcaaaaattgctacccgcacatggaaaagcgtggctcccgatacttacgctacgcactttacaacgcaaccaagtatgtctgccactgggactcggcttttgctgattatctcgccaagaagcgggcggagggaaaacactacaatattgccatctctcacgctgccaaaaagttgattcgtttgatatttgccatggagaaatccaggcagccatattgctcagcggcttaagcgcagctacttgaatagccagcaggggtctgacaagacctcagctttgctatacctttcttgagccatctcttttcaccaccaccattcatttttggggttgattttaatagttaat

SEQ ID NO: 2138 - DNA, 1404 bp, unidentified
  source 1..1404: mol_type = unassigned DNA; note = element_2f7e236
  misc_feature 1: note = core
  misc_feature 2..330: note = LE
  misc_feature 331..1128: note = CDS
  misc_feature 1129..1404: note = RE
  misc_feature 1179..1399: note = bridgeRNA
caatgggatggagtccgacccaccctacacaggcgctgctgcgccacaatggagagtgagagggctactgtcatgcccaggctgaggagcacatcccatgaccatttcccgagtcggtgttgatattgccaagtctgtcttccgtgtccacagtgtcgaccgtcatgatcaggtgcagtggcgagggaagtacgcccgtgacaagtggctggacgcaatcgtcaagcgtgtccctatcggtgccgagatcgccatggaagcctgcgcctcttctcattattgggcgttcagacacgtggttatcacgtcaagctgatcgcggtctaattcgtgaagccctacgtcaagagcaataagaatgaccgagtcgatgccgaggccatctgtgaagccatggggcgaccaacaatgcgttttgtggtagtaaaaacggcagctcaacaagatattcagaccactcatcgcatccgggaagagctggttcagcaacacactgccaaggcaaatcagattcgcggattggtcggcgaatacgggctagtggttcccgtcggtatcggtcagttgcgcacggctctgccacgctggctggaagacgctgagaacgggttgaccgatgacttccgtttcctgcttgctgggctcgccgaagatcttcggtacctggatgatcgaattgctactgtcactgagcgcattgcgctccacgccaaaactgacccaatggcgaaatgcctaatgaaactccgtggtttcggcagcattacggccagtgcgctggccggcgccctgggggatgctaaggcgttcaagcgtggacgtgactttgctgcctcactgggcctgacaccgcgtcagcacagtaccggcggacgagaccgcctgctggggattagcaagcgtggcgatcgttacctgcgcacattgctggtacatggtgcccgggtggtcttgcgatacacggaaggcaaagaggacaacctgagtcactgggttcggcaactggctgagcgcaaacatgtcaatgtggcggtgattgccttggccaacaagacggcgcgtatcgcctggtcgatcacctgtcatgacaatgcctacgatccggatagagcagctagagctgcgtaaatccaaccccgtgaatctaatgcttttattgcactgaggtcacccaccaccacgattgctgagcattctgcaagatggcaaacaggtcgaaccgacgtcggtaaaccccgttttggacgaagagctagcagctcgccttaccatttgggaactgtcgtgcgaatagcccattaggatccgatgccactggcatcttcttaaagaccggatatacgtgtgcagtcgttcctattaaccatcgtgccttgtgcttgcaaccgggtcagactccatata

SEQ ID NO: 2139 - DNA, 1604 bp, unidentified
  source 1..1604: mol_type = unassigned DNA; note = element_2f842cc
  misc_feature 1..3: note = core
  misc_feature 4..238: note = LE
  misc_feature 239..1447: note = CDS
  misc_feature 1448..1604: note = RE
  misc_feature 50..223: note = bridgeRNA
cttatctgttaaactcaaattagatagcaggaaagctagcccaagctagccaaaaatatagccaaaggtttccgggaaaaggatttcacctcctgacagttcgactgcttacaaaagagctacctttcccggatcaaatttgcagactgcggttcatagaagggttgtgcttcgagcaccacgttagataaggcccactgccagtctgcaaccaatctctataccggaggttctcgacatgtacttcgtaggaattgactggtctgacctgcatcatgacgtagctgtgctcaatgaaaagggtcaagagcttaagtatttcaccatccctcacaacaggaaaggcatggagttgttaaaggaaaggctcttgagcatcgatcccgaaccggaaaacttcgcctgcctgctcgaaaccaaaaacggtcttctggtgcagtttctgctggaagccggctttccggtttacccgctcaatccgaagattgtggattaccggcgaaagccctccggggcaaaaagcgaccccatcgatgcccggctgctggccaacatcggccgctccgatctggcgcagttgaagaggcttaagccagatgcggaactaatcgcggaactaaagatgctcacccgggaccaggacagcctgatccaggaatccacccggctcaccaataagctcatagcttgcctgaaggagtattacccggtagccctggagttcttctcgaagccaaccctgccggtagccctgggatttttcaagctttaccctaccccggatctggtcagggaagctaccgttccggagatggccgcttttctgaaaaagcataagcacccccggcccaatcaaacggccatctccatctggcagaaggcgcaggagccgcagcttcaggccagcgctcccaccgtgcgggcaaaaggccgcttaatgctcgccctggtgagacagctggaggtagtacaggagcaaatcgctgcttacgacgaggagatcaaccgcctttttcagcagcactccgacagcaggatcttcgctagcctgccaggggcggccgggcggcttgcgccaagactgctggcggagtggggggacgaccgggaacgttacgaaaatgcggccgtggtccaggctttagcgggtacctcgccggttctctttcaaagcggcaagtaccgctttgccaggcagcgcagatcctgcgtaaaacctttccgacgagctctgcacctgttcgccttccagagcatcaggcaggtttcctgggcacgggaatattacgacaccaagagaagccagggcaaaacccaccatgaggctttgcgggcattggcaaatatctgggtacgaataatctttgccatgtggaaaaaccgtacttgctacgacgaagccacatttctcgcagcccgtgccaggcatcttagtcgggcagcatgatgttaaatattcggttttcaatgttctttagccgccggcgagggctggattttaatctggccctcgccgggcggggcgggcgaagcccgtcctttttaaagaccacgaacatttgtactacctaaaattttttgataaacctattgacatagaaggt

SEQ ID NO: 2140 - DNA, 1422 bp, unidentified
  source 1..1422: mol_type = unassigned DNA; note = element_2f89c97
  misc_feature 1: note = core
  misc_feature 2..287: note = LE
  misc_feature 288..1109: note = CDS
  misc_feature 1110..1422: note = RE
  misc_feature 1191..1413: note = bridgeRNA
taatgagatggtccgccgcttgatctccacgttgagttgggtgatcttgttggcaggtacaaggaggatcatcgacatgcagattcactcggtaggcatcgatctcggcaagacgacgtttcacctcgttgccctgagcgcagcaggcaaggtgctgttgcgcaagaagttcactcagaggcagctcatcaccttcaccgcgaacatgcagatctccctgatcgggatggaggcatgttcgggagctccacttccttggccgagtgctgcgacagcagggccatgatgtgaagctcatcccagcccagttcgtgaagccgttcgtaaagtcgaacaagaacgacttcctggatgccgaggctatcgccgaagcggtggaccggcagaacatgcggtttgttccgatcaagacggacgaccagctcgacctccaggcgatgcatcgtgtgcgcgatcgactcgtcgctcgccggacgtctgtgatcaaccagctgcgggccttcctgccggagcgcggcatggtgttcgctaagactcccttcaagctgaagcaggcgatgcctgagatcctggagaacgcagaggcgaacctgacgccacggatgcgcaacctcgtcagcatgctctggagcgagtggaaggatctcgatcagcagattgttgccatgaacgatgaggtcgagcagatcgcctcctccgatcccgcctgtcagcggctcagacagatccccggcatcggcccgttagtcgcaaccgcgatcgtcgctgcgatcggcaacggagccgccttccataagggccgggagttctcctcctggctgggacttgtgccgcgacagcactcgaccggcggcaaggccagactcttcggcatcagcaagcgaggcaactgctacctgcggaagttgcttgtacatggtgctcgatccgccgtccttatcgtcaagcgagagcgatcgccgttcgggccttggctcgacgcacttgaacaacgagcgccggtgaaggtcgtcatcacagccgcagccaacaagttggctcgcgtcgcctgggcggtgctgtcgagcggcgaagagtaccgcccacccacgaccgcgatggcggcctgagcaggcgcggaaaagacgccttcggcttggaagcgcaacaacgcgctcccactttaccgcaccacgacgacgatttagagttcccaccaaggtctgcactggatagctaagacgaacgaacagttcccaacggcgtgctcgcaacctgctcccgaaaatggtcctccatgaccgtcccgtttatcaggtagagcacgcagcgcaactcatcatggccaggagactacaccctccacccaaaggccgaatacatttgcgcagacctgtctttcgcccttcgcttttcccttgcattccggcggcggaccataca

SEQ ID NO: 2141 - DNA, 1392 bp, unidentified
  source 1..1392: mol_type = unassigned DNA; note = element_2f8aecc
  misc_feature 1: note = core
  misc_feature 2..89: note = LE
  misc_feature 90..1124: note = CDS
  misc_feature 1125..1392: note = RE
  misc_feature 1165..1384: note = bridgeRNA
caatgggatgggcgcccccacccgagacggcatcgatgtgccaaagtggaagtgcgtgtcaaccacttaaaccgaggggagcgtccactatgaagcttacgacaattggtatcgacctggcgaagacactgtttcaggttcatggcgtcgatgagcgcggcaaggccgtgttgaagaagcagatcaagcgtgaccagatggcgactttctttgcgaacctgccggcgtgcctgatcggcatggaagcgtgcgccagtgcgcatcactgggcgcgaaagcttgagggtttcgggcacacggtgcggttgatggctccgcagttcgtcaagccctacgtaaagacgaacaagaacgatcttgccgatgccgaggcgatctgcgaggcggtggcccgaccgaacatgcgcttcgtgccggtcaagagtgtcgaacagcaggccgttttgtcactacaccgggtgcgtcagggcttcgtcaaggcacgcacagcgcaggccaaccagatccggggcctgctgggtgagttcggtctggtcatgcctcagggcatcacaaacgtcaggaagcgcgtgccagaggtcatcgagaatgcgagcaacgaactgcctgcagcattccggcatctgattgcccggctgttggaccacctcaaggagcttgatcgccaggttgacgagatcgaagcgcagatcaaggcgtggcatcgcagcagcccgctgagcctgaagctcgagaagatccctggcatcggaccattgggtgccagcgcactggtggcctctattgccgatgcaaagagcttcgacaacggcaggcaggtgtccgcgtggattggagtggttccccgacagcattccagtgggggaaaatcgacattgcttgggataagcaaacggggtgatgtctacctgcgaacgttgcttattcatggcgctcgatctgcgattgttgccgcacagcgcaacgccaaggtcaatccctggctggctggcctactgcatcggcgccatccgaacatagcggcggtggcgctggcaaacaagaacgcacgcacggtgtgggcgttactggcccacgaccgggagttccgtcctgattacgtccccacgccggtagctgcctagctccggcctggcaaacccaacacaagataggaggtcttccaccgattgctcaagtgatcacgcagtgatggcaaaacaggtaagaccgtggttggcaaagcccaaaacgtccgcagcacttcgagtgcacagaagcgaatgaggagtcaaccagcgcattccatcagggacagcggcaatgccgcagctaaagtccgaatgtacggttgcaatcttccctatcagccttcacgaactgaaagcttgacaaaccgggggcgcccatgta

SEQ ID NO: 2142 - DNA, 1445 bp, unidentified
  source 1..1445: mol_type = unassigned DNA; note = element_2f8e308
  misc_feature 1: note = core
  misc_feature 2..225: note = LE
  misc_feature 226..1431: note = CDS
  misc_feature 1432..1445: note = RE
  misc_feature 12..237: note = bridgeRNA
ctactagacgattcccgtaggaccggtgtccggccagactcggtccaggtggtcggcggggcgctctctttgcggctgcccactgatgcttgggtgtggctcttttccgggctgcgtccccgccgactgccgtgttgaggtgtggctcaagaggggactgcccagctcgcagtagcaatgcccgcctcgcgtccacatcagccgcgacacgaaggcgggaagcagatgcaggtgttcatcggggtcgatccccacaagttgtccgcgaccatcgaggtcgtcgacgcgcgagagacagtcctggccaagggcatgttcgacaccaacaaggccggctacgccgcgatgcgcagacacgtcgctacatggcccgaccgggtctgggccgtcgaaggcagcggcggtgccggacggccgctggcgcagcggctgctggccgacggtgagcgggtggtcgacgtcccgccgaagctctcggctcgggcacggttattcgacaccggccacaatcgcaagaccgacgctcatgacgcccacgccgtcgccgcggtcgcggtccgcaccaaaggcctgcgggtgctgtcctacgacgggaacctcgaggtcctgcggatgctcaccgaccggcgcgcagagttgatcagccagcgcgtgcagaccgtgaatcgccttcagcgactgctgtccgagctgatccccggcgaggtcaagctgaatctcaccgccccgcaggcacgcgagatcctctcccgacgccggccacgcgacctggctggcaagacctgcaagcggctcgcgctggaacagctcgaggacctgcaggtgatcgaccgcaggatcaaggccgccgacaaagagttgaaggcgctggtgatcgcgtcggggtcgaggctgatggatctacccggcatcggccccgtcggcgcggctcggattctcgccgacgtcggtgacgtcgcccggtttgctgaccgcaatcgattcgcctcctggacaggcaccgcaccgctggacgcctcgtcgggtgagcaggttcgtcatcgtctctcccgggcgggcaatcggaagatcaaccacatgctgcacatggccgcgttgagccagatccggctcgacaccgaaggccgcgcctactaccggcgcaagagcagcgccgggaagacgcacctcgaagcgctgcgttgcctcaaacgacggatctcggacgccgtctaccggcagcttctcgacgacgtagccgacaccgcgggcgcggtcggtacgagtccgggagggcaaagcggggcgtctcaagaatccagcgcggccgactcacacccgctcatcggcacttcggatcagccactcccggacccgcatccacgacgctacgccgcgacctcacagccacggaagccccagcccgtggaagcgctccgcgacgccggttgacaacagaggggagc

SEQ ID NO: 2143 - DNA, 1409 bp, unidentified
  source 1..1409: mol_type = unassigned DNA; note = element_2f8f168
  misc_feature 1..3: note = core
  misc_feature 4..99: note = LE
  misc_feature 100..1122: note = CDS
  misc_feature 1123..1409: note = RE
  misc_feature 1180..1406: note = bridgeRNA
cgatgagatggtctcctccctctcccttctacggcgtcgatgcgccaagggatagatgctaaaacatctactgaaaccgaacggagacaggaggagaccatgaccaaatttatgacaattggcatcgacttggcaaaggctgtgttctttatttcagtgcacgagccttccggcaaacagacacaccgcaagaagcttcgccgccatcaggtgttgccgtttctggccaatcaccccaccgccgtagtggggatggaggcctgttccggcgcgcattactgggcccgggagatcagcaagttggggcataccgtttgcctgttacctgcccagcatgtaaaggcctacctgcgtggccagaagaatgattacaacgacgcccaagccattgccgaagcggttcagcacgggcgcattcgctgcgttgagatcaaaaccatagagcagcaactggatcagagcttgcaccgcttgcgccagtcgttagtggttgagcaaaccggtctggtcaatcgcacacgtgcgttgctggctgaacacggcgtgtgcctacccgaaggcaagcatcgcttccgtaaagcagtggcagcctttctggaagacgctgagaacggcttaccctggcggctgcgtgagttgctggatcgccagtaccagctgtttctggtgctggagcaggagctggcgtggtacgagcgtgagataagggcacaagccgcagagaacgaacactgccagcggctgatgagcgtgccgggctttggtccgatttccagtagcgccttttacggctggcttggcaatggtcaacaatttcgctgtggccgtaacgtgggcgccgcacttgggctggtgcccaagcaatacagcaccggcggcaaaacgctgcttggcggtattagcaagcgcggagacaagcacctcagggccttgctggtgcatggcgccagggcggtggctcgttacgccaaagaacgtgatgacaggctaagccgctgggtacaaagcctgattgaacggcgcggctacaacaaggcagtggtggccttggcaaacaagctggcacgcataggctgggcggtgatcgcacggtctgagcaatacagggcgctaccggcataaggccggcaggctaacgggttttatacaggttttaacagcgaggtaaggcgttcttccccgggttgcgaaggcaatcagtagctgatgacaacacaggtcaaaccgacgtaccgaaaacctgaggaaggtcgaggcccttgaagccgcgaactcgataaggacggtacgtggcgaatgctcatcaaggcccgcggcactgtgctgcacattgaggccggatatacgacagacaacctgctcttgttatcaaacactggtggccttgcaatgagggaggagaccatata

SEQ ID NO: 2144 - DNA, 1357 bp, unidentified
  source 1..1357: mol_type = unassigned DNA; note = element_2f8ff12
  misc_feature 1: note = core
  misc_feature 2..460: note = LE
  misc_feature 461..1342: note = CDS
  misc_feature 1343..1357: note = RE
  misc_feature 9..238: note = bridgeRNA
cgttatctttttcgcggtcctgcaagagggccgctggcctccgggcccggcatgactgttgccccctgtcgaacggatgacctggggggtggtgtcaccgggtccgaggggtgccgtcggagacgctgatcagaggtccgaccaccgcccggccgggcgcaatgccaggccgcttgcgggcggcaggtctgcataacgtggatgcgcgagaacggccctcaccgccgaggccggcacgcatcgacacatgtgggggcacggtgatcagcatcgacggggtgggcgtcttcctgggcttggacgtcggtaagcagacgcatcacggccacggcctgaccccggccgggaagaaggtgttcgacaagcagctgccgaacagcgaaccgaagctgcgggccgtcttcgacaagctcaccgccaagttcggcaccgtcctggtggggcttcctcgagggcggccgtggccgcgtcgagacgcactgctgcccgcaccatgccccacaccctgcgcaccctcgacctggccgatgaggtcaccgcggagctggccatgctggccggcttcgaccaggacctcgcaggcgaggccaaccgcacctccaaccgcatccgcggcctgctcacccagttccaccccagtctggagcgtgtcctcggcccgcgcctggaccatccggcagtgacctggctcctcgagcgctacggatccccgcaagcactccgcaaagcgggccgccgcaagctggtcgaggtcgtccggccccgagcaccgcgcatggccgagcggctggtcgacgacatcttcaccgcactcgacgagcagaccgtcgtcgtcccgggcacgagcaccctcgacgtgatcgtcccgtcgctggcgaagtcgctggcctccgttcacgaacaacgccgagccctcgaaacccggatcgaggcactgctggaggcccaccctctttcccaggtcctgacctcgatgcccggcatcggcgtcaggaccgccgcagtcctcctggccaccgtcggcgacggcagcagctttcccaccgccgcccacctggcctcctacgccggtctcgccccggcgacccggcagtccggcacgtcgatccacggcgaacacgctcccagaggcggcaaccggcagctgaaacgagcgatgttcctctccgcgttcgcagccctccacgaccccgcctcccgcacctactacgaccgctgccgagcccgcggcaaaacccacacccaggccctcctccgcctcgcccgccaccgcatcagcgtcctgttcgccatgctccgcgacggaaccttctaccagccaaggagcccccgactcgcttgacgaaggacatagagg

SEQ ID NO: 2145 - DNA, 1598 bp, unidentified
  source 1..1598: mol_type = unassigned DNA; note = element_2f9196a
  misc_feature 1: note = core
  misc_feature 2..374: note = LE
  misc_feature 375..1220: note = CDS
  misc_feature 1221..1598: note = RE
ataatatgaaatgacctcctagttgtcaaaacgtggatttaaactcataataagaatagaaaacaaaaagtgagttgttaccataacgacaataggaggtcactatgaaaagtataatttatattggaatggatgtccataagaagacatatagtttatgtgctttattgaaagaaactggtgagattattggtgaaactaagattcctgcagatgtaagtcttatcatcaagttcattgagaatgccaagaaatcagttgacagtgatgatgttcagatctagacaggctatgaagcaggatgccttggctattctctttactggcagttagctgcaaaaggtatcgaatgtgatattcttgcaccatcaactatgcatcgttctgcaaaaaataaagtagtgaagaatgatagaagagatgcgaaaaatattgcagctaacctagccaatggaacttataaatcagtttatgttccaacagacgaagatgtagaaatcaaagaatacataagaatgatgcatgactttaagattgaactaaagaaggttaagcagcatattaatgcattcctcttgagattcggtcatcattatcctggcaaatcaaaatggattccagctcatattaagtggcttaaggaacttgaactaagtgatatgcatagagaaatacttgatgaatatctatcacagcttgaaatcctaactgaaaagatagagagatttaaatatagattagaagaattatctcagaaggaaacatacaatgagaagattggtcaattgcgctgtatcaagggtattgatactactgcagctatgacaattcatgcagaaacatccgattttgatagatttcctactgccaatgcctttgcatcttattgcggtcttacaccaggtgaagattcaagtggtgattcttatcatagactgggcattaccaagcaaggaaacagtatgattagaacaactcttgtagaggcagctcagacatttgtaagagggactataggcaaaaaaggaaaaaaagtgaaatcaaaacagaaagatcaggatgtaaaggttatagattatgcagacaagggagttattagattacagaagaagtatcatcgtatgatttttagaggagttaaaagaaatatcgcaattacagcagtcgcaagagagcttgcatgttttgtatggggaatagagactggtcatatctcataacaatctttattgatgtttttgaatttgagagaaaggaaatgaagtgccgttaaatagataaaacaacccagcatcgaaggcatagatggacttcaaattaatagtacaggttcagctatctaagatatatactttatggcattacgaatttttactaaaagtcgcgatttagtgagaataataaaagcaatgatccatgcttatagattatagagctgtcgacgaaccattaactttttggtcccaatccacgtattacagtttggttaactgtcgcagaatctatatgatttgaggtctttctatgcccttgatgataaaacttaatagaaatgttgtgagagtttatttatgtcttgacaatggtcatttcataac

SEQ ID NO: 2146 - DNA, 1364 bp, unidentified
  source 1..1364: mol_type = unassigned DNA; note = element_2f94dbf
  misc_feature 1..2: note = core
  misc_feature 3..235: note = LE
  misc_feature 236..1237: note = CDS
  misc_feature 1238..1364: note = RE
  misc_feature 19..213: note = bridgeRNA
gtcgtacatttgtacggttaataaatttgatgtaattttacttcaaaattaggttgtatctcacaacttggaataaggccgatgcattgttggctgaaaccgaaatgcacgatatgtccccaagtttgttacatctaaagactggatagttcggtggggcaagagtgttgaccccgtgtctgcgacgagagtgcaaaagatgtaatgacctattttgaatttacaaagtaaagatatgacatacattggcgttgacatcagtaaaaagtcctttgtggcagcatttccttcggcaaatggctatttgacgaaggagtttgaaaacactccgcgaggtgttcgtaagtttatcggttcgttaccgaatagttgcatggtcgtcatggaagctacaggaaactattgttttctgcttctctatcttcttcacaatgcgaagattgaggcggctctggtgaatcccaagcaaatcaagcattttgcgagaatgatgatgacggtgactaagaccgatgccaaagatgcctgcctgattgctctgtacggcgagaaaatgaatcccgcatcatacaagctaccatcggcaactattctaaccctgaaacagaagcgaaccgttatcagccagctcaagaaacagctaaatgctacacacaacttgcttgagtctataaccgtcctgccttacgctgacaaaacctgtttaaactctcttaaaaagacaatttcttttctggagaagcaaataaagtctcttgagagcgagctggtcaacttggcagagtcggagtttgacgccttactcaaacgccttacctcaattaagggcatcggagtgaccttggcaacggccctgattattgccacaggtggttttacctatttcaacaatgcaaagcaactgtcgcgttacattggcatttgcccgaccgtttgccaatctggatcatcgataagcatccatggcagcattaaccgcaacggagatgaatcgcttcgatcaatgctctacatagcttcttggtctgccataaggtacaatgcctcttgcaggcagatgtatgaacggatgcgcagcaatggaaagccggcaaaagttgcattggttgccgtgtcaaacaaacttgtgcgtcagtgttttgctgtcgccaattccaacatgtcatatattgacggctttgtctctacaaagcccgaaacccaaaagtgtgtttcatctaaagaccaaactttataatatgaaaaacaccgaggggagcgcctttgcggcaagggggcgagcagcccccgacgagcggaataaaaactcgtgaaataaaaaaagaaattttcttattcattttatttggaatttaacatagttc

SEQ ID NO: 2147 - DNA, 1404 bp, unidentified
  source 1..1404: mol_type = unassigned DNA; note = element_2f9b643
  misc_feature 1: note = core
  misc_feature 2..89: note = LE
  misc_feature 90..1109: note = CDS
  misc_feature 1110..1404: note = RE
  misc_feature 1171..1399: note = bridgeRNA
caatgggatggacgcccccaccctaaaacggcatcaatgtgccaaagtggagttgtcgagaaaccacttaactagaggggggcgtcaccatgaagattacggtatgcggtgttgatttggcaaaggaagttttccaattccacggtgtgaatgcggctggcaaggtggagaagcgtatccagctgaggcgtggcaaggtaatggaatttttcgccaacatggcaccgtgcctgatcgggatggaggcatgtgggagcgcgcattactgggcgcggcagttacaaagcctggggcacacggtcaagctgatagctccgcagttcgtcaagccgtacgtgaagaccaacaagcacgatgcagcagatgcagaagcgatctgcgaagcagtacaacgaccaagcatgcgtttcgtgccgatcaagaatatcgaacagcaggcgatccttgctgtccacacggcccgggcaggattcgtcaagcagcgcacggcgcaggctaatcagattcgcgggctattggcggagtttggattgatcgtgccaaagggcctggccctgcttaaggagcgggtgccgacattgctcgatgaagcgaaggatgaactgcccggcgcgttccgccagaccatcctcgaacttcttgatcacttgaacgtattggacaagcgagttaagcaattcgagctggagatccagaattggcatcgctcgaattcgatgtctcagcgactagagaagataccgggcattggtccgattacagcgagcgcattggtggcagcgatcggtaacgccaagcacttcgccaacggccgacagctcgctgcatggcttggcctggtgccgaaacagcattcaacgggcggccgaaccaaccttcttggcatcagcaaacgaggcgatacgtatctgcgcacgttgctcattcatggcgcccgagcagtaatccggcacgcagccaacaagatcaagcaagactggcttcattcgctacttagccggcgacacaagaatatcgctgccgtggccttggccaacaaaaatgcaagaacagtgtgggcgttgttagcacatgacagagagttccgagccgattacgctgccgcgtaatcgacccggttaagggtcccttgtcgaagggaggcaaacagtttttggaagcagtgccggtacattccaccgattgcacaagcgatcaagcagtgatggcaaaccaggtaagaccgtggttggctaagcccgtctgtcaccaagcacttcgagtgcgttaaaccgccggggcgtcgaccagcaaatccgatcagggacagtggcatcggccacatcaaagtccgaatgtacgggtgcaatctttacctaaagccgtcatgaaaagaaagcttggcataccgggggcgtccatgta

SEQ ID NO: 2148 - DNA, 1531 bp, unidentified
  source 1..1531: mol_type = unassigned DNA; note = element_2fa49d1
  misc_feature 1..2: note = core
  misc_feature 3..240: note = LE
  misc_feature 241..1416: note = CDS
  misc_feature 1417..1531: note = RE
  misc_feature 3..217: note = bridgeRNA
cttgtattatagagtagtagttattaaagcccctctccaagggctgtgctacactgtaagggatgctgtggattggtgttcacctcctaccacaagatggttccagaaaggttccaaccacagccctttgcagttttgttaatcagttaaataccgccagacggttgatgtagaacaaggctacaaggcaaagtgttctgtgggtgcagcatcataatcttaccgccggaggtcttaaatatggtttctattggcattgatgtctcaaaggacaagcacgactgtttcatcctcagctcggagggcgaagtccttgcggatgcgttcactgttcctaacaacatggaggggtttaccaccctgctcgaaagaatccaggactgtaccacacctcaagacaaaataagagtagggcttgaggcgaccggacattacagctacaacctactcgggttccttcttgacaacggtctacccacctatgtcttgaaccccttgcgcaccaatctgtaccggaagagtctcagcctgagaaagaccaagaccgaccgtgttgacgcacgaacgattgcgactatgcttttgtccgatgtgggcctcaaaccctacacggatacagcataccacaacgaggagctaaagtcactgacaagataccgttttgacaaggtgaaagagcgggccaagctgaaaagctctgtttccagactggtctgcatcctgttccctgaattggagaagctggtgcctaccctccacatggtttctgtctacgctttactggaggagtttccgggagccagacagattgctaaagcacacctgacgagactgaaatctcttgtggagagtgcttccaagggtcactacaagcaggatatggccatcgtgatcagggacgccgccagaaattcaatcggctccagaatgtctgccaagtcgctggaattgcagcacaccattcggctcattcgagaactggacgccgagattaatgatattgaagccgctattcagaacattatggatgaacttcattctccaatcaccacgattccgggaatcggctgccgaatgggatccatgattcttgcggaggtgggcgacttttcccggttcgattctcctgacaaactgttggcctatgcagggatgtccccctctacaaaccagtctgggaagatgcataactgctacgcccacatggagaaacgaggttccagatacctacgtttcgctctctataacgcgaccaagtatgtctgtctttgggagccgagctttgctgcttacctcgccaagaaacgagctgagggcaagcattataatgtcgccatttctcacgccgccaagaagttagtacgacttatcttcgcattagagaaatccaggcagccctatcaccaagccgcgtaaattgttcgtcatagccgacgccggggccactgtgggcctctgctttgctataccctttttgaaccatctgcttttgaccaccattcattttcggggttgacttttaatagttaat

SEQ ID NO: 2149 - DNA, 1443 bp, unidentified
  source 1..1443: mol_type = unassigned DNA; note = element_2fab35c
  misc_feature 1..2: note = core
  misc_feature 3..230: note = LE
  misc_feature 231..1427: note = CDS
  misc_feature 1428..1443: note = RE
  misc_feature 11..224: note = bridgeRNA
gtcctaccgttctagcgcgggcccacgccggtcattcgtaggatcggtgagcccgaagactccgggtatggcagtgagcttgtcgccgtctgatggctgaaaagacttggccgcccggagcccgtgacggtcacaaccgctcattgggatacgcgacttgatcgctgtgtaggacaacgccggcaaggccgtccgcgggaccgcagaacggacatctgacggaggcggccatgttcaggatctgggccggggtcgacatcggcaaggagcatcaccactgcgtggcactggacgcccggggtgaacggcggctgtcgcgccgtgtcggcaacgacgagcccgagctgctggagctcatccatgaggtgctcgccctcgccgaccggggcgaggtgctgtgggcggtggacaccaaccacggcagcgccgccctgctcatcgggctcctgctcgatgccggacagccgatggtctacctcaccggcctgaccgtccaccgcgccgcggccggctatcgcggccagagcaagaccgacgccaaagacgcccacgtcatcgccgaccaggcccgtatgcgccaggacctcggactgctgcggcccggcgacgatgtcgctgtcgacctgcgcatcctcaccggtcgccgcctcgacctcgtcaacgaccgcacccggcagatcaaccgcctgcgcgaacagctcctggagatcttcccggcgctggagcgtgtcctgccccggaagggccgggggccggtggtcctgctgaccggctaccagacgccgggcgcgatccgccgcacgggcgtctgccgcctcgaatcctggctgaagaaccgtggcgtcaagaacgcctccgcgcttgcccacaccgccgtcgaggcggcacaagcccagcacatcgcgctgccgggtgagcggctggccggcgccatggtggcccgcattgcagagggcctgctggccctggacgcggagatcgccgaactcgacgcgctcatcgaggcccgctttcacgcgcacccgcacgccaaggtgatcgagactctgcccggcatggggccccgtctcggggccgagttcctcgcggccaccggcggagacctggcggccttcggcaccccggaccggctggcgggctatgcggggctggccccggtgccacacgattccggccgcatccgcggcaatctgcgcaggccatgccgctaccaccgtggcctgctgcgggcctgctacctcgccgcgatggccagcatccgctgctgtcccgtatcccaacgctactaccagcgcaaacgcgacgaaggcaaaagccacatccaggccgtgctggccctggcccgccgacgcctcaacgtcctctgggccatgatccgcgaccacacctcctacgaacttcgccctccgaccgcggctgcggcttgacgcccgctattgggaa

SEQ ID NO: 2150 - DNA, 1225 bp, unidentified
  source 1..1225: mol_type = unassigned DNA; note = element_2fadedc
  misc_feature 1..2: note = core
  misc_feature 3..238: note = LE
  misc_feature 239..1213: note = CDS
  misc_feature 1214..1225: note = RE
  misc_feature 6..212: note = bridgeRNA
cttgtatctcgactaccaccctctcaaggggtgatagtccccgactgatcatcgggggagagccaggaagccgtgtccacccttaggcctcgagcccgacccgtagatagtgccctggccctccacactcactcagatagctcgaacggtatctagagcccacttcaagtgagagctcgcattcacaaggccgggccgggtgcagtgatgatcactctggatggattgaggaggttgcatgtccagcatcgtcggcattgacattgccaagcacagtttcgatatcgccaccctgcaggccaacggcaagtaccgcagcaaggccaagctgatcaacgccgcagagggctttcaggtgttgcaggagtggttgaacaagcacagcgaacctggggcctggatcgtgatggaggcgacgggtacctaccacgaggcgctggctgagcacttttacgcgctgggctaccggatttgcgtgatgaatcctgcgcagattgcctattacgcgcgaagccagttgcaacgggtcaagacggatcaggtcgacgccaagctgattgccagctacggcgagcaccatcaagatgagctgcgcgcctggcaacccgagcctgccgcgatccgccgtctgcgtgccctggtgcggcgcctgcaggatctcaaggagatcgagcagatggagcgcaatcgtctgggggtggccgatgccagcgtgcaagagtcgattcactcagtgctgcagcgtgtcgaagagcagattgccgagaccctgaaaaccatccgcgaccatatcgatgatgatccagacctgcggggtaaacgcgatctgctgaccagcatcgatggtatcggcgagcagactgccgccctgctcctggcggaactgggtgatccgctgcagttcgagagcgcgcgagcgatcactgcctttgccgggctgaatccgaagctacaggattcgggtaagcataaagggcacgtacgcatttcccgtgtgggctcagcgcggctacgcgcgggcctgtacatgccggcgatcacctcgatgacccacaaccccgcgatcaatgccctggcacagcgcctgcgcgcccgcggtaaggccggaaagcagatcgtctgcgcggccatgcgcaagctgttgcatatcgcctatggcgtactgaaatccggccagccattcgatgcccaactggcccttgcccggggctaaacaagacggtat

SEQ ID NO: 2151 - DNA, 1792 bp, unidentified
  source 1..1792: mol_type = unassigned DNA; note = element_2fb0cac
  misc_feature 1..2: note = core
  misc_feature 3..72: note = LE
  misc_feature 73..1110: note = CDS
  misc_feature 1111..1792: note = RE
  misc_feature 1567..1779: note = bridgeRNA
tgttggtgtggacggccccacggcatcgcgtgccagaattggagctgtaaacaaccaataccggagccgtccgtgacccagtataaacgcgtagccattgatacgtccaaagcggttttcaccctgcacggcatcgatcagaacgaccgaccagtgctgcggatcaatctccgccgcgcgcaaatgatcccgttcttcaccaagctgcttcccaccgagatcgccatggaagcctgtggtggcgcacaccattgggctcgcgaactgtccgagctcggccacgaggtacatctgatcccgccccaatatgtcaaaccttatgtcaagcgaagcaagaacgaccgcaacgacgccgaggcgatctgcgaggcggcggggcgaccgggcatgcatttcgtgccggtgaagtcagtcacgcaacaggctcagggcatggtcttgaaagtacgcgagagcctggttggccagcgcaccctgctgatcaacacactccgcggtcatgccgctgaattcggtgttattgccggcaagggaattgccaaaattgggccgctactggcggttttcgatcaggaagccagcatcccacccgaggccaaagacatggccgttctgctgggccagcagattgctgaaatcgatgccaaggtaaaagaactcgacgtcaaactgagcgccgcgcacaaggccaatgcggtcagccagaaccttgcgacaatccccggcgtgggtccggtcaccgcgctgaccttggcaaccgaaatcgatcccgcggcgtttgaatcggggcgtcacctcgccgtgtgggccggtctgaccccaaaggaacgctcgaccggcgggaagcaaaaaatgggcggcatcagtcgggccggcaatgaacggctgcgcagcttgctcgtcacgggtgcgacctcagtcatcaaggccgccatgaagccgggcagtcagctgatgacggactggttgcgcgctctgctgctacgcaaaccacgcaaagtcgtggccgtggcactcgccaacaagatggtccgcgtcgcgtgggtgctaatggcacgcggggaggtgtaccggcgccccaccagccccgccgcggcggccgcggcatgaccggcttaatccgcttcatagatcaaacgtcacgtaacgctatggagtggaccgatgccccgtcggttgaccggtgatatccccatgaccggcgccgaacgtcaggcgcgctaccgtgccgcgcgaccaagcggtgtgccgatcattcgtattcgccgcccagccgaccgtcgcagccggatccagcgctggaacgacaccgtcaccgcgctgaccgagctgcaggcggagtatggtgtctggttggaggcgttgccgggcaatcagcaagacagcgccacagccgaggctttgcgcacgatcgtcgagttcgatctctcagagcttcaggcgatcgaaccaccgcgcggcttcggccgtgattgaacaacggaatggcccgactggcggggccacgatgacgcgcgtcaaggtcgaccggcaccagccggtgcagaccagaaacgcgcgttggtgccagggtgaaagagctgaatgagatgacgatcggtcgaaccgacgatccagtgaacccgtttggtgcacaggctttcaaagccgcccgagtgtttggggctggatcgcggaacccatctgggccagcggtcatagcaccgcgccgaaaaggccggacacatgatcgcaatcgacccacccgtcagacttctcatttttcccttgcatccaacgggccgtccacaca

SEQ ID NO: 2152 - DNA, 1353 bp, unidentified
  source 1..1353: mol_type = unassigned DNA; note = element_2fb255a
  misc_feature 1..2: note = core
  misc_feature 3..80: note = LE
  misc_feature 81..932: note = CDS
  misc_feature 933..1353: note = RE
  misc_feature 1070..1340: note = bridgeRNA
tgttggagtggacggctcccgaaccgcaccgaatgtgccaaattgaagtcgttgtggatttcaaatgaaggaggccgtccgtggaccagattatccgaataggtatggatacatcaaagcatgtctttcagctgcatggtgtgaacgcagctgagcaaccggtgctgcgcaagaaattgcgccgcaaagagatgttggagtatttcaggaaattgcccgcgacagtaattacaatcgaagcctgtggcggctcccatcattgggcacgtttactgagcacgttcgggcacgaagtgaagctgattgcagcccaattgataaagccatatgtaaagcgcggcaagaacgacgcagccgatgctgaggccctatgcgaggctatgagccgtccgacgatgcgctttgtacccgcaaagcgcgcagagcagcaggcatcgctgatgctgatcggcatgcgcgatcgattggtccgcaataagacacagcttgccaattcaatccgcggttatgcggctgagtttgggctgactgccgcactcgatcgcatcgcggctgatgagactttaccgaccctcgctcgcgatcttttcgcggcccacgccagggaatatcagcagttgcaagaagaattggatggcatcgaggcgaaattgatggcttggcatcgcgctgacgagtgcagccgccgtctggcgcagatccctggtgtcggcccgatcggtgcgtcactgctgatgatgaaaacgcctgggcccgagctgttcaaatccggacgacacttctcggcctggatcggtctgacacccaaggatcattccacggccggaaggaaccggcttggcatcatcacacgcgctggcgatgaagtgttacgaagcacgctggtgctgggcgccggggcgcggcaggaatacttcaccttggctccttgagctgctcaagcgcaagtcgccgaaactggccgcagtggcagtggccaacaaaatcgcccgcaccgcctggaaaatgatggtgaccggcgaagcctatcgaaaaaatactgtgtcggcggcgttggcttgtgcagcataaggaatcagtcagtcacggtgagctgttcatgaagctaccgcgctgatctgatgcgtgaacttgcaagaaaagagcagatggcgtgatcgatcgatccaggacgcgtgatactccgttcccggcagtggccttcgtaggtcgcgtccctgtttggaacacgcgtcgcggagcccatcttggccagcgttcatatgggagcgcgacaacaggccggacatatgcacgcaagcgatacgatcaaaataacgctcgacatcttgcaaggagggagccgtccacata

SEQ ID NO: 2153 - DNA, 1154 bp, unidentified
  source 1..1154: mol_type = unassigned DNA; note = element_2fb7d9a
  misc_feature 1..2: note = core
  misc_feature 3..258: note = LE
  misc_feature 259..1140: note = CDS
  misc_feature 1141..1154: note = RE
  misc_feature 34..230: note = bridgeRNA
ccgacttatggtcgtgtcagcggtccgtggtccgggttagctgcccgtaatgtgccgtagcagaccggaagggttgactcctgagattcctgtcaccccatcctgcgggttgacttcgtggcggtgtgtcggccccttccggcctgcgttcgcggagtgactgaagagaggcgtgaccccaagctgctgtgagaggtacttgaagtcggattgtcctccgcggatcccccaatccagcagagaagggaaccgccttccatgatcgtcatcggcatcgatccccacaagtccagccacactgccaccgcggtcgacccggccaccaacaccgcccggatccggcaactctcccgcggcggccgacggaagaacgaccgcatcgacgccgccgcagcggcctgtgtcgccgtcctgcagggcgacgcccgcccggtggaccccgagggcccgaccgatatcctggcgctgctcgacgaacgtcgaacgaatatgtctcacagtcgaactcgcctcgtcaatcagttgcacgcgttgctgcgacagctgttcgccggcggagcgccgacctcgctgaccgcggcctcggccaccaccctgctgcggggcttccgtgcccgaagcggcgtcgaccgaacccgcgtcggtctgtgccgggatctgatcgccgacatccgccgcctcgatgaccagctcgcggcgaacgagaagcagatggcccatacgctcgacgagcacggcacccctctgcgggaggtggacgggaccggtgcggtgaccgcggcccggctgatcggccgcacgggacgcgccagcagattcccgaccgccgcggcctacgccaactacaacggttcggcaccggtccagatcgccagcgccgacaccgaccgccaccgcctctcccgctacggcgaccggcaactcaacagcgcgctctacaccgtcgccatggttcagacccgaatgcccgccagcgccggccgagcgtactacgacaagaaaatcgatgaaggcaaaccgcccgcagcggcgaggcgcgccctcaaacggcacctatccgatcacgtctggcgcatcatgctcgccgacgagaaacgccgataccgacgaaacgaggcggataccgcaagtgcggcttgacagatagagaggca

SEQ ID NO: 2154 - DNA, 1541 bp, unidentified
  source 1..1541: mol_type = unassigned DNA; note = element_2fc30d9
  misc_feature 1..2: note = core
  misc_feature 3..239: note = LE
  misc_feature 240..1421: note = CDS
  misc_feature 1422..1541: note = RE
  misc_feature 3..218: note = bridgeRNA
cttgtattatagagtagtagttattagagcccctctccaagggctgtgctacactgaaagggatgctgtggattggtgaaaatctcctaccgcgagacggttcatgaaaggctccaaccacagtcctttaccagtttgttaatcagttagataccgccagacggtttatatggaacaaggttacaagcgtaaagtgtcctgtgggcccggcatcaaataaatcttttgggggtatcattatgatctgtgtgggaattgacgtagccaaggataagcatgactgcttcttcctcagttcggaaggtgaggtccttgcagatgtattcaccattccaaacaatgcagaaggctttgatctgctcttgcagacgattcgtcgctgtaccagacctcaagacaaaataaaagtaggacttgaggcaaccggacactacagctacaacatcctcggatttctgcttgacaaaggtatgcccacctatgtcatcaatccgctgcacaccaacctttaccgaaaaagcctcagccttcgtaaaacaaagacagatcgtgtcgatgcgcgaactattgcaactatgctcatgtctgatgtggacctcaagtcctacacagacacagcatatcacaacgaggagctaaaatcactcacaagatacagatttgacaaggtcagggagagagcaaagtggaaacagtctgtatctcgcttggtcaccatcctgtttcctgaactggaaaagttggtgccaaccctccacattccctctgtttacgcacttctcagcgagtttcccggagctaagcagctttccagtgcccacctgacgcacctgaaaacgctcctgcaagatgcatctaatggccactacaaacaggatatggcaacggagcttcgagacgccgccagacattccgtcggttccgtcatgcccgccaagtcgctggaactgcaacataccatccggctaattcgggaactggatgctgaaattgatgacatcgaggcggccatccaagccatgatggacgagatccaatcgcccatcacgacggttcccggcattggtgtccgtatgggagccatgatcttggctgagattggcgacttttctcggttcgattctcccgacaagattgtggcctatgcagggatgtctccctctacctaccaatccgggcagctttcactatccggggcatactcgcacatggagaaacgaggctccaggtatttacgctacgctctctacaacgctaccaaatacgtctgcctctgggatccaacctttgctgcctatctcgccaagaagcgagccgagggtaaacactacaatgttgcaatctctcatgccgccaagaagctggtgcgcttaatctacgctatggagaactctcggaggccgtataacgccgctacataatctctttaccttcataactcagcaacgcgcccagacggacgtcggctttgctataccctttttgagccgtccaatttttttgccaatctacatttttatacttgactcttaatagttagt

SEQ ID NO: 2155 - DNA, 1539 bp, unidentified
  source 1..1539: mol_type = unassigned DNA; note = element_2fcb763
  misc_feature 1..2: note = core
  misc_feature 3..206: note = LE
  misc_feature 207..1253: note = CDS
  misc_feature 1254..1539: note = RE
  misc_feature 1253..1471: note = bridgeRNA
agatcccatgggcgtccggctagcgaccgttgctcattgagagtgaggttgcagccccacccactctggaggcgacgatgactgaagacgcatctcggccggcgcaggccgctatccgcactgcacttggcgcgatctttgtctcgctggaactgtcacgcagaacctggctgatcacgtccctgtcgcctgggggtggggagaagatgtccaagcacgcggttccggcgggcgaggtgtccgggctgctgcgtcggttcgccgagctcaggcgcaaagctgcggcgcggaccggccgggacttgccgattatcgtcatccaggaggccggtctggacggcttttggatccaccgggtgctgcagtcggaagggatcgagagccacgtagtcgacgccgcctcgatcctgacctcgcgccggcgtcggcgggcgaagaccgaccggatcgatggcgagaccctggtgcgcaccctgatggcctacaagcgtggcgagccgcgggtgtgttcgatggccagggcgccgacgccgcaggaggaggaccgccggcgtgtctgccgcgagcgccggacgctgatgggcgagcgggtgagccacgtcaaccggatcaaaggactgctgtccgcccagggggtgttcggctacgagccgctgcgcaagggtcggcgtgagcggctagaggacctgcggacaggtgaccgccggcccctgccggtgcgcctgaaggcgcagattatccgcgagctggatcggctcgaggtcctgctggagcagttgaagacggtcgaggcggaacgggacgctttgctcaagccggccagtgacgaggcggcctcgccggcggccatgctggcgcggctgaagggtatcggcccagagaccgccgccgtcctctggtcggagggcctgttccgccagttcgacaaccggaggcaggtggccgcctacgccggcctggcgccgacgccatggcagagcggctcgatcgatcacgagcagggtgtgtccaaggccggcaacccgcgactgaggacagcaatggtcgagctggcctggctatggctgcagaaccagccgacctcggcgctcagcctgtggttccacgaacgggtccagcgccttggcaggcgggtgcgcaagacgatcatcgtcgccctggcgcgcaagctcctgatcgctctgtggcggtacaccaccgccggcgtcgtcatcgagggggccgtgatgaaggcggcggcggtgacgaactgaccccatccgcaaggactgatcagtcctgccggatccaggtggccggaccgaaatggccgttggcctcaacagccgaccgaaagaatggtcccggcctcctgagccccacccgccggacgcgggatgttggtgcagccgcaacaagcggcgaccggatgtgagtttgatctggtgcagcacgccatcaggtcatcgaaacgggctcagactttggatccaaaccaacggccggaaaactgctcttcaacccctaaacctgacccttgacttcgagcatgcccatgtg

SEQ ID NO: 2156 - DNA, 1337 bp, unidentified
  source 1..1337: mol_type = unassigned DNA; note = element_2fcd1cd
  misc_feature 1: note = core
  misc_feature 2..102: note = LE
  misc_feature 103..1107: note = CDS
  misc_feature 1108..1337: note = RE
  misc_feature 1120..1332: note = bridgeRNA
gaatgaaagggacttcccctactcgaagcgggtttgagcccgcacggcatcgagtgccaagattgagtttcgcacgttcaatctaaaacgagaggggaagtcatggacaaggttactactgcggggattgatttggcaaaacgagtattcgcgctgcacggggtcgacggcgccgggcgagtggggcttcggaagacagtgagacgcgagcagctcatgcagactgttgcggccctgccgccgtgtctgatcggcatggaggcgtgttctggagcgcacgaatgggcgcgacggtttcagcagctcgggcacacggtgcggctgatggccccggtgttcgtggctccgtaccgcaagagcggcaagaacgacggcaacgacgccgaggcgatctgtgaggcggtgacgcggcccaacatgaggtttgtgccgatcaagagcgccgagcagcaggcggtgctggcactgcaccgggtgcgccagggctggatcgaggagcgcaccgcgaccatcaatcggctgcgtgcagtgttgactgagttcggcgtagtgctccccaatcgcgcgcaatatgtgcgccgcgaggcacatgctgcggccgaggctctgcctgaactcgcgcgccaggccgtggaggatctgcgtgcgcacctgggcgtgctcgatgagcgcatcgccgcctacgatcgagagctgcaagcccaagcccggcaaagcgaatcggcacaacggctcatgcagatccgaggcatcggaccgctcaccgccgtggcgatggtggccaccgtcggatgcgcgcgtgatttccgaagcggccgacagttcgccgcgtggttgggcctgactccgcgccaacactcctccggcggcaaacaccgtctggggcacatcagccggcgcggcgatgcgtacctgcgctgcctgctggtgcagggggctcgatcggtgctactgactgcgatgcgccactcagaccggctctcgcgctgggccttgtcggtgcaggcgcgtcgcggttaccacaaggcgctggtggcgatcgccgcgaagaacgcgcgcatcgcctgggcgctactgagcaagaatcaaacgctgcgagccgcttgaccgaattcacttccttgccagactgcactcgttgatgacacacaggtcagaccggcgtccggacactccgatgattttggcggcagcagcacgatgccgactaacgtatgggaaccgggcgcgcggctttcatcagggccagagcgcaacttcgctcgcaaacaggccggttatagtcacgcagtccttcctgtgctcatccgccttgcagatccggggaagtccttata

SEQ ID NO: 2157 - DNA, 1612 bp, unidentified
  source 1..1612: mol_type = unassigned DNA; note = element_2fdc614
  misc_feature 1..2: note = core
  misc_feature 3..291: note = LE
  misc_feature 292..1467: note = CDS
  misc_feature 1468..1612: note = RE
  misc_feature 36..270: note = bridgeRNA
ctcgtattatatagtagtagtttttagagaccctctccaaggtcttaataactattaagtcatagcctcgtctttacctcttctgtaggttcgactatgatatataagatgctgtggattggttaagttctcctaccacttgatggttttggaaaggctacaaccacagtctctttgtatatttgttaatcagttagataccgcatgacggtttatttagaacgaggttacaatcgcaaggagttccagtggttctaaaacagcattaatacatttcaaaggagattttttatgatttatgtaggaattgatgttgcaaaagataagcatgattgctttatcacaaattcagatggagaagtgttattcaaagcatttactatccctaacaccttagatggttttaacaacctgtatcaaaagattgaatccgttatggaagatataaccaaagtaaaagtaggactggaagccaccggacactatagttacaatctcttaggatatctcattgataaaggtttccccgcctatgttatcaatccgttacatactaatctgtacagaaaaagtctaagccttagacagacgaaaacggataaagttgatgcccgcacaattgcttctatgctaatgtctgatgtgaacttgaagtcctactcagacacatcatatcacaacgaagaactaaagtcattaacccgttatcgttttgataaagtacaggagcgagcaaagctcaagacttctgtatccagacttatctgtattttatttcctgaattagaaaagttagttcccacacttcatatggcatcggtttacgcaatgctctctgaatttcccggagctaaacatgtagctaacgctcatctcaccaaactttctaatcttctttctgaagcttcaaaaggtcgctatggtaaagaaacagctatcacatttagagaagcagcaagaacctctattggttcaaatatgcctgcaaaatcacttgaattaaagcataccatcaagcttattcaggaactcacttctgaaattgatgaaattgaaaatgaaatcaaaatcatcatggatgaaatcaattctcctattcttagcatcccaggaatcaactatcgaatgggtgccatgattattgcagaaatcggtgatttcagtcgttttgactctcctgataaaatcttagcttatgctggcttttcaccctctacttaccaatcagggcagcttgatggagcatactcacatatggaaaaacgaggttccaaatatttacgctatgccttatataatgctgccaaatatgtctgccactgggattccacattcgccgaatatttggcaaagaaacgagccgaaggtaaacattacaatgttgccatatcccatgctgttaaaaaacttgttcgggttatttatcatctcgaacagactaatcaacaatactccaagacagcttaactttttctaattcaatactccttttttgagcacctataacgatgctctttttgtcatgcagttttcaaggtacaaatatatctgaaatacatttctgcaattcattcaaaaattttcattttagacttgacttttaatagttagt

SEQ ID NO: 2158 - DNA, 1545 bp, unidentified
  source 1..1545: mol_type = unassigned DNA; note = element_2fdcd35
  misc_feature 1..2: note = core
  misc_feature 3..242: note = LE
  misc_feature 243..1544: note = CDS
  misc_feature 1545: note = RE
  misc_feature 3..218: note = bridgeRNA
cttgtattatagagtagtagttattagagcccctctccaagggctgtgctacactgtaagggatgctgtggattggttgggttctcctaccacaagatggtttcagaaaggttccaaccacagccccttacaattttgttaatcagttcaataccgccggacggtttatgtggaacaaggctacaaaagtaaggtgcactgtggatgcagcatcataattctaaccgctggaggttcttgctatggtagtttctgttggtatcgatgtttcaaaggataagcacgactgctttatcctcaactcggaaggcgaaatcctttcggatgtgttcaccatcccaaacagtctggacggttttaccattctgctgcaaagaattcgggactgctcttcgtctcaagacaacataaaagtagggcttgaggcaaccgggcattacagctacaacattctcgggtttcttcttgacaatggtctacccacctatgtcttgaaccccttgcgcacaaacctttacagaaagagccttcgtctcagaaagacgaagactgaccgggtcgatgcgcgaacgattgcggctatgcttttgtccgatgcaggcctcaagccctacacagacacagtttaccacaacgaggagctaaagtcattgacaagataccgttttgacaaggtaaaagaacgggcgaagctgaaaagttccgtttcaagacttgtctgcatcctattcccggaattggaaaagcttacgccaacgttgcatatgccttccgtatacgctctgctggacgagtttcccggcgcaaaacaaattgccgaggcaaacttaacacacttgaaagccatccttcacaacgcatccaaaggccgctataacagggataaggccatagatatccgcgagtcagccagagcatctattggggcagtaatgcctgcaaaatcactggagcttcgccacaccatccggctcatccgagagctggacgctgagattgaagatattgaagcagccattcaaagcatcatgaacgagatgcattcgcccattaccaccatccctggcatcggcactcggatgggtgctatgattcttgccgaagtaggcgatttttcccgctttgattccccggacaagctgttggcatatgctggtatgtccccgtctacctaccaatctaggcaacttaagaactgctatccccatcccatatggagaagcgcggttccagatacctgcgctatgcgctttacaacgccaccaagtatgtctgcctatgggccccaacctttgctgcataccttgcaaaaaagcgggcggagggcaaacattacaacattgcgctttctcacgctgccaagaagctggtgcggcttatttttgctatggagaaatccaggcagccgtactgctcggcaacgtaaattcctcttgacagccagcactggggttctaacgagctcctgctttgctataccctttttgaaccatctgccgttttaccacatccattcatttttagggttgacacttaatagttaat

SEQ ID NO: 2159 - DNA, 1388 bp, unidentified
  source 1..1388: mol_type = unassigned DNA; note = element_2fdf6df
  misc_feature 1: note = core
  misc_feature 2..80: note = LE
  misc_feature 81..1121: note = CDS
  misc_feature 1122..1388: note = RE
  misc_feature 1138..1374: note = bridgeRNA
tgatgcggtggacggcccctgagcggcatcgtgtgccaagctcgcggttgtcgagacagcgagcagaggagccgtccaccatgcatgttgccacagtcggcctggacctggccaagcgggttttccaggcgcacggcgccgacgcggagggccgcgcagtcctccggcgcaagctcgggcggggcgaggtgttggcgttcttcgccaagctgccgccttgcctggtgggcatggaggcctgcggcggcgcgcaccactgggcgcgcgaaatcgcggccctcggccacgaggtgcgcctgatgcccggcgcctacgtccgcccctacgtcaagcgcggcaagaccgacgctggcgacgcggaggcgatctgcgaggcggtgacccggccgggcatgcgcttcgtggcggtgaagtcgcccgatcagcaggcagccctgatgctgcaccggacgcgcgacctcctggtgcgccagcgcaccgccctggtgaacgcactccgcggccacatggcggagttcggcatcgtcgcgcctgtcggcatcgcccgcgtgggcgagctggtcacaatcctcctcgacgaggaggcggccgcgatgccgtcgctggcgcggcgcgcgctgctggcgctggccgccgaactggaaacgctcggcgtgcggatcgacgaggccgaggccgccatcctcgcgtggcacaagggcaacgaggcgagccggcggctggccgccgtgccgggcatcgggccgatcactgcctcggcgatcgtcgccacggccggcgacgcctcgcagttcgcctcgggccggcacttcgccgcctggctcggcttggtgccgcggcagaacagcagcggcggcaagcagcggcagggcggcacctccaaggccggcgacggctacctccgccgcctgctcgtgctcggcgcgacctccctcgtccgccaggcgcagaggaggaccaaggagccggcgttcgcgtggctgcgtggcctgctcgagcggcgcccggcgcggctcgcgtccgtggggcaggcgaacaagacggcgcgcctggcgtgggcgctgcgggcccgcggcgaggcctaccggcggccggccccggccgtggccgccgccgcgtagcgcgcaggggacaccgccgggggtgccgcgaccggcggggtggagggcgatggtggcgtgatggcgaaccggtcgaacccggggcctcgcagaacccgaacgggagtttggcgccgcgagcgcgtcaggctgattgggagcgaggccgcggattgcatcagggccagcggccgtgcgcgccgcgcgaacaggccggacacatgaccgcacccgaccgcggcgccagcacgacgacatcgcccttgcacgaagggggccgtccacaca

SEQ ID NO: 2160 - DNA, 1321 bp, unidentified
  source 1..1321: mol_type = unassigned DNA; note = element_2ff2c9a
  misc_feature 1..2: note = core
  misc_feature 3..63: note = LE
  misc_feature 64..1080: note = CDS
  misc_feature 1081..1321: note = RE
  misc_feature 1084..1315: note = bridgeRNA
ttaattagatggtccacctcaccctaaactaaactttaggggagctacagaggagtaccatctatgtcttctattacagtcattggaattgatttaggcaaatcaacttttcatttaattggtcatgatcaagcaggtcgtgaacaacttcgtaagaaattaaaccgaacaaagcttatcgaattcctatcaaatcatgaacctattgttatcgcaatggagtcttgtggtggttcgcattggttagcaagaaaatgccaagaatttggtcatcagaccaaattaatccctccgcaatatgttaaaccctacgttaaaaccaataagaatgattttctcgatgcggatgcaatcgctgaagcaagcacacgcccctcaatgcgttttgtcagcgttaaatctgaagaaacacaagtgctcgctgttatccaacgtattcgctctgggtatattaaagagcgaactgcatgcatgaatcggacaggcgcaatcttactcgagtttggtttgagttttcctcgagggcatactcacatgaaaaaattgtttgattggctatcacaacaaccagacagagtgccaaaattgttattacaagaattgatagaaactcatgagtattatgaacttcttaatgagcgaattaagcaacaagagaaaaagctattaaatatcgtagagcaagatgaaagggctcaattattaaaaacaatacctggtattggtgatttagtcgcaagtcagtgcctatcatcgatttcagatgttcatgattttaagaatggacggcatatggccgcttggataggacttgtacctcatcaacattcaacaggagggaaaaccaagttacttggtatcagtaagcgaggcgataagtcattacggactttgttcattcatggtgcaagagcgatgttatcgaggctagatagagcggaaaagtatttcgggcattggattattgaacttagggcaagaaagcccttcaatgttgctgtggttgcattagcaaataaaatggcacgaatagcatggtcagtgctgatgtataaacgaccttttgaagtaattaaataaaccaggtttttgcaaatgatacgagaagatgacaaaaacggtcagaccactagattgaagacctgacataaaaaacagcaatattatgataaataataatgctttgggctttttgaggacaatctagcgcggatctcatcgtggagcgggtaataagttgcctatatagactccgaatacattagcgcaaaccaaccccgtcattgacaatattacttgcaataacgaggtggaccataca

SEQ ID NO: 2161 - DNA, 1613 bp, unidentified
  source 1..1613: mol_type = unassigned DNA; note = element_2ff39a9
  misc_feature 1..3: note = core
  misc_feature 4..249: note = LE
  misc_feature 250..1485: note = CDS
  misc_feature 1486..1613: note = RE
  misc_feature 8..224: note = bridgeRNA
tttcgtattataaggtcagtcagagaaatctgattgactattttttattctatttatagattgatagtagccggggtagaacgtaatggcccttgggacatgatcccgttcattaaactgttcgccctctacttgttaacacatgattaggctggttgggacatagtgatcccgtataacaagcgaagatatgaatgacaagatagatggaggttaccggtcaatcactacattaggaggagataatttatggatccagttgtaggtctggatgtcgcaaaaggtgaaagtcaggttcaaatgttcttggataaaaaaatgccctataaaaacagtgtgaaggttgaacatacggtggagggtctagaagagttacactcttatttactagatttagagcgtcaaacagggatgaaaccacctgtggttttggaatcaacgggtcactatcatgccccgattgttcagtttttagaagcaagagagtatattgtgattatcgttaatccattggtatcctaccgagcgaaaagttctagtttacggaaaacaaaaacagatgcgattgatgcttatcacttaggtgaaatgtattacaaagaggatttagaacctcagaaaaagcgtggtattcagttattaaaccttcggcatctgacaaggcagcacgaaaatatgacaggagttatggttcaaactaagcttcaattccaagccgtactagatcaagtattccctgaatacaaaggggtttttgggagtttatatgccgatatttcattaaaaacattacaaaacttccctacctccaagtctgtcttaggagctggtgtggaagaaattactcagtttattaatatgcattgtaaagcacgttcattagaatgggcgcataagaaaacagaggaattgatcgaagctgcaaaacgcaacccatttcaatcaactctttatcatagtcttcttgtcagtctaaatatgtatatagatttacttcaagcgtaccagcaacaactttctacgttggagcgtgagattgatcagttagcggtacaacttgaagaatatgaactactccaaacaattcccggtgtaggtgaaaaaatcgctgccacgattatttctgaaatcggagaaattgatcggtttagtcatcccaaaaagttagttgcctttgcaggacttgatccaagtgtgtttgaatcaggacgttttaaaggtacaaaaaatcatattaccaaacgtggctcagctaggcttcgccgtatgctttatacagctgttcgctgctctattcgtgatagccgtaaaaagaaaacaactgatgaaaccattgcacgaaataaaagattaagagccttctacgacttgaaacgcgaagaaggaaaaccatacagagtagctataatcgcttgtgctaataagcttttacactggatttatgcgatgttaaaaacaaaaacagcattccaagaatctatttagcaacaattttttcaaataaaacaaaaaccttccaaattgattcggagggttatttgagttgtgcatttttagtatagcatgaagtaatttttaatttaaaagatttttattgacaatctattagctgg

SEQ ID NO: 2162 - DNA, 1445 bp, unidentified
  source 1..1445: mol_type = unassigned DNA; note = element_2ff6502
  misc_feature 1..2: note = core
  misc_feature 3..238: note = LE
  misc_feature 239..1417: note = CDS
  misc_feature 1418..1445: note = RE
  misc_feature 32..203: note = bridgeRNA
cttgtatgttgggcactcatcgcggactcttcatacagacccgaagagacgggatccgggagagggtcgccgtaggctgcgggaggctacgtcctcggctgtgagagaggcgccctcgcccggtgctcaagactcgaacggtatcccgaggcgccgcgtgcggcggcctcgcatggacaagcgcgagtatgggcaccggcgccgaggctcccggccatcgccgtcggaaaggacgggcatgcgcttcgtgggcattgatatcggcgcggagacgcacctggtggcggcggtggatgaggccgagcgtgtcctcatgccacccacgaagatcggcgaggacgccgacgggtaccagcgactgctggaacggctcggggagccgcacgacaccctggtggcgatggaggccacgggtcactactggacgaatctgttcgccgccctggcggctcgcggcttcgccgtggccctgctcaatccactgcggaccgcgcgattcgccagcgaggacctcgcgcgcaccaagaccgacgccatcgacgccctgggcattgcgcgcttcgcggcccagacgcgaccggcggcgacccgcttgccggaccgcgtgactgaggaactgcgcgagctggtccggctccgcgatcgcctggtgcaggacttcggcgaccgggtgcgccagcggcatcgcctcgtggatctcgggttccccgagttcacgcggtacgtccgacgcctggacagtgagctcgccgccgccatcctgcacgactacccgacggcggcggccttcgcgagcgtgtcggtccggcgccttgccgccctgcggtacgacggccggcaccgggtcgacgacgagctcgcccaggcgctcctcaccgcggcggcgcgctcggtgggccgccatcacggcgaggcctaccgcattcaggtgcgctacgcctgtgaagatctcgatctgctccgccggcggcttcgcaccctcgagggcgatatcgagcggatgctcgaccgccacgaagtcggctcgctgctgaccaccatcgacggcgtcggcccgccgacggccgcgcggctcgtggccgaactcggcgatccggcgagtttccgcagcgccggcgccctggccgcgtacgtcggcgtcgtgccgagccggcggcagtccggcaagcggagcgcgacgcgggccggcctgacgtcgatcgggcacgccgccttgcgcgcgagcctgtggatgccggtcgtgacggccgtccgcaagaatccctggttgcgcgcttactaccggcggctccgcgcacgcggcaagctgcccaaggtcgcgctcatcgccgcgatgcgaaagctcctcgtggcggtctacaccgtcgccaagcagcggcgccccttcgtccccgccctcgcggaggcgcgcccatgaaaaaatcgcttgacgcgcgtcacggtat

SEQ ID NO: 2163 - DNA, 1367 bp, unidentified
  source 1..1367: mol_type = unassigned DNA; note = element_3007d0c
  misc_feature 1..2: note = core
  misc_feature 3..79: note = LE
  misc_feature 80..1102: note = CDS
  misc_feature 1103..1367: note = RE
  misc_feature 1079..1354: note = bridgeRNA
cgatggggtggacgccccctctgacggcattttgtgccaaggtggagcgtaatgaatcgctacataggaggaagcgtccatggaagatgttagcataatcggcttagatatcgcgaagaattcgtttcaggcacacggagccagtgccgcaggcgttgttgttttcagaaaaaagctaccgcgcgggaaggtattggagtttctgtctcgccaacctacttgcgtggtcgcacttgaggcttgcgccacgtcccattactggggccgcgagataatcaggctagggcacgaggtgcggatgatcccgccaatttatgtgaaaccgtttgtgaagcgccagaagaacgatgctgctgatgctgaagcgattgccgaggcagccgtccgccccacgatgcgcagcgtcgcggtcaagagcgagcaaaagcaggcgcttggcatggcatttcgggcgcgtgatcttctggtgcgacagcgcacgcagacgataaacgcgcttcgtgggcacttggccgagtttggtgttattgctcctatcggaaccgcgcaccttaaacgccttcgagcttcaatcgaagacccggatggtgtcttggttcctgaagtgcttgagattgcgaacatctttttgagacagattgatgcgcaacagacggaaattgatgcccttggggctcgtttgcgagcgcgggctccagcggataataccgcgtcacgccttatgaccattcccggaataggtccgataggcgcggcggcgataattgcgtttgccgccccaatggaaggctttagaaaaggccgtgactttgccgcctggctcggcttgccaccaaggcaatactcgaccggtggcaaaactgttcttggtcgcatgtcccgaatggggcaacgtgacatcagacggctgctgattaccggtgccatggctgtggttcgttgggctggtatccgtggaaccaatgaaccatggcttcaacgcatgctggatcgcaagccacgtatgttggttgcggttgcgctagccaacaaaatggcgagaattgtatgggccctgatgacacagggcggagaataccgagttccggctcctgctgcataacgcagcagagtgttcgggacgtcggagaatgtgagcaggacggaggacgtgtaagggcaaacggtcattgagacgagatgggaaaaaccagtttacggacgatgcgcctcagagcgcgcgtaagcgatttggatcctgtctgcgcatctccatacaggcccgcggcgtgcgaaaagccgcatcttgaggccggacacacgactgcacctgatcacatgtcattacaggtcaaaataatgcttgcatttacgggggcgtccacaca

SEQ ID NO: 2164 - DNA, 1396 bp, unidentified
  source 1..1396: mol_type = unassigned DNA; note = element_3007d92
  misc_feature 1: note = core
  misc_feature 2..88: note = LE
  misc_feature 89..1114: note = CDS
  misc_feature 1115..1396: note = RE
  misc_feature 1165..1388: note = bridgeRNA
taatgggatggtcgcccccttctgagacggcatcgatgtgccaaagtggagttgtgacacaaccacttgaacgaaaggggcgaccgagatgaagcttacgacgattgggattgatctggcaaagaacgtgttccaggtgcatggggcggacgacagggggcgggcggtgctgaagaagcagatcaagcgggcgcagatgctggcgttcttcgccaagctcacgccctgccggattggcctggaagcctgtggcagcgcccactactgggcgaggaagctccaggcgctgggccacacggtacagctgatcgcgccgcagtacgtgaagccgttcgtcaaaaggaacaagaacgacgcggcggatgccgcggcgatctgcgaggcggtgacgcggccggacatgccgacggtgccgatcaagaacgccgagcagcaggccatcctgagcgtgcatcgcgcccggcaaggtttcgtcaaggcgcgcacggcgcaatcgaaccagattcgcgggttgctggccgagtacggaattgtcctgccgcaggggataggccacctcgtccggcgggtgcccgcgatcatcgaggacggcgagcgtgacctgcccggcagtttccggctgctcattcaacgcctgcttgatcacctgaaggaactcgaccgccaggttggcgaactggaagtcgaaatccggtcgtggcatcggcagaacgcggccagccagaagctggcagccattccgggcctcggcccgctgtctgccacggcgatcgtggcttccatcggggatgcccggaacttcaagaacggccggcaactggcggcttggctgggcatcgtgcccaggcagcactcgaccggcggcaaaccggtgctcctgggtatcagcaaacggggcgacgcgtacctgcgcacgctgttgatccacggcgcccgggcggtcattcgtgcagccgagcacaaggccgatgccgacccctggctgcggcaactgctcgcccggcgcaacaagaacgtggcggcggtggcactggcgaacaagaacgcgcgaacgatctgggcgctgctggcccatgagcgggagtaccaagcggattaccgcatggcagtgtgaatacctctgcggcgtagcaacgacacgaaccggcttcgaaaggagaccctccaccgattgcacaggcagtcacgacgtgatggcaagacaggtcagaccggggcctcgccaacctgcgaaaagtcgggcgcttcgagcgcgggcgactgataaggacggggccagcgcattccatcagggacagaggcttgtggcctcgatgacagtccggatctatggccgcaatctctacctacttaccgtcatcgattgaaggcttggcaaaccgggggcgaccatcta

SEQ ID NO: 2165 - DNA, 1431 bp, unidentified
  source 1..1431: mol_type = unassigned DNA; note = element_300f6c1
  misc_feature 1..2: note = core
  misc_feature 3..70: note = LE
  misc_feature 71..1108: note = CDS
  misc_feature 1109..1431: note = RE
  misc_feature 1207..1425: note = bridgeRNA
taatgggatggtccgccgcgatagcccagctcacagctggggtataagggattcacggaggaactacattatggaactgcacaccatcggcatcgatcttggaaagacagtatttcatttggttggactcaacctgcgcggcgaagttgcagtgcgcaagaagttctctcgcgtacaactgctgcacttcacagcgaacctgaaggtcgatttgatcggcatggaagcttgtggcggagcccactttctcggacgcgcattgcgcgaccaaggacatgaggtgcggttgatgccggcccagtatgtgaagccgtacgtgaaaacgaacaagagcgactatatcgatgcggaagccatcgccgaagctgtcgcacgaccaaccatgcggttcgtgcctatcaagaccgacgaccagttggatcttcagtctctgcatcgagtgcgcgagcgctgggtgatgcgccgtacggcggtagtcaaccagattcgcggcttgctgctcgaacgcggcatcactctgcgcaaggggcggagccatgtgggccgggcgttgcccgggatactggaagacgccgattccacattgtccggagcgctgcgcgtgctgctggcgcaactgaaactggaactggagcagctgaccctgcggatcgaggaggccgatgcggcgatcggaaaaacggcacaggagaacgacgcctgccggcggctggttgccatccccggcattgggccggttacggcgaccgcactgatcgcagccatcggcaacggagcggccttccataaagggcgcgagttcgccgcctggatggggttggttcccagggagcactccaccggcggcaagcagaaactgctcggcatcagcaaacggggcaactcttatctgcgaaggctgttcgtgcaaggcgcacgcgctgtcatgcggttccaggccaaacagtcttccggtctgagtgcatggctggcgcggcttaccgcacgcactcaccacaacatcgtcaccgtcgctctggccaataagttggcccgcatggcttgggcggtgctcgccaagggtgaaccatatcggcctccggtagtggccagcgcagttgcagcttgacgggtctacagatgacgcctgttcagccaggcttggaaatcgctggcgcgattcccacatctacaggccagcgactgctggaaagtttatgatttctgccaggtctgctggcgaacagtgagatgacacaacggtcgaacccggcgctctgaaaaacctgctttgtgtaaaagccctaacaaggctgcacgtttaaataggagcagagcgcagcgcattccatcctggccaggagtcacaaactccatcaaaggccgtatacatttgcgcagaccaacttgttaccttcatttttcgcttgcattcacgcggcggaccataca

SEQ ID NO: 2166 - DNA, 1381 bp, unidentified
  source 1..1381: mol_type = unassigned DNA; note = element_3014086
  misc_feature 1: note = core
  misc_feature 2..89: note = LE
  misc_feature 90..1118: note = CDS
  misc_feature 1119..1381: note = RE
  misc_feature 1144..1337: note = bridgeRNA
gaatgaaagggacttcccctcgatttggttactgtattgattttccgtgccatcatggggagtaaccaacatattacaggggattcattatgaccatcgcaactatgggtatcgatctcgcaaaaaatatctttgctgttcatggtgttgatcacaacggcaaacctcttcttgttaaacccaaagtatccaggactgcgctgcctgagttaatcgctaatttaccgccctgcctgatcggtatggaagcctgctccggcgcacattattgggcaaggttgttccggcaatacggccatgatgtccggttaatggcccccaaatttgtttctccctatcgtctggcgggtaaagttggaaaaaatgatgccgctgacgcattagccatctgtgaagctgtccagcgtccgcatatgcgctttgtccctgttaaagatgaagaacaacaatcgatgcagtgtttgcatcgtactcgccaggggtttattgaggaaagaacggcttcatataatcggctccgtggcttgctatctgaatttggtctcgttgccccgcaacgcacagaacagcttcgttatttggccgcagaacacagggaagctttaccctactgggttcggcagtgtgttgctgatcttctggggcatattgatgccattgatctgaaaattactgagtatgatcgtattttggcaaagatagcgggtcaggatagtcgtagtaaaaatttgatgaaactcaaagggattggtccgacaacagcgagtgcgttggttgccagcatcggtaacgcccatggttttagaaacggtcgccaactggccgcttggttgggtctaacgccctcgcaatacagcagtggaggaaaatcctgcttggggaaaatcactaaagccggtgacagttacctgcgcactttacttgttcagggggcacgttctgtgatgattggtgtggaaaataaacaagatcccttcagtcgttgggttagctcactgatcaatcgacgaggttactggtgcgcagcggtggctattgcggcaaaaaatgcccgtttatgctgggcatcactgaactatggtgatgactttaaactgtattgcgcatcagatacctgaaacaagtctgtagaaaaaattaccttttctggctgcaagcgttgatgttaaagggttagaccccgtaaggcatatctgtacaaagcactggatattggtatccgcttaacgagcgagaaccttacgagcgtctttcatcagggtccgaattaatagatgattcatcatgaccgtttatagtaccgcagtcttatcctttatttcagagaggggcagacagaaaattaaaaaaccgacgttgactgttcggggaagcccttata

SEQ ID NO: 2167 - DNA, 1763 bp, unidentified
  source 1..1763: mol_type = unassigned DNA; note = element_301cc76
  misc_feature 1..2: note = core
  misc_feature 3..359: note = LE
  misc_feature 360..1616: note = CDS
  misc_feature 1617..1763: note = RE
  misc_feature 46..322: note = bridgeRNA
ctcgtattatataaatcgaattagtagtaatattcctaaaaaagtttgtttatttggtcatcaggtgatagcctctaattgtcattggctttagtcaattggtataggtttttcttccttgcgatttgttagctttagttagtctgccgcccaagcaacttttctaatgactcactcacatgctgtaccgatttgagatatctactgttccagagcaggaacaggcgcagctttcttatcttaaacccgtgtgtacttatatcttgcgaggctgtcctagaagttgtaattaggggctacaacatgatgatcaaacctatcaaccaatgaaatttgtgtagaaaggaggccaaaacctaatgaacaaactatttatcggcattgatgtcagctctaaggatcttcaagtcgctattaccgactctgaaaattaccaaactcctttggtaaacaagtccttctccaacgatcttattggtgctagcgaggtcaaagagattatccttgatcttgctcaaaagaacggctacgacaaggtaattattggtatggaagccacctctatttatagcttccacccagcttacttcttctcaaacgatgatgatcttaaaaagttgaatgtcgagactgatgttatcaatcctcgacaaaccaagaggtttcatgacgttttcgaagaaaacaaaaacgatcctgtagacgcctatttcattgccgaatatctccgatatggcaaatatcgtgtaaccatcgccaggcaagatgaatatcttgccttacagagacttaccagaaccaggtatgaatttacccaatcactggtccgggccaaacagcacttcattgaagccctgtactatcgcgtaaataagctcgttactgttgacaaagataaggtcaatacttctatctttggcgcaacaatgatgagtatcattagcgatagccacaccctcgatgaaatagcccagatgcccgttgaaaagcttgtggagtatttacaggaaaaaggccacggacgcttctccgatccagaaactttggctaaggcaatacagaaagccgttagaggctcgtatcgtctagggcaagtgattaaagattccatagattctgttttagctgtctattcgaatgaaatcagaacctacaagaaattgatcgctgatctggataaagccatttctaaaataattttgactttaccagaggcgaagattttagaatcgattcctggaattggaaaggtctactctgctggaattatcgctgagattggatcaattgaccgcttcgataccgaagctcaactggctaagtatgccggccttgcttggaatcagaagcaatcaggatcctttgacagtgaacatacacctctttcaaaaactggtaacaggtatctaagatattatttagttgaagctgccaacttaataagattgaaagatcccgtctttgcccagtactatcgaaagaaatatgacgaagcaactttttcctcacataaacgtgcttcacataaacgtgcttgcgtattaaccgcaaggaaattaatcagggtcattttcactttgctcaaaaatggccaaatctatcaaacaccgaggtgattggtctagaaacaaaccactattttcaaagaacttttgaaaaaaaccctttaggtagggcttagtttcgtgcacccaaatttcaggttttaaacaaactcctatttgaattattttttaattctgtcttgacttagtaccacatga

SEQ ID NO: 2168 - DNA, 1493 bp, unidentified
  source 1..1493: mol_type = unassigned DNA; note = element_301eead
  misc_feature 1..2: note = core
  misc_feature 3..246: note = LE
  misc_feature 247..1473: note = CDS
  misc_feature 1474..1493: note = RE
  misc_feature 6..233: note = bridgeRNA
ctaatgggagctaccgggtcagccgctggcagactcggtgcctggtagccgcgggcgggtgagcactcccgtcgcctggaccgatgttgagtcctggtgtcagagcgtgcccccgcctgtggtcgggagatgaacggctgatggggtgtcgtgcccgccgtatgttggcgtgagcactggtccattagggcgctggagtcttccgcgggctgctgacctgaccccgtggcggagcggagattcgtagtgctgttcgtcggcgacgactgggcggaagaccatcacgacgtggaggtgcaggacgaacacggccgggcgatacgcacggtccggctgcctgagggtgtggacggcatgacccgcttccatgagctcgtcgccagattcctgcccgagcacgcgaaaccttccgacgtgctggtatgtatcgaaaccgaccgcgggccgtgggtgcgggcgctggccgcggccggctaccaggtctacggggtgaacccgaagcaagccgcccggcaccgcgaaggcatgtcgctctcgggcgccaagagcgacaaggccgacgcgcacaccctggccgacatggtccggacccgccgtcaccagctgcggcaggtcgccgcggactccgacatcgccgaggcggtcaaggtcgtcgcgagggcgcatcagacgctgatctgggaacgcacccgccacacgctgcggctgcgggcggcgctacgcgactatttccccgccgcgctacaggcttatcaggtgctgacgctgaccggcgccgacacccttgaactgctggccaaggcgcccaccccggccgcagcggccaagctgaccgtgacgcagatcagcgccgcgttgaagaaggcccggcgccacgatgtcgcggccaaagccgccgcgatccagcaagccctgcgcaccgagcacctgggccaatccgacgtcgtcgccggcgcctacggggccaccgtccgcgccaccgtcgcggtcctgcaaaccttgaacaccgagatccgcaccctcgacgggcaggtcgaggcccattttggccagcacccggacgctgaggtctacctcagccaacccggcatcggcgtgatcctcggcgcccgggtgctcgcagagttcggcgacgccccacagcgttacgccgacgccaagtcccgcaagaactacgccggcaccgcaccgatcacccgccagtccggcaaatccaagaccgtccacgcccggttcatccacaacgaccgcctcgtcgacgccctgcacatgcaagccggcgtcgcgatcctgcacgacccgggcgtccgcgcctactacgacgaactccgcggccgcgagatcggccacaacgctgccctgcgccaggtcggcaaccggctcgtcggcatcctccacggctgcctcaaaaccagcagctcctacaaccagacaaccgcctggtcacaccgcacaaaatccgccgctgcttgacattcaagaagctggggtgt

SEQ ID NO: 2169 - DNA, 1365 bp, unidentified
  source 1..1365: mol_type = unassigned DNA; note = element_302278a
  misc_feature 1..2: note = core
  misc_feature 3..75: note = LE
  misc_feature 76..1110: note = CDS
  misc_feature 1111..1365: note = RE
  misc_feature 1083..1353: note = bridgeRNA
tgatggggtggacaccccccgacggcatcgatgtgccagagtggagttgttgaagcaccactgagggaggcgtccgtgtcggaagttaccacaatcggtctggatatcgccaagaatgttttccacgcccacggggccgatgagcgcggtggcgttgttttcagcaagcggatcagtcgcgagaagctgctcgatttctttgccgcgcagccgagttgcacggtggcgctcgaagcgtgtggcggtgcccatcattgggcgcgccagctgatccatctcgggcaccaggtacgcctgatcccgccagcctacgtgaagccgttcgtgaagcggcacaagaacgatgcggtcgatgccgaggcgatctgcgaagcggcgcaacggccaagcatgcggttcgtggcggtgaagggcgaggaacagcaggcggccggcctcgtgttcaggacccgcgacctgctcgtcaggcagcgcacccagttgatcaacgcgatccgagggcatctctcggaatatggatgggttgcgcccaagggcccgtcccatgtcgcgatgctcgcggatctcctcgaagaggaggagatggcgagtacgctgccaaaggcggcacggtcgatgctgcgcgtgatgctcgacctgctgggcaacctcgacgaccggatcaaggaactcgacaaggaaatcacgcggcgggcgcgagaggatgaggtctcgcgccggctgatgacgatccctggcatcgggccgatcggtgccaccgcgatcgcggcgctggcaccgccggccgagaccttcaccaagggccgcgactttgcggcatggcttggcctcaccccgctccagaaatcgacaggcggcaagcaaaagcttggcgcgacatcaaagatgggcgagcgcacgcttcggcgcctgctaatcatcggcagcagcgcagtcgtgcttcaggcgagccggcgtggtgcgcccaggggctcgtggctcgaacggatgctggcgcggaagccgcgcatgctggtgaccgtggcgctggccaacaagaccgcccgcatcgtctgggcactgctggtgaagcaggaggattacaaagctccggttgcggccctggcgtaagccagagcggacctgaggtcgtcggaggtgtaggcgggcgaaggagagtatggcgcaacagtcggcgagacggggccggaagaaccagtgctatccacggtgcatcaagcacgccatggtgatgtggttccggtccgcgaactcccatacaggcccgcagctccatcgctgcatcagaggccggacagatggcagcatccgactacacgccaactaccctcaattaccgcttgcacctgaccgggtgtccacaga

SEQ ID NO: 2170 - DNA, 1322 bp, unidentified
  source 1..1322: mol_type = unassigned DNA; note = element_3028a24
  misc_feature 1..2: note = core
  misc_feature 3..68: note = LE
  misc_feature 69..854: note = CDS
  misc_feature 855..1322: note = RE
  misc_feature 1089..1320: note = bridgeRNA
ttaatgagatggtcactccctccttcccagtactatgctgaggacaggctttcattcggagaaccatcatggaaaacattgcgcttattggtatcgatctgggtaagaactctttccatattcattgtcaggatcatcgtgggaaggccgtttaccgtaaaaaattcacccgaccaaagctaatcgaatttctggcgacatgcccggcaacaaccatcgcgatggaagcctgtggcggttctcactttatggcacgcaagctggaagagttagggcattttccaaagctgatatcaccgcaatttgtccgcccattcgttaaaagcaacaaaaatgacttcgttgatgctgaagctatctgtgaagcagcatcacgtccatctatgcgtttcgtgcagcccagaaccgaatctcagcaggcaatgcgagctctgcatcgtgtccgtgaatccctggttcaggataaggtgaaaacaactaatcagatgcatgcttttctgctggaatttggtatcagcgttccgcgaggtgctgccgttattagtcgactgagtacccttcttgaggacagtagtttgcctctttatctcagccagttactgctgaaattacaacagcattatcactatcttgttgagcagattaaagatctggaatctcagttgaaacgaaagttggacgaagatgaggttggacagcgcttgctgagtattccctgcgttggaacgctgactgccagtactatttcaactgagattggcgacgggaagcagtacgccagcagccgtgactttgcggcggcaacagggctggtacccgacagtacagcacgggaggtcggacgacattgttagggattagcaagcggggcaacaaaagatccgaactttgttggttcagtgtgccggtattcatacaaaactggaacaccagtctggcaagttggccgactgggtcaggagttgttgtgtcggaaaagcaactttgtcgtcacctgtgctctggcaaacaagctggccagaatagcctgggcactgacggcgcgacagcaaacttacgaagcataaaggcagaaatacaccagtttaaacaatcattcatctggttttgcgaatactgatattgatgatactaacggcccaccggcctgttgaggaacctgtaaaacggaaaggctcattgaagccgtatattttctggaggttcatcaggcgcggaactcatcgaggcgcgggaataaaatcccattcagacgccggatagattcaagcaagccaacttgtcgtcaaaatcggtgttgcaaaaacgggagtgaccataga

SEQ ID NO: 2171 - DNA, 1216 bp, unidentified
  source 1..1216: mol_type = unassigned DNA; note = element_302db97
  misc_feature 1: note = core
  misc_feature 2..213: note = LE
  misc_feature 214..1185: note = CDS
  misc_feature 1186..1216: note = RE
  misc_feature 35..203: note = bridgeRNA
tcttaagtttacaatctattaaatttagagtattaatcagaaagaacaaaagagaggattaaggttattatacacgtagaagcttaagacttcgtcaacattgaaaatcccctctcttttctacacagatttcgtacagttctatgaggctttggacctcgctttaaagtcgttgaaactcgcgtaggttgtcctttcaaaaaacattttcttatgaataaagatattaaatattttggtatcgacatcagccatttggtttttgatgtcaccgattctcaaggtaattattaccagtttaaaaacacgatttcaggctttaaaaactttgctaaacttctatcagcaaacagtcattgtgttatggaagccacaggttattaccattatcaattggcttattatttactagagtcagggacaaaagtatcggtcgaaaacccattggcggtaaaacggtttatacagatgggactctcaaaggtaaagaccgacaagagcgactcaagacttatctgtgcatacgcacagcatgtagagttgaagctttggaaaggtaattccaagaatgagctagagtgtttgcagatcgtcaggaccttatctgtatacaccaaacagagcaccatgctaaagaacaaattgcatggtgaggccgttttgggagagccgagcaaattggttgtaaggtcattgaaacgaaacttgaaacaattagaaaaagagatgaaaaccttggaagatcaactcctgctgttggtcagacaagtacatcaagatttattgacacgcttggagaccataccaggaataggaagaaagacagccataatgttggtggttctaacaggtggttttgatcgattcaccagtgcgggcgaattgtgcagttatgcaggtttaacaccagtgataagacaaagtggaagcagtatcaatggacgggcaagaataagcaaaataggcaaccagaaactgagaaacttattgtttatgtgcagttttaatgcttgtaaatacaacaaggcttgtagggatttatacgagcggatagtagccaagggaaagagcaaaaaactagccttgattgcagtgtacaataagttgttaaaacaggcctttgctatagcaaaatcaggattgatatatgatgataattacagaagtactttagtgaaaaattaaggagattttacttgttttttaccacagtact

SEQ ID NO: 2172 - DNA, 1573 bp, unidentified
  source 1..1573: mol_type = unassigned DNA; note = element_303224f
  misc_feature 1..3: note = core
  misc_feature 4..244: note = LE
  misc_feature 245..1327: note = CDS
  misc_feature 1328..1573: note = RE
  misc_feature 10..224: note = bridgeRNA
cccgttaccttgtcagtatccccgataatggggatagtcgctggtcccggtatggcttacttgccctgttgtttcgatgatccggggggtgttgccgccgggtgccaggacgttcgatgacagctgatagggacaaggccggttctcaaactaggtctctttgtaacgtgggtgctcgctacgaatgtcatgacgccagcgactggaacaaggacatgttcatctcgttttctaggagctcaccttgtcacaggaactctccatcgacatatttcttggtttagacgtaggtaagtctgaacatcacgcctgcgctctcgaccgcgacggcaacaaggtcttcgacaagccgttgcctcaactcgaatccgaactagcaagcgttttccatcagcttcaagagcatggcacggtgcttgtggtcgttgaccaacccaacacgattggcgcactaccgattgctgtagcccgtgcctgcggatgcgaagtcggatacctaccaggtctagccatgcgcaaagccgcagatctctatccaggacgtgcgaaaacagacaaacgcgacgccttcatcatcgccgacaccgcccgcacaatgccccacacactacgtgcggtcgaccgaagcaacgaagttctgtcggcgctgaagatgctgtccggcttcgatgacgacatcgcccgcgactgcacccgcacagtcaaccgactacgcagtatcctcactcagatctaccccagcctggaacgagtctttgccggtagcaccctgactcgcaccccagttttggatttgctgatccactacaagggaccccaggggctgaaacgagccgggtaccatcgagtgctgaactggatgatcaagcacacacgcaaagaccccaccccgctggtagacgagatttttgcagcactgaaagcgcaaacagtcaccgtgcctggaagtgatgccgccgagctcgtcatcccgcagctggccgccaacatcaaggcactcaaagagcaacgcaacaccattgctgaacaggtcgaggggatgcttgatgatttccctctttgcgaggtcttgatgagtatccccggagtcggcatcaagaccgcagcgcagatcctccttgcgatcggtgacggctccgacttcgatagcgccggacacctggctgcatacgcaggaatcgcaccagtcaccaggagatctggttcatcgatccgaggagaattcccagcgcgatcaggcaataaacgcctgaaaaacgctttgttctattccgcattcgcgggctattcgcagccacgaaccatcacgccagtactacgaacgtaaacgagccgaaggcaaacgccacaacgcagcagttatctgcctggcacgacgccgatgcaacgtcatctacgcgatactgaaaacaaggaattcttccgcgagatcccaccacgcccagccgccgcataacgtccaacaaagcgaaaccgaccagcacacgctggccggttcctaagcccgcctaaagctaccccccatgcctgtactcgtcagcggcaacctaacacttgacaaaacatagggaca

SEQ ID NO: 2173 - DNA, 1394 bp, unidentified
  source 1..1394: mol_type = unassigned DNA; note = element_3032d8f
  misc_feature 1..2: note = core
  misc_feature 3..82: note = LE
  misc_feature 83..1108: note = CDS
  misc_feature 1109..1394: note = RE
  misc_feature 1160..1382: note = bridgeRNA
tgatggtgtggacggcctctcctcaacggcatcatagtgccaaggcgtggtcgccggagcgccacaaagagggagaccatccatgaagaagtttatcagaattggcgtcgatttggccaaaaactactttcagatacatgcgctggcgagcgaaagcgggcccgcggtgacgcgcaagttgaaacgctcgaagatgctcgagtttttttcgcagatcgaaccctgcctcgtcggcatggaggcgtgtggctcggcgcattattgggcgcgcgaactcaagaagctggggcacgaggtgcttctgatgccaccagattacaccaagccctatgtgaaacgcggcaagaacgacgcggtagacgcggatgcgatctgcgaagcgatgtcgcgtcccggaatgcgcttcgttccggtcaagagcgcggagcagcaagccacgctgatgctgcacaagacgcgcgaactgctggtcaagcagcggacgatgagcgtcaacgcgcttcgcagccatctttcggaattcggcattatcgccgccaagggaatcggccgcgtcgacgagttgcttgagctggccgaaagtgatgcgacgcttccggccgccaccagggcggccgtggaggttctggccttgcatcttgaggggctcgacaagtcgatcgacgatctggaggacacaatcgccagcgcccatgcgcaaagtgagatgagccggttgctcgatgaggttccaggcatcggcaagctcatcgcctcggtgatcgcagctagtgtaccggacgcgggcgtgttcaaatcggggcgcgatttcgccgcctggctcggcataacgccaaggcagaactcgagcggcggcaagcagacgctcggagccatcaccaagcagggcaaccgatacataaggaaactgctcgtcttgggggcgacctcgctgctgcgcgtcgtgggcaaacgcaaaggcgccctgcgcgactggattgtcgggctgctggcgaagaagccggcgcggctggttacggtggcgctggccaacaagcttgccaggattatctgggcgatgatgaagaccggcgaaagcttccgcaccgaaatgttcgcgaaggcgtgagaacgtcgcctatcgccgcaaggagcattcgcaaagaagttttgtaggttcgagtttggtaagcgcgcaacaggcgtgatgaacgacacggtcgccaccgaaggccaggaacaacccgccacttgtcacgagcgtaaagctcgcgcgcttgatagggatcccggtagtcggacttcatcaaggccagcggatatatgctccgcgcaaacaggccggacatatgaccgcagccgaccaaatcgttcgaagcgccaaaaaacgcttgccattgggggccgtccacata

SEQ ID NO: 2174 - DNA, 1344 bp, unidentified
  source 1..1344: mol_type = unassigned DNA; note = element_303407c
  misc_feature 1: note = core
  misc_feature 2..126: note = LE
  misc_feature 127..1092: note = CDS
  misc_feature 1093..1344: note = RE
  misc_feature 1106..1332: note = bridgeRNA
tgatgctgtggacggctctcacccaaccagccagcctgtttgtggctgataataggaggagagccatggaagcagcagttacgataggtctggatctcggcaagtcggtttttcaggttcacggcgttgatattaagggaacggttgtcgttcaacgtcggatcatgcgagctcggctgctggcatttcttcgcaaagcagccggcttgcctggttggaatggaggcctgcggagccgctcatcattggtctcgggagctgcagaagctagggcaccgggtgaagttgatgccgccacgttatgtcaaaccgtatgtgaagcggcagaagaacgacgcggcggatgccgaggcgatctgcgaggcggttacccgtccgaacatgcgcttcgttgagattaagagctgtgagcagcagggcgttctggttcttcaccgcgtccggctgatgttgatgcgccagaggattgcgctgtcgaacgccatccggggtcacatggcagagtacggtttggttgctccagtgggccgcaacgggctgcagcgcctggcagcgatcattgccgaccacggtgatgaccggctgccggcgatggcccgcgcctcgctgatcgtcctggtatcccagcttcagctggtgaacgagcaggtgcttgagaaagatcgcagagtgagagtgaccgcgcgatcgacggagatcggccggcgtttggtggaagtgccgggtgtcggcccgttgctcgcgagtgcgatggtcgcatcggtgccagacccaagtgccttcaggtcaggccgggaccttgctgcctggatcggccttgtgccgaggcagaactcaagcggcggtaaggagaagctgggcagcatcaccaagcagggagaccgctatctgcggcagctgctggtggtcggtgcgctctccgtcatccgctatgctcagcagcatggaaccaggcggccctggctgatctcactcctcgcgcgacgatcacctaagattgcagcggtggcgttggccaacaagatggcccgaatgatctgggcgatgatgatgactgcggagcgatacagagagccggtcacggcggcttagcaaacgcgtgattcagggattgggaagggcaactgcgatgtaatgcgtccaccggtcgataccgggagcgggaaaacccatttgcgccatagcgcttcgagcgcgtgcttttggtcgggacccgtctccgcggaaggcattatggccagcggctactgtgtgccgcatcaacaggccgcacacatggccgcaccgaccaagcggaagcaccgcatcaaagaaaacccttgccaatagagagccgtccacaca

SEQ ID NO: 2175 - DNA, 1395 bp, unidentified
  source 1..1395: mol_type = unassigned DNA; note = element_3038138
  misc_feature 1: note = core
  misc_feature 2..99: note = LE
  misc_feature 100..1131: note = CDS
  misc_feature 1132..1395: note = RE
  misc_feature 1175..1392: note = bridgeRNA
taatgtaatgaaccatcctccacccacgctgctagtgcggcgggagtcttcagactagtcttttatctgaaggacctcaaactcggatgggagatcgacatgacaattagcatattgggcattgatattgccaagaacacttttcagcttcatggcgccgactgcacaggcaaggcggttctgaagaagcgtttgcctcgacacaagcttgccgcctatgcggcaactttgccagcctgcactatcgtaatggaatcatgcggaggagccaattactgggcgcgagttttccaacgaagcggtcacacggtgaagctcatcagccctcagttcgttaaacccttcgtgaagaccaacaagaacgacgccaatgatgcgcaggcaatcgtcgaagcagccagcaggccgtcgatgaactttgtgccaatcaagcaggttgaacagcaggacatccagtctatccatcgtatacggactcgggtcgtcaaaaatcgaacggcactaatcaacgagatcagggggttgtgcctggagtatggaatagtcctcactccaggggccgcgagggtcaaatcgtcattgtgcgctgttattgcagaaagcgataacgagctgacactgtcttcacgtgaaagtatgcaagatctttatgaagagctgattgagattgaagtcaggttgaaaaacctggatacaagaatccgtcagctctgtagaagtaatgagagctgtacacgcatcttgaaaatacccggtgttggtgaactgaccgcaacagcgattgtggcagccgtgcccaacccaaatgagttccgcaatggccgacatatgtcagcgtggttgggactggttccacggcagttatccagcggagacaagcaggttctcctaggaatcagtaaacgaggtgatcgttatttacggacattattaatccacggtgccaggtcggtattgagccactataaagacttggataacgactatgcccgttgggttggcaagaagaaggcgacgctgagtcacaataaagctgctgtcgcattggccaataaaaacgcgcggatcatatggtccatgctaaatacaggggaggattttaactacggggttcaaacggctgctgcctgatactcaatattaggtggtttcattaacacaacggaaaatatcacaagtttgctgtagttgatttgaatgatgggcaataggtcaaaccggctcttttaaaacctgaaagttgtcacggcccttagaggccatggtactgatgaggaaaaagagtgcgaatttacatcagggcacaagtctgacttgcatgccgaatatatgaccgcaacttagacctataacatccatcagaaatcagcttgcaaaagggggatggttcatata

SEQ ID NO: 2176 - DNA, 1215 bp, unidentified
  source 1..1215: mol_type = unassigned DNA; note = element_303a25e
  misc_feature 1..2: note = core
  misc_feature 3..214: note = LE
  misc_feature 215..1153: note = CDS
  misc_feature 1154..1215: note = RE
  misc_feature 12..188: note = bridgeRNA
cttgtatcgttctttccgtggtggttagctactaccacacgaagcagaggacgcttgcagcgctccttaaggctcgaccttgttaagtagatcaagccctctgcttcacctatcgccagcaaagacactgaacggtatccaaggggcaaaccctgcatgaacaaggctagtgggcgaagttggcagtgatggttgattataacaggaggtcatcatgttctacctcggcatggatgtggcgaaagccaaattggattgttgcttgttgctggatgaagtcagtggcaagcggaaggccaaagtaatcaataacaccaagtctggcatttctgatttactggcctggactgtcaaacaaaacgtttcacccaaagaattgcacgttgtcatggaagccactggtgtctatcacgaacaagctgccatggcactgtcggatgcgggtgtgatggtatccatcatcaacccggcgcagatcaaagacttcggtcgtgggctggcggtgcgcaccaagacagatggcgtggacagctttgtgctggcgcgttacggcgcattactcaagcccaaagcttggatggcaccctccccggaagcacggactctgcaagtgctcttggcgcgtcgggaggccattgcccaagatattcagcgcgagcgcaaccgccaggagaaggccgatgcgaccgacactcccgagctgattttaaagtcacttgaagacagcatcgaatttctggtcaaacaattggccacattgcaacggaacattgacgaccacatcaacaaacatcccgatctgaatagagatgtggatttactccagagcatccctggcgttggcccgcaggtcggaggcaatatgctttcggtgttgagcagtcatcatttcgagtcagccgaacatctggcggcgtatcttggagtggtgccagtggaacgacagtcaggtagttctgtacgcggtcgcgcaaggctatccaaaacggagcccgctagaatacgtgccgtgctatacatggccgcagtcgtcgcaaagcgctgcaacccccacgtcaagggagtctatgaccgcttaattggcgtggtaaaactaaaatgtctgcactcggcgccgccatgcgaaaattggtccatctatgcttcggcgtaatcaaaactcagcaggcataccaacacgattacgcaaaaaatgcttgacgttaaagacggtat

SEQ ID NO: 2177 - DNA, 1409 bp, unidentified
  source 1..1409: mol_type = unassigned DNA; note = element_303e140
  misc_feature 1: note = core
  misc_feature 2..90: note = LE
  misc_feature 91..1143: note = CDS
  misc_feature 1144..1409: note = RE
  misc_feature 1201..1403: note = bridgeRNA
caatgggatggacgccccgactctaaaccggcatcagatgtgccaaagtggatatctcaacaaccacttcaacgagaaggagcgtccgacatgaaggttacaataattggcatcgatttggcaaagaacgtgtttcaggtgcatggcgtggatgaacagggcaagaccgtgatcaagaagcaactcaagcgtcaccagatggcagagttctttgtgaacatgcctacctgtctgatcgggatggaagcctgtagtggggctcactactgggggcgcaagctcacggcgatggggcacaccgtacgcctgatggctccccaatacgtcaagccatacgtcaagagccagaagaacgacgcagctgatgcccaagcgatttgcgaggcagtgggtcgaccgagcatgcgttttgttgccatcaagaatgttgatcagcaaagcgtattggcgctgcacacggcgcgccgcgggtttgtcaaagcgcgcaccgcgctggccaaccagatgcgcgctctggtgggcgaatttggtgtcgtgatccccaaggggttgagcaacgtgaccagtcggctgccccaggaactcgaagatgccagcaatgagctcacgacggtggttcgcctgttgctgcagcaattgctggaacacttcaaagagattgacacgcaagtgaaaaagcttgaaaagcagatcagggtgtggagccgccaagacgagcaggcacgccggatcgaacaaattcccgggattggaccgatcacggccagcgccgtggtggccagtttgggggatgtgagcctctttgaagacggccgacaggtctcggcctggttggggttggtgccgcggcagcactccagcgggggcaagacggtgctgctgggcattaccaagcgaggcgacagttacctgcgagttttgtttattcagggtgcccgcgcagccatacaggcggcgcaaaggagcgcagagggccccccggcgtggctggccaaactgcttgcgcgcaagcatcccaacgttgcggcggttgcgctggccagtcgcaacgcccgaacggtgtgggcgttgctggcacacaaacgagattacgatcccaaacatggtttggacaaatgcatcagtgcagcgctggctgcctgagagaaagagttagacccagaagtcaaagcagttcaaggagaaccccgtaagcgttgcgcagactacaacagcaattgaaggcaaatcaggtcagaccgggggttggaaaaacccgatcatcgcgaagcactttgagtgcatcacctcgctagaggatccaacccgctaaacccatcagggaccaattgagtccgaatgtacggttgcaatctctccgactcgccagcacttgcaatgtggcttgcaaaacaaggggcgtccatgta

SEQ ID NO: 2178 - DNA, 1580 bp, unidentified
  source 1..1580: mol_type = unassigned DNA; note = element_3048ca1
  misc_feature 1..2: note = core
  misc_feature 3..269: note = LE
  misc_feature 270..1439: note = CDS
  misc_feature 1440..1580: note = RE
  misc_feature 1..246: note = bridgeRNA
gtatgatgtttgcagaagctaaaacaccacttttcctttctttcatctccgtggttcaatacaactcagatactgtggacaattgattttgttttgtagctttgactactcagttgggagtgtattgccgctacctttatctgaattgtttatagctggatgtttccggtggctgctatgagcctctgagtacttatttccgtcaagtctacgatgataatcgctggtggatatcacggtatcaatacttgaaagggaggtacgacctcatgatctatgttggcatcgatatcgccaaactcgatcactacgcatctgcaatcgattctgatggcgtagtactcatcgagccgttcaaattcagaaatgacgctgatggcttccacactctgtcatccaagctggaatctcttccaaccggtgacaaagtcatcatcggtcttgagtcgacggctcactacggcaacaacctcgttcgttatcttgtttgtcgtagctatgatgtgtgtgtcctgaacccgattcagaccgccactctgcggaagaacaacatccgcaagaccaagacggacaaagtggacacattcatcatctgtaaagcccttgctatgcagcagtcttatcgcttagtttccttcgatgatcttgatctcatggatctcaaatcgcttggacgctttcgccagaaagccatcaagcaacggaccaggctcaagatccagctcaaggcttctctcgatcagactttccctgaacttcagtatttcttcaagtcagggctgcaccagaaaggtgtctatgctcttctcagggaagcccctacggctaaagacgttgcttccatgcatctgacccatttggctcatcttcttgatgttgcttcccacggccatttcaagaaggatcaggccaaagagttaagggttctggcacggaactctgtcggttaccctgacagcgctatcgctattcagatagttcatgctgttgaacagatagaacttctggatagtcagatcgcccacgttgaggcggagatgacggacattatgaaagttcgcgattccgtcatcatgaccattccaggcattggctacatcaatggcggaatgatcctgggtgagatcggtgacgtccaccgtttctcaagccctaagcagcttcttgctttcgccggtcttgatcctactgtttaccagtccggtcagttccaggcgaagaagaccaagatgtccaagagaggatccaaggtcctcagatacgctcttgtaaatgctgcccataacgtggtcaagaacaatgtgacattcgcggcatactatgatgccaagatggcgcaaggccggactcattacaatgcccttgggcactgtgccggcaaactagtcagagtcatcttcaagatgcttactgacaacgtagaattcaatctcgactgatagtcgggatatccgctaatcgatagattttgaaagcaccactattagggagctcggttaaagttacccttttttaccaccgatagaagattggaattctcggtaatttctgcctaaattatgcttgacttttcatagctg

SEQ ID NO: 2179 - DNA, 1603 bp, unidentified
  source 1..1603: mol_type = unassigned DNA; note = element_3052963
  misc_feature 1..2: note = core
  misc_feature 3..278: note = LE
  misc_feature 279..1493: note = CDS
  misc_feature 1494..1603: note = RE
  misc_feature 13..298: note = bridgeRNA
ctgttacaatataattgacgggtaaaaccttgcaatccagtaagggattacacgtgcttattacttaagctatactgaaagcagtaattggactgacgaattcctccttgggacaaagtgcccgtgattaagactgtcatccatgcttttattatagcgttcggtttatgcaggttgagccacagtatgtgcgttcgtgtcaccaaacagattgaataggtaatgagtaaagtgtggtttgcccgattacaatttcaattcaggagatgtattttattatgaacgcagtaggtattgatgtttccaaaggtaaaagtacagttgctgtactacgtcccttcggtgaagttgtggcttcgccttttgatgttgctcacaccggaagtgacttgaaaatattagcggacttcataaagaaacttcccggtgagagtaaggttgttatggaagcaactggaaactattatgaacccattgcccgttacctccacgaacaaaatatatttgtttccgtagtcaatcctgtgcttatcagtgacttcggcggaaacacgttaagaaagcccaaaacggataagaaggattctttaaaaatcgcttcctttgcgttaacttactggcttgaactgaagaaatatgttcctcaggaagacttaagaaagtcattgaaactgctgaacagacagtatcagcaagcttcaaagttaaagactatgatgaacaataatctgatttctttgcttgaccttactttcccaggaatcaataagcttttcacatcatcttccagagaatcagacggtcatgaaaagtgggttgactttgtattggcatttcctcactgcgatatgatctcaaagctcactatcaaggcattttcaaaaaagtacaagaagtggtgtgccagcaattcttattacttcacagaggcagcgtgtgagagaatatatgattattcaaaagattgcatcagcagcgtttctttggaagaatcgactgcatttgctgttatacaagcttctaaaatgctcaattctgccattgagaactgccacgctatccagcttgaaatgaatcgtatagcagctcagcttcccgaatatgatactgttatgtccatgtatggtgttggtaaatctgtaggttctcaactcatagctgaaatcggagatacaagacgtttccatagccggaaagcaatcaccgcttactttggctatgacagtgagaataatgattcaggtaagaaagtgtcaatatcaaatccaatgacaaagaaaggttcgggggctcttcgaagaaccttatttatcattatgcaggtattgttacaaacaaagccgatcgataaccctgtgtacgattttcggataaagaaacaatccaaaggtaagcattactattcatacatgaatgccgctgcaaacaagttcctgcgtatttactatgcgagagttaaagaagtcttaattgccgcagatatctcgacgtaagatgtctattcaagaataaattttttcaggctgcttctgcagtctttttgtcgtacacttttttactttgaaaaaaatttcaatttaaggcttgacttttatttgcaggt

SEQ ID NO: 2180 - DNA, 1356 bp, unidentified
  source 1..1356: mol_type = unassigned DNA; note = element_3057b76
  misc_feature 1..3: note = core
  misc_feature 4..79: note = LE
  misc_feature 80..1111: note = CDS
  misc_feature 1112..1356: note = RE
  misc_feature 1128..1343: note = bridgeRNA
tgatggtatggacgccccccacgacttcacgatgagccatactggagcgtgttgaacaaaccagaaagaggaggcgtccatgacgaaggttacgacagttggtttggatctggcaaagacggtttttcaggttcacggtgcggaccaggatggcaagcccgttgtgcgcaagaagctgcgccgggctcagatggttccgttctttgcggaactggcgccttgcctgatcgggttggaggcctgcgccagcgcccattactgggcgcgcgagctgcaggcactcggccatgaggtgcggttgatcccgccgcaatatgtgaagccgtttgtgaaaaccaacaagaacgatgcctcggatgccgaggcaatctgcgaagcactggtccgcccgacgatgcgatttgcggcggtgaagagcgccgggcagcaatcggtcctgatgctgcatcggtcgcgcgatctgctggtgcgccagcacaccatgctgataaacgcgctgcggggccattgcggcgagttcggtattatcgctgcgcaaggtgctgctaaggtcgaggcgctggttgcgttgatcgacgatgccgacgattcccgtctgccgtctgtggcgcgcgacgcgcttggttatctggtcgaacagctacgctcgacacaggaccggatcaaggagttggaggcaagcctgacgagctggcatcgatccaatgaagccagcttgcgtcttgcgacgatcccgggcgtgggtgtgatcaccgccacagcccttgtcgcgacgatcggcgatgcctcgcagttccactcagggcgtcaacttgccgcctggctggggctggttccaagacagcactccagcggcggcaaggagcggctcgggcgtatatcgaagcgtggagacggctatcttcgtcgccttctggttcatggagcccgcgcggatctgcgctggtccagacaccggaaagagcagcgctcggtatggcaggaaagcctgctcgcgcgccggccgaccaatgtcgtgctggtagcgatggccaacaagacagcccgcgtcgtgtgggcgatgcttagtcggggtgaagcattccggacggaagcccggtccgccgcataaccgccgacgaaaccaacgttattgcgagggtgatgatgacttgatggcgaaacagggtaaccgggatcggccaaacccgaggctttgtccgagctttaagctcgatgctctgactgggcgtcgatccacggattccatcagggcccgcagcgaagaagatgctgcatcgagaggccggatagatgactgcaaacccaaccgccgttacgcatcaaaacacttgcaatcaggggggcgtccataga

SEQ ID NO: 2181 - DNA, 1163 bp, unidentified
  source 1..1163: mol_type = unassigned DNA; note = element_305c4ec
  misc_feature 1..2: note = core
  misc_feature 3..201: note = LE
  misc_feature 202..1137: note = CDS
  misc_feature 1138..1163: note = RE
  misc_feature 57..202: note = bridgeRNA
cttgtatattaattgaactttaaaaaacaagctactgaggatagaatacaaatgtttagaaaggtgtggcagaccgttacgaccttggtttttaaaaaccgtaatttagcacgggtcgccacaccgtcacctgattaacccgaacaatggccaggacctaacgagtccgcatttaacaaggccgggagatgaggcaattctatgaactcagaagcatatgtcggtgttgatgtttccaaagatctattagatgtaaaagcattacccagcaatgaagctcaacaattttctaatgatgatccgggggtcaagaaattaaccatatttgcaaaaaagattgatccccgattgattgttttagagtctaccggcggtttggagatgctcgccgtcagtagtctcattgaaaatcacttgcccgttgtggtgattaacccacgccaagtaagagattttgcaaaagcaaacggtagactggcaaaaacagattcgatcgatgccgacacgatcgcgtgttttgcacgtgatattcgcccggaagttcgtccgctaaaggacgaacacacaaagcttttatcagcattaaatgccagacgcagacaaatcgttgacatgcttgtcgccgaaaagaatcgcttacatacggcgcccaaaccgaacagaaagagcattcaaaagcacattcagtggcttgaaagagcgttagaggatatcaacaaagatatcgaaaaaagaattaaaaaaagtccgacgtggcgtgaaaacgacaaaattctccaaagctttaaaggcgttggacccgtagtgtctgccacgttgctgtgcgatctaccggagctgggcacgttaaaccgaaaaaaaatcgctgccctagttggtgttgccccgcttaattgtgacagtggtcgatttcgcggtagacgtcgcatcaaaggaggcagaggaaatgtccgccgcaaattgtatatggctgccgtcgcatcgcttcgtcataacgatatgattcaagagttttataacaaattgattgctgccggcaaaccacccaagctggctttaacagcatgtatgagaaagatcctgactatcttaaacgcaatgatgaaaaatcaaacttactggatcgctccatattaatttttactggacattcaatacagtgg

SEQ ID NO: 2182 - DNA, 1374 bp, unidentified
  source 1..1374: mol_type = unassigned DNA; note = element_30666f0
  misc_feature 1: note = core
  misc_feature 2..88: note = LE
  misc_feature 89..1120: note = CDS
  misc_feature 1121..1374: note = RE
  misc_feature 1141..1366: note = bridgeRNA
caatgggatggactcctcctccccttacggcatctatgtgccagactggagtagttgctctcagtcacaggaaaaaaaggagtccaccatgaatattaatcgtattggaattgatttggcaaagaatgtgtttcagttacacggtgttgatcgtcacggaaaactggtgtggaagcgccggttaaagcgggaccagtggctgcaggcggttatggatcatgcagaaccgggttgtgagattggcatggaagcctgtgggggtgctcatcactgggcgcgtgtgcttgaggcccggggatttgccgtcaggttgatcgcaccacagttcgtcaagccgtacgtgaagagcagcaagaacgacgccaatgatgccgaggcaatttgcgaagccatgagccgccccaacatgcgcttcgtggcggtcaagagtgtcgcacagcaggatatccaggccacccaccgcatccgggctgacttgatgacgcagcgcaccgccaagtcgaatcagatccggggcctggtggctgagtacggcttagtcgcaccactgacgctgcgcgcactgcgagccgccatcccgtgctggttagaagatgccgacaacggcctgacggattacttccgttcactgctacacggcctacaggctgatctgattgctctggatgatcgtgtgcttgatctggatcggcagatacagaagcttgccaacagcaacgaagtcacccgacggttacagcaactgcgtggcgtgggtccgatggtagccaccgcactagtcgccacggtcggtgatgccgggcagtaccccaaaggccggcagatggcggctgcaataggactcacgccaaggcaacacagtagcggtggtaaggaccgcttgctgggtattagtaaacgcggtgatgtctacctgcgtacgctgctggtacacggtgccagatccgtggtggcgcgtgccaagcacaaagatgaccggctcagtcgctgggtcaccggcattgcgcaacggcgccatcccaacgtggccgctgttgcactggccaacaagaccgcgcgcatggcctgggcgatgctgcgtaacgataccgattacgatcctgacttcacgatcagctaagacaagatcaacaggagaacctcaactacgattgcttaagcaaactgcatgatggctaacaggtcgaaccggcgttagttaaacccggcaatggctaagtactcgaagtacgacaaagcaattgggaactgacgcgcggataacccattatggcccggcatcaacgtatgccaactttagaggccgaatatacgtatgcagtcgtgccatgtctgccattaacagattgcttgcaatgaggaggagtccatata

SEQ ID NO: 2183 - DNA, 1588 bp, unidentified
  source 1..1588: mol_type = unassigned DNA; note = element_306e839
  misc_feature 1..4: note = core
  misc_feature 5..288: note = LE
  misc_feature 289..1458: note = CDS
  misc_feature 1459..1588: note = RE
  misc_feature 46..266: note = bridgeRNA
tcacgtataatccaattatcttcttttagaggtagttggattatttctcctttctctcagtctatctatttggatattctttattactcggttattataatgataaagcactgtggatttgtttctattttgatacagcttgactgttttgaggtgactcagaccacagtttttcgtcttcattggtaattagttagttaacgcttgacgtttatatttacgtgattacatgaccgaaatccttgtggtaaacaacagtgctaaatatttttttaggaggtatctatcatgtactttgtcggtatcgacatatccaagtacaaacacgactgtttcatcactaccgaaacagggctcattgtttatgatccatttaccatcgaaaacagtcatgatggtttcgatgaactgctgaccgtgcttcgttcactgggtcatccaaatgcaataagaatagggttcgaatctaccggtcattatgctttaaacctgaagctattccttgagaaagcccactacagcttcatggaatttaaccccgttctccttgccaaattcaacaaggctcagtctttaaggcgtaccaaaaccgatgcaatcgattgttcttcaatcgctcgttggctaatgacggtggaatacaaaccccatccaattggattttaccacacatattcccttaagtcattaacccgtctacgtaattcactaattcaacaacgcagcttctatcttgtgaaactgacgaatgtattggatcatactttccctgagttcaaacctttcttcaataagaaatttggtgctacagccttataccttttagaaaactacgctactgccgaaaaaatggctcgcatgaactctcaatcctacgacattcttcgtggtatttctcgcggtaaattttctttgcaaaagttcattaaactaaaggaacttgccagaaataccatcggcgaaagcaatgccatatttgtttcacagctaaatagcctgttggatctgtataaactatccgctaaagaaatacagtctttagaaaaacaaatcatttctttagtccaggaaatgaatcctagaactttatctattcctggaatcggtccaatttcagctgcagttatttgctctgaatatggcaacttctctcactttgattcgcctgctaaaatgctttcttttgcaggtctagagcctggctactatcaatcagggcttgccgagcataaaggtcatatggttaaacgaggttcttccaatttgcgatatactttgatgaacctcagtatccctttgattcaatacaacatggtttttgctgagtactatgctaaaaaaagagctgaaggtaaatcacacagggttgcctgctcacatcttatcaaaaagctcatccgtgtcatctataccttagagaaaaacgacatggacttcgatccaaaaaaactccgctgattgtgtagtggcaatcagtaattgttccataacttagcttttcaaaaaggtttatctggaaagctttgtttgccattgctttttttaacttaaaaatttttcttcaaacctattgacttttaatagttag

SEQ ID NO: 2184 - DNA, 1367 bp, unidentified
  source 1..1367: mol_type = unassigned DNA; note = element_3080115
  misc_feature 1: note = core
  misc_feature 2..66: note = LE
  misc_feature 67..1107: note = CDS
  misc_feature 1108..1367: note = RE
  misc_feature 1110..1357: note = bridgeRNA
tatggaatggcccgcccctccttccggcgtagtaggctcgccggagatagaacggagggattggtcatgaagacgaaggtttccgtgctcgggatcgacatcggcaagaatatttgcagtctcgttggcatcgacgcggccgggacggtgatcatgcggcggcgggcgacgcgggagacgctgatcggcttggcggcgaagctgccggcctgtgtcgtcgcgatggaggcgtgctgcggcgctcatcatctggggcgggtcttcgcggctcatggccacgaggttcggctgatgtcgcccgaatatgttcgcccctatgtgaaagcgcagaagaacgacgatcgcgacgccgaagggatcgccgaggcggcgacgcggccgaccatgcgctttgtggaactgaaaacgcaggatcagctcgacatccagacgttgcatcggtctcgcgaccgactggtcggcgaacggacggcgctgatcaaccaactgcgggcgatccttctggagcgcggaatcgtcgttcccaagggtaaacgtcatctcgcggattatctcgccgtcctgctggacgaagggaaccgacatactctgagcgaccggatgtacaggctcgtcgacgacgctcgcacgcaatggcgcgagctggaccagcgcatcgccgcctttgacgcggagttcacggctttcgccaaagagaacgaggacgcccggcgactggcgacaataccgggcgtcggcgccctgatcgcttcggccttgttggcggcgatcggaaaggccgagacgttcgagcatggtcgcgatcttgcagcctggctcggcctggtcccccgtcaggcgacgacgggcggtaagccgaaattgctcgggatcagcaagcggggcaaccgatatttgcgcaggcaactcatccatggcgcgcgggcggcgctgccccatgtcgccaaacgcgacacgccgctcgggcggtggctgacggcgctgctcgcccgcgtgcatcagaatgtcgcggtcgtcgcctttgccaacaagctggcgcggatttcttgggcagtgctgcggcgtggagaaacatttgccgacaaggaggcgatcctggcggcgtgagactggtcgttcggcgcatgtgctgctgatcgtccgacgatgtttgcgagtggtggatcgaaagatggcctgactgatagtcgaacggcgttctggaaacctggttcaaaaaacggcgttcgacgccgacagttttatgaggacaggaacgcgcgtatctccatcttggccgggggctcgccccgaggccggatacgttgacgcagacccatcagaaggcgctctcgataaaactgcttgcagacggggcgggccatacg

SEQ ID NO: 2185 - DNA, 1372 bp, unidentified
  source 1..1372: mol_type = unassigned DNA; note = element_3080f47
  misc_feature 1..3: note = core
  misc_feature 4..81: note = LE
  misc_feature 82..1110: note = CDS
  misc_feature 1111..1372: note = RE
  misc_feature 1084..1359: note = bridgeRNA
tgatggtgtggataccccctgccaacggcatctcaatgtgccaaggtgatgttgggtaacgtcacttgagaggaggtatccatgggagagattagcattatcggtctggatcttgcaaagcaggtttttcaggttcatggcgcacgcgttgacggcagcgttgttctgcgtaagaaactaacacgcggacaacttttggcatttttttcaaagctgccaccctgcatcgtggccatggaagcttgttcaaccgcccattactgggcgcgcgagatcgccgagtttggtcatgagatccggctggtcccaccggcctatgtaaaaccctttgtgaagcggcagaaaaatgacgttgctgatgcggaggctatcgctgaggctgcaacgcgtccaacgatgcgcttcgtcgaacctaaaacgcctgaacagcaagcacgcgcaatggtcttccggacacgtgagttatttgtccgtcaacgaacccaaacgataaatgccttacgggcacatctggctgaacacggccttatcgcgccaaaaggcttgtggaatctttcaagcatccggcaacttattgatcaagcagaagatacagtagatgggctgatagtggaaactgcacgcatttaccttgagcagattgagacattttcgacgcggattctatctctcgaggctgtcctaaagaaagaagccgcgcggtctgacgcttcatcgcgtatgatgaccatgcccggtctagggcctatcacggctatggccattgaagcattcgctcctacgctgactgtcttcaggcgcagtagggattttgctgcatggttgggtcttgtgccgcgccaacactcgagtggtggaaagcagattttgggacgcacatcgaaaatggggcagcgtgatattcggcgtttgctcataatcggtgcgatgtcgataattcgctgggcaagtaaaaaggcgccagtacctggaacctggcttcatgcgatgcttttacgtaaacctagaatgatcgttgccatagctttggcaaacaagatggcccgcagcctttgggcaatgcagacaaagaaggaagattatagagatccgctactaactgtcgcgtaagttaaatcggcaagttagagcggaacgacggcgtgtgaggaggtcaacggatagtaaggacaatgatcggcaaacggttctggaaacgcatccgggtcaatgggcttagagcccgtagaagtgattttgcaccagaaccgctaagctccataccggccagcggttatttgaatgccgcaaaacaggcctgatacatgaccgcacccgatcgcacgtctaaattatccaaattccaacttgcacaaatgggggtatccataca

SEQ ID NO: 2186 - DNA, 1187 bp, unidentified
  source 1..1187: mol_type = unassigned DNA; note = element_3086267
  misc_feature 1..2: note = core
  misc_feature 3..208: note = LE
  misc_feature 209..1171: note = CDS
  misc_feature 1172..1187: note = RE
  misc_feature 6..213: note = bridgeRNA
cttgtatgtttagccatgaccagtgcggtaaggtttggtcgtggttgagtcggccaggccggtccgtgtagtttgacaagcgctggggtgttcgagcccgtaccggagtacatgacgcacgggtcccgtactggtcttcctgaaacccgaacggttactcgcgccggtgcggccgagagcgcattcacaagcaagggagatgaagaccatgcctgaagcgtcagtggtagtggggatcgacgtggcgaaggcccatgtcgatgtggcggcgtccggcgccgtgttcgaagacaggcgattcgataacgacgccgacgggcactcggcgctggtggcggcgctcgcgccaatgggcgtggcgctcgtggtcatggaggtcaccggtggctatgaggcggcgttggcctgtgcgcttcaagcggcagctctgcccgtggccgtggtcaatccccgtcaagcgcgtgacttcgccaaggccatgggcaagctggccaagaccgaccgcgtcgacgcccgccttctggccgaattcgcggcggtactcgtgcgccgcgacgatgtcagcaccttcctgcgccccttgaccgatgccgagcaacaagcgctggcggcgatggtcacgcggcggcgccaattgctgtcgatcttgctggccgagcgccaacggttgaccttggcagcccccgtgatccgccccagcattgaagccgtgatcgaggtgctccgccaacaactcgatcacgtcgaggggcaaatgacggaccacatcacggtccactatgccgggctgaacgcgttgttgcgtaccaccagcggcattggtccggtcgccagcgccacgctgatcgccgagctgccggagctcggccacctcaatcgccgcgccatcgccgcactggtcggggtggcgccgatggccaacgattccgggaccagccgcggccggcgccgggtacagggcggacgcttcgatatgcgccgcgtgctgtacatggcctcgctcagcgcagcccaatacaaccctgccattaaggccttccatgaccgcctggtgcgcgccggaaaactgcccaaagtcgtccaggtcgcgtgcacgcgcaaattgctcaccatcctcaatgccatggtccgcgataaccaaccttgggacgaatccattcatcagacttgacagctggacacggtta

SEQ ID NO: 2187 - DNA, 1506 bp, unidentified
  source 1..1506: mol_type = unassigned DNA; note = element_3088ac9
  misc_feature 1..2: note = core
  misc_feature 3..249: note = LE
  misc_feature 250..1485: note = CDS
  misc_feature 1486..1506: note = RE
  misc_feature 7..243: note = bridgeRNA
ctaatgggtctgcatcgaggtctctgagatcttggtgaccgagccgtcggtgggtcgagcactcgtctgggcaggcccgattttcgaggtctacgactagatcgtgccgcccatcggctgccgggaaggcaagacgactggtgggatggcgtgccgacgagcccgcgggctgacgagcactgatccattagcgcgacgcagtccttcccgatggctcgacagattcaccgagttgagggagtgctgctggtgctgttcatcggagatgactgggctgaggcccatcacgacatcgagatccaggacgagaccggccgtcggctggcccggcgcagactgcgcgaaggcatcgccggcgtcgcgacgctgcacgagctgatcgggcagttcggcggcgacgagctggccgagaacactgccggcgtgatcgtggggatcgagaccgaccgcggcccctgggtccaggcgctgctcgccgccggctactcgatctacgcgatcaacccgctgtcggtcgcccgctaccgcgagcggcacgtcacttccggggccaagagcgaccccggtgacgcaaaggtgctggccgacctggtccggaccgaccggcagcaccaccggcccctggccggggacagtcacgaggctgaggcgatcaaggtgctggcccgcacgcaccagatgctctgctggatgcgcgggcgtcagcacaaccagctccgcagcacgctgcgggagttctacccggcagcgctcgaggcgttcgaggacctcacccacggcgacgcgctcgccgtcctggacctcgcccccacgcccgcggccggtcgtggcctgtcgctggcgaagatcgcctcggcgctacgccgcagtggtcggcaacgcaacatcgagaccaaggccgagcaggtccacaccgccctgcgagcgccgcaactcgagcagccaccgctgatcgccgacgcctacggcgtcaccgtcaaggccctcgtcacggtcctcgccacgtcgaccggtcaggtccgagcgcttgagagcgagctggaggcgtcttttggccggcacccggccgctgagatcgtgctgtcccaacccgggctcggcacgatcctcggcgcccgggtcctcgccgagttcggagacgacccgacccgctacaccaaccccaaggcgcgcaagaactacgccggcacctctccgatcacccgcgcctccggcaagagccacgtcgtgctgacccgcgtcgcaaccaacaagcggctccgcgacgccctgcacctacaagccttcagcgccctcagcacctcaccaggcgcccgcgcctactacgacgcgcaccgcgccaaaggcacgacgcaccaccaggccctccgagccctcagcaaccgcctcgtcggcatcctgcacggctgccttcgccacgccaccacctacgacgaagcgaccgcctggccccgctacacacaacgagaccaagcggccgcttgacgagttagaaccgtgggatgt

SEQ ID NO: 2188 - DNA, 1233 bp, unidentified
  source 1..1233: mol_type = unassigned DNA; note = element_309aba8
  misc_feature 1..2: note = core
  misc_feature 3..223: note = LE
  misc_feature 224..1192: note = CDS
  misc_feature 1193..1233: note = RE
  misc_feature 12..190: note = bridgeRNA
cttgtatcttagtttgtatagtgattagctatcactatatgaaaattgtagagcttgtgttctacctaaaacttctaagtttgtccgaaagagtaagtctacaattttcccctaattactcctttcaactctgaacggtaactaagcactttgatgctgtattcacaaggttagatcgtgattagtgagtaattaaaacactatatggattgtagaggtacacatgattacattgggtattgatgtcagtaaagccaaaattgattgttgtatttttccttctggtctaactggaaagagaaaaaccaaaaggtttgataatgcacaatctggttttgttaaactcgtaaagtggttaaccgaactagatgttaatttatcagacactcgggctgtaatggaagctacatcggtatatcatgagaatctagctcattttttatatgatatgcaattaacaatatgtatcgctaatcctgcaagagttcgagcgttttcaaaaggattatcaatgctaaataaaacagataaagcagatagcgaagctctcgtctattatgcaaatactgttaagttagcaacatggcaacctgagaaagaaaatgtaagaatattaaaggctttaataaatagatatgcagttcttgaagaagacttgcaacgtgaaaagaatcgtttagaaaaggctcaatctactcaaacatttccacaagtattactctcaattaatattcgtattcaacaacttgaacaagagattattagattggatgaaacgatctctagtcatgtaaatggtaattcagagctaaaaaatgatcttgctttactaactactattccagcagtaggaaggaaaactggattgctcatgctagggttattacgctctcatcactttgaaaaagcaagtcaggtcgcagcttatgttggtctagttcctatacatttccaatctggcagttcggtcaataaacgaagtcgtttatcaaaagcaggtgatagtaaaatacgctctagcctatttatgccatctatagttgcacttcaatataatccccatattaaggcactgtatcagcgactacgtgaaaaaggaaagcctaaaatgctgattgttagtgctgcaatgcgtaagttagtacacctatgctatggtgtattaaaacatcaaactgcttatcaaatataaggtaaataattactaaattaggttgacagccaagacggtat

SEQ ID NO: 2189 - DNA, 1207 bp, unidentified
  source 1..1207: mol_type = unassigned DNA; note = element_309fc49
  misc_feature 1..2: note = core
  misc_feature 3..189: note = LE
  misc_feature 190..1173: note = CDS
  misc_feature 1174..1207: note = RE
  misc_feature 12..198: note = bridgeRNA
cttgtatctctctgtaatagatgattagctatcatttattacatcggaagttagtgagcttgtagccccgcccagtacttgatactgagccgtagattaagccctagcttccaattctcaacaaactgaatggtatccaagcactcttagattaagttgatgctgtatgtacaaggggagtaagtagagatgatgtttattggttttgatatcagtaaagataaagttgatttatgttggctgagagatccaatcactaataaaaagaaaacaaaagtatttaaaaataaccacctagctttcagggaaattaagcaatggcttttaagtacaaccaaaactatagctgaggaaatcgttatcacggtagagccaaccggtgtttaccatgagccgttaatgtactttttataccagcaaggattcaatattattctcgctaaccctagcaaagcaaaaaaatatgctgaggctctaaatgttgttcataaaacagataggtcagatgcgataatgcttgcaagctacggttatgctaagcaatcaaccgttaacttctggcaacctgaagcaaaggaaattagagagcttaaagccttactgcgtcgacttgatgcattggagcccaataaacaacgagagcagaatcgattagaagcaagtgagtttaatgcgacatctgagcgagtcactcaatcattaaaagaaacgattaactttctagatgatgagataaaaaaacttaagtcagatattgatagtcacataaatagctttcctgacttaaagaagaatagaacgttactagaaacaatccccggtattgggcctgttatgtctcgggagctgacgtatatattcgccgctaaaaatttcagcagagctaagcaagctgctgcctactgtggcttaataccgcggctgcatgagtctgggaaaatgaagggccgtacaactatgagcaagctagggccctcaaaaataagaagtaaactttatatggcagcagtagtcgctgggcagtggaattataagatacaacagcaaaaaatagccttgctgaataatggcaaaacgtcgatgcaaatcattggcgccaatatgcgtaaactcattcatatatgttttggtgtaataaaaaatcaagaagcgtttaagatccaagaaagttaaatacgatcttgaagcctataaagagagatggtat

SEQ ID NO: 2190 - DNA, 1449 bp, unidentified
  source 1..1449: mol_type = unassigned DNA; note = element_30a6143
  misc_feature 1..3: note = core
  misc_feature 4..290: note = LE
  misc_feature 291..1190: note = CDS
  misc_feature 1191..1449: note = RE
ttaaccttacattcctttccgcctgcagctcctaggcacacatagtaatgaatagtccttgttcgtgcagacatcttattttatattcttacttgaaggagacttttatttatggaaattatttaccctagatcttgtggtgttgacgtgcataaatctttcatcgttgctgttatttgcatctctgaatccgtcaaacccaagtatataaaaaaagattctcaaccttcaataatccactcattcaattcaaagattggcttattgaaaacaactgtcaaaatgtatgcatggaatctaccggcaagaactatatccctgtatacaatgcattagaaggctttatctctaatgtcgttgttaccaatcctaaatggggcaaggctatcaaaggtaagaaggatgacaaatggattgctgacctctttaaatttggtattgtcagatccagttatatccctgaaaaagatattcgtatcctcagggaatttacctgctatcagtataaacttgtcaatatgcgttcttctgaaaagaatcgtttccaaaatgctttgactactggaaactgtaaacttgatcttgtttttactgatgtctttggtaaatctgcttcctctattgtcgatactattttatcaaatgatccatatacaagtgaagatattctttctaaagttcatggcagatgcaaagcatctcacgaagatatcctaagtactgttgatggcattcaactgaatcagtttcaaaaggctagaattcaaatcgttcagaaacatatggaatatctggattctcttttgaatgagatacaacaccatatcgacttgatggttgccaactacgaagactacatacagcttctttgtacaataccaggaatcaacagaaaatctgccattaccattatctctgaagtcggcactgatatgtctcaatggtcctctcatcgcaaacttgctgcatgggctggattagctcctggatgcaatcaatcagccggcaaaaagaaatcggtcaagatttcaaaagctggtgtttatcttaagccttgtctcgttcaggttgcacatgctgccataaaagataagaaatgtgattattatttaaccaaatatactaaaatatctaaaagacacgataagcaattgcaagaaaaatatttattgctgtctatcaccttttaaaaactgatgaaatatttaacccaacagacatgtcagatgttgaaacaacaaagaagcaacgaatcgaatacattaaaaataatttacgaaatgctttcgatcagctcagccgcactggtttatctgaagcagagattctcaattcatcagaaaagaacctacgaactcacctcaaatagaatagcctttcatttggagaaaggggctttatacacttttttagggtaaaatttattttctcttttaatttttattcaga

SEQ ID NO: 2191 - DNA, 1452 bp, unidentified
  source 1..1452: mol_type = unassigned DNA; note = element_30b380c
  misc_feature 1..2: note = core
  misc_feature 3..373: note = LE
  misc_feature 374..1435: note = CDS
  misc_feature 1436..1452: note = RE
  misc_feature 10..235: note = bridgeRNA
ccattaccttcttggtggccccgcaatggggtcgcttggccttctgagttggcatgactgtctccccctgtcgagttgatggcctgggggtggtgtcaccggctccggaggcatcgacagaccgctgattcaggggcatgaccaccggcttcttcgcaggccgggaggctcttcatcatgtggatgtggcgatcggtgccgtgggacggccgggcgaggacggccggaggacgagcgtgatcgacgtcagtgacatcggcgccttcctcggcctggatgtcggcaagggcgagcaccacgccaccgctgtcaccccggctgggaaggaggccttcgacaaacggctgcccacagcgagcccaggctgcgcgaggtgttcgggaagctgcaggccaagcacggaacggtgccggtcgtggtcgaccagccggcctccatcggagccctgcctctggcggtggcccgggacatgggctgcccggttgcctacctgcctgggctgacgatgcggcggatcgctgacctctgtccgggcgaggccaagaccgatgcccgcgacgcgttcgtcatcgcggatgccgcccgcgtcatgccgcagacgctccgatcggtcgatctcgaggacgagaccaccgccgagctggagatgatcgtcggcttcgacgacgatctggccggcgaagccacccgcatcagcaaccgcctgcgcggcctgctgacgcaaatccatccgttgctggaacgcgtcctggggccgcgagtgcaacacctggccgtgctcaggctcctcgaccagttcgggtcccccgcccggatacgcaaggctgggcggcggctcgtgacgctgatccgtccgaaggcgccgcggacggccgagcgtctcgtcgatgacatcctcaccgcgctggacgagcagaccgtcgtcgtcccgagcacggacgcggcagcgctgatcgtccccagccttgccggatcgcttcaggcggtgcttgaccagcggaagatcctcgccgcacgaatcgaggaactgctggagaaccaccctctttccaaggtcctgacgtccatgccggggatcggcgtcaggaccggagccaggatcctcatcgacgtcggtgacggccgttcgtttccgtccgccgcccacctcgccgcatacaccggccttgccccggcaacccgcagttcgggctcgtcaatccgcggcgagcaaccgtcccggagaggaaacaagcagctcaaacgagccttcctcctctccgcgttcgcggccttggccgacccggcctccatggcctactacgacaagaagttcagccagggcaagcaccacacccaagccctcctctgcctcgcaagacgccgagccgacgtgctcttcgcgatgctccgcgacagcaccttctacgaaccccaacccgccccctcaacttgaccaaacccataggggca

SEQ ID NO: 2192 - DNA, 1168 bp, unidentified
  source 1..1168: mol_type = unassigned DNA; note = element_30bbcb2
  misc_feature 1..2: note = core
  misc_feature 3..179: note = LE
  misc_feature 180..1148: note = CDS
  misc_feature 1149..1168: note = RE
  misc_feature 33..200: note = bridgeRNA
cttgtatctcaaaagtggattactatgaactggcttagatttggcaaggtctgtgtagtccgattcctcccggggttattgaagctcgtagcatagcgattgacgcacaggctgagccgttcatctgaagcccgaacagttgtccgaacttcaaatcatatttgcaaggaggggtatagatgagtgtgtcaaatcaacgttgtgcaggcatagatgtttcaaaaggtactctggatattgcaatcagcaataatgccagccagttcactgtacccaatggaagtgacggttttactcaaattatcggagaattaaagcgaaataagacaagattgatcctcatggaagaaacaggagggctggagtcaggtgttgcttgtcatcttcaatcagaaggctttgacgttgtcgtcattaacccccgtcaggctcgagattttgcccgtgcaatgggctatcttgcgaagacggatcgtattgatgccagagtattgcttcagatgtctgaagtgattaacctgcacccggaacgggaaaaatacatccttcccttgcctgatgcacacaggcagattctggcagcgatggtggtcagacgcagacaactaacaatcatgcttacggccgaacgaaaccgattacatccttcgcatcctcagagttatgaaagcatcaaatcaattatttctgcactgaagggtgagctggctcgcattgaaggtgaaatggcgattcacatcaaggaccatttcagtgagttatctgatctactgagtgcagttaaatgcgttggggctgcgactgttgctgtattgctggctgaagttcctgagcttggttcgctctctcgacgtgaaattagcgctcttattggggttgctccagtaaacagggattccggcacgatgcgcggtcgccgaaccgtattcggagggcgagcttccgtccgtacagctctctatatgtcagctctggttgggacgaggcacaacccggtaataaaagagttctatacacgcctggttgccgctggaaagcccaaaaaagttgcactgacggcctgcatcagaaaattgctgaccatcctgaacgcaatgctgaaaaagaatgaagcatgggatccgatgtatcatcagcatgcttcgtagtcgcgctcaaaagacagttg

SEQ ID NO: 2193 - DNA, 1261 bp, unidentified
  source 1..1261: mol_type = unassigned DNA; note = element_30c3db3
  misc_feature 1..2: note = core
  misc_feature 3..243: note = LE
  misc_feature 244..1233: note = CDS
  misc_feature 1234..1261: note = RE
  misc_feature 47..204: note = bridgeRNA
ctggtatatttcggcatccactcgttacccattgaaacctgggttgtggaagtcgagaccattcggcgatgagaccgtccctcgttgggatctcatgaatccgagcgccagtttgggtcctcgtcgaatcggccatccttcgttcgaatagtcaccgggctcaaacccgaattcaccagcttgaacaggacgccgaaaaggtctcgtcactgccgtgttctgcgtttcggagagcatccttccatgagcgaatcgccgccatcgtctttgagcccgtactggatcggtgtcgacgtctgcaaggaccacctcgacgcccacgtccgacccgccaaccttcgtcgacgattcgacaactccgccgacggcatcgtcgagctcctcgcctgggtcaaggctcaggggtcgggccttcaacgcatcgtcttcgaatcgaccggtccctatcagaaggccgccgtcggcgccttgctcgccgaagagttgccggccgtcgtcgtcaacgctcggcaagtccgcgacttcgccaaaggacacggcaagctcgccaagaccgacgccatcgacgccgccatcctggctcacttcgcccaggacgtcgccaccgtcgtgcggccgttggaatccgcggaaatcgccgaattccgtcagttctacgaccgccgcagccagctcgtccgcatgctcgccgtcgagaagaaccatcgccacgcggccgaggccggcttcgtgacttcacctcgggtgctgcggaacatcgacaagagcatcgcctttctcgagaagcagatcgccgagctcgagaaacgcatggacgcgatcgtcgaaagctccgaaacgtttcgcgccaagaacgagatccttcggtcgatcgtcggcatcgggccgcaggtctcgcggacgcttctggtccatcttcccgaactcggccaacgcacgcgtcagggaatcgccgccctcgtgggcctggcgccctatcccgacgacagcggaccgaaccgccacgcccgacacatccgcggcggccgcggcaaagtgcggctcggtttgtatcaggcggcgatcgccgccatccgtcacaacccttcgatgaaggccttctacgtcaagctgaaagcccacggcaaagcgtcgaaggtggccatcgtcgccgtcgctcgcaagatcctggtcctggccaacgccctgatccgaacgatgacgccttaccgtcaccccgcaaactccgtttgagaaaactgcttgacacgcaacatagtca

SEQ ID NO: 2194 - DNA, 1712 bp, unidentified
  source 1..1712: mol_type = unassigned DNA; note = element_30c8c56
  misc_feature 1..3: note = core
  misc_feature 4..56: note = LE
  misc_feature 57..1229: note = CDS
  misc_feature 1230..1712: note = RE
  misc_feature 1268..1484: note = bridgeRNA
aagatgctatggggcggcggcgagaatcttgcattcatcggcgctgatttgaaccgatggagcaccccatgcaaaagttgaacgatctaagccgatcccttgcccctctcgagccggacggtacgctgatcgccgtcatcgagatgagtcagtcgagctggctcgttgccggtatcgtgcctggcgtcgaacgccagccgttgaagaagctcgctgccgacgaggtcgcattgctaaagctactgcatcgatggcgcgaggaagccgagaaagcaggacgcaggatcgaacgcactgcagtcgccttcgaggctggccgggatggtttctggctggcgcgttggttgaggacacgcagcattgaggcccacgttattcacgcatcgagcgtagccgtatcgcgcgagcaccgacgtgccaagaccgaccggctcgacaccgagctgctcaaacgcgcctttctcggctggctgcgcggcgagcgtgatcactgcaagatggtggcgatcccgacgagcaaggacgaagatgccaagcggcccaaccgcgagcgcgagagtctcgtcggagagcaaactcggattgtcaaccgaatgaaagcaaccttgatccggctcggcatccgcggcttcaatcccaagctgaagaaggccgccggccgacttgaagatttgcgcacgcccgaggacgagccaataccgcccaacacgatggctgagctgcgtcgcgacatggatcgtcgtcggctggtcagtgatcagatccgccagatcgaggaggcacgcctggatcgtctcaagcaggcgcctgatgatggaccacacgcaatgctgcgcctgctggcgcgcgtgatcggggttggcatcgagaccgcggatatgttggtgcaggaggtgctggcgcgaaacatgcgcgaccgacgggccatagcgcgttatgctggcctcacgggctcgcccgacgagagcggcacaaaacgccgggagaaagggctggcccgttccggcaacgctcgagttcggcgaggcatgatccaattggcgtggcgatttctcatctttcagaagaacagcaccttggcgcagtggtttcgagcccgcaccgagaacgcgcgcggtacgcgcaagctcatgatcgtggccttggcgcgcaagcttttgatcgccttgtggcggctcgtgcgagagggcgtggtgccggacggcgtcgttctgcgcccgacgcaataaacggaggttgctgaaggcacccaacagtttcggctcagtccgtccgcttgtgacgggtcgccgatgacgattcgaggtggcgggttccggtttgtgccatggctgttatgccgaggaaaagaatgggtccgccgcttcggagcttcgctgccgatgcgcatggctgcatcatggttcgggtccccgggcccgccggatacaaggttgtggcgcgattgatccgcgcccgaaagcgagctcccctctgatcgccatcccgaccgcaccagcgtgccgtcgtgctcggagctgtcaaggtatggcctggcaagggcggagcatgccgctaggttggtgcgacggccaaccttgacagctcctgcgcgcgacgacatgcgcgaagcgcgggtcgggacgaaggaacggctttcggatcgaacaaagaaactgatgaaggaggtggcgccggcgtgccgaaactccttgacaagaaaagccccatac

SEQ ID NO: 2195 - DNA, 1412 bp, unidentified
  source 1..1412: mol_type = unassigned DNA; note = element_30d22a8
  misc_feature 1..3: note = core
  misc_feature 4..79: note = LE
  misc_feature 80..1129: note = CDS
  misc_feature 1130..1412: note = RE
  misc_feature 1126..1399: note = bridgeRNA
tgatgtggtggatggcaccccccaacgccattttatgtgccaaagtaggtacatttaacaccgaagaggagtccctactatggaaaccataacaacacttggcctcgatatagcaaagaatgtttttcaggttcatggcatcggtgagaacggtgaggtggtcttacgcaaaaccctccgacggtcgcaaatgatgacattcttcagtactctatccccttgtttgatcggtatggaagcctgcgcgacagctcaccactgggcccgaacgcttaaggcatcgggccatgacgttcggctcattccgccggcttatgtaaagccgtacttgcgccgacaaaagaatgatgcggctgatgctgcggcaatctgtgaagccgttacgcggccctccatgaggttcgtccccgtaaagagcgaagaacaacaagctacactgatgctgcacagtgcccgggaactgctggtctcacatcgaaccgctttaatcaatgccgtgcgcgggcattttgctgaatttgggatggtcgtttctcaaggcgctcgcaatggtcaccttctcattaccattattcttgataaggacaatgatgatcttagcgcgagtgcccgctcggcccttctgcctctggcgataacattgctcgatttggacgcccaaattaatacgctgagtaaggccattctcaccgctcatctcagcagtgatgtgagtgtgcgcctcgcgaccattcctggtatcggtccgatcgtggcgtccagtctttccgccagtattccagatgcgagcctgtttaaatgcggccgggagtttgccgcttatctaggcttggttccccggcaacactcaactggcggcaaacctcgtctaggacgcatcacaaagatgggtaaccggcgtttgcgaaagttgcttgttattggtgcccatgcagccctctacagcatcaagtcgggcaaaaccgatacgccgcttgccatatgggctcgatcgcttttggagaaaaagcctttcaagctcgttgccgttgcactggcgaacaagatggcccgtatcgcatgggcgattatgacccaaaacacaatatatcaaccaatacccaaggggggtgcattgaaaacagcataatcgaaagcaatgattagagtttgccctgtgggcatgatagttggcggagtgaaaaagggatgatgtgaaacaaaggcgaaatgggatacgccagaaccgaaaaacccgtggcgttgtctagcgcaaatcaagcgcgttactgtgatagggaccggttcccgcgaaaaacatcagggccagcggtcataagtgccgcgttcaaaggccggagacatgactgcacccgactgcctcgttaaaacatctcaaaaatttaccttgccaaaggggtgccatccagaca

SEQ ID NO: 2196 - DNA, 1511 bp, unidentified
  source 1..1511: mol_type = unassigned DNA; note = element_30d3f72
  misc_feature 1..2: note = core
  misc_feature 3..244: note = LE
  misc_feature 245..1471: note = CDS
  misc_feature 1472..1511: note = RE
  misc_feature 49..213: note = bridgeRNA
cttatattagctgtatacgaagaagtgttataggagatcatcttagcgacgccgattttaagagcttgcgggctgaggacctctcatccctaattccgtggagaatcagatcaagactgtcccgaccgtaagagaacggagttaaaggttcaatagaaagttgtccctcagaggacccatataaggcgaacaatccgttcagagcctttgaaattggaagtccacaacgaaggaggaatagacgttgaagcgatatcatttgggagtggattggggagatgagtttcatcaggtgtgggtcaatgatccccagggcaagaaagtagtcgagatgaccatagagcagagtgcgaaggggttgagcgagttgggccgttggcttcgtgagcgtcaggccgaagggatcgagctttgggcggctatcgagaagccccacggacgcattgtggattttctgttggaccacggcgtggtggtctatccgattaatcccaaggccttggatcgtgcacgggatcggtttcggatgagccaatccaagagcgattcctttgatgcttatgtgctggcggagtttgttaggaccgatcatgctcacttgcgggctctggagccgagttccgagccggctcaggagcttaaactgctcacccgcgatcatcatcggctgatgcgtcataaaactcgacttatcaatcagatcgaggtgacgctcaaagagtattacgctcgccctctggaggttttttctgatctggaatcgaagatagcgctggattttctcgagcaatacccaacccctcaggctctgtctgaccttacccgcaggcagtggaaccgctttgccaagcgcgagcaccgtctcggcgaggagcgctctaaagagctgtgggagacgctgagccaaccgcaacttaagattcccgagcacgtggtcagagtcaaggcgcaactgcttttggtgctgatcgtccagctcaaggctttgattcaagcggttgagagttacagcgagaaggtccaacgttttttcgcctctatgccggcagctaagcttgtggaaacgctgccgggaggaaaaagcggcacgatcgtgccgatgctctgggctgaactgggggacgccaagagtcggtggaaatcctttcgccatctgcaagccgaagctggagccgtcccggtaaccaaagcgagtggcaagtaccgtgtggtccaatttcgttttgcctgtaacaaactgctgcgctacgcctcgtactggctgtcctttgtctcgctcaatcgatgcgagtgggcgaacaagtactatcgagaccaacgggctaaagggcatagccactcccaagcgcttcgggctctgggagcaaagtggcttaagattatttttgtcgtgtggagagaccataaaccttacgacgaaaactgccacctggccaacattgcccgacagaggatgcgtcaggtgatatgaaaaacccaaaccggaggacttgacaaatgtcatagaaagt

SEQ ID NO: 2197 - DNA, 1274 bp, unidentified
  source 1..1274: mol_type = unassigned DNA; note = element_30e001d
  misc_feature 1: note = core
  misc_feature 2..86: note = LE
  misc_feature 87..1007: note = CDS
  misc_feature 1008..1274: note = RE
  misc_feature 1040..1266: note = bridgeRNA
caatgggatggactcctcctcaccactaagcgcctcagcgcctaaactgaagtttcgacacaaacagtttagagaaggagtccaccatgaagattatccgcgtcggcgtcgatctcgccaagaatgtctttcaagtacatgctgttgatcgttgcgaaaaggtcgtgtggcgcaaaaagctggggcgtgccgagtggcttacggcattactagagaaaattgagccaggttgtgtagtgggcatggaagcttgcggcggtgcgcatcactgggcccggcaattacagaagcgcggattcacggtgaagcttatcgcgccgcagttcgtcaaaccctacgtgaagagtaataagaacgacgcaaacgatgcggaggcaatttgcgaggcgatgagccggccgagtatgcgtttcgttgcggtcaaatcggtcgagcagcaggacctgcaggcgatacaccggatcagagcggagctggtgagtcagcgttccgccaaaggcaaccagatccgtggtctgtgcagcgaatttggcctggtggcgccaagagaaatgattcaactgagagcagccattcaggaaatagaaatcgcggcatcgaccgatccggttgccaccaggttgcagcagctgcgcggcgtcggcccgatcatcgccacagcgattgtggccaacgtgggcgacgcgaagcagttcagcagcggcaggcagatggcggcgtcgctggggctaacgccgcagcagaacagttcaggtggcaaggagcgattgttgggtattacgaaacgcggtgacgctcagttgcgaacgctgttgattcacggggctcgttcagtattacgaacggcggccagcaagaatgatcgaatgagtcgctgggtgacgcacatcgccgagacgaggcatcacaacatcgcggcagtcgcgctggcgaacaagacggcgcgcattgcctgggcgatgataaccaagggcactgattaccagcccggaacagtagtagtttaaacagtagaacagtcagtacgtaaaaaggagcatccaaccacgattgcgaaacatgccgatgatggccaataggtcgaaccggcgctggcagaacccgacaacggctgcggccttcgagcccgaagaagcaattgcgagccagcgcgcgaatagcccattatggtccttgcccgacaacgggcaatgcagttagagaccgaatatacgtgagcagtcgtacctgaaagtcaaagacggaatgtttgcaaacgaggaggagtccatata

SEQ ID NO: 2198 - DNA, 1114 bp, unidentified
  source 1..1114: mol_type = unassigned DNA; note = element_30e335c
  misc_feature 1..2: note = core
  misc_feature 3..163: note = LE
  misc_feature 164..1108: note = CDS
  misc_feature 1109..1114: note = RE
  misc_feature 1..165: note = bridgeRNA
cctgtgtctgagaagtctgtcatgatggaggtgggcgggaagccgttgggtccctggcgctagacgccgtgagccggcccggtctcccgcccgtttcgacccatcaacctgaacagttgcacgaggctgcacgaacagacctcgcatcacagggacaggcatcatgatcctaccacttcgctgcgtcggaatcgacgtttctaaacgtatgctcgatatctttgacgatggtatcggcgctccggaacgcatcgccaacgcgtcacagcccatcacagagcaggtggcgcgttggcgatgcggcaatgtgtttgtcgtgttcgaggcgaccggcatttacgaccatgtccttgccgaggtgctccatcaggccgggatacggttcgcgcgcatcaatcctgcccgtgcccgcgacttcgcccgtgccggcggacgattggccaaaaccgatgcaatcgacgcctgcatgctcgctgcctttgcccgtgcaatggcgccgacggccgaacaagcgccttgcccagaacgcaatgccttggccctgctagcaaaacggcgcgatcaactggtccagatgcgggcgcaggagaagaaccgacgcagcgaagcgcaagaccgcgccatgatcgacggcatcgcgcgccatctcgacttcctcaatggcgagatcaaagcgattgaggccgagatcaaggccctcatcaaagccgcgccactaattgccgagcaggcacgcatgatgcgatccgcccccggcattggccccgtggcctgcatgcagcttattgcccagatgccagaacttggacacgtcggccccaagcaggtcgtggcgctggcaggattagctccgctcaatgtcgatagcggcgcataccgcggtaaacgcaccatcgcggggggccgcaagcgcgtccgcgacgcgctctatatggccgctctcaacgccgtccgtcgggagggtccctttaaaaccttctaccaaaagcttcgggttgccggcaaacctgccaagctcgcccttatcgctgtggctcgaaagctcctcaccaccctcaacgccatgctgcgcgaccgcaaatgctatctcccgccccaaccttcataacagttg

SEQ ID NO: 2199 - DNA, 1160 bp, unidentified
  source 1..1160: mol_type = unassigned DNA; note = element_30e583e
  misc_feature 1..2: note = core
  misc_feature 3..188: note = LE
  misc_feature 189..1148: note = CDS
  misc_feature 1149..1160: note = RE
  misc_feature 15..198: note = bridgeRNA
cttctgtatctccggtttgctatcctgatcccgtcaccgaccttggccgaggccggtgacgggacggtgtttggcgtctgagccttgtggcgttgaccacgtttcttagcgagccagcaccgtctctcttcatcgtctcgaacagttgaatgcggccgatcaggaccgcggagcagaaggaagagagcatgagcaaagtatcacaggcaaggatcatcggtatagatgtcagccgggattggttggatatccactgtctgccagaaggcaagcgcacgcggctgccgaacaaggcagagggtcacgagcgagtcgctcaactcgctcttgaaacgggtgcgctggtttgcttcgaggcgactggcggtcaggaatggcggctatggtccgccctggatgtttgcgggatcgcgacccggcaattgccacccgcccagatcaaggccttcgccgccagccggggcacacgggcaaagacggaccggatcgacgcagagctcatcgcgcggttcatgatgtttcgaccggatgcgggacgcgtactgccacatggaaaactgcgtcttctcagggcgttgtcgtcaaagcgtggtcagttggtcgagacacgcaaacggcttctggcgcagatcaaggcgcatgggaagctgggatcggcggatatgtttgaagccatgaacgccgagctgaaagatcttcttgatcgccagatcgcagggttggaggagcggatcgagcagaccctggcctcggatgatgaactggcgagaactgccgacatcctgcgttccgttcccgggatcggccccgtcgctagcactatgctcatcgccgagatgcccgagcttggccaactctcgggtgagcaggccgccgcgctggcgggtctggctccgatcgcacatgacagtggcgccatgcgcggcaagcgcgccatcggaggcggccgccgactgttacgacacgtgatgttccaggcggcgctcgtcgccagccatcacaacccgctcctgaaaaccttcgccgaccgtcttcgtgccgccggaaaaccacacaaggttgtcatcacagcagtcgcccgcaagctcgtcacaatcgcaaacgcgctttgcaaatctcgtatcaaatggtcccatcaggccgcatgagaaatacagttg

SEQ ID NO: 2200 - DNA, 1478 bp, unidentified
  source 1..1478: mol_type = unassigned DNA; note = element_30f233b
  misc_feature 1..2: note = core
  misc_feature 3..46: note = LE
  misc_feature 47..1171: note = CDS
  misc_feature 1172..1478: note = RE
  misc_feature 1222..1422: note = bridgeRNA
agatggggtattcggcatgcgctgcatctgtggtgggtaaagagaggtgctgcgcttcgagctgatgataaaacgtggtctgcgagaacagccacaagcctcaggaaaggaagcgcagcatgagacactacgctggattggacgtgtcggtaaagagacctcgatctgcattgtcgatgagacgggcaagatctgccgggaattgaaggtcaccagccatccggaggatttggcgcaggcgctgattgacccggcttggcaactggcccgtgtcggccttgaggcgggaccgttgtcgcaatggctgttcgatggactttggcgtgccggcctgccggcgatctgcatcgaaacccggcacgccaaggctttcctgagggcgcaggtgaacaagtccgaccggaacgatgcccgtggcattgcccaaatggtccgggtcggactttatcgaccggtgcatgtgaagactattgagagtcagaatcgcagggcgttgctttccgcccgcaagctcttgcaggccaaggcgattgccattgagaacgatatccgtggcctgctgcgcaacttcggcctcaaggtcggtgctgtcggtgcaatcaagttcgaggaccgcatccgtgagctcgccgagcgcatgccggagttgggggaaatcgttgcctgtctgctggcggcacggcgaaagctgcgtcaggagttcacgagattgagtggcaagctgctgtcgatcgtgcgcgatgatgcagtttgccggcggctgatgacgatccccggcgtcggcgcggtgacggcgctagccttcaagagcaccatcgacatccccgcgaggttcaaaaactctaaggcagtgggcccggccctagggctgacgccggtgctcaaccaatcgggcgagagctgtcgcgtcggccatatctcgctggccggcgatgcgatgctgcggactttgctctatgaagcagctcaggtgcttttgacgcgcgtgaagaaatggtcgtggcttaaggcctgggcgatgaatgtcgccaggagacggggtctcaagagagcagtcgtcgcgcttggccgccggctggccgtgatcatgcatcgcatgtggagtgatgaaaccgagttttgctggagcagacaagacggtcttggcccggctcaacgctgcgctatttgacggctccgcgccgagcctgacgtcgtcgaagaccgaacaagaggaggtgacgatattccgccaccggcggtatggatgtccttcgcgggacgatggatgaggtgagttcgttgcaagcactgtgccggtcgcatcagttgtgatcaggacgactcctagattggaccacttcattcttctgatcccatggtgggagggccaaagtgccgatcccgaagagaagcaagaccccgcgaagagcaaccaaaactagcgccggccggaacgcaaagctcgcaagcgcttgaccgcaaccgccgaatagaga

SEQ ID NO: 2201 - DNA, 1631 bp, unidentified
  source 1..1631: mol_type = unassigned DNA; note = element_30f4027
  misc_feature 1..3: note = core
  misc_feature 4..262: note = LE
  misc_feature 263..1498: note = CDS
  misc_feature 1499..1631: note = RE
  misc_feature 8..234: note = bridgeRNA
tttcgtattataaggttagccagaatgctaaatatttctggttgaccttttttaaaatggttttattatatcagtagccagggtagaacgtatctgcccgtggggcttcgaccccgtcagctaaactgttcgccccctacttgtagaaacatgattgaggctggttgggacgtagatctcgtataacaagcgaagctgtgatactgcatggaggaattaggggttactggcaaattaccagtttaggaggaggagatttagaatgaatccagtcgttggtctggatatttcaaaaggggaaagtcaagttcaagcatttttagataaaggcaaaccttatcgtaagagctttaaaatttcacatactgttgagggtcttagttcacttgtttcgtttcttgaggatgtgaaaaaagagtccggcaagaaaccttcaataattttagaagctacggggcattatcaaacaccagtagttcattacttggaagaacgaggttatttattaattatcatcaatccattgatttcctataaggctagatcatcaagcttaagaaaagtaaagacagatgtcattgatgcttatcttctctgtgagttgttttataaggaggaattagagccttataaaaagcgtggagtccagttattaaaccttcgcaaccttactagacaacatgaaaatataactggagtgatgatacaaacaaagcttcaatttcaggcagtgcttgaacaagtgtttcctgaatataaaggggtttttggagatttatattcggtggtgtcacttttaactctttcagagttcccttcctctgaggatattttgaatgcaagcgaagaagtagttacagacaagataaagggtctttgtaagagtcgatcaagcaggtgggcaaaggaaaaagcgattcaacttaaagctgcggctgcacgtaatccttttgaaaaggcagtctatcagagtcatattttaagccttggtatgtatattaaaatgattcttcaatacaaagagcatctagcaaagttagagaccgagatagatgccctcgctaaagatattgaagaatataatattatcaaatctattcctggtattggagaaaaaatcgctgcaacgattatttctgagattggggagatagatcgatttaatgacccaaaaaagcttgtagcattcgctggagttgatcctagtgtatttgaatctggtaagttttctgccaccaaaaaccgaattactaaaagaggatctagtagacttagacacgccttgtacatggctgttcgttgtgccattagagattgtcgtaagaagaaaacgacggatgaaatcatacctcgcaataaaagaatgcgagaattttacgataagaaacgtgatgaaggaaagccttttaaagtagctgttattgcctgtgtaaataaactcttacattggatatttgcacttttaaaaaatagaactactttccaagatattgcttagaacctaaatctaactaattaacacaaaaccttccaaatctaaacaaacggaaggttatttggcatgcttatttttagtatagcatgatatattttaagtttttaatgaaaaatattgacaaactattagctgg

SEQ ID NO: 2202 - DNA, 1447 bp, unidentified
  source 1..1447: mol_type = unassigned DNA; note = element_30f41ff
  misc_feature 1..2: note = core
  misc_feature 3..234: note = LE
  misc_feature 235..1428: note = CDS
  misc_feature 1429..1447: note = RE
  misc_feature 1..238: note = bridgeRNA
cctccccgttacctttttcgtggctcctggttgaggggctcgtggtcgccaggcccggcatgacttagtcccccagtcgtacccatgatccggggggtggtgtcaccgggtttggtggcatcgagggaccgctgatagggacacggccgccttcgggtaggtctcgtcgtaacgtggctgccggcctttggtgctcgactggtgaccgtgcacgacggacggaagataccttcgatgaccagcgactacgcggttttcctcggcttggacgtcggcaagggcgagcatcacgcggtcggcctggacccggccgggaaacggctgcacgacgcgccgctgcccaacaccgagcccaaactgcgggcgatgttcgacaaactcgccgttcacgggcagatcttggtggtcgtggatcagcccgcgaccatcggggcgctgccggtcgcggtcgcccgcgcctgcggccacgacgtggcttatctgccaggactggcgatgcgccgcatcgccgatctctaccccggcaacgccaaaaccgatgcccgcgacgcctatgtcatcgccgacgccgcccgcaccctgccccacactctgcgccagctcaacgtcgacgacgaggccctggccgagctggacgtgctcgtcgggttcgacgacgacctcgccgccgaggccacccgtgtcagcaaccgcatccgcggcctgctcaccggcatccaccccgccctcgaacgcgttctcggccccaaaatcagtcatctcgcggtgctggaaatcctgtcccgctgcggcggaccgatcgggatccgcaaggccgggcgccgcaaactcgccgcgatcgtgaccacacacgccccgcgcatgggcgcgaaactggccgaggacatcctcgccgcgctggacgaacagaccgtcaccgtcgcgggcaccgccgctgcggacaagatcctccccagactcgccgacagtctgaaaaccgttctccaacaacggaaaaccgtcgccgccgaagccgaggagatactcgatgcgcaccctctcgcccaggtcctgacctcgatgcccggcatcggcgtcaggaccgccgcccgcatcctcctcgaaatcggcgacgcctcaggcttcaaatcttccggccacctcgccgcctacgccggcatcgccccggtcacacaccgctccgggacctcgatcaagggcgaacaccccgccagaaccggcaaccgccgcctcaaacgcgcgttcttcctcgccgccttcgcggccctctccgacccgaccagccgcgcctactaccagcgcaaacgcgacgaaggcaagaaacacaacgcagccctcatctgcctcgcacgacgacgctgcgacgtcctctacgccatgctccgcaaccacacccactaccaacaccccacgacatcagccgcttgacaatttccatagggacacc

SEQ ID NO: 2203 - DNA, 1369 bp, unidentified
  source 1..1369: mol_type = unassigned DNA; note = element_30f7e88
  misc_feature 1..4: note = core
  misc_feature 5..77: note = LE
  misc_feature 78..1112: note = CDS
  misc_feature 1113..1369: note = RE
  misc_feature 1085..1358: note = bridgeRNA
atgatggggtggacgccccgccgacggcatcgatgtgccaaagtggaggtgttgagcaccacttaagggaggcgtccgtgtcagaggttagcataatcggtctggatatcgccaagcatgtttttcacgctcacggggcggatgcgcggggtggagcgatattcagcaagcggatcagccgaggaaagctgctggatttcttcgcagctcagccgagttgcacggtagcgctggaggcatgtggcggagcgcatcactgggcccgtcagctcacccaactcggacataaggttcgactgattccgcccgcctatgtaaaaccgtttgtgaagcggcaaaagaacgacgcgattgatgccgaggcgatctgcgaagcagcgcagcggccgagcatgcggttcgttgccgtgaagagcgaacagcagcaggcggcgggtctggtgtttcggacccgggatctgttagtgcgacagcgaacccagctcatcaacgcgatccggggacacctcactgaatatggttggatcgctcccaagggaccgtcgcacgtggcgatgcttgccgacctgatcgaggaagacgagatggctacctcgcttcccgaagcggcccacgccatgttccgattgatgttagacctgctcgccggtctcaatggcaagatctcggatctcgacaaggagatcgcgcgacgcgctcgcgaggacgaagtatcgcgcaggctgatgaccgttcccggcatcggcccaatctccgccaccgcgatcgccgccctagcaccgccgatcgagacctttgccaagggccgcgactttgccgcctggctcggtctcacgcctcttcaaagatcgacaggcggcaagcggaagctcggggcgacatccaagatgggcgagcgcacgctcaggcgcctcctcatcatcggcagcagcgccgtcgtgcaacaggcgagcaaacgcggcgcaccaaagggttcgtggctcgaacagatgctggctcgcaaaccgcgcatgctggtgacggtcgcgctcgccaacaagatggcacggatcgtctgggcgctacttgtaaaacaagagaattaccgagctccggtcgcagccaaggcgtgatcttggcggacttgaggtcgtcggaggtgtagtcgggcgaaggagggtatggcgcaacagtcggtgagacggggccggaagaaccagatgtactcatcgtgcctggagcacgcatttatgatttggttccggtccgcgaactcccatacaggcccgcagctccatcgctgcacaatcagaggccggacagatggcagcatccgactacgtgccgatcttcttcaaaaaaccgcttgcatctcgcggggcgtccacag

SEQ ID NO: 2204 - DNA, 1451 bp, unidentified
  source 1..1451: mol_type = unassigned DNA; note = element_30f932d
  misc_feature 1..4: note = core
  misc_feature 5..204: note = LE
  misc_feature 205..1437: note = CDS
  misc_feature 1438..1451: note = RE
  misc_feature 1..191: note = bridgeRNA
ctccgtaagttgataggtggccctgtggggccgggtgtggctcatcggtccttgcgcccgttcgctctcgaggagtggccgcccggtcctgcggggcaccctggctgctgattgagacgtgcggataggtcgctgtttacggaggtgtcggcggggtgttccacgggccgtgtcccgacgactagcaagcgacaggaggagaggttggaagcagcaaggcctcacgtgtggatcggtatcgatgtgggcaagacccaccactgggcagcagcagtagatgcaaacggcacccagatctggtcgcgcaagatcaccaacgacgaggccgagatcctcgacgcgatcggtgtgggccggggcctggctgatgaggtgtcgtgggccgtggacatctccggcacctcggcggcgctgctggtggcgctgcttgccgcgcacggccagcagccggtctacgtaccgggccgcacggtcaactccatgaccaccggctaccgcggggaggccaagaccgatgcccgcgacgcattcgtgatcgccgagacctcccggctgcgacgcgactttgctccggtccaggtcgatacccccctcgtggccgaactcgcgctgctgaccgctcaccgtactgatctggtcgccgaccggatccggatgatcaaccggctgcgtgacctgctcaccggcaccttccccgccctggagcgagccttcgactacgcccaccacaaaggtgcactcgtgctgctgactggctaccaaagccccgacgcgatccgccgccgtggccggacccggctggaagcatggctgcgcaaacgaggcgtgcgcggcgccgatcaggtcgccgccaccgcactggatgccgctcaggcccagcacaccaccctgcccggacaagacgtcgccggcgcgatcatcgccgacctcgccgcccagctcctggcccacgatgaccggctcgaccggctcgaggaccagatcaagaccaggttcgccgaccatccccaagccgaagtgatcacctcggtaccaggtatcgggccgatcctcggcgccgagttcgtcgtcgccgccggcgacctcggctcctacgccgccggcgacctcggctcctacgccgacgccggccggctcgcctcggcggccgggctggtccccgtgccccgtgactccggacgccgcaccggaaacctgcaccgccccaagcgctacagccgacgactgcgtcgggtcttctacctctccgcccaaaccagcatcctcggcgagggccctaaccgcgacttctacctcaagaaacgaggagaaggactcaaacacgtccaagccctcatcgccctggcccgccgacgcgtcgacgtcttgtgggcactgctccgcgacaaccgcacctggacgccaagcatcacacccggaggcgacactgctgcttgacatcttcattgaga

SEQ ID NO: 2205 - DNA, 1522 bp, unidentified
  source 1..1522: mol_type = unassigned DNA; note = element_30fe296
  misc_feature 1..2: note = core
  misc_feature 3..71: note = LE
  misc_feature 72..1100: note = CDS
  misc_feature 1101..1522: note = RE
  misc_feature 1276..1511: note = bridgeRNA
ttatggaatggcccgcccctcactctccgccgttgaaagcggcggactgacctgaggggaaggagcgcgacatgcagattgccgtactggggatcgaccttggcaagcggacttgcagtgtggtcggactggacggggcggggcgcgtcgttctgcgtcgccgggtggcgcggacgaacgtgatcgggttcaccgccgggctggccgcctgcgtcgtcgccatggaggcctgctgcggcgcccattatctcggacgcgagatcgccacgcaggggcacaccgtgcgactgatgtcgccggagtacgtgcgtccctacgtcaaggcgcagaagaacgacgatcgcgatgccgaggcgatcgccgaggcggcgacacggccgaccatgcgcttcgttcctctgaaaaccgaagcccaactcgacgcgcaaatcctgcatcgggtccgctcccggctcgtgggagaacgaacggcgctaatcaaccaactgcgtgcggtgctgcttgaacgcggcctcgtgttcccgcagggacggcgccagttcgaacaagctctggccgagctgctaaccggagatgagacggctgacctcagcccacggatccgccagttggtggtggatatgcaagccgaatggcaggacctcgaccggcgcatcgccgcgctcgatgacgagttcgccaaacgcgcccgcagcgatgacagcgcacggcgcctggccaccattcccggcatcggcgtgctgaacgccacggcgctggcagcggcggtgggcgacgcgagcgccttcgcccgcggccgcgacttcgccgcttggcttggtctggtgccccggcagaggacaaccggaggcaaggcgaagctgctgggcatcagcaagcgaggcaacgtgtacctcagaaccctgctgatccacggagcccgggccgccttgccggcgctcagtcgtaaagcgactccgtttggcgcatggctgcgcggcctgttggcccgggcgcacgtcaacacagtggtggtggcgctcgccaacaagttggcccggattgcctgggcggtgctggcgcgccagacgacctatgaggcgcaccatgcacatgcctgaaccgagcctccttcagcccaccgggcatccgcaagcgatgatccgccttcggccgcccctcctcaagcctggccctagcgggccaccgcctacggcggctgtgggcttgaccaggggcggcctccaggcgacctgttccaccatcggatgcagggtggggtcaggctgaagggatagaattgtccggagccgatcgtgccggacggtgatgtctgcgggtggttgagcgagatggcctgaacagtcgaacggcggcccggaaacctggttcaaaatgcggcgcgtagatgccgtgacttttatgaggaccggaccgcgcggatctccatctgggccgggagctgtgctccgaggccggatacgttggggcagactttcagcgctggatcagaaaccgcttgccgacggggcgggccatacgt

SEQ ID NO: 2206 - DNA, 1445 bp, unidentified
  source 1..1445: mol_type = unassigned DNA; note = element_3116af3
  misc_feature 1..2: note = core
  misc_feature 3..230: note = LE
  misc_feature 231..1430: note = CDS
  misc_feature 1431..1445: note = RE
  misc_feature 10..223: note = bridgeRNA
gctctaccttcttgatcgggctgatcgagccattcgtagggttgggtcacccaggggcgctgggtgtggctttcaggccgctgccgtctcgtggcaatcgaggctttgccgctcagcgccccacgacgactcggccgccgattaggaagtgcgaacaagtcgctgtgtagagcaatgccggcgaggtcgtccgtggcacgaagagtacgaacgcgcacgtcaggagcgcgatgagccggatatgggcggggatcgacgtcggcaagggtcaccatcacggcgttgccctggacgtggacggcaagacactgctgtcgcggcgggtcgccaatgacgaacccgagctgctgaagctggtcggggatgtcctggacctggccgacgggcgtgaggtcacctgggcgatcgacatgaccggcggggaacccgcgttgctgctggccttgctggtcagccacggccaagaggtcctctacatgcccggccgactggtgaaccgggcttccgacggctaccgtggcgagggcaagaccgacgcccgcgatgcctacgtgatcgccgaccaggccaggatgcgccgcgacctgcggcccatccgtcccggtgacgaggcagccatcgagctgaagctgctgaccgggcgccggtctgacctggtcgaggaccgcacccgcgccgtgaaccgcctgcgcggcactctgctgagcatgttcccggccctggagcgggccttggacgtgaccaacaccggcccgctcaagctgctgacgggctaccagaccccggctgcgatccgccgggccggcgtcgcccggctgacgaagtggctggccaaccgcaaggtccgcagcgccagggacctggccgaagcggcggtcgaggccgccgcgcgccaacacaccgccgtgcccggggagaagaccatcgcgaagctggtccataccctggctgaggaggtgatggccctcaacgcgcatatttccgagatggacaagctcatcgagggccggtttcgcgagcacgaactcgccgacatcatcgtcctgagcgtccccggcatcggtgcgactctcggtgccgagttcctagccgccgttggcggcgatctggacgagttcgactccccggacgccctggcggccttcgtcggcgttgccccagcacctcgcgactcgggcaaggtcagcggcgacctccaccggccggccacctaccaccgccgactccagcgcgtcttttacacctccgcgctcgtcagcgtccgctacgacccgaactcacggcagttctacgaccgcaaacgcgccgaagggaagaggcacgtccaagccgtgctcgccctcgcccgccgacgtgtcaacgtcatctgggccctcatccgcgaccgacggtgctacgaagtgacaccgccgatggatacggccgcttgacaacagcattaggaa

SEQ ID NO: 2207 - DNA, 1388 bp, unidentified
  source 1..1388: mol_type = unassigned DNA; note = element_3119f98
  misc_feature 1: note = core
  misc_feature 2..81: note = LE
  misc_feature 82..1128: note = CDS
  misc_feature 1129..1388: note = RE
  misc_feature 1130..1376: note = bridgeRNA
atgatggtgtggacggcctccgacggcatcgcgatgtgccagaatgaggtcgttggagatctcatacaaaggaggccgcccgtggacgagattacccgcattggcatggacacgtcgaagcatgtttttcagctgcacggtgtcgatccgagggaggagccggtgctgcgcaagcggctgcggcgcggacaggttgagacgttcttcgcgcggcttgcgccgacggtggtggggctggaggcctgcggcggggcgcatcactgggcgcgggttctgcaggctctgggccacgaggtgaagctgctgccgccgcagtatgtgaagccttacgtcaagcggggcaagaacgatgcggccgatgccgaggcgatctgcgaggcgatgagccggccgcgcctgcgcgagcgctttgtgccggtgaagacgccggaggcccagacggtgctgatgctgatggtggtgcgcgaccgactggtgcgccagcgcacgcagctgaccaacgcgatccgcggccatgcggcggagttcggggtggtcgaggccaaggggctgaaccggatcgccccgctgctggcgcgcctggcggcggacgagacgctgcctgagttggcgcgcgagctgtttgccgcgctgggcgaggaggcagccgagctcgaagcgcggctggaggcggttgaggccaggctgctggcctggcaccgcagcaacgagacgagccggcggctggccaagattcccggcctcgggccgatcggcgcggccatgctggcgatgaaggcccccgatccgggcgcgttccgctcgggccggcagttcgccgcctggctcgggctgacgcccaaggaccactccaccgccggcaagacccggctcggggtgatcacccgcgccggcgacgaagccttgcgctcggtgctggtggccggcgccatggcggtgatccagcagacccggcgcggccgcggcgcgccctcgccttggctggccggcctgctcaagcgcaaggaacccaaggaggccgccgtggcgctggccaacaagacagcgcgcatcgcctggaagctgatggtcacaggcgaggcctacgatccgcaccggctgcagccggccagggctgcagctgcctgacagcaatcggcaggcgctgacccgcccgccgaggccggacttgccagaggacgagtagatggttggatcgatcgatccggacgcgagacactccgtgggatccatcggcgctacagaccgtgtccgtgtgtggaactcgcgtcgcggaaaccatcttggccagcgccccaccgagggtgcagcaaacaggccggacatatgggtcgcaaccgagccgatccttccgccgactcctcttgcaagcagggggccgtccacat

SEQ ID NO: 2208 - DNA, 1370 bp, unidentified
  source 1..1370: mol_type = unassigned DNA; note = element_311b2e6
  misc_feature 1..2: note = core
  misc_feature 3..78: note = LE
  misc_feature 79..1104: note = CDS
  misc_feature 1105..1370: note = RE
  misc_feature 1108..1355: note = bridgeRNA
gatggggtggacggcccctgtgacggcatcgatgtgccaggatgaggtcgttggaacttcatctcaaaggagccgtccatggtcgagattatcacgatgggtctggatatcgcgaagagcgtgtttcaggttcatggggtcgattcgtcgggttcggtcgtcgtgcgccggcaactgcgccgtgccgaacttttgaaatattttagttcgctgccgccgtgccttgtcgggatggaggcgtgcggttcggcgcattattgggctcggcagattggtgcgttggggcaccgggttcgcctgctgccaccagctcatgtgaagccctatgtgaaacgcggccggaagaacgacgcggcggatgcggcggcgatctgcgaggcggtttcccgaccgcacatgcagttcgtgccggtcaagagcgaaacgagccaagcggttctcctgctgcatcgagcccgcgatctgttggtccggcaacgcacgatgctgatttgcgcgttccggagccatctggccgagttcggcctgatcgccggccagggcaagggtaacttcgccaaactggtcgcgggccttgcgcaggacgagacgctgccggtgctggcgcgccagacgctgcagctgatcgcggcacagatcgatgacggcaacgagaagatcgaggccctcgagcaagagatcgcgctacagcatcgccgcgacgaggcgagccgccggctcgcgtcgattcccggcatcgggccgatcatcgcctccgctctcgtcgcctccgtgccggatgcttcggccttcaagtcggggagacagtttgcggcctggctgggcctggtgccgcgacagaactcgacaggcggcaaggagcgtctcggcggcattaccaaggccggcgaccgctatctccggcgcctgctcgtcatcggcgccaccgggctgatccgttataagcgcaagaacgtccccggcggtctcgcctgggtgacggggctcctggccaagaagccggtccgtctcgtcaccgtggcgctcgccaacaagatggcgcgcatcgcttgggcgatcctgtgccggggcgaaatctaccgggaagcggcggcgacaagctgacgcccgataccgcgctgaagggccttatcgattgcgagggtgatgacgtgacgtgatggcgatccgggtcgaaccggggatcggaaaaacccgtactgtgtcctgtgccgcagagcgcgctacggtgatggggagccgatccgcgaacttcatcagggcctgcggtcaatagtaccgcgtcaacaggccggatacatgaccgcacccgaccagaacgccgacaaaaccgtcaatcagtccttgcaacacaggggccgtccatacag

SEQ ID NO: 2209 - DNA, 1340 bp, unidentified
  source 1..1340: mol_type = unassigned DNA; note = element_312155d
  misc_feature 1: note = core
  misc_feature 2..64: note = LE
  misc_feature 65..1099: note = CDS
  misc_feature 1100..1340: note = RE
  misc_feature 1109..1331: note = bridgeRNA
taatggaatggtctgcccctcctctcgcacaatggccggagtcggccatcacgaaggagcagcgatgactacagacccgaccatcatcggcatcgacctcgggaagaattggtttcatctcatcggattggacgggcgcggcgccaccgtgctgcgcaggaaattgaatcgcgtgcagctggcggagtatgcggccaccgcctccccgtgcatcgtggtaacggagtcgtgtccgggctcgcagtactggggccgggtgttcacgaacgccggacatgaggtccggatccttccggcgcaattcgtgaaaccgtatctcaaggccaacaagaacgacttcaatgatgctgaggcaatcgccgaagccggcgggcgcgcgagcatgcggtgcgtgccgctgaagacgaacgagcaactcgaactgcaagccctccaccgcgtacgccggcgcttcatcatcgagcgcacggcggtcgtcaatcagatgcgggcgctgctgctcgagcacgggatcgtcattccgctcggccgcgcgctattcgctcgtcggctcccggccatctttgaagatgccgagaatgggctatcgccacgcttggtcgttttgctccatcggcttcgccagcgctggctcgccttggatgtcgagatcgatgaagccacacgggacctcaccgagtgggcggaacaatcggacttgtgtcgtcgagtcacgacggtccctggcatcggcccgatgatctccacggcggtcgtcgccgcggttggcaatggccgaatgtttgcgcgcgggcgtgacatggccgcctggctcggacttgtcccgagtcaatactccacgggcggaaaacccactctggggcggatcagcaagcgcgggaatacgtacctgcggcagctcttcatccaaggagcacacgcgctgtacgtacacatgaggcgcgaccgatcgtatctcggcgaatggcttcggcagatccaagcgcgcagccaccgaaacgttgcggttgttgcgctcgccaataagatggtgcggatctgctggaaggtcctcaccagcgagcaggtgtacgaaccttaccccgcacgcatcgtgtagttgcaacctgtcttcggattgcgagggtgtctcgatgtgatggcccaaccgtcgcccggcgcatcgcgagcctgattaaaaatgcggttggtcgtgaccgaacgctttgtgaggatcgatgcgcgcggattccatcaaggccaggagcccgaggctccaccagtaggccgaatacattgacgcaaacggctttcgtccatcgctcgagcgcagcccttgcaacggaggggcagaccataca

SEQ ID NO: 2210 - DNA, 1625 bp, unidentified
  source 1..1625: mol_type = unassigned DNA; note = element_3122449
  misc_feature 1..3: note = core
  misc_feature 4..257: note = LE
  misc_feature 258..1493: note = CDS
  misc_feature 1494..1625: note = RE
  misc_feature 8..233: note = bridgeRNA
gttcgtattataaggttaaccagataagaaaatatttctggttgacctttatttatatggtcttattataacagtagccagggtagaacgtccgcacccgtgggacttgatcccgtcagctaaaccgttcgccccctactagtttaaacatgtttgaggctggttgggacaatgatctcgtataacaagcgaagctatgatactactaggaggaattaggggttactggcaagttcaattttgggaggagatttaaaatgaatccagtcgttagtctggatgtttcaaaaggaaaaagtgaagttcaggcttttttagataagggaaaaccttacggtaaaagctttagtatcaaccataatcttgatgggctaggatcattacttgagtttctggaaggtataaaagataaaactggtattcaacctccagtggttttagaagctacaggacattaccatacaccagttgttcagtatctagagcaacatcaatatttattaatcatcgtaaatccattaatctctcacagagctaaaagtgctagtttacgaaaagttaaaacggatgccatcgatgcctatcgtctttgtgagctttactataaagaggatttagagccgtacaaaaaacgtggaattcgactcttaaaccttcgtaatctcacaaggcaacatgagaatataacggggatgtatgttcaaactaaactgcaatttcaaactgttctagatcaaatattccctgaatatcaaggtgtttttggggacttatattctgttgtgtcgttgctcactctgcaagcatacccagcatctgaagatattttagcagttaacgaagtaacattgactaataaaatcaaggaattatgtagaagtcgttcaataagatgggcaaaagaaaaagcccaacaacttaagaaagcagcagcaaagaatccgtttcaaaagacactatatcatagtcatttactgagtcttagtatgtatattaatatgcttcttcaatacaaagagcatctatcagagttggaggctgagatagatactctcgcaaaggaaattgaagaatataagattatccaatctatccctggtatcggagaaaaaatcgctgcaacgatcatttcagaaattggggagatagaccggtttaatcacccaaaaaaacttgtcgcattcgctggagtggatccagaggtgtttgaatcaggtaaatttaaagctactctggttcgtattacaaaacgtgggtcaagtaggttgcggcacgccttatatatggctgttcgctctgggattcgtgattgtcgtaagcagaaaacaactgatgaaattatccctagaaacaagagattaagagctttttatgataaaaagcgtgaggaaggcaaactttataaagtagccgttattgcttgtgtaaataagctcttacattggatctatgccatattaaaaaacagaaccactttccaagatatagcctaattaagatttccagctaaataagacaaaaccttccaatcatcagttagcggaaggttatttggcatgcatattttcagtatatcatggctaaatattattttttattgaaaaatattgacaaactattagctg

SEQ ID NO: 2211 - DNA, 1520 bp, unidentified
  source 1..1520: mol_type = unassigned DNA; note = element_3123ee5
  misc_feature 1..4: note = core
  misc_feature 5..259: note = LE
  misc_feature 260..1510: note = CDS
  misc_feature 1511..1520: note = RE
ctcactggtgcaccatccttgtgtcggtgatctttgatggatcactgatgcacccgcggtgccgccaggccactgccctgctcgcttgacgttcttgacgtccactatgaggtctgcgagacctggcggttacccgggacgtgccgaccgtcgacagggctgagcgccaccgagcgccgaacagtgagcgaaccggcagccacgtcccggcatcgcatgagggtgcctccccactgggtctagcagcgaggaggcaggcttgaagtctgccagagttaccctgcccgaggaaccgcccggcgacgtgacatgcgggatcgactgggcccgtgatgatcacgcggtgtcggtggccgacacccggggccgtgaaatcttccggtgctctgttgagcacagcaccgctggcccgcgggagctgctcgccgtgctggcccgctatagcgcccgggaagccgccatcgagcggcccgacggcccggtggtcgacgccctgctgggagcggggatcacggtggtggtgatcagcccgaaccagatcaagaacctgcgcggccggtacggctcggccggcaacaaagacgaccggttcgacgcctacgtcctggcggacacgctgcgcaccgaccgggcccggctggcacccctgacccccgacggcccggccaccgtcaccctgcgccgcgcgtgccgggcccgcaaagacctcgtcagccaccgggtcgccgtcgctaatcagctgcgcgctcacctgcgcaacgccttccccggcgcggtcgggctgttcgccgggatcgactcgccgatcagcctgcgcttcctggcccgctttgccacccaggaccgcgcggactggctctcgccccggcgcctggcggcctggctggccagcgccggctactgcggccgcgctgatccggccgtcatgcacgcccgcctggccgccgcgccccgcggcgccaccggtgacgacggggccgcgcaagcccacgtcaccgcagccctgctcgccgtcctgaccacccttgccgaccagatcaaggtcctgtccgagcagatcggcgagcagctcgccctgcacgccgacgcgcatatcttcacctcgctgccccgctccggcaccgtccgcgccgcccggctgctcgccgagaccggcgactgccgcgcccggtttcccacgcccggggccctggcctgcctggccggcgcggcaccttccacccgccagtccggcaagatccgcaccgtcagcttccgctggtcctgcgacaagcaactccgcgacgccgtcaccgacttcgccggcgactcccgccgcgccagcccctgggccaccgacctctacaaccgcgcccgcgcccgcggccacgaccacccccacgccgtccgcatcctcgcccgcgcctggctgttcgtcatctggcactgctggcaagacggcgccgcctacgaccccgccaaacaccgggccctccagaccctgctcaaccaagatcagcaggcggcttgacacagggctt

SEQ ID NO: 2212 - DNA, 1590 bp, unidentified
  source 1..1590: mol_type = unassigned DNA; note = element_312ca9a
  misc_feature 1..2: note = core
  misc_feature 3..252: note = LE
  misc_feature 253..1425: note = CDS
  misc_feature 1426..1590: note = RE
  misc_feature 3..229: note = bridgeRNA
ctcgtattatatagtcataccccttctttaccttttctacaggttagggtatgctgttaaagatgctgtggattggtctgtttctcctaccactcgatggttactgaaaggctccaaccacagtctctttgtttaattgttaatcagttagataccgcatgacggtttatgtagaacgaggttacagcgtgcaaagagccctgtggatcttataacagcagcatcaaatactttttaaggaggatcacatttatgatctatgttggtatcgatgttgccaaggacaagcacgactgctgtatccttgatgacgaaggccggaagatggaccccaacttcaccatcacaaacgacaaggtcggtttcgatgagctgttctccagaattgaagaagtgactaccgacaaggcagaaataaaagtaggccttgaagctaccggtcactattcaaacaatcttctggcagcgctcgttgataaaggtttcccgaccgttgttatcaacccgctacatactaatctttacagaaaaggtctgagccttagaaagacgaaaacggataaagtcgatgcctttacgattgctatgatgttgatgaccgatagaacactcaagtcctactcggatacatcataccacaacgaagaactaaaatcactaactcgttatcgtttcgacaaggttcatgaacgttccaaactaaagacctctttatcccggctggtgaacattctttttcctgagttggaaaaactcgttccgtctctgcatatgaattctgtctacacccttttggaagaacttcccggcgcaacctatgttgcaaactgccatctgactcatctgaagaaaatacttgaggatgcctccaaaggccactatagtcgcgataaagcaattgaaatcaggaatgccgccattgattcaattggcgctcctatggccgccaaatcgatggaattggtgcatactatccgcctcatcagactgctttctgatgagatagaagaaatcgaggaatccatcaaatctatcatagataaacttgattctcctatcatgaccatccccgggatcagctatcgaatgggagctatgatccttgccgagattggtgatttcaaccggtttgataatgcagacaagattcttgcatacgcaggcctatcgccgtccacatatcaatccggtcagcttgattcatcctattctcacatggaaaagcgaggttccaagtaccttcgatatgcgcttttcaacgccaccaagtttgtctgcaaatgggacgaatcctttggtatctatctggaaagaaagatatccgaaggaaagcactataacgtggcggtatctcatgccacaaagaagctgctccgaaccatctacaggatggaactgaccggcgaagtatactcgccaagataaccctctgataatccttttctgtttgagcacccaatcggatgctctgtttatcatgcaattttcaaagaactgattgcagggaataagtccctaccactatgcaaatcgcatttctgcgtttttgatcaaaaagcatctttttctacttgacttttaatagttagt

SEQ ID NO: 2213 - DNA, 1223 bp, unidentified
  source 1..1223: mol_type = unassigned DNA; note = element_3138989
  misc_feature 1..2: note = core
  misc_feature 3..210: note = LE
  misc_feature 211..1125: note = CDS
  misc_feature 1126..1223: note = RE
  misc_feature 12..192: note = bridgeRNA
cttatctgatcggaatctggcagcgtaggtgccgagagccggcgtgggccgccgtgcaagcctggatctcgacgatcgccatgtagcttggcgcccacgccggaatctcccttgatccgcccgaacagttgctggagctgactactcgcagtgataagactgggcaagcgggggagctctcgacccttccagactatacggagtccggtaatgaacgggatcgggattgatgtcagcaagcgccagctggacgtcggcatgacagacgggcagatcttgaaggtcagcaatagcgccgccggcttcgctgaattggatgcctggctgagggagcgcccaaccagtcagatcgtgctggaggccaccggcggctatgagcagtgcgtgctggattttctgcataaggcaggacatccggtcgttcgggccaatgcctttcgtgccaggaagctagctcaaggactgggccacatcgccaagaccgaccgcttggatgcctatgccttggcgaagatggccgcgttggtgaagctgccgccctaccagccgctggagccttggcagcagaaactgcgggagttcgtgcgagcacgtcgacagacgatggacgccttggccgtagcgcggcaacagcagcaaatggtgaccgatcgtgagttgcgccggcttttgcaggccaacatcacccgcttgcagacgctggtccaacgcttgggcaatcagattgccgagcaggttgcccagcagccgcaactggctgtgctgaagtcgatgaagggagtggggacggggctgcaggccgtactggccagctatctacctgagctgggcaggatcaatggtaaggccatcgccagcctggtcggcgtggcgccgatgtcccatgacagcgggacaatgcgcgggaagcgaagcatccatggcggcagagccgagatccgtcaagtgctctacatggccagcatgtccgccctgcagcacgaacctcgattgcgggacttttaccgctccctgcgggcgcgcggcaaggaggccaaagtagccatcgtggcggtgatgcggaagatgctggtgatcctcaacgcccgcgtgcgagacgcccagagcggaccgatccccgcctgacgtcagtgggtgcgtacatccagaggctgccggccagcggccggcactaccgtgcccgtctgcaggaagggccgaagctcctcctgcaaacacagttg

SEQ ID NO: 2214 - DNA, 1544 bp, unidentified
  source 1..1544: mol_type = unassigned DNA; note = element_313b8d2
  misc_feature 1..2: note = core
  misc_feature 3..401: note = LE
  misc_feature 402..1217: note = CDS
  misc_feature 1218..1544: note = RE
  misc_feature 3..226: note = bridgeRNA
ctcgtattatagtgtcatagccttttctttaccttttctactggttaggctatgctgttgaagatgctgtggatttgtttttttctcctaccgcacagacggtttttgagagactccaaccacagcctctttgtctaaatgttaatcagtaagataccgcatgacggtttatgttgaacgaggttacagcccgcaaagagttctctggatttttaacagaatcaatacactttaagaaggatcttttgatgatctacgttggtatcgatgtcgccaaggacaagcgcgactgctgcatcctcggctctgacggagagattctgttctctccattcaccatccagaacacgctacaaggattcaatgcgctttatgagaagatctgattcctgacctcagatatgtcagaaataaaagtaggtctcgaggctaccggacaatatcatctcaaccttctgcgctcactccttgataacagcctgcccagctttgttatcaacccgttacatacaaatcttttcacaaaaggtcaaagcctaagaaagaccataacggataaagtcgacgctgcttcgattgctataatgttgctttccgatagaacactcaagccctacttagaatcatcataccacaacgaagaactaaagtctcttacaagataccgctttgacaaggttcaggaacgcgccaggcttaagacttctgtctccagactcgtcagtatcctctttccggagccgaaaaagctggttcctacccttcacatagcctctgtctacgcactgctttccgagtttcccggcgcgtctttcatagccgctgcccacctgacccgtttgaaaaaacttctccacaatgcttcaaataaagaccgttatggcagggatatggctgtttctatccgtgatgcggtatctttatccatcgattccgtcctcctggcaaagtctctggagctgagacacaccatccatctcattgaaactctgaccatggagatcaacgaaatcgaagctgctgtcaaatgcaatcatggatacgatggattccctcatcaccacgatctctgggctcaaaaacggatgggcgccatgattctggctgaaatcggcgagttctcccggtttgataaccctgatcagattcttacttacgcagttctttctccaaccatttatcagtccagccagctggctcttcctatgcgcatatagaaaagtgtggtttccgatacttacgttatgctctgttcaatgcaacccactacgtctatttatgggattcaacctttaaatcctttctagccaaaaagcgggaagaaggcaagcatcattatgtcgcgatttctcacgcctgtaagaagcttgtctgaatcatctaccagatgcaactgactggcgaggcttatcgaatcacctaaacttattcttaccctcttctgtatgagcatcctcgtggatgctctctttgtcatgcagttttcaaggtgctttccgtctgaacaagtgccttcaattcaggcttgccttttaatagttagt

SEQ ID NO: 2215 - DNA, 1357 bp, unidentified
  source 1..1357: mol_type = unassigned DNA; note = element_3149376
  misc_feature 1..3: note = core
  misc_feature 4..83: note = LE
  misc_feature 84..1103: note = CDS
  misc_feature 1104..1357: note = RE
  misc_feature 1125..1355: note = bridgeRNA
tgatgtgatggtctcctcccactacggcatcgatgtgccatgattgaagtggttacaaacaatcaaaatgggagaagaccaaaatgaagattacaacaatagggttagacatagcaaaacgattctttcatgtggtttgttgcaatgaacaaggtaggttaattaataaaaaaatgttaacacgagctcaagtattagcatttttccaaaaacaaccaacatgtttagttgctcttgaggcttgtgcaacatcgaattattgggctcgagaaatacaaaagtgtggtcataaagtaaagcttatcccgcctcaacatgtaaaagcctttttaattggcaataaaaatgattataacgatgctttagccatttctgttgcagcaaaccagctacacattaaaagtgtaggtataaaatcgatagaacaacaagataatcaagcacaacataaagtcagagagttagccgtaaaacaaagaactgcactttgtaaccaaatcagagggttaattgctgaatacggcattattttaagccaaggcgtgaatcacgtacgtaaaaccatcccgttcatactggatgatggatccacacaattatcagagacattcaaaacaatactgagacagctacaagcacagctcaacgcattagataagtgtattgaagcctacagtcaattaattgttgaaacagtaaaaagcaatgccatttgccagagaatacaaaccatacctggatttggaccaatggtttctagtgcctatttcaatgaagtcggtaatggtgctcattacaagcgaggccgtgatgtatccgcttcattgggtattgttcctaaacagcacagtagtggcggtaaagatagtttacttgggataagtaaacgaggtaatagttacctaaggtgtttgttaatacaaggtgctaaagcggttgtatccagagcaggcaccaagagtgacaagctgagtcaatggataaataagcttgtgaaaactcgagggcataaccgcgcatgtgtcgcttatgctaacaaaatggcgagaatggcttgggctataaccgtgtcaggcgaagattattcaacgatagaaatataagtaccaataaaaagtaaaccgctcttcaacgaattgcgtgggtaaaatgaaacgatgacataacaggtaaaacctgcatattgaaaacctggcgagttcagtggtagtcaataccgataacctgataaggacaatatgtgcggaatacatcgaggccagaagtcttgaacttcatataaaggccgtatatatgacagcaatcctgtccctgttatcgatgagtgataccttgcaatacgggaggagaccatata

SEQ ID NO: 2216 - DNA, 1357 bp, unidentified
  source 1..1357: mol_type = unassigned DNA; note = element_314dbba
  misc_feature 1..2: note = core
  misc_feature 3..75: note = LE
  misc_feature 76..1101: note = CDS
  misc_feature 1102..1357: note = RE
  misc_feature 1124..1354: note = bridgeRNA
ttaatgagatggtcacccccacaccctgcgagggctacgctttcgcagggtgttttgttttcggaggccatcatcatgagcgagtcagcgctgatcgggatcgatctcggtaaacacagtttccacctgcacggccaagacaaattgggccgagaggtgtttcgcaagaagctctcgcgtcaacagatgatgacgctctttggcaatctgccggcctgtaccgtggtgatggaagcttgtgccggggcgcatttcgtcgctcgccagctgatggccatggggcatgaagccaaactgatttccccgcaattcgtccaccccttcgtcaaaggcaacaaaaatgatttcgtggatgccgaagccatttgcgaggcggcttcacgtccatcgatgcgctttgtcacacccaaaaccgaggcgcagcagacgctttccgttctgcatcgcctgcgcgagtcgctggtgcgcgatcgcaccaaaaccgccaatcaaatgcatggtttcctactggagttcggcatcagcctgcccaagggcctggcgatcatgaagcggttggcgagtattttggctgagcatgagttgcccgttcggttgacagtcctgttacagcgcttgcatgagcatttctgttatctggatgaacagatcaaggcgctggataaagagctggcaagccaactggccgacgatgatctcggcagccgcttgctgagcttgccgtgtgtcgggccgatcaccgccagcctgctggctgtagagatgggcgatggccaacagtacaaatgcagtcgtgacttcgccgcctccgtgggcttggtgcccaggcagtacagcaccggcggcagggctaatttgctgggcatcagcaagcgcggcgacaagcacctcaggcagttgctggttcaatgtgctcgggtctatatgcagaggctagaacaccagaaaggggctctggccgactgggtgcgctcattgcttgggcgacgacactcgaacgtggtggcctgcgccctggctaacaagctggcgcggatcgcgtgggcgctagcggctcaccatacgcaatatgaagcagggccagacgcgctgaacgcctgaccctgcggttgttgcagtaccacgaatcacccttcaggttttgcgatagctgaacaacggatgacgtgaacggcccaccggcctgacgaagaacctgacataaaaatcggcttcagaagccgcggcatttttcaggatcgtcaggcgcgactctcatcgtggcgcggggcatgccctggatcgacgccggatagatttaagcaagccaaccacttcacccaataatcagtattgcaaaaatgggggtgaccataga

SEQ ID NO: 2217 - DNA, 1579 bp, unidentified
  source 1..1579: mol_type = unassigned DNA; note = element_31531a6
  misc_feature 1..2: note = core
  misc_feature 3..278: note = LE
  misc_feature 279..1457: note = CDS
  misc_feature 1458..1579: note = RE
  misc_feature 10..258: note = bridgeRNA
gtataatatatttaggttgataagggagcctatctccccaaattaactgtttaattattcatcaaaatgatgtataatagttttattagatagaggttgtcgtactctccttgaggagaatatctacctcgtacttgaaagactgacacctctttctgataaacagattacgtataagttggatgttgacagtttttctgtacttcgcatatagaacaaggcagtaacgtttatcagttaagaggaactatctaaaatcttttttgtaggtgaattttatgttgtatttaggtattgatattgctaaaaataaccatgtcgcttctcttattgatgaaaatgcaaaacctctattcaaagcattttctttttctaacactcttgatggtgctaacagccttcttgcaaagctgtctgcctatgcaactaatcccgattgtgttgaaatcggcatggaagctaccggtcactattggctttcaatatattcttttctcattgaaaacggatatactgtacacgttgtaaaccctatccaaactgatggctggcgtaaaggtactgaaattcgcaaacgcaaaaccgatattattgactcggttttaattgccgatttaattcgctacggtgattttgttgaaacctctttatctgatgaagatacattatcacttcgcaacttatctcgttttcgcagttatcttgtatcgtctatcggcgatttaaaacgcaaggttgtatgcgttcttgaccagatattccccgagtatcagtctgtgtttgctgatattttcggcaaaacctctaaagaaattcttttacactttcaatcagctgaagattttgaaaatattacttctgaacagttagaaagtgtgcttgaaaatgtttctttcaaaaaatttgcaaaaaacaaaatttcttgtatatcagagcttgcagccacttcgttcggtttgaaattttgtcgtgaaagtttctcgttacaacttaaattgctgattgagcagataaaatttatagaagctcaagtcgccgatgttgaatctgaaattgccataattcttgataaaatagattctcctattaccaccattcccggaataggtgtaattacagctgctgttatactcggtgaaataggtgatatatcaagattttccaatgcttcgaagctggcagcctatgccggtatcgatgcttctgtaagccaatcgggagaatatcaatcatcaaacaacaaaatgagcaaacgtggttcaccatatcttagaaaagctttatttaatgctgcaatgattgctgcttttcatgaccctgttttttctgctttttatcaaaagaaacgcaatgagggtaagcaccatcttactgctataggagcggttgcgagaaaactttgtaacactatttttgctgttttaaaatacaataaaccttacgaagttcagttgtgatgatttacataaaatctttaaacctgtattttatcaggtctttttgtcgtgcatatttatacattcctcatacataaaatttatttatttttttcgttttacctattgactttttatagttg

SEQ ID NO: 2218 - DNA, 1547 bp, unidentified
  source 1..1547: mol_type = unassigned DNA; note = element_3156789
  misc_feature 1..4: note = core
  misc_feature 5..271: note = LE
  misc_feature 272..1537: note = CDS
  misc_feature 1538..1547: note = RE
ctcactggtgcaccatcctcgggtcggtagttctggatgaactgctgatgcacccgaggtgccgtctggtcactgccctgctcgcttgacgcgttggacgtccagcatgagatctgcagggccgggcggttacccggggcgtgccgaccgtcgacagggctgagcgccagggccgagtgctgcgagcgccgatcagtgagcgaaccggcagccacgtcccggcaccacataagggtgcctccccactgggtctagcagcgaggaggctgacgtgaagtctgccagaaacaccctgcccaacgcattgcccgaagagcccgtcaacgccgtgaccggcgggatcgactgggcccgcgacgaccacgccgtgtcggtcgtgaacaaccgcggccgcgagatcgaccggtgcaccgtcgaacactccaccgccggactgcgggacctgattaccatgctgggcagcaacggggtcggcgaggtcgcgatcgaacgccccgacggcccggtcgtcgacgccctgctggaggccgggatcaccgtggtggtgatcagcccgaaccaggtcaagaacctgcgtggccgctacggatcggccggcaacaaggacgaccggttcgacgcgttcgtcctggccgacaccctgcgcaccgaccgggcccggctcgcaccactgacccccgacagccccgccacggtcgcgctgcgccgtgcctgccgcgcccgcaaagacctcatcggccaccgcgtcgcggcagcgaaccaactccgcgcgcacctgcgtaacgccttccccggcgcagtcgggctgttcgccgagatcgactcgccgatcagcctggcattcctgacccgcttcgacacccaagaccgcgccgactggctcagcccgaaacgcctcgccgcctggctggcatccgtcggctactccggcaagaaagaccccgccgtgctgcacgcccacctcaccgcggcaccccgcggcccggtcggcaccgacgccgacctcaacgcccagatcacccacgcactggtcgccgtgctcaccaccctggtcgagcagatcaagaccctcaccggccagatcagcgaccagctcaccacacacaccgaccagcacatcttcaccagcctgccccgctccggccgcgtccgcgccgcccgcctgctcagcgagatcggcgactgccgcgcccgcttccccacccccgaagccctcgcctgcctcgccggcgccgcaccctcgacccgccaatccggcaaactccgcaccgtcgggttccgctgggcctgcgacaaacaactccgcgacgccgtcaccgacttcgccgccgacacccgccacgccaacccctgggccgccgacctctaccaacgcgcccgcacccgaggccacgaccacccccacgccgtccgcatcctcgcccgcgcctggctgttcgtcatctggcactgctggcaaaacaacaccacctacgaccccacccaacacaacgccctccaacgcatcctcaaccccaccgaacaccaggcgggttgacacagggctt

SEQ ID NO: 2219 - DNA, 1315 bp, unidentified
  source 1..1315: mol_type = unassigned DNA; note = element_315cf86
  misc_feature 1: note = core
  misc_feature 2..71: note = LE
  misc_feature 72..1100: note = CDS
  misc_feature 1101..1315: note = RE
  misc_feature 1117..1307: note = bridgeRNA
taatgatatggacactcctacccaacctcacacctatactgactgtgtgagcattgaagaggacacaaaccatggcagtaacaactttaggcatcgatttggcaaaattatcttttgctttacatggcatagatcaacaaggctctgtgttgataaaaaagaatgttagaagagcgaacttagctaaggtgatatcaaagctcgaaccatgtttaattggaatggaagcttgttcaggagcacactattgggctcgattatttatcaaaatgggtcacagcgttaaattgatgcctcctcaatttgtaaagccttacgttaaatctaataagaacgatgcggctgatgctgaagctatttgtgaggcgcttactcgacctaatatgcgctttgtaccaataaaaacagtagagcagcaatctattctatcggtacataaagctcgtgaacgattagtttctatgagaacgggacaggttaatcaacttaggggattactcggtgaatttggtatcgtcatccctaaaggatcttcagcgttgaataagcaaattcctctgattttagaggatgcagagaatggactgacagtgactgtccgcagtctggtgtcgcagttgaaagagctagtcaacgaactagatatacaagtcaaagagctaaataaacaaattgattcttggcatcaacttaatgaagattcgcagcgaattgctcaaatcccaggaatagggccaataacggcaacagcattggtagctagcaccggtgacccaaaatcgttcaataatggtcgccaagtatctgcttggatcgggcttgtgcctaaacagttttctactgggggcaaacaagtcctattaggcataagcaaaagaggcgatggatatttgagaaggttgcttgttcatggggctcgtgctgtccttggtcatctgaaacaaaactctgagacttatacccaccgttggttagcagaactgcttaaacgcaagcataaaaatgtagctatagttgcactggctaatcgaaatgcacgtattgcatgggcattgctttcaaagcaacaggagtataatccaagtctattgtctgcataaaaatcaaactaattcatcaaattgcgcatgaagcaaatgagaagacaggtaagaccgtgaatgtgaaactctgatttgatcttgggacttaaagttcgtgttgttgataagagcacattcagcggaaatcattaagagttttagaactcggatatatgtctgcaatctactaccattttttcaattgctacttgccaataaggagtgtccatata

SEQ ID NO: 2220 - DNA, 1525 bp, unidentified
  source 1..1525: mol_type = unassigned DNA; note = element_315e817
  misc_feature 1: note = core
  misc_feature 2..97: note = LE
  misc_feature 98..1237: note = CDS
  misc_feature 1238..1525: note = RE
  misc_feature 1258..1468: note = bridgeRNA
agtcagaatggaatgaccgactccgattcgcgggcgtgggttatcctgcgaatcggaagaccagcagtacagagccacaagcgaaaggagtcggtctatggagagaataaagtttgtcggtttggatgtccatgccgagacgattgcagtcgccgtagcagagcaaggcggggaggtaaggtcgctggggataataccgaatcgcgaagattccgttcggaagctggtaaaaaaactcaggccagtggagcaattgaggttttgttatgaagcaggtccaacaggctacgcactgtactggcaactaaccaggatgggggcaaagtgtgaagtagtggcacccaccttggtgccggtgaaagccggagatcgcgtgaaaacggatcggcgggatgcgttaaaactggcgcggaattgccgggccggagagctaacgccggtgtgggtgccggatgcggctcacgaggcgttgcgggatctggttcgcgcccgagaagcggccaagcaggatgaacttcgagcacggcatcggctgagcaagtttctattgcggcatggccggcgacccccgatgggggtaaagccttggacgataaaatacctggagtgggtgagacgagaggtacatttcgatcagatggcccaggaagccacgttgctggattaccttcacgaggtggagcatggggcagcacgcatcgcgcggctcgatagtgcaattaccgaagcggcgaagagtgcgccgccccagatgcgtgccgtgatcgaagcattgcaggcgctaagggggatcgcgcaggtttcggcagtgacggtggtagccgaactgggagagctgtcccgatttgtcggagcaaagcagttaatggcttacggaggaatcgttcccagcgaagactccagtggagagcgcacgcaacgcggaaatatcactaagacaggaaatgcgcatttacggcgggtggtggtggaagctgcgtgggcctaccgacaccgaccgtctgtaggggcaaagttgcggaggcggcaagagaatgtcagtgaagaggttaaagagatcgcttggaaagcacaacagcgcttacatcagcgctatcgaaagttgcaggccaagggcaagaaccacggagtggtgatcacagcggttggacgcgagttactgggttttatctgggccattgggatgaaagtggaaaccgcgcagaaggatgccgctgcagcgcgcggcttagagtgagcttgttcggaactcggaaagagcaaaggaggcagcgtaggtagtggtcgagggtccacggtaaggagaatcctcgataacgctatgcggtaggttttcggaccaaacccgcgcaactagtccgaggcagctcccgacggatcacgattatgcggtttcgacccgcgaatatcagagtgatcaaccgtcgcgaaactacctcgaccacgacttgcgctgcctcttaataaaaggaggaagaaaggcagaagaaaacagttgctcctagttgacaggtcattccatatc

SEQ ID NO: 2221 - DNA, 1533 bp, unidentified
  source 1..1533: mol_type = unassigned DNA; note = element_316608f
  misc_feature 1..3: note = core
  misc_feature 4..237: note = LE
  misc_feature 238..1431: note = CDS
  misc_feature 1432..1533: note = RE
  misc_feature 7..257: note = bridgeRNA
tttcgtactatataagagtagggaaattacccctattcttatttttttgttatgatgaggttgattggttaacgtcggcaaatatgggacgcagctcccgcaactgaaagtgttaaccatcactcattatcatgaattcgattaagcaagttgggattcgctcccgggtaaagaacgaaaatgaatcgataactgagtgttggacccaatcatactaattcgcaaaggaggaacaccatgatagctgtaggcattgatgtatccaaatctaaaagtaccgtagctatagtacgccccgatggaactatcctattaaaacctcatgaattcgctcataccatcagcgacctttcacagctttctaacctaattcgctcttaccatgaagacgctaaaatcgccctggaatccaccagccactatcattacccaatcgttaaagctcttctcaatgagaacttttctgtctttgtaatcaacccttttcttattaaaaagtttatggacaacaatatcagaaaaggaaaaactgataaaaaagatgctgtccgtattgcctattttgctttagaaaagtcataccagctgaaaccttacagccctgctgatcaaaaatacgatgacttgaaatttctctcaaggcagtacaaccagtgtgtttccatgaaagtcaaagccagagtacaaacagctaatctccttgatgaaatcatgcctggcattcaaaacattatccccatatcctctaaatacttagaaaacacactattctatgacttcatagaaaaatatcaaaactatgaaaagatcatccatatgggggaaaagcgatttataaatagttatattgcctttgcccaaaaacaccgttgcagaagctctcacaaaaaggcgcttgctatatacgaagcagcttccaacagtattactacccgcagccacgatatcagcacttctctggctctctctcaatgtcttttactgctcaaacaagccagttcatctgctgatctattattacgtcagatgcagtcagttgcttatacgctcccagaatataacattgttcgatccatgcatggtgttggtgatcgcttagcccctctcctgattgctgaaataggagacgttcgcagattcaccagtgccaaggctcttaatgcttatgccggaaacgatgccccgccttatcagtcaggacagtttgaaggaacaaaccggcatatatccaaacgtggttctgcatacttaagaaaggcctgttaccaagtcatgcactcgctaaaagtacataagcctgaaaacgatgcagtctaccagttcatcctgaaaaaggaatcagaaggcaaacacaaagcagttgctaagatggccggggtaaataaatttttacatatctattatgccagggtaatggaaatgtacaggtaactcattccatttttctacattgattaatagtgaggtttattaaagttaccctttttttacctcattatttttttctaaaaaggcttgacatttattagcaag

SEQ ID NO: 2222 - DNA, 1565 bp, unidentified
  source 1..1565: mol_type = unassigned DNA; note = element_3167d42
  misc_feature 1..3: note = core
  misc_feature 4..245: note = LE
  misc_feature 246..1439: note = CDS
  misc_feature 1440..1565: note = RE
attcttaatatatgagcagaggctttaatagtctctgctctttctttatgatgaaggcgattggtctgacgaaatctggaattgggacaccacgcccggagacaaatgtgtcagcctgccttcatcgttctacattcgattaagcaagttgggaaaggcatcttctcccgtttaactaaagaatatgagtgaaccttgaagagccggatccaatcatacaaaactacgaaaggaaatacattcccatgattgctgttggtattgatgtttcaaaatccaaaagcacagttgccatccttaatggcgatggcagcatccgcgctaaaccttttgatgttcaccacacgatcgatgaacttggcgccctgaccgaatacatcaaaggcacttccgaggttcctaccatcctgatggaaccgaccagccattatcactatccgcttctgaaagcctttcaggatgcctctctgcccgtctgtctgatcaatccctatcaaatgaaaaagttcggtgacacagaactccgcaaagctaaaaccgacaagcgagatgcgctaagaatcgcgcaatatgcacttgaaaaatcttattccctggtcccttacacccccgcagatcagaagtatgatgatctccgttttctatccagacagtacagccagagaatttccactctcaccgtcagcaaagtacaacttctacgtcttttggatcagacaatgcctggaattacaacgctccttccactgaaaagcagggatccggataactgtgtacttcttaggtttgtaaagcgcttcaagtcctttgatataatccgtaaaatgggcaaaacacgttttctggatagctatctggtattggtccgtaaaacaaaggatcgttttgctggagctaaaggtcttgctatctatgagttagttctcaatagtgttaccactcgcggcgacaatcccctgactgcaatgactcaggaccaatgtgtggatcttatctccacttctcaaaaagcggcagacgagatcaatcttcacatgctcaacatttcgcaaaccattccggaatacaaagtgctccgcagtatggccggcgttggtgaccgtcttggaccgataatacttgcagagatcggtgatatccgccgttttcacagtggaaaagcactcaatgcctatgcaggtaacgatgccccgccgtatcagtccggacaattcgagagccggaatcgtcacatctcgaagcgtggcaacccggctctcagaaaagcttgttttgaggttatgcaggctctcaaactgacaaaacctcaagacgatcctgtttacctttttctgctcaaaaaggaacaggaagggaaaccgtataacgtagccaagatggctgccgttaataagttcctgcggatctactacgctcgtgcgatggagttgtataagtaaatccgtccgctttcattatagccgttatatgccggcctgcaacagtaggccttgttaaggttactctttttttcgccctcaaagtgctcaagatcttcaaaaatctgcttgacaaacattagcaag

SEQ ID NO: 2223 - DNA, 1594 bp, unidentified
  source 1..1594: mol_type = unassigned DNA; note = element_31691d7
  misc_feature 1..3: note = core
  misc_feature 4..255: note = LE
  misc_feature 256..1425: note = CDS
  misc_feature 1426..1594: note = RE
  misc_feature 24..238: note = bridgeRNA
tcttgtatgatacaaacgtaccttgtagtaacgtttagtatcactatcctttctaacctttagatagaatgtagatgaaccttagtactcttatgttaatttgtagtttcatctacttcgtggagagtgaatctataggatcttatcacatctgtttatagctggataggttatatgataccttcatgtcacgcaagtttacactgctaagaccgctatagaaactataaggtttcagaaaggcggtctttttaaatggccaaaccgttttgtggcatcgacgttgccaaatatgaacacgtcgcaagtatctataatccgtcaaccggtgcaatagaacttgatgcactccattttgaaaataatgataaaggttttaaatcattaaattcaaaacttaaaccgttaagtaaaggaaatgatatctgtgtcggttttgaatcaacaggacactatcatcagactttatttaactatctaactgccaagggatataagtgttatctgattaatccttatatgaccagcagatttagatcaatatctcttcgtgacacaaagaatgataatatcgattcccgtgccatcgctgagtttttatcgcttgaatattcaaaattatctaatgaggaataccagtcaaatgaacttaaagaattagccaaacagagggattttctgatgactgattcatcaaaaatgaagattaaactcaagtcttatcttgatcgaaccttcccagaagcggaatccttagttgatttaaatgtttcagctataagggctattttgaaagaatatcctacagccaaatcgatagccagtaccagaatagataaattaaagaatatagctaacgaagcttccaaaggcaaatattccttaaagaagatcgaagaacttaagcagctagctaaaaaatctataggtattgattctgtcgccttaggcctgaacatcaaacaatgtatagaaactcttgaactaaaagaaaagcagattgatgaaatcgaaagagagattaaacaacatccgaccgttattaattctcctctacatcagttaaaaggtattaatgatatagagattggatacatcatgtctgccattatcagtatagaccggtttgactctcctgagaaactggtagcttatgcaggacttgatccaaaagtaagacagtcaggaacgtgggaagcttcaaaaaccagaatgtccaaacgtggcaataagcttttaagatatgccctaatctggtcggcttttaatatgttgagaaaagaaggatctatcaaggcctactatgaactgaagaaatcccagggcaagcttcactataacgctttgggacattgtgcagccaaacttacaagatacatctattggattctcaaacatccggacaaagagtttgtatacagataattccaaacgataaatttcaaagaaccagataatacttttataaataaatatcatccataatcagaacaatattatttaacttaaataaacgtgttttaatatacccaaaacagcaaattcaggaaatcagatagattaatcactttttacttgacagattcatagctgg

SEQ ID NO: 2224 - DNA, 1366 bp, unidentified
  source 1..1366: mol_type = unassigned DNA; note = element_316af09
  misc_feature 1..3: note = core
  misc_feature 4..107: note = LE
  misc_feature 108..1118: note = CDS
  misc_feature 1119..1366: note = RE
  misc_feature 1134..1364: note = bridgeRNA
agatggaatggtcgcctcccgccttaacggtctgtccggcgccgcggtctcgcttccagaacgtgcgacattgcaggttcggcagtcctgccgtcaaggagaatctgatggaacccacgatcattgccatcgatctggcgacgcgcgtcttccagatccatttcgttgattctgacaccggcgcaatccacaacaaggctctcaaacgcgcgcagctactaccgttctttgccaaccggcctgtatcccgtgtcgtgatggaagcctgtggcagcgctcatcattgggcaaggcaactggctcggcttggccacgatgtgcggctcattgcagcgcagttcgtgcggccattcgtcaagtcgaacaagaacgatgccgcggacgcggcggcaatctgggaagctgcgcagcgtcagggcatgcggttcgtggccgtcaagaccgaagatcagcaggcgatgctcgcgcttcaccggatgcggcagcaactggtacggttccgcgtcatgcaggtcaaccagatgcgcggtctgctctacgagttcggcgtgatcctgccgcagggtcgccgtgcctcgatcgaggccgccaaagccgcactcgcaacgctcgcagaccagttgccggcgatgctcacggaaagcctccaggaccagctctcacgaatgctcgtgctcgatgaacagatcgggcgcatcgagcaacgcattatcgaatggaggcgcagtgatgaagcgtgtctacgtatctcggagattcctggtgtcggtctgctgacagccactgcagcagtctcggtcatcggtcaggcgaaaaacttccggtctgggcgtgaatttgcggcttaccttggtctggtgccacgtcagaacagctcaggcggcaagatcaggcttggcggcatcagcaaacgtggcgacgtgtatttacggacgctactcatacacggtgcccgggctgtcatctcaagttcgaagcatctgcccgagagattgcgcctcctgttgacgcgacgtccgacgaacgtagtcgctgtcgcactggccaacaagatggcgcgaacaatctgggcgctgctggcttatgggcgaacgtatcaggcgacgccagcgcagtaaccatttgtcaccgcatttgatctcatccacggttgcacaggtgtattgaacgatggcaagacaggttggaccgcgcaaaggcaaacctgagacatttctcggaccttgagtccgctcatttagattaggacctttgcggcgaaatccattggggccggcgggcatgcccgcgatcgagtccggatataagtccgcaaccaccctcctcgccatgaacaattaccttgcaaatgggaggcgaccatata

SEQ ID NO: 2225 - DNA, 1715 bp, unidentified
  source 1..1715: mol_type = unassigned DNA; note = element_316e572
  misc_feature 1..3: note = core
  misc_feature 4..69: note = LE
  misc_feature 70..1230: note = CDS
  misc_feature 1231..1715: note = RE
  misc_feature 1270..1487: note = bridgeRNA
aagatgctatggggcgagcggcgaggacaatggcaccatcgtcgctccagcgaatcaacggagcgccccatgccacagctgaacgatttgagcagatccctcgtaattctcgaacaagatgcaacactaatcgccgtgatcgagatgggccagtcgaattggctggtcgccggtatcgtgcctggcgtcgagcgctcgccgttgaagaagctcgcggtcgatgagagcgcgttgctgaaactgctcaatcgctggcgggaggaagcggagaaagcaggacataggatcgaacggattgctatcgccttcgaggccggccgtgacggcttctggctggcgcgctggctccgggctcgcggtatcgaagcccatgtcattcacgcatccagcgtagccgtatcgcgcgagcaccggcgcgccaagaccgaccggcttgacacggaactgctcaaacgcgcgtttctcggctggctgcgcggcgagcgtgatcactgcaagatggtggcgattccgacgctggcgcaggaggatgccaagcggcccaatcgcgagcgcgaaagtctcgttggcgagcaaagccggatcgtcaacaggatgaaggcggcgctggcgcggctcggcatccgcggcttcaatcctaagctgaagaaggcggttgaacgcctcgacggcttgcgcacgcccgaaggcgagccgatcccgcccaacacattggctgaactcaagcacgacatggagcgccgccggctcgtgcgcagtcaaatccgggacattgaggggacccgcctggagcgcctcaagcaagcccccggtgacggacctcatgtcatggtgcgcctgttggcgcgggtgatcggggttggcgtagagacggcggacatgctggtgcaggaggtgctcagccgaaacttgcgcgaccgtcgggcggtggcgcgctatgggggcctcaccggctcgcctgacgagagcggcaagaagcgtcgcgagaaagggctggctcgatccggtaacgcgcgagtccggcgcggcatgatccaactggcatggcggtttctgatgttccagaagggcagcgccttggcgcattggttttacgcacgcacgaaaaatgcgcctcagacccgcaagacaatgattgtggcgctggcacgcaagctgctgatcgccctgtggcggctcgcgcgggagggcgcgatcccggagggtatcgtcctgcgtccagctttatgagcggagttacatagaaatcttccgacagcttcggcccgtcgcttcaagcgcgagagggtgccgatgacggttcgaggtggcggggtcccgatcgccccccttggctttcatgccgggaaaaagaatgggtccgccgcctcggagcttcgccgccgatgcgcatgagtgcatcatggtttgggtcctggacccaccggatacaaggttgtggcgcgattgatccgcgcccggaaagcgggctcccctctgatcgtcatcccgaccgcactaagcgtgccgtcgtgctcgaagctgtcaaggtatggcctggcaagggcggagtacgccgcaaggttggggcgtcggccaaccttgacagctcctgcgcgcgtcggctttgcaataccgcgggtcggggcgaagaaacggaactccaggtcgaacaaagaaaccgatcaagacaatgtgccccgctctgaaaccgcttgacaaaaaaggccccatac

SEQ ID NO: 2226 - DNA, 1352 bp, unidentified
  source 1..1352: mol_type = unassigned DNA; note = element_3178872
  misc_feature 1: note = core
  misc_feature 2..61: note = LE
  misc_feature 62..1093: note = CDS
  misc_feature 1094..1352: note = RE
  misc_feature 1096..1342: note = bridgeRNA
tatggaatggcccgcccctcttctccaccctgtccgggttggatgagggaaggataaggcaatggacgttagcattctcgggatcgacttgggcaagaacagctgcagcgtcgtcgggctagacccgagcgggcgggtggtgctgcgccggcggctgcggcgggagggcatcatcgggctcgcggcgaagctgccgggctgtgtggtcgcgatggaggcatgctgcggcgcccatcacctcggacggctgctggccgagcaggggcacgaggtgcggctgatgtcaccagaatatgttcgtccctacgtcaaggctcaaaagaacgacgaccgcgacgctgaagcgattgctgaggcggcgacccggccgacgatgcggtttgtcgcgctcaaaaccgaggcccagctcgatgtccaggttctccatcgcgtgcgcgaccggctggttggccagcgcaccgcactgatgaaccaggtccgcagcatcctgctcgaacgtgggatcgtcgtaccgcagggtcgacgcaagctgctcgacgcattggcggcgctgtcagcagagccggagggttcaggtgtggggccgcgggtgcggctgctgctcgacgacatgctcgaccaatggcgcagcctcgaccggcggatcgcggctctggacgacgagttcgccgggatggctcgcaacgacccggcagcacgccggctggcgaccatcccgggtgtcggcgtgctcaacgcgactgcgctggtcgccgcgatcggcgatgggcgcacgttcagccgcggccgcgacctctcggcctggctggggctggtgccgcgacaggcgaccacgggcggcaagccgaaattgctcggaatcaccaagcgcggcagcaaatatctgcgcaagctgatcatccagggggcgcgagctgctctgccctcgctgtccagaaccgcgacgccgcttggcggctggctgcgcgacttgctcggtcgtgcgcatagcaacacggtcgtcgtcgctctcgcaagcaagctggcacggatcgcctgggcgctactgcgcgaccagaccgcgttcgcttacggcgggccggtggcggcatagacgggatcggcttgcggcgatcacccggccgtcgcgagccgtagaagagtctgcgggtggtggaagcgagatggcctgacagtcaccggtgtcccgacagcctacggcagaaaatggcactcgatgccggcccctttatgaggctcgagacgcgcggattctccatcttggccagggttccgccctgagaccggatacgttgatgcagaccagtcagatcacctcgcacaagcctcttgcggacggggcgggccatacg

SEQ ID NO: 2227 - DNA, 1375 bp, unidentified
  source 1..1375: mol_type = unassigned DNA; note = element_317cf93
  misc_feature 1: note = core
  misc_feature 2..87: note = LE
  misc_feature 88..1119: note = CDS
  misc_feature 1120..1375: note = RE
  misc_feature 1141..1367: note = bridgeRNA
caatgggatggactcctcctcacctaccggcatctaagtgccaaactggtaagcgataccaccagcaaatggaaaggaggagtcaccatgaatcttagtagagttggagtcgatttggcaaagaacgtttatcagttacacggtgttgatcgtcacggcaagacgagctggaagcgacgcttgcgacgtggccagtggctgcaggcgttgttggacaagacagatcccggttgtgaggttggcatggaagcttgcaccggcgcccatcactgggccagagagctgcagtctcgaggttacacggtacggttgattgcgcctcagttcgtaaaaccctacgtgaagagcaacaagaacgacgctaatgatgccgaggcaatctgcgaagccatgagtcggccgaacatgcgctttgtcacggtgaagagtgtcgaacagcaggatatccaggccacacaccgagtgcgctcagagataaaagatcaacgcaatgcaaaggcgaaccagatccgcggcctggtggccgagtatggtctggttgcaccaacgactttgctcgcgttacggcatgcaattccctgttggctagaggatgcggataacggtctgaccgattacttccgcagcttgctgcacgggctgtggggcgatcttgttgctctgcatgatcgtatgaccgaactcgacaagcagatcaaaacgctcgccgacagcaatgaggtgacccaacggctgcaacaactacgcggtgtcggtccactggtagccacagcactggttgcgacggtcggtactggcgagcaatacaagaaaggccggcagatggcggcagcccttggacttacgcccagacaaagcagttccggtgacaagcaacgccttcttggcatcagcaagcgcggcgacgtttacttgagaacgatgctgatacacggtgcccgagccgtggtctcgcaagcgaaacaccgggaggaccgtctcagtcagtgggtgacgagtatctcgaaacgaagtcaccctaatgttgccgctgtcgcgctcgcaaacaaaacggcacgcatggcctgggccatgctgcgtaacgacgcgaactacgaccctgactttgcttttggctgagtcaggtaaaccaaggagaaactcaacagcgattgcttaagcaaactgcttgatggcaaacaggtcgaaccggcgtcggccaaacccgtgaacgtccgagtacttaaaagtacgtagaagcgattgggagctgacgcgcgaatagcccattatggcccggcatcaacgtatgccaactacagaggccgaatatacgtacgcagtcgtgccatggctgtcatcaacagagtgcttgcaaagaggaggagtccatata

SEQ ID NO: 2228 - DNA, 1325 bp, unidentified
  source 1..1325: mol_type = unassigned DNA; note = element_3180360
  misc_feature 1..2: note = core
  misc_feature 3..295: note = LE
  misc_feature 296..1093: note = CDS
  misc_feature 1094..1325: note = RE
agatggtatgaagagcggcgtaccttcctggtacgtgctcgaggcacagataatccatccggaggaagatacgccatgcagacccacgtaggagtagatctacatcagcgattttgctatttgacggcagtagatgcaagtgggaagaggttgaagcagtcgcaggtggtgaacgaaggagtggcgttgcgggcgtggctgcggcaggtgcctgggccgcggcaggtggtggtggaggcgagcgggttttggccggcgttcgcgcgcggtgcagcccgaagccgagcggctggtgatggtgcatccgcagcggatgaaggcgattgcgagtgcgcgtctgaagaacgacaaggtggactccgagaccctggcgcatctgtcgcgggccgatctgttgcccgaggcctggatggcgaacgaacgcacccagcaggtgcggctgttgacccggctgcggatcacgctgggccagcagcgggccaaggccaagaaccagctgcaggcggtgctgcatcaggagggcttcctgaagcccgttgcggatgtgttcggcaagcgcgggcgggcgtggctggcggagcttgccctgagcccggcggcacgggtggtagttcaggtctggctgcaggtggtcgaccagatgaacgccgcgatcctggaacaggagagaacgctgaagaagatggcacaggaggatgcacgcgcccgatggctgcagtcgatgcccggcatcggggcttattcggcgatggtgatcctggccgagatcggtgagatcgagcgcttccacaccaagcgtgcgctggccagctatgccggcctgacccccagcgtgcgcgagtcggcgggcaagcgcaagcgcggcggcatcggacaccatggatcggcaacgctgcgatggatcatgctgcaggtagcccaggtggccgcacggcgctcccccgcagccggggcatggctgaaaaagctcaaacagcgaaaacccgcgcaggtcgccctgatcgcactggcacgcaagctgctcacagccctctgggccctgctacgccatggcctctgcttcgacgaagccatcttcgctcgacaagactaaatcaggcaaaaacaaaacgcctggaaataaaaaactttacggtattttgcgacggttgcaaggtagcccggccagctcgctcatcctctgtccctcggagccagcccaacaggacatcttcagatggagcggccgggaagcgaatctcccttgtgtgccatgagcacgaatagaagtctgtacgcaatctgttcgcaaaatacccctggacaactacgcctctcttcataga

SEQ ID NO: 2229 - DNA, 1443 bp, unidentified
  source 1..1443: mol_type = unassigned DNA; note = element_3181080
  misc_feature 1: note = core
  misc_feature 2..227: note = LE
  misc_feature 228..1430: note = CDS
  misc_feature 1431..1443: note = RE
  misc_feature 13..236: note = bridgeRNA
ctacttagaaactggttgcaggatcgacgtccggccagactcggtttaggtactcggcgagacgctctctctatcggctgcccaccggcgtcattggtgtggctctctcatggcatgcgctctcgtcgggtaccgcgcgaggagaggctcgaaaggggtttgttctgctcgaagtagcaatgccctcctcgcttctacgtcgctggtgaacgaggaggtgcagtgcgatgggcgtgatcatcgggatggacccgcacaagcgctcggccacgatcgaggtcatcgaccagaccggtcgagtacttgaggtggggcggttcgacacggaccaggccggctacgcggcgatgctcgccgctggccgcggccagggtgcggtgggtgagcgggtgtgggctgtcgagggctgcaacgggatcggtcggcacatcgcgcaccggctggtgcacgatggggaacgggtggtcgacgtgccaccgaagctgtcggcgcaggtgcggatcttcgcgaccggcaacggtcgcaagactgacccggtcgatgcgcactcggtcgcgttggcggctttgtacgccccgggggagccgggtcttcgccgtgtgctggtcgaggacgacctggtcgtgatgggtttgatggtcgaccggcgtgatgagctaggtcgggcgcgtacgcagacgctcaatcggctgcatcggcttctgctggagctgattccgggcggcgcgaagacatttctgtccgcgccgcaggcccgcgcgctggtcgcgacggtcaagccgcgggacctcgtcgggaagacgaggcgccggttcgtcgtcgagctgatcaccgagctcgaggggatcgaccgcaagatcaggacggccgaacgagagctcgccgcgctcgtgcaggagcgcgggtcgagcttgctggagctgaccgggatcggcccgaccggtgccgcgcggctgttggccgatgtcggggacatccaccggttccgcgacaaggaccgcttcgcgtcctggaacgggaccgcgcccctggacgcgtcctccggggcgcagcaacggcaccggctgtcgcgggccggcaaccgtcggatcaaccggacgctgcacatcatggccgtcgtccagttgcgcaacccgacacccgggcgagagttctacgacgcacgcaaggccggcgggacgccctcgttgatggcgatgcgatcgctcaagcggcgcctgtccaacgtcgtgtacgcccgcatggtcgccgaccagaaccgacgcgacctcaccctcgacaccgatgatgtgacgggcccgggagggcaccggggcaacgactctgactccagcgtgaccggctcacaaccccacaccggctcttcggagaagcctcttcccggacccgtcaccaccgagcgtagaacgccgatccccgcaaggtcttgacctaaaggggtgc

SEQ ID NO: 2230 - DNA, 1517 bp, unidentified
  source 1..1517: mol_type = unassigned DNA; note = element_31929c8
  misc_feature 1..2: note = core
  misc_feature 3..243: note = LE
  misc_feature 244..1410: note = CDS
  misc_feature 1411..1517: note = RE
  misc_feature 7..225: note = bridgeRNA
cttgtatactcaatactgtaataatagattgagtatttcctttctttctgttgttataatatgtttaggcactgtggatttgtttcatataattgtagcttgactacctatggaggctcctaccacagttcctatttttttaaccatcaataagttagttagcgctagacgctttatcacaaggttatggtaaataggatctcgtgtcaaacgacagtgccaaaatcaacggaggtgatttagatgtacttagttggaattgatatttctaagtacaagcacaactgttttatagctactgaaacaggtgtgccactcaacgaatttgtctttgagaataatttagaaggttttaaactgtttcatcaggtgttatccaaacttgatcaagaccaagacataagaataggtcttgagtcaacaggacactatggaacaaatttaaaacagtttatcgtagcatctggatatacttatcttgagtttaatccctacttaacacatcagttttccaaggctatgtcgttacgtcggacaaaaacagataaagttgacgctaaaactatctcgaatatgttaggttctgttgactacaagaccttacatactcaattttaccacatcaacgaattaaagcaactcgtaagggaacgtgacgatattctcacgaatcgttctaaaacaatggtaaagctcacaaacttgctggacatcatatttccagagtttaaacccttttttaacaaccgattgggtgttactgcgctatttttacttaaaaagtataaatcaccagcaagaatctcaaagtttatcatgcacgattatgaatgtttaagatcagtttctaatggtcgattaacctatccgaagtttagtcgactgaagtcactcgcaaaagatacaattggcgtgcaatccattgtctacaacaagcgcatgttggctcttattagagattatgaatattttgaccagtctcttgatgaaatagatcaagaaataattcaactatttagtgaagtaaatacgaaacttagaacgattcctggacttggcatcatccaagcagcaaccatctatgctgagattggtgacatccacctcttttcaaatcctcagaaactcatcgcttatgtcggttttgatgtttcaattagtcaatctggaatgagtgaacatcatggaaaaattgtcaaacgtggatctccattacttagaaaagccatatggacatatgcgttaccttctttaagattcattccaactttaaatgattattatcatagaaagaaggctgaaggtaaacatcatagggtcgctttaacacatgtctgtcgcaaactcattcgtataatctaccacattgagtacaatcaaatcgattttgacaataaaaaaagcaaataattagaatcaagatgtagctacttgaaatctaatctatacatcatgggcttcctatggaggtcttttagtatttagtggatatttatgcttgacttctaatagttagt

SEQ ID NO: 2231 - DNA, 1492 bp, unidentified
  source 1..1492: mol_type = unassigned DNA; note = element_3193f1d
  misc_feature 1: note = core
  misc_feature 2..246: note = LE
  misc_feature 247..1347: note = CDS
  misc_feature 1348..1492: note = RE
  misc_feature 40..216: note = bridgeRNA
cgttatcttgttgacagccctaaaagaggatcatagggactgtcggccgaccaatcccggcatggtgtcttgcccctgcttatccaatagtccggggtgttgccacggggattggatggcagcaaggtgattgctgattagaggcacggcgccaaaaacggacgccagtcgtaacgtgaatgtaagactttgctaccgacggttggccgaccttgaacaattaatcggtccaaaggagcaccggtcatgaaaaccgaagacatccagatcttcctcggcctcgacgtcggcaaaaccgaccactgggcctgcgccgtcatccaagacggcaccagaatctggaacaaaaccctgcccaacgacgaagccaaactcaccgccgcgtatcaaaagcttctagctcaaggacaggttctggtagtcgtggaccaacccgccaccatcggcgcgctggccgttgttgtcgctcagaacctcgatattccggtggcctatctgcccgggctctcgatgcgccgtatcgcagacatgtatcctggctcggcgaaaaccgacgaaaaagacgccttcatcatcgccgacgcggcacgcaccatgccacacaccttgcgcagcatccgagtctccgacgaggacgaagcaaccctgggcatgctcaccggattcgacctggacctggcacggcagatcacccagaccagcaaccggatccgcgggctattcacccaaatccacccgccactcgaacgtatcctcggcccgtggctggaacacgacgccgtccttgaaatcctcgctatctggcccactccagcacaactgaagcatgccggcaaagcgcggatcgacgcgaagctgaagaaatacggtgcccgccggcacactgcctgggccgtagccatcatggacgcgctcgatgagcaaacagtggtcgtggtcggcaccgatgctgctggactggtgatccctcacctggcccggcaactaatctcgttgcacgccccgcgggtagatgtagccacgcacttggaaaccctggtggaggctcaccctctttactcggtcctgacatccatgccaggggtcgccgtcaggaccccagcgatcatcatcgccgagacctccggcaagaccttcaccagcgccgcagcgttgtcctcctacgccggtctggcaccaaccacgcgtcaatcagggacatcgatcaagtccgaacgcgtaagtcattcaggcaacaaacgcttgaaacgagccctcttcctctcagcgtttgcgtccatccgttttgatccgaccagtcgggactactatgaccggaaacgggctcaggggaagcggcatatatgaccggaaacgggctcaggggaagcggcataaccaagcactcatcgcgttagcccaccgacgactcacagtactatttgccatgatccgagacggctcactttatgacatgccagagctgaaaatagcttcactttttacacagggg

SEQ ID NO: 2232 - DNA, 1544 bp, unidentified
  source 1..1544: mol_type = unassigned DNA; note = element_31960a4
  misc_feature 1..4: note = core
  misc_feature 5..268: note = LE
  misc_feature 269..1534: note = CDS
  misc_feature 1535..1544: note = RE
ctcactggtgcaccatccttgtgtcactgatctcggatggattggtgatgcgcccgaggtgccgccaggtcatcgcccagctcgctcgacccggttgaggtccatcgtgagatatgcgaggcctggtggttgcccgggacgtgccgaccgtcgacagggctgagcgccgtcgagcgccgatcagtgagcgaaccggctgccacgtccgggaaccaccggtaccgcacgtgggcgcctccccactgggtctagcagcgaggaggctgacgtgaagtctgccagcaccaccccgaacagcacactgcccgacgagccgcccaacggtcttaccggcgggttggattggtcgcgtgatgaccatgccgtctcggtcgttagcgaccgcggccgcgaactcgtccggcacaccgtccagcacaccgccgacgggttgcgcgagctggtcgccgtcctcatcgacgccggctgtcacgaggtcgcgatcgaacgcccggacgggccggtagtcgacgcgctgctcgccgctggcctgaccgtcgtggtgatcaacccgaacaaggtcaagaacctgcgcggtcggtacggctcggccggcaacaaggacgaccggttcgacgcgttcgtgctggccgacacgctgcgcaccgaccgagcccggctgcgacctcttatccccgacactccgcccaccgtcgcgctgcgccgcgccgtccgcgcccgtcgcgacctggtcgccaaccgcgtcggcaccgcgaaccagctgcgggaccacctcaagcgagttttccctggcgcggtcggcctgttcgccgatctcgacagtgcgatcagcctcgccttcctgacccgcttcaccactcagcagcaggccgactggctcaccccgatccgcctcggaacctggctggccaagcagggttactccggcaaggtcgatccggcggtgttgcacgcccgcctgctcaccgccccgcgcggccccatcggcaccgaggccgacgcccacgctgcgatcacccgcggctacgtcgctgtgctgaccgtgctgctcgaacagatcaaagccctcagtaccgagatcgagacccagctcgcctcgcacgctgacgcgcacatcttcaccagcttgccccgcgccggaaaagtccgagccgcccggctgctcgccgagatcggcgactgccgcgcccgcttccccacccgagaatcgctggccagcctggccggcgtcacaccctcgacccgacaatcgggcaagagccacgtcgtcgcgttccgctgggcctgcgacaaacaactgcgcgacgccgtcaccgacttcgccggcgacacccgccgcgccaacccctgggctgctgacctctacaaccgtgcccgaacccgcggccacgaccacccccacgccgtccgcatcctcgcccgcgcccggctcaacatcatctggcactgctggcagacccaccaggcctacgaccccgaacaacacctcgcgctccaacgcatcctcaagcaagatcaactcgaggcggcttgacacagggctt

SEQ ID NO: 2233 - DNA, 1429 bp, unidentified
  source 1..1429: mol_type = unassigned DNA; note = element_319db4c
  misc_feature 1: note = core
  misc_feature 2..230: note = LE
  misc_feature 231..1253: note = CDS
  misc_feature 1254..1429: note = RE
  misc_feature 18..239: note = bridgeRNA
ctgatggaggatcgggcgcatggcgcgacggtgctccgcagcgtcgaggtcctgggtgggcggtctctcgaatgccctgccgatgccggcttggtgtctggctttcgaacgaacgggccgctcgcccgggtccggtcacggcgtggctcgaaacaggagcgaggcatcgacaccctcatcaggactgctcgccgtggcgcgccacgacgttcagagctgaggaggagatgatgttcgtcatcgggatcgacccgcatcgcgggtcgcacactgccgcggtgctcgacggcactgaggagctgctcgacgagttccgtgtggtggccgatcgccggcagcgccaacggctgctggagtgggcggcgccgttcatgccgcgggtgtgggcggtcgaaggcgccaccgggaccagggcgctgttggcccaacagctcgtcgccgccggcgagcaggtgctcgatgtgccgccgaccctgtcggcccgggtgcggctgttggactccggccgcagcgacaagaccgacagccacgatgcccgcgccgtcgcggtggtggcgttgcgccaccgctcgctgtggccggtccgagccgaggacgaggaccacgtcgccgtgctgcggctgctggccaagcgacaccacgacctggtcgccgcccggacccgcgcggtgtgtcggctgcacacgacgctgtgccacctggccgaaggccatttccccaaacggatgaaggcgtcgcaggccgccgcgatcctggctcgcatccgtcccagcgtcccggtgtcggttgagcgcaaggccctggcccgtgacctactcggcgagatccgccgcgtcgaccgggaccttgccggcctcgtcgcgcggatcaagaccgccgcgaccgcgtcgggcaccacggtcaccgacgtgttcggcgtcggccctgtcgttgctgcgtatctgatcggccacagcggggacatccgccggttcccgaccgcggggcactacgcccgctacaacggcaccgccccgatccaggcctcgagcggaccgaccacgcggcaccggctcaacccccgcgggaaccgccaactgaaccacgccctccatatggccgcggtgacccaggtccgcaacgacacgcccggccgggcctactacctccgcaaacaagccgcgggacacagccgcaaagaagccatccgcgccctcaaacggcgcatcagcgacgccgtctaccggcaactcgtcgccgacagccaccgctgatcggcgggcccgggaggacaaacgggaacgactccaatggccagcgtgaccggctctgcaccctgacggccggctcttcggtcaagtcactcccggacccaccacgaccctacgaccaccgcccccaggcgtgcttcaacgcgccccacggccaggcccttgacacaaacagggtt

SEQ ID NO: 2234 - DNA, 1412 bp, unidentified
  source 1..1412: mol_type = unassigned DNA; note = element_31b0891
  misc_feature 1: note = core
  misc_feature 2..89: note = LE
  misc_feature 90..1136: note = CDS
  misc_feature 1137..1412: note = RE
  misc_feature 1209..1407: note = bridgeRNA
caatgggatggactcctcccccctaagaggcatcgagtgccagactggaggttgtgaacaaacagtcgcgcaggcgagaggagtccgagatgaagattacgcgcatcgggttggatctggcaaagcaggtgtttcaggtgcacggggtggacgagaaggggcgcaaggtggtgtcgcggcagttgaagcgagcgcaggtggaggaattcttcagagggctggagccgtgcctggtggggatggaggcctgcggagggtcgaaccactgggcgcgggtgctgggggcgctggggcacgaggtgaagctgatggcgccgcagcacgtgaagccgtacgtgaagggcaacaagaacgatgcgaatgacgcggagggcatctgtgaggcggtgggtcggccgaacatgaggtttgtggcgttgaagacggtggagcagcagaggctgcaggcgctgcaccgggtgaggagaacgctgatgcgcaaccgcacggcggcggtcaacgagatacgggggctgctggcggagtacgggatcgtggtgagcgtgggggtggggaagttgcgggcgcgcttgccggagttgctggaggagacggacaacgggttgccgatgtcgtttcggccggtgctctcggggctgaaggaggacctggagtacctggacaggcgcatcggtgagatggacgcggcgatgctcagggtggtgcaggaagacgatagagcgcgcgagttgatgaggctgcgaggggtggggccgacgacggccacggcgttgctggcggcgctgggcgacggcaggcagttcacgaggggtcggcaggcctcggcctgggtggggattgtgccggggcagcacagcagcgggggcaaggagcggctgctggggataagcaagcgcggagatgcctaccttcgcacgctactcatccacggagcgcgctcggtggtgaacagttgcaagggcaagaccgacccgctgagccgttgggtgcaggagctgtgcgcgaggcgtaacaagaacgtggcggcggtggcgctggcgaacaagacgatgcgcatcgcgtgggtgttgatgagccagggcgggcgctacgacccggactacggggtgaacaagcaggcagagcagacggcctgaggggcaaagccccggcagacgggggtgtgatcgaagggtctggcaggtgtcgtaaccaggagcgagtcgaacgacgattgcgtagcaagaagagtggatggcgaactgatcgaatcggcgtgtgcagaccctttcagagcccgcagagcctcgagctcgatagcccgatcaggagcacacgcgcggatcgcccacctctagaggccggatatacgtgcgcagtcgatccttacgccaaaagcacttcctgcttgcaaacagggaggagtccatata

SEQ ID NO: 2235 - DNA, 1238 bp, unidentified
  source 1..1238: mol_type = unassigned DNA; note = element_31b6886
  misc_feature 1..4: note = core
  misc_feature 5..259: note = LE
  misc_feature 260..1228: note = CDS
  misc_feature 1229..1238: note = RE
ctcactggtgcaccatgcttacgtcggcagttgtcaggctgctgatgcacccgaggtgccaccaggtcatcgccctgttcgcttgacgcatcagacgtccgttatgagttccgcgggatctgctggttacccgggacgcgccgaccgtcaacagggctgtatgcgcaggtgagcgccgaacagtgagcagacaggcagcggtgtcccggcaccgcgcatcagggtgcctccccactgggctagcagcgaggaggctgtaatggattatcccccggacacgctgcctgcagtaccgccgggcggtgtgacctgcggcatcgattgggccaacgacgatcacgcggtctgcgtatgcgacatggcgggcacggtcgtgcggcgattcacggtcaggcacaccagcgagggcctggttgagctggtgcgccgcctgaggaaggcagacgccagcgaggtcgcgatcgaacggcacgacggcaaggtcgtcgacgcgttgctggaggccgggctgaccgtcgtggtcatcagcccgaatcagctgaagaacctgcgcggccgctacggctccgcgggcaacaaggacgaccgcttcgatgcgttcgtgctggcggacacgctgcgcaccgaccgggcccggctgcgcccgctgctgcccgacagcccggccaccgtcacgttgcaccagacctgccgggcccgcaaagacctggtccagcacagggtcgctgtgtgcaaccagctgcgcgcccacctcaagatcgcattccccggtgccgtcggcctgttccacgaactggacaggccgcacatcttcacctcgctgccccgctcgggcaccatacgggccgcccggctgctggccgagatcggagactgccgggcccggttcgccacccccgaagccctcatctgcctggccggcgtcgccccctccacccgcaaatccggcaagaccaccttcgtcgacttccgctgggccgccgacaagcaactccgcgacgccgtctgcgacttcgccggcgactcccgccacgccaacccctgggcagccaggctctacaacgacgccatcgcccgcggcaaagaccatccccacgccacccgcatcctcgcccgcgcctggctctacatcatctggcactgctggcaagacggccacgcctacgaccccgcgcgccacaacgccctccagcgcatcttcgccgaccaacgaccagcggcagcttgacacagggcta

SEQ ID NO: 2236 - DNA, 1468 bp, unidentified
  source 1..1468: mol_type = unassigned DNA; note = element_31b762f
  misc_feature 1..3: note = core
  misc_feature 4..225: note = LE
  misc_feature 226..1449: note = CDS
  misc_feature 1450..1468: note = RE
  misc_feature 7..226: note = bridgeRNA
tctaatggaacccgacatcgtcttttaggagatgatgtcactgaaccgctgaccggtgagcactgtcacaatctgagcgtcgagctctagtcggagaacgtgccccggtcagttggtgaggacggcggagaaggctggaggggtgtcgtgctgcgagcactggtccattaggtcgccaccgctacctcgaggttcattcatggacaacgaactggaggtggtcgaatgatatttgttggagtggattgggcggaagtccaccacgacgtgtgcgtcatggacgcagaaggtgtggtgctcgcacgcaaacggatcccggactcactagtgggtcttggcgaactgcacaccatggtggccgagcacctgggtgacgatgatgagcccagtgaagtgatcgtcggcatcgagaaggaccggggtctgatcgtgacggcgttgatcgcggcggactaccaggtctttgcgatcaacccactggccgcctcgcgctaccgcgaacgccaccacgtctcgggggcgaagtccgaccccggcgacgccaaggtcttggccgacttagtgcgcacggatcgacacaaccaccgcgaggtggccggtgacagtgcgctcagtgacgcgatcaagttgctcgcgcgcacgcaccagaacaccatctggacccgccaacgccaagtgaactctctgcgttcggccttgaaggactactaccccggggcgctggaagcctttggaactgacctttcgggacccgacgcggtggcgattctggccatcgcacccacgcccggcgtcgcgcgaacgctctcgcgcgcccggatgacgacggcgctcaagcgagtggggcgatctcgtcacctcgaggaacgtgtcgagcggatctacgaggtgttgcaccgcgagcaactgcgccaacccgccaccttggagaacgcctacggcgtcaccaccgaagcggcgatggccaacatcgtccagctcaacgcgtcgctcgccaagcttgaggcgtcgctgtcggagcattttaagaagcacccgagcgccaaggtcatcctctctcttccaggaatggggacggtcctgggcgctcgggtgctgggcgagttcggagatgatccgaaccgctactacgacgccaattctcgcaggaactacgccggcacgtcaccaatcactagagcgtcgggcaaatctagagtcgtcctcgcgcgccacagtcgcaacaagcgcctggccggagcgctggatcagtgggccttcagttctctcctcccgtcgccgggagcacgtcactactacgacgagttacgagcccgtgacaagcaccaccgaaaggccgtgcgccagctcgccaacaagtgggtcggcatcttgcacgcgtgcctcgagaacgactgtccctacgacgaagagattgcgtggtcaccgcgaaaagagcgagccgcttgacatttacgaccaaggggtg

SEQ ID NO: 2237 - DNA, 1476 bp, unidentified
  source 1..1476: mol_type = unassigned DNA; note = element_31ba81d
  misc_feature 1: note = core
  misc_feature 2..252: note = LE
  misc_feature 253..1461: note = CDS
  misc_feature 1462..1476: note = RE
  misc_feature 47..248: note = bridgeRNA
cccgttaccttgttggtggtcgctggcggggaagtgttggcggctgggccagcggtggtcggcatgatgtcttgcccctgtctactcaatgatccgggggtgttgtcaccgaccatccgcgcggctggtggtgaccgctgatcaggggaacgccccgaagacgtgactgtcgaggtctttcgtaacgtgggtgcggggcgaccagctcaaggggcgctggccgtccacccctacgacggacgggatgacgacatggtcaccgacgacatcgacgtgttcatcggcatcgacgtgggcaagtccgaccactgggcgaccgccttgacccgagacgggaagaagctctttgatcgggctctccctaacgacgaggcccgcctgcgtgatctttacgaccgtctcggctcccatgggcgggtgctggtggtggtggaccagcccgccaccatcggcgccctggccgtcgctgtcgcccaggacgagggcttggcggtgggctacctgccgggcctgtccatgcgcaggatcgccgacctgactccgggcaatgccaagaccgacgcgagggacgccgcggtcatcgccgaggcggcccgcaccatgccccataccttgcgagcgatcagctcctcggacgaggacgccgcggccttgggtatgctcacgggcttcgacctggacctggcccgtcaggtcaaccagatctctaaccggatccggggcctgtacacccagatccaccccgccctggagaaggtcctggggccctggctcgagcacgacgccgtcctggaggtcatcgcctcctggcccacccccgccgccctgcgcaaggccggacgaggcagcgtggacgccaagctcgaggcccacggcgccagacgccacaccacctgggcgaacgccatcatcgacgccctggactcccagagcgtggtggtcgtcggcaccgacgccgctggcgtggtgctcccgcacctggcgcgccagctcgcagccctgcacgcccagagagcggacgtcgccgcgaaggtcgaggccctggtggaggcccaccctctttacgaggtcctgacctccatgcccggcatcggggtcaggaccgccgccgtcttcatcgccgagaccctcgggcgcaccttcgaaaccggagcccacctggcctcctacgcaggcctcacaccagtcacccgcagatcaggatcctccatccgaggcgaatacgtttcccacgcaggcaacaaacgactcaaacgagcaatgttcctgtccgccttcgcatccctacgctcagaccccacctcaagggcctactacgaccgcaagatcacccaaggcaaacgccacaaccaagccctcatcgccctcgcccaccgacgcatcctcacactccacgccatgatccgagacggagccctctacaaccccaacccgacaacacacctgccaacagccgcttgacacaccacatagggg

SEQ ID NO: 2238 - DNA, 1434 bp, unidentified
  source 1..1434: mol_type = unassigned DNA; note = element_31c15e8
  misc_feature 1..3: note = core
  misc_feature 4..122: note = LE
  misc_feature 123..1160: note = CDS
  misc_feature 1161..1434: note = RE
  misc_feature 1186..1379: note = bridgeRNA
agatggggtattcggctagcgccccatcttcgacagcgatgcagggaggtgctgcgcttcgagctgatgatagaacgtggtctgtgagccacagccacaagcatcaggaaaggaagcgcagcatgaagcactatatcggcctcgatgtttcggtgaaagagaccgccgtttgcattgtcgatgacactggcaggatctgccgggaattgagagtggtcagccacccggacgatctcctcgccgttctgaaggatcctgccttgaacattgaacgggtcggcttggaggcggggcccttatcgcaatggcttttcgaggggctggcgagcgccgggttgccggtcatctgcatcgagacgcgccatgtaaaagcgttcctgaaggcgcagccgaacaagacggatcgcaatgacgcacgcggcattgcgcagatgatgcgggtcaacctgtatcgcccggtgcatgtgaagacgctcacgagccagaagcggcgggcactcttgactgcccgcaagctgctgcaggggaaggcgatcgccatcgagaacgacatccgcggtcttctacgcaatttcggcctcaaggtcggtgttgtgggaacggtgaagttcgaggcgcgtattcgcgatctcgtcgcaggcatgcccgatctcgaagagatcatggcaccattgcttgccgctcggcggaagctgcgtgaggaattctctcacctgcaccgaaaagtattgacgatcaccaaagacgataaaacctgcaaccgcctaacaactatccccggtgtcggccccatcactgcgctggccttcaccagcaccatcgatattccgcagcggttcaggaactcgaaggctgttggaccgatactggggctgacaccgaagctcaatgagtcgggagaaagcaagcgtgttggatgtgtatcgctgtgcggtgacgcgatgatgcgaacgctgctttatgaagccgcccaagtgttgctgacgcgcgtgacgaaatggtcatggctgaaagcctgggcgatgaacgtcgccaagcggcgtggcttgcgtaaggcaatcgtcgcactcgcacgtcgcctggcggtgatcatgcatcgcatgtggctggatggcaccgaattccgctggacgcgagaagcctcagcggccgccgtttgactgagaacgccgcaaagaagggaaacaaagttccgccaaccggtggaaacacgtccttcgcaggacgatggatgaggtgagttcgcttagtgtcttgtgccgatcgcatcgtgcggtcaggacgcgattcagattgggccacctcattctcctggtcccatgctgggagggcaaaacgccgatcccgaagagaagcgaggccctgcggaagacgccaaaactccggacacattgaaagctcgaaagcgcttgacctcaacacgccgaatagaga

SEQ ID NO: 2239 - DNA, 1567 bp, unidentified
  source 1..1567: mol_type = unassigned DNA; note = element_31c585d
  misc_feature 1..2: note = core
  misc_feature 3..211: note = LE
  misc_feature 212..1438: note = CDS
  misc_feature 1439..1567: note = RE
  misc_feature 22..234: note = bridgeRNA
cttgtataataaaatcagttagattttactacactttcctttcttttagttttatattaaatctcctataatgaagttacaaacgttgtggagtgtgtcatgacaaacctacacttcgagtgtgcaatggagggtacacccacgacatagttgataaatgtgaatgagctagtgacacttcgagtgtgtatttacaaggttacatttagctatgtttgtggtttcacaatgtttgaatcaatcaaacaaggaggtttttaatttgatattcatcggtatcgatatcgcgaaagatcatcacgatatcgccatcatcaacgattgtggggaaattttgaacagccatctttatattgagaattcagcttcagggtttaaaaaacttcatatggaaatcagagcccatatgaagtcaattcaagacattcatataggaatggaagaaaccgggatttaccatgaaaacctacgagattttctgatatcacatggttataacgtttactccataaatcctaaactaacttaccatagtcgtctttcttcgtctccacgtcgaactaagacggataagttagatgcgatagccatcacaaggtatattatgaacagttataggtctctccatccctatacaccatcattataccacctcgatgagttaaaacaattatcacgtagttaccatgacaagaaaattttactttctaaagctaagactgaactaaagcgacttcttcaaattacgtttccagagtttttaaagcatttcaacccttatagcaagtgggtacttgatattcttaagaattatccaacacccaatcattttaaaggactccatattacagcacttgcgcagcgtattaaaaccaaacgtgatcgacttgaagatgcgtcacttcttaaacaaatcgctatagattcgattgggcgcagcaatgaattacaagttattttaatgacggtggccattgatgacctgattcactatcaagctcaactggaagttctaaaagcattgattagtaagaaaatgcgtcttttcccaaaaatactatccatgcctggcgttgggccaattaacggcgcaaccatattaggtgaaaccggtgatattcaccgtttttctaataagcatgaatattacgcattttatggctgtgatccggttatccatgaatccggtaacttcaaacttaaacgctcaagactttctaaaactggaaataaatttctaaggaccgctatttatagtgcatcacgtgtagcttgcgtaggtccagctaaagacaataagtttcgtcgaaagtatttatcaatgacccataaagaaaacaagcatcataacaccatcattttcgcagttgcgaaaaacatggttcattcactttttacgatgattaagcaagataaattttattatgatcaggcctaacttaccttaaagtagcttttaaatcttaataacaccggttctttgaacctcttttaaatatgccttaatttctcatcacatttaattcttaaacttttagtgatttttacttgatttctttatagctag

SEQ ID NO: 2240 - DNA, 1571 bp, unidentified
  source 1..1571: mol_type = unassigned DNA; note = element_31c9aad
  misc_feature 1..2: note = core
  misc_feature 3..249: note = LE
  misc_feature 250..1425: note = CDS
  misc_feature 1426..1571: note = RE
  misc_feature 3..227: note = bridgeRNA
ctcgtattatatagtagtagtttttatagaccctctccaaggtctgtatgctatactattggagatactgtggattgttttattcctcctaccaccagatggtttgagaaaggctacaaccacagtctctttgtatatttgttaatcagttagataccgcatgacggtttatttagaacgaggttacaatcgcaaggagtaccagtggttctaaaacagtatcgaatatttattcaaaggagaaatgctatgatttacgtaggaattgatgttgccaaggataagcacgattgctttatcacaaactcagatggtgagatattattcaaatcttttaccatctctaataaccgtgaagggtttgaaactttatctcaaagaatcaaatctgtatcagatgatttaaccaatgtaaaagtaggacttgaagccactggacactatagttacaatcttctgggatttcttcttgataatggtttcccgacctttgttatcaatccgttacatacaaatctttacagaaaaagtctaagccttagaaagacgaaaacggataaagtagatgcccatacaatcgcttctatgattatgtctgacgtgaacttaaagtcctactcagacacatcttatcacaacgaagaactaaagtcattaactcgttatcgttttgataaagttaaggaacgtgctgcgttgaaatcgtccatttcaaggctcgtgtgtattctgtttccagaactcgaaaaactcgttccaacactccatatggcttctgtttacgctttacttgctgaatttcccggtgcatcgactgttgcttcagcacatctaactcggcttacaaatctgctttctgagagttccaaaggtcgatacggtaaagatattgctcttacttttcgcgatgctgcacgaaattctatcggatcgcatatgccagcaaaatctttggaactaaaacataccatcaaacttattcaagaactggatgcagagattgatgaaatcgaaaatgaaatcaaatccattatggatcaaattaattctccaatcttaaccattcctggaatcagttatcgtatgggcgcaatgattattgccgaaatcggtgatttcagtcgtttcgactctccagataaaatacttgcttatgcaggtatgtctccttcaatctatcaatccgggcaattagataattgttatgcccatatggaaaagagaggttccagatatcttcggtatgctctctataatgcaaccaaatacgtctgtcattgggatgaatcctttggttcatatcttgccaagaaacgtgcagagggaaagcattataatgttgctttatctcatgccaccaaaaaacttgtaagaatgatctatgccatggaaaaatccggacaagcatatatcaaatctgcgtaactttttctaaaataaatatttcgtgtcagagcacctaacaagatgctcttattgtcatgcagttttcaatgttcatatatatctgaaatgcatttccgcaattcattcaaaaatttcattttaagacttgacttttaatagttagt

SEQ ID NO: 2241 - DNA, 1359 bp, unidentified
  source 1..1359: mol_type = unassigned DNA; note = element_31c9d47
  misc_feature 1..2: note = core
  misc_feature 3..250: note = LE
  misc_feature 251..1108: note = CDS
  misc_feature 1109..1359: note = RE
  misc_feature 1128..1350: note = bridgeRNA
ttaatgggatggtctgccccacctcctgcgcgatactgtgcgcgtccacctcaaggagagcgaccatgagcgagcaccacgtccacgtcatcggcattgatctcggcaagaactggtttcacgtggttgccatcgatgagcgtggcaatgagctatttcgcaagaaactcaaccgcgcccaactcgcagagttctcggtgactgcgccgccgtgtgtgattgcgatggaggcgtgcccgggatctcaattttggggaggcgcttccacgaagcgggccacgagttgcgcatcattcctgcgcagttcgtgaagccctatttgaagtcgaacaaaaatgatttcaatgatgcccaggcgattgccgaagccgccagtcgcgggagcatgcgctgcgtaccattgaagacaaccgaccagctcgaacttcaagcgctacatcgggtgcgacagcgctttatcgtcgagcgaacggcggtcgtcaaccaaatgagagcgctgcttctcgaacacggcattgctataccggtggggcgcgcgctgttcgcccgacgaatgccagcagtattgatcgatgcagacaacggcttgtcaccgagattgcgccagctcttggctcggctgcggcaacgatggcaattgctcgatgaagagatcgaagtggcttcgacggaaatcactcaaatcgcgcgtgagtcagagctatgccgccgtgtgagtactgtgccaggcgtcggccccatcgtctcgaccgcgctcatagccgcagtgggtaacggcgttgcgttcaaaagtgctcgagatatgtcggcctggttgggactcgtgcccaggcagtattcgaccggcggcaaatcaaacctgggcggcatcagcaagcgcgggaacgcctacctgcgaatgatgatgatccagggtgcacgggccttgatgatccatatgaagcgcgatcaatctcgaatgggcttgtggcttcgtgaactagagcagcgaagtcatccgcacgtcgcgctcattgcgctagccaacaagatcgtccgaatctgctggaaggtattgacgagccaagtgccatatcgacaatttccagacgcacccgtagtcgcctgagaacaaagaagtgtcgaagtcctgttttgcgagccctgattaactgatgacacagaaccgttgaccggcatgccaagagcccggctaaaaaagcagtcttccatgactgaacgctttattgggtttggtgtgcgcggattccatcatggccagcagtcatgcgctgcgcgaacaggccggatacattgacgcaaacgttgttctgtcgaagcggaaaaccagcgacttgcaaatccggggcagaccataca

SEQ ID NO: 2242 - DNA, 1355 bp, unidentified
  source 1..1355: mol_type = unassigned DNA; note = element_31e4112
  misc_feature 1: note = core
  misc_feature 2..69: note = LE
  misc_feature 70..1074: note = CDS
  misc_feature 1075..1355: note = RE
  misc_feature 1121..1353: note = bridgeRNA
taatgagatggtcacccccaccctgtgagcggtacgctgacagggtggattattttagagggcaccatcatgcaaaacgttgcgcttattggtatcgatctcggtaaacattcttttcatattcattgtcaggataaatctggcaatgcgcttttgcgtaagaagtttacgcgtacgaagctgatgcagtttctggcaacatgtccatcctcagtagttgttatggaagcctgcgctggtgcgcattttatggcccgacgtatcagcgacatcggtcatgaagcaaaacttatctctccgcaattcgtgcgtccgtttgtcaaaagtaataagaatgattttattgatgcagaagccatatgcgaagcggcttcacgaccatcaatgcgttttgtccagcccagaacagaaacccagcaggcaatgagggcattacaccgggtcagagaatcgctcatcagagataaggtgaaaacaaccaaccagatccacggtttcttgctggaatttggaatcagcctgccgacaggggatgccgtaataaaacggttgtctctggtgttggctgaacacgaaatacctgaatatctgagtcgcttgctgatgaaattacatgctcactatctttatcttattgagcaaataacagaactggaatcagagttaaaccagtcaatcaaagctgacgctactgcgcaacgcatcatgacaatacccggtgttgggccgattacggccagcctgctctcatcccagcttggtgatggtaaacaattttcatgcagcagggattttgcagcatccacaggacttgttccccgacaatacagtaccggtggtaaatcaacgctgctggggatcagcaaacgaggcgacaaaaatttgcgtcggttacttgttcagtgcgcccgctcgttcatgatgcggctggagcatcaacagggcagactcgctgaatgggttcgaaagcaactcgacaacaagcattcgaatattgtcgcctgcgctctggcaaataaactggcccgaatagcctgggcaatcactactcagcaaaaagaatatcaggcctgatatagatactgacaaaactcaattagcttattttaaacaataagatataagttacctgtctggttttgcgaagactgattattgatgacatgaacggtaaatcgacctgattaaaaacctaacagagaaaatggctcactgaagccgagggcctttttaggattatcaggtgcggaactcatcgaggcgcgggcctccttgcccacagagacgccggatagatttaagcaagcccaccattaatcaaaaatcagtgttgcaaaaacgggggtgaccataga

SEQ ID NO: 2243 - DNA, 1373 bp, unidentified
  source 1..1373: mol_type = unassigned DNA; note = element_31eda95
  misc_feature 1..2: note = core
  misc_feature 3..256: note = LE
  misc_feature 257..1303: note = CDS
  misc_feature 1304..1373: note = RE
  misc_feature 34..208: note = bridgeRNA
cttgtatcttggttgtaactgccccatccctgcgatcccgtgttagttggggtcagatggggtttcggcgggaggccgatcacaccctgaggcgcctaagttctgcagcctggattatagataggccccccgcccttccttttctaacgccgtggagaatccgaggccacatgagcctgcattcacaaggtcggcgagagaggttgctcagggtcggggagccgagaccagtctaatccaagccgtgaggacacatatgtcaaagaatcctgcaactgaagtccaagttttcgtgggagtcgacgtcagcgctcgcgaactgagcgtcgcagtgcgttctgcaaccacggatcgcgagggagtccagacttttggcaacaatgcggctggacatcaagctctcctcgatcacctgctgcgaggaaaacggcgtgctcggatttgtttggaagcaagcggcaactacagcttagatctggccttgacgttgcatgcccacccccgggtggaagttagtgtggtgaaccctcgtcgcgcccgacgtttcgcggaatcacttggggagcgcagcaagaccgatccggtcgatgcccatgtgctttgccaatatgctgtgcgcatgccttgggaaccttgggtcccgcccagcgcgttggccttacgtttgcgtggcttgacccgcgccatcgaagctgtgggtgttacgcaaacacaggaaaagaatcgtcagcattcgttgcaagcaagccaggctctatctacgttcgtgatcagggaactgcagcggcacctggagtacctgcagctgcgaatcacgcggctgcggcgcgaggcattgcgactcatcgcccgcgatcccgaactggatcggcgtttccgtctgatgctcacgaccccgggaatcggggaaaccagtgctttgcaaatcctcggcgagttagttgtgctgcccgccactctcgatgctcggcagtgggttgcctttgctggactagacccagttcgttttacttctggcaccacggtcgacaagaaaccgcgcattagccgagggggaagtcgtcacctgcggcgggcgctgtacatgccggcgttggttgccgtacgccatgagccccacctgcgagctttctttcagcggctcctggctcacgggaaagcaccgctacaagcggtagtggcggtcatgagaaaactgctgcatgctttcttcgccatgttccgctctgatcgctcgtatgacggctccaagttgtgtctgctggaggcagatccccgtcccgttgctatgtgcgctgcttgaggcagacaaaaaaaagagaggttctcctgcacctctccagagagaaaaaaattgaaattcaagagagaat

SEQ ID NO: 2244 - DNA, 1426 bp, unidentified
  source 1..1426: mol_type = unassigned DNA; note = element_31f7e62
  misc_feature 1..2: note = core
  misc_feature 3..106: note = LE
  misc_feature 107..1123: note = CDS
  misc_feature 1124..1426: note = RE
  misc_feature 1192..1423: note = bridgeRNA
taatgaaatggacccagccttcttcccacacgagcctcatcgtaggcaagatgagtgttgttgagcgcgtcacgcacactcattgtcacgaagaagggagggagctatgcacatcacgacattggggatcgatttggcgaagaatgtatttcagttgcacggggtggatgcgcgagggcatgcggtgctgagccgacgcgtgaagcgcagtcagctggtggagacggtggcgagtctgccgccttgtgtgatcgggatggaggcctgcgggagtgcgcatcactggggtcgggcgtttgaacagctcgggcataccgtcaagctgatgagccccaagtacgtgaagccctatgtgaagaccaacaagaatgatgcgcgcgatgcggaagcgatctgcgaagcggtcagtcggcccaccatgcgatttgtttcgattaaaactgtggaacaagccgatctccaggcgttgcaccgcacgcgctcgctcctcgtgaaacaccggaccgccgtcatcaatcagattcggggactgttggccgagtacgggttggtgattgcgcaatccccggagaaggtccggcctgctgtcgtcaggtttctggatgacgcggagtcggggttgaccgcgtttgcccgagagacgttctccgagttgtctgagcaactgcgggatctcgagtcgcgcatcgagcgggtgacgcaccgggtagagggcgtgtaccgggcgcatccagtctgccggaaattggccgcggtcccggggattgggccgttgacggccacggcactactggcgaccgtcggtcggcctcaggcgtttcataacggccggcatctagcggcgtggttggggctggtgcctcggcaatattccagtgggggcaaggacaagttaggcgggctttcgaaacgaggcagtcggtatgtgcggacgctcctgattcatggggcgcgcgctgtcgtgcagcgtgccgagcggagggttgatacgcaggggcggtggctgtgggcgctcaagcgccgcaaaggcactaatgtcgccgcggtggccttggccaacaaaaacgcccgggtggtctgggccttgttggcccatgatgaggtgtatcgacaacctgcctaggtgtataggcagggggcgagccgatcttcacgaggagagacgagccatatcacaaaaggattcacaccgaggagtgcagcgaggagcatccgtgatgacaccacagggacacccggcgcgttcaaaccctggacaaattatcggcccgaacgaggccgttgtgctaatgaggagaacgcgcgcgtatttcatcaaggcccggacacatcggttgtccatcgagaggccggatatataaacgcagccctgcattgtggtccattgcgtgatacccgccgttgcaccgaaggctgggtccatata

SEQ ID NO: 2245 - DNA, 1356 bp, unidentified
  source 1..1356: mol_type = unassigned DNA; note = element_31fa650
  misc_feature 1..2: note = core
  misc_feature 3..83: note = LE
  misc_feature 84..1097: note = CDS
  misc_feature 1098..1356: note = RE
  misc_feature 1122..1343: note = bridgeRNA
tgatggagtggatggctcccgcttccggcatcgcaatgtgccatgttgggtgctgtgaacacggccaacgaagggagccatccatggatgagattatcacaatcgggatcgatctggcgaagtccgttttccagctgcacggtgtcgacgccaagggtcgtccctcattgcgtcgccaactcagacgcagccaggtgctcgagttctttcagcgccagccggcgtgcctgatcggcatggaagcctgcgccagcgcgcattactgggcacgtgagttgatcaagctcgggcatgaggttcgactgatgcagcccagctacgtgaaagggtatgtgaaacggggcaagaccgatgcagccgacgccgaagccatctgcgaagcggtatcacgcccctcgatgcggtttgtccccgtgaagagcgaggacacgcaggccttgctgatgacacacaaggcgcgggagttcctggtccgtcagcagacccagatcgtgaacgccattcgcgcgcatcttggcgagttcggcatcgtcgtcccgaagggcgttcataatgtcgagcgcctgatcacggcgtgtgacggggccggtctgcccgcgccagcgcgcaaggccctgaacctgctggccgaccaactggtcgacacgcagaagaagatcgaggcgctgaccgcagacatccgcgcggacgcgcgggccaatgacgccgcgcagcgcttgcagacgatccccggggtcgggccgatcaccgccagcgcgctggtctcggcgctgcccgacatcgccgagttcaagtcaggtcgggacctgtccgcgtggctgggcctgacgcccaggccgcattccaccggtggcagggaaaggctcgggcgcatctccaagatgggcaaccgatatctacgccggctgctctatcttggtgcgatcgcgcaggtcagcgcccggcgccggggcgagcccggcgaagactggctgtggaagatcatccagcgcaagaagcccaagcaggctgcaattgccctcgccaaccgcatggcgcgcacggcctacgcggtgatgaagaaccagacggaattccgggcggcaaccgccgcctgacagaaaaagggcgatcagctcttacaagaaggcaagtgcatcgtgagatgatggcaaatgacggacatatcgccaaggacaccctgttcggaccggagcgccagagagcgcgtgccattgattgggaccagagcgaccgcggactttcatcagggcgcgcagccaccgtgctgcagtcgagacgccgtatacatggccgcaaccgaaatcacgccagcttcaaccgagacgctcttgccacgcgggagccatccataca

SEQ ID NO: 2246 - DNA, 1422 bp, unidentified
  source 1..1422: mol_type = unassigned DNA; note = element_31ff4c4
  misc_feature 1: note = core
  misc_feature 2..65: note = LE
  misc_feature 66..1106: note = CDS
  misc_feature 1107..1422: note = RE
  misc_feature 1196..1416: note = bridgeRNA
taatgagatggtccgccgccgagtagattacaactcggcagttcatatcaaggaggatcatcgccatgcacatcgcatccatcggcatcgatttgggcaagaccacctttcacctggttgcattgggagagcgtagcaaagttctcgtccgcaagaagttttcacgcacgcagctgctggcctacacggcgaacctgccagcttcgctcatcggtctggaagcgtgtgccggagcacacttcctgggcacggcactgcgcgaacaagggcaccaggtgcgactgattccggcgcagtttgtgaaaccctatcggaagtccaacaagaacgactttctcgatgccgaagcgatcgccgaggctgtgaccaagcagaacatgcgctttgcccagctcaagacgcaggagcaacttgactggcaggccctgcaccgggtgcgcgaccggctggtgcagcgtcgcaccgcgctgatcaacgagattcgtggattcctgctggaacgcggcatcacctttgcgacccagcctatccacttgcgcaagaatcttcctgcagtcatcgaagatgcggagcagaacctgagcccgcgtctgcgttggctgcttactcgcatgtggcaagagtggaaacagatcgagaccgaagtcgagaccatcagcgaggagatagaacgcataagtaaagacgacgcccgctgccggcaacttcgccagatcccgggcttcggcccgatggtctcaaccgccacggtggccgccattggcaatggttctgcctttcgtcgcggacgcgactttgcggcttgggttggggtggtgcctcgacaacactccaccggggggaagcagagactgtacggcatcagcaagcgcggtaacgtctatctgcggcgcatgctgatccacggtgcccgctctgtgctattccgcgtcaagtacgacaccggaggattcgggcagtgggtgcgtcggctggcacagcgtgcgccccgcaacaaggtcgtagtcgctatcgccaacaaactggcgcggatcgcgtgggccgtgctgtccagcgggcgggattatcggcatcagccactgccgcagcagatgacgactgcgtgatggcggtggaaaagacgctgcgcttggaaagcacaaaacactttccactttcccaccgccacgacgaccgatgttaaacagatttccaccaaggtctgctgaggagagaagaagacgagaagaacagcccaatggcgtgccggaaaacctggtggcgttaatgcgtccctggtgaccgagggatttgtaaggaccggcgcgtgcgtatcatcatcgagtgcccggagagcattctccacttagaggccggatacatttacgcggactgtcccttcgtcaacttcaaccctcttgcagtccggcggcggaccataca

SEQ ID NO: 2247 - DNA, 1622 bp, unidentified
  source 1..1622: mol_type = unassigned DNA; note = element_3203e3d
  misc_feature 1..2: note = core
  misc_feature 3..82: note = LE
  misc_feature 83..1111: note = CDS
  misc_feature 1112..1622: note = RE
  misc_feature 1375..1620: note = bridgeRNA
tgatgagatggacgacccccccgtttccggcgcggcagcgccatatagcggacaggacgtttttcatcagggagattgtgcgatgtctacggcgttcatcggtctcgatctggcgaagttggtattccaagttcacggtgttgatgcccagagcaaggtgcttatgacgaagcggctacggcgggacgccgtgctggcgttgttcgccaacctgcccgtgtgcgtggtcggaatggaggcttgtgccgggtcacacttttgggcacgggaacttacccggctcggctacacggtgcggctgatggcgccgcagtacgtcaagccctacgtgaagcggcagaagaacgaccgggccgacgctgaagcgatctgcgaggcggtgcagcggccgagcatgcggtttgtcgcggtcaagaccgaggagcagcagagcaccctggcgatccaccaggtgcgcaagacgctggtcgcccagaagacgcagctgatcaacgcgctacgcgctcatctggccgagttcggcatcatcgccccccagggcgccggcaaggtcgcgcagctgagcgccgtggtggccgacctggaggatacccgggttcccgctctggcgcgaagcgttctccaaagtcttgtcgaccaactgcgcgacaccgaacgtcgggtcgaggacctcgacgcccggctggccgagcaggctcagacggacgaggtgtgtcagcggctgatgacggttcccggcatcggcccgatcaccgcgacagcactgacggcgacgattggcgacgccacggtcttcgagtccggccgccaattggcggcctggctcggcctggtgccgcgccagacctcgagcggcggcaaggaacgcctggacggcatctccaaggcgggcgacggctatctccgccggatgctggtgaacggcgcccgaacggtgatgcgctggcatggcacgacgtcaccctggcttgccggcttgctgaagcgccggccggtcaacgtcgcggtggtagcgctggccaacaagctggcccggatcacctgggccgtgatgacgcgcggtgagaactaccgcaagcctgccgtgacggctgaaccagcgacggcgtgaggcagcgatgaaggtaccatccgcactggggatcccgacccacggcagaatagcaccgtgctcgctccggcaaggccgagccgcctgcggtggtggccctggcgggccagccttgccgttcgctgcgcgcggcgctcctggaaaagacaggtcgggacggagaggtggttccgccgatcgaacaaagaggttgggattgggagaaagaacaggatgagacagcgccgcgggctcggcagccgtcacggcgccgagggcggcgcatcaggttctccttcggtttgcgagggcgactgacagcgtgatgacaccacaggtcgaccgggatcggccaaacccgcctgcaccagagagccaccaagctcgttgctttgattgggcgtcgacccgcggatcttcatcaaggccagcagcctgaaagctgcacaacaggccggatagatggcagcaaccgactctcaacgtcagaacgctgcaggaaactcttgcaaggcggggggccgtccataga

SEQ ID NO: 2248 - DNA, 1366 bp, unidentified
  source 1..1366: mol_type = unassigned DNA; note = element_320e7c2
  misc_feature 1: note = core
  misc_feature 2..67: note = LE
  misc_feature 68..1093: note = CDS
  misc_feature 1094..1366: note = RE
  misc_feature 1128..1363: note = bridgeRNA
tactgagatggacccggcgcctccctccgggggcacactaacgcacccagacgtgcggaggttcatcatggaaatcgacgttctcggcattgatctagcgaaacagatcttccagctccacggcgcggatcgtcgcggtcgtgttgtacatcggtcgaaggtctcgcggagttcattcttcgaatccgtgcgcaccttgaatcccagggtgatcatcatggaagcattcagcacggcccaccactgggcgaggtctttccagtcgatcggtatcgaagtccggctgatcagcccgcaatatgtcacgccgttcgtcaagacgaacaagaacgaccgcaacgatgcagaggcaatcgtcgaggccgccagtcggcccacgatgcgcttcgtgacgatcaaatcggtcgagcaacaggacatgcaggcagcacatcgcatgcgcgctattctgctgcgtcaccgtaccgcgctgatcaaccagatgcgcggcctgctcggcgagcgaggtctcacgattgcgcgctcaccagaagccttcaagcgcgcgataccggaattgctgcgcacgagcgcagatgaactgacttccttttgccagacgctgctcaccgaacttctgcagcacctgggcgccattgaggaacgagtccgtctcattgaggcatctatccagtcgttcatgaagaggtccacgctctgcaggaagatcgccgagattcctggcattggtccgattaccgctacagccattgtcgccgcggtcggcgacgccaggcagtttcgcaacggccggcatctgtccgcctggctggggcttgtgccccgacaatattcgtctggcggcaagcctcgactgcacgggatcagccgacgtggcgacgcctacttgcggaccttgctcattcatggcgctcgggctgttctgcgctacgcaccgacaaaaactgatcctcagagcatctggcttcaagagttgatggctcgacgcgggcataactgcgcggcggttgcactggccaacaggaacgcgcggatcattcaggcactgctcagcagcgatgcgccctatatgacgcaaagcgctgcagcataaccctgcacccacttgcaaggaggcaacacccacacaggtttgcgaagcttcttaaagcgatgacgaaataggttgaaccagcatcctgaagcctgtttttcgtgccggctgccacctgtggcaagccgcgattttgctaaggacggggtgcgcggatctcatcgaggctgcgggcgtgctttggcaactgcccacctggcaagccggatacatgcatgcagaccgtttcgacatcacgaacaagaagcttgcaaaaggcgtcgggtccataca

SEQ ID NO: 2249 - DNA, 1482 bp, unidentified
  source 1..1482: mol_type = unassigned DNA; note = element_3210c81
  misc_feature 1..2: note = core
  misc_feature 3..231: note = LE
  misc_feature 232..1461: note = CDS
  misc_feature 1462..1482: note = RE
  misc_feature 7..228: note = bridgeRNA
ctaatgggtgcgtaccggtcggtggcggatgcggcaggctggtgcacctcagccgccggtgggtgagcactttcgccagctggttcgtttgtcgaggccaagggctagaccgtgcccctgccggttggcgaggagaggtgacggccggtgggatgtcgtgccgcttgcgagcactgatccattagcgcgccgcgattctcctccgtgctgaccgaggtgagaggaggatcggtgctgtttgtgggcgatgactgggcggaggatcaccatgatgtggaggtggtggacgagtcgggccggcggttggttcggcgccggcttcccgagggtgtcgcgggaatggcggcgttgcatgggttgattgctgactatcttcctgatgaggcggaagcgtcggatgtggtggtggggatcgaaaccgatcgtggcccgtgggtcactgcgttggtcgctgccggttatcaggtgtatgcggtcaacccgatgcaggccgcgcggtatcgcgaccgttactcgacctctggtgcgaaatccgatcgtggtgacgctcatgtgttggcggagttggtgcggttggaccgcgcgcatcaccgtcaggtcgccgggggttcggacctgtccgaggcggtgcgggtgctggcccgcagtcatcagaacctcatctggacccggcaacggcagaccaaccagctgcggtcgatgctgcgcgagttctatccggcggccctgcaggcgttcgctgacctggccggacgtgacgcgctggcggtgttggccgcggcgcccacacctgcagctgggcgggcgttgaccgtcgagtcgatcacggagctgttgagacggtcgggtcgcaagcgctatctggcgtccaccgccgcgaccattcataccgcgctgcaaaccgagcagttgtccgcgttacccgctgtggcgcaggcgttcggcgcgtcgactcgtgccctggtcgcggtcatcgacgcgctcaccactcagatcgcgacgttgcaggccgaggtcgatgcgcattttgggcaacacccggacgctgagatctatctgagccaacccggactcggagtgatcctcgccggccgggtgctggccgagttcggagacgacacacatcgctatgccaccggaaaggcccgccgcaactacgccggcacctcgccgatcacccgcgcatcgggaacaaagaccactgtcctagcccgctatgcccgcaaccggcgcctcggtgacgcactgtttcagcaggcattcgccgcgctgaccagatctcccggcgcgcgtgcccactacgacgcgatgcgcgcccgcggcatcggccacaacgacgccctacgccgcctggccaaccgcctggtcggcatcctgcacggctgcctacgccaccacgtcacctacaacgagaccaccgcctggccaccaccacaacaagaccaacaagccgccgcttgacaacttacgaccgtgggatgt

SEQ ID NO: 2250 - DNA, 1392 bp, unidentified
  source 1..1392: mol_type = unassigned DNA; note = element_3214d89
  misc_feature 1: note = core
  misc_feature 2..93: note = LE
  misc_feature 94..1137: note = CDS
  misc_feature 1138..1392: note = RE
  misc_feature 1163..1384: note = bridgeRNA
caatgggatggactcctcctcacccactttcggcatcaagtgccacactgagtgtgctgtccaacagtcaccagcgaggaggaggaacccgcgatgaagattagtcgagttggggtagatttggcaaaaaacgtgtatcaagttcacggcgtgggtgcccgagaccatgtggtctggcaaaagcgtctgcgtcgagacaattggctcgctgaactgcaacggtgtgtgcccgagggagcagaggtcggcatagaggcttgtgccggggcccatcactggggccgcgagcttgttgcacgtggccatcaggtgaagctcatggcgccacagtttgtgaagccatatgtgaagagcaacaagagcgatcgcaacgatgccgcggcgatctgtgaggccatgagtcgcccctcaatgcggtttgtcgcactcaaaagcaccgaacagcaagatatacaggcagtacatcgcgtgcgctctgagttaatcaagcagcgtaccgcgaaagcgaaccagatacgcggtcttgttggagagtatggtctcgtggcaccgctgggcatccataccttgcgtaaagcgctgccatgttggctggaagatgcgggtaacgggctgagctcacgcttccgtcggatcctggccggtctagccgaggatctgcgccacctcgatgagcgcatcaaaatgctcgatgacgagctggccaacatggtcaaggaaataccggctgcgcagcgtctcacgacgctcaatggtgtcgggccgaccattgccacagcgctggtagcagctttgggggcaggcgagggttttagccgcgggcgtgactttgcggtgaccctgggattgacacccaaacaccagggcacgggcggcaaggatcgcatccttggcatcagtaagggtgatgcttatctacgtacactgctgatccacggagccagagcagcggtctacgccgcgaaaggcaagacagacccgctaagtcgctggattaatgcactattagaaagatgtcatgcgaatgttgttattgtcgcattggcgaataagaccgcacgtatggcctgggcgctactgcgtcatgaccgtgactatgatgcgaattggtccaacgtcaccgccccggtgcagtaacgcggcgactggctgcgagttcaaccctaccaacgattgcgaaggagtctgattgacggcaaacaggtcgaaccggcgctggcaaaacccgagtcccccgaagggcgaaaagtccgtcttaacgttagggagccagtgcgcgaatagcccatcaaggtcccgtgtcattggcacgatcaggagaccgaatacacgtgagcaatcgatcctaccgcctgagatcaaaccccttgcaaacgaggaggagtccataca

SEQ ID NO: 2251 - DNA, 1483 bp, unidentified
  source 1..1483: mol_type = unassigned DNA; note = element_3214ef5
  misc_feature 1..2: note = core
  misc_feature 3..242: note = LE
  misc_feature 243..1463: note = CDS
  misc_feature 1464..1483: note = RE
  misc_feature 7..238: note = bridgeRNA
ctaatagagcttgatggtcgtggtcaggtttagagggccaggatgatcgctgagcccgtcggcgggtgagcactggttggggctgggccgctgagccctaccgctagatcgtgcccccgctggctggtgaggtcccctgtgatggctggtgggatggcgtgccttggagcactggtctattagcgggctgctggggtcctcgggctcactgtcaggtacacggctggcgggaggagctggggttgatctttgccggggtggattgggccgaggcccaccacgatgtttgttttcaggatgagcagggccgccggctggctggtggccggctggctgagggagtgaagggaatcgcccggttccatgagctggccgccgcgcacgcggccgcgccggatgaggtggtcgtcgggatcgagaccgaccggggcctgttcgtggccgcgctggtcgcggctggctatcaggtggtcgcggttaacccgatgtcggcctcgcgttaccgggaccggcacgggtcctcgggcgcgaaatctgatccaggggatgcgaaggtgctggcggacctggtccgcaccgaccggcacaaccaccggccggtggctggtgacagtgacctggcccaggggatccgggcgctggcccgcgcgcaccagtcgatgatctgggcccggcgccggcaggcgaaccagctccgctccgcgctgcgcgagttctaccctgccgcactggctgcgttcgatgatgtgaccagcggtgatgcgctcgccgtgctgaaagcagcgccgcagccggcgctcggcgcggcgctgtcccgggctcagatcaccgccgccttgcgccgcggtggccggacccgccgtctcgctgaacgcaccgcagctgtccaggccgcgctgcgcgcgccgcagccacagcccgctcccgccctggccgccgcgatgggcgctgcggtggccgcaacagcggctgtgatcaccgagatgaacacccagatcacagcgctcgaacagcagctcgcagcggattttgagcagcacccggacgcggaggtggtccgttccctgccaggactggggaccatcctgggcgcccgggtgctcggcgaattcggcgatgcaccaggccgttacgccaccgccaagtctcgcaagaactacgcgggcacgtcacccatcacccgcgcctcgggcacccggcgggccgtcctggcccgctacacccgcaaccggcgcctcgccgatgcgatctacctgtgggccttcgcagcgctcaccgccagccccggcgcccgggcgtactacgaccaccaccgcaccgccggggacacccaccaccaagccctgcgggccctcggcaaccgcctggtcggcatcctccacggctgcctggccagccacaccccctacagcgaagacacagcctggagccaccgcagccacgaaaccgcccgcgccgcttgacacttacagccgtgggatgt

SEQ ID NO: 2252 - DNA, 1211 bp, unidentified
  source 1..1211: mol_type = unassigned DNA; note = element_3224598
  misc_feature 1..2: note = core
  misc_feature 3..209: note = LE
  misc_feature 210..1196: note = CDS
  misc_feature 1197..1211: note = RE
  misc_feature 12..192: note = bridgeRNA
cttgtatcttgttttttatggtggttagctcccatcatatcgagacagagacagcttgacgccaaccttaaggcacatgaccttgagccgtagatcaagccctctgtctcacttcatcgccagctccgacactgaacggtagccaaggggcaaaccctgcatgcacaaggcaactgggctaagttggctcaacaaaagggtattgaatgatgttctatctcggtatcgatgtggccaaggccaagctcgactgttgtttgttgctcgaccctgagagcacgaagcgaaaatccaagtccgttgccaacaccagggcggggttcgccactctcctggaatggctggccagaaatggcgtttccccggcccaactccatgccgttatggaaggaacaggcgtgtatcatgagcaggccgccctggccctggccgataccggcgtgacggtctccatcgtcaatccggcccagatcagggattttgcccgtggcctggctgtgcgcaccaagaccgacggtgtggatagtttcgttctcgcccggtatggcgctctgctcaaaccacagccctggcaaccgccatctgcggaggcccgtgtcttacgggcgctgctcgcccgtcgggaagccgttgcccaggacttgcaaagagaactcaaccgccgggaaaaagccgacgcaacacagacgcccgcgcttatccgccaatcaatcgacgattccagcgcatttctccgcaagcaactggccaaactccaggaggatatcgaccaccatattgatcgccatcccaatctgaaggacgacatggaactgttgaccagcatccctgccgtaggccgacaaaccggaagcaatctgctggccattatccacactcaccatttcaattcggcggaacaacttgccgcctatctcggtttggttccagttgaacggcaatccggttcgtccgttctgggaagagtcagactctctaaagccgggccgccccggatcagggcgactctgtacatggccgctatcgtcgccatcaagtacaatccgcacatcaaggctctctaccatcggctcgtggccagaggcaaagtcaagaaagcggccctgggcgctgcgatgcgcaagctcgttcatctctgttttggcgtcctcaaaaaccgtatggtgtaccagccggattacgtgaaaaccgcttgatctccaagatggtat

SEQ ID NO: 2253 - DNA, 1484 bp, unidentified
  source 1..1484: mol_type = unassigned DNA; note = element_322d01a
  misc_feature 1..4: note = core
  misc_feature 5..238: note = LE
  misc_feature 239..1468: note = CDS
  misc_feature 1469..1484: note = RE
gtcactagggcaccatcctttctgcggatgcccgatgggtgttcgttgaagggactcggcgggggccgaggtgacggccatcgtcggtcgctcgtggagggcctgcatgacaccgccgccctcggtcctcccggggtcgcagaccggcttcaggaagacgcgccgcagagcgccagttagtgaccgtccggtggtcgatcccctcgccgggtcgtcgctgccaacctgaggagcattgttgtctgacgagacccctgaagttgtgtatgtcggcctggactgggccgccgtcattcatgcggtgtgcgtgatgtcggcggccggtaaagtgctggcccagttcaccattgagcacacggccgagggcatcgcgtccctgatcgctcgactcgccaagtatggcgatccggccgatgttcaggtcggcatcgagcggcccaatggccgcttggtcgacctgctgctcgaagccggccaccccgtgatcccggtgtcgcccaacgcaatcaaaacctggcgggaaggcgaagtcgtctcgggtgcgaaatccgataccggtgatgcccttgtcatcgccgaatacctgcggttgcgccaccaccggctccatccagtccagccctactcgacccaaaccaaagcactgcgcaccgtggtccgtacccgcgacgacatcgtcgaattgcgcgtggccgcaaccaaccagctcaccgcgctgctggagacctactggccaggagccaaagaaatcttcgccgacgtggagtccccgatcaccctggcatttctgcgtcgatacccgaccgcggcctccgctgcgcacctgggcgacaagcgcctggccgcgtttttgaccaagcagggctactccggtcgccgctccagcaccgagctgctggccagactgcgccgcgcgccagctggcaccaccgacccggaactggtcagggccatcggtgatgcagtgctgggcatggtcaccatcctcgaagccctcaacaccgccggtaaacagctcgaccgatccgtgatcacccacctcggggagcacccggacgccgcaatcttcacgtcgctgccaaggtcgggtcagatcaacgccgcccaggtgctcgccgagtggggcgactcccgcgcagcctacgactcgcccgacgccatcgcagccctcgccggggtcaccccagtcaccaaggcctccggtaaacaacacgccgtgcacttccgctgggcctgcaacaaacgcttccggaaagccgtcacgaccttcgccgacaacagccgccatgccagcccctgggccgctgacatctacgcccgagcccgcgcccgcaaccacgaccatccccacgccgtgcgcatccttgcccgcgcctggatccgcgtgatctaccgatgctggcacaaccgccagccctacgaccccaacctccacggaggagctcaaagactgcccaccgcagcctgagcttgactcaggaagt

SEQ ID NO: 2254 - DNA, 1624 bp, unidentified
  source 1..1624: mol_type = unassigned DNA; note = element_322dea4
  misc_feature 1..2: note = core
  misc_feature 3..287: note = LE
  misc_feature 288..1511: note = CDS
  misc_feature 1512..1624: note = RE
  misc_feature 105..326: note = bridgeRNA
cttgtatgatatagtggacaactaaatcatacactcctttctttagatttacgctcgcttcatggtgtttatcgaatttatgaaagctgaaggagcgtagcgactgaagctttcataaattcggccggcttcttgccggtataaacttatccgatataatggatttaggcactgtggactttttatgatgacctatagctcgactattcgaaggagtgtattgccacagttttatctaaatcatttatagttggataagtttttaaacttttatctcccgcaagtctatgatgataaaactaagtggaccaaagcagttgcctaatattttcaaaggatgtggtcctatgatttatgttggcattgacattgccaagcaaaagcactttgccgctgccatgaccgctgatggcgaggtcctgatctcacctttcgggtttaccaacgatgctgaaggattcaaactcttcctttcgaagattaagtccttcaaaaaggaaagcactctaatcggccttgaatcaacgtctcactatgctgagaaccttatttgccacctttttgacctgggttatcacatctcagtaatcaatccgatccagacatccaccttacgcaaaactaacatccgcagaaccaagaccgataaggtagactgtctgctcatcatcaagtcgatgatagtgaacaagcccaggctctattccaagaccgatatcgactcacttcgccttaaaagcctctgccggttcagagagaaaattaaaaaggccaaagctaaactcaaaatccaacttgtcacattcgttgatattatcttccctgaactgcagtatttctttaaatcaggcatccataccaatacctgctaccagcttttgaagaaacattcatctccagatgatatcgccgccttacaccttacatacctggctaatctcctccaaaaagcttcccacggccgttttggtaaaaaagaagctattgctttaaaaggtctggctaaatcatctgtcggtactggcaataccgatgtttctattcaaataacccaatccatcgcacagattgaattattggaacagcaattggctgatatcgataggattatcgaatcaattatgcttgaaatggattctgttatcttgacaattcctggcatcggattcctcaatggagctatgatccttggtgaaattggaaatatatcaaggttttcaaatccatcaaagcttttagcttatgccggcctggatcccaccgtaaaccagtccggcaagttcaatgccaaaagtaccaagatgtcgaaacgaggttccaaacttcttcgctacgccttgattaacgctgcctggaatgtttctcttaacaacaagacatttaatgattacttcaacctcaaacgctctcaagggaataaccactatgcagctctcggtcatgtagctcataagctggttcgcattatctttaagatgcttaaggataatgttgcttttaatctggattaataaccatttattcagttgtctatgtccataggcttatttcagcatgcctgtttttctattatcaaatttttcactctgaatcatcgttttttacttgacaattcatagttggt

SEQ ID NO: 2255 - DNA, 1384 bp, unidentified
  source 1..1384: mol_type = unassigned DNA; note = element_322f31b
  misc_feature 1..4: note = core
  misc_feature 5..80: note = LE
  misc_feature 81..1106: note = CDS
  misc_feature 1107..1384: note = RE
  misc_feature 1120..1373: note = bridgeRNA
atgatggtgtggacggcctcactcaaacggcatctagtgccaaagcgtggtcgccgaagcgccacagagggaaaccgtccatgaagaagtttatcagaacagcgattgatcttggcaagacctattttcaagttcacggcctggagagtgaaggcggccaatcgatctcgcgtaagatgaagcgatcgaagatgcgagagttttacgagcagatcgagccttgccgggtcggtatggaggcgtgcggttccggacattattgggcccgcgagctcgtggcgatggggcacgaagtgatgctgataccgcctgcttacatcaagccctacatcaagcggggcaagaatgacgcggtcgacgcggcggcgatctgcgaggcgatgtcgcggccgggcatgcgtttcgtgccgatcaagagtgcggatcagcaggccgtgctgatgctgcacaagacccgggaaatgttcgtcaagcagcgcaccatgagtgttaacgcgcttcgcggccatcttgccgaattcggcatcatcgtcgccaagggcatcggacgcgtcgatgaacttttggcgctggcacagtcggatgcggagcttccgcaaattgccaaatcggccgtggctggcctggcccagcaccttgaaggtctcgaccagtcgatcgaagctgtgggcgacgagatcgccagggcgcataagcaaaacccgaccagccgcctgctcgacgagattcccggcatcggtgtgctgatcgcgtcggtgatcgcgtccagcgttcccgatccgagcgtattcaagacggggcgtgacttcgcggcgtggttgggactgacgcccagacaaaattccagcggcggcaaggagaagcttggctccatcaccaaacagggcaaccgctacatccgcaaaatgctcgtcgtgggagcgacctcggtgatgcgcgtggcgggcaagcgcaaaggtgctctcgccgactggatcaacgctctgcaggccaagaagcccaagcgagtggcggccgtggccctagccaacaagctcgccaggatttgctgggcgatcatgaccaccggcgagggcttccgcgtcgatacatacgtcaaggcctgaggcccaacccacggtttcaagcagtatcaaaacaggagttcgtcggttcaagtttggcaagcactaagacgtgatgaaagacacggtcacaccgaagccagggacaccccgccatccgtcatgagcctcgagctcgccgcaatgatagggacctcggcagtcggaattcatcagggccagcggccatcgtgccgcaccaacaggccggacatatgactgaagctgaccaaatcgttcgtaacgtcaaaaaagagcttgccaataggggccgtccacat

SEQ ID NO: 2256 - DNA, 1386 bp, unidentified
  source 1..1386: mol_type = unassigned DNA; note = element_32321b3
  misc_feature 1..2: note = core
  misc_feature 3..126: note = LE
  misc_feature 127..1149: note = CDS
  misc_feature 1150..1386: note = RE
  misc_feature 1171..1350: note = bridgeRNA
acatggggtaatcgcgggaagcagctacttcggtcagcaatggtttcgagggtggctgttccccggtagatgaaggtgcgggctcacgactagcagccgggcccatacatcggacggagaacagccatgtgtgagtatattgggctcgacgtatcgttgaaagagacagccgtttcgatccgacgcggcggtaagcgggtgtggcgtggcaaatgcctgtcagacccagcggctattgccgctctgatccgcaagcatgcccctgcggcggagcgagttgtgttcgagacgggaccgctctcagtgtggttctaccacgccctgagcgcggaaggattaccggcaatttgcatcgatgcgcggcacgcgaaggcggcactcgacatggcagccaacaagacggacgccaatgatgcggatggcttggcgcacttggctgaggtcggcttctttcgcgaggtgcgggtgaagggcttcgacagcatgctttcgcgtacgctgatcgcggcgcgcacgaagctcgttcgggcaaccctcgatatagcaggccagatccgtgggttgatgaagacgttcgggctcatcgtgccgcgcggtataggcgccaagttcgaggcgaacgttcgcgcgcttctggccgatcatgctgaactcgcccggatcatcctgtcgctactggaggcgtggcggagccttcgcatccaggcgaccgagctgggtcgccagcttcttgccgaggcacgtaaaagtcagccgtgtcagctactgatgtcgatccccggcgttggtgcaatcaccgctacggcttatctgaccgcggtggaggatcccgctaactttagccgatcgcgctctgttggtgcttggctcgggttaaccaccaggcgatatcagtcgggcgaagttgactatgatggccacatctcccgacgtggcgacactcacgttcgctctctgctgtacgaggcagctgtcgtgattctgacccgcagccacgccgatagtgatctgcgcagctggggcatgaagcttcgcgagaaggtcggcttcaagcgcgccgccgtcgccgtcgcccgcaaactcgcggtcatcatgcatgcgatgctgcgttccggcgaactattcaccaggacggctgctgccgcctgatccacgagctcgacagcgccagatggcgtgacgaggcgtccctgccgggacgtaggctggtccattccgcttcggccgttgcaccgcgaacttggttcgaggcgtgcgtaatgaacattggaaggaccgacccgcgaagccccatgatgcggcggcacatgccgaccgcgaagacgaccgtgccccggcaaacatcgtcccgttacacaaagcgcttgcaaacaccgctattagacg

SEQ ID NO: 2257 - DNA, 1353 bp, unidentified
  source 1..1353: mol_type = unassigned DNA; note = element_3238276
  misc_feature 1: note = core
  misc_feature 2..198: note = LE
  misc_feature 199..1092: note = CDS
  misc_feature 1093..1353: note = RE
  misc_feature 1119..1349: note = bridgeRNA
taatgggatggtcacccccaccccctcatcggttacgctttactgacgtagcgaaccttcgggagaccatcatgcaaagcgtcacgcttattggcatcgatctaggcaagcattccttccatctgcacggctaggaccagcatgggcatgcagttctgaaaaaaagtaaatcgcaaacagttgtttgaattcttcgccatgttccaggtgtgtacagtcgtcatggaagcatgcgccggcgcgcattacatggcacgcaaacttggcggctttggccacaatataaagctgatttcaccacaattcgtccgtccgttcgtcaaaacaaataaaaatgacttcgtcgacgcggaagccatctgtgaggccgcctctcgcccttcgatgcggtttgtctcgcctaagactgaagcgcagcaagcgctttctgcgctgcaccgcgtgcgcgagtccttcattcgagaccggaccaagaccatcaatcaaatccacggcttgcttttggagttcggtatcagcttgcccgttggccgtacggcgatcacgcgcctgcccgcagcgtcagcggatcattcgcttcctaggcaatttgtcacgattatcgagggactgcacgcccatttcaaatatctagagacacagatcaccgatatcgaaaaggaaatcgccagacagttggccgccgatgatctcgggcagcgcctgctctccattccgggcgttggccccgtgacggcaagcgtgctggccagcgaaatgggcgacggtaagcagtacgcttgcagtagagacttcgccgcgtctgtcggcttggtgccgaggcagttcagcaccggtggtcgctcgaatttgctcgggatcagcaaacgcggagacaggaatctgcgacgtctgctcgtgcaatgcgcacgggcttacatgctcagattggaaaagcgcaccgggccgcttgcagagtgggtacgcgcgatgctcacgcggcgacacacaaacgtggtggcttgcgctctggccaacaagctagcgcgaactgcctgggcgctcgcgacgcgacatacaacgtttgacgacggcgccgcaaaggcggcatgacgtccgtggtaagacagttttacctgtaacaactacctggttttgcgatagctgaaatgtgatgacgtgaacggcacaacggcctggcagaaaacctgatcaactaatcggccctctcaggccgcacaactttacaggactgccaggcgcgaatctcatcatggcgcgggaggaagctctccatgacgacgccgaatagatttaagcgagccaacccaccgagtcagaaatcggccttgcaaaaacgggggtgaccataga

SEQ ID NO: 2258 - DNA, 1362 bp, unidentified
  source 1..1362: mol_type = unassigned DNA; note = element_323c147
  misc_feature 1..2: note = core
  misc_feature 3..64: note = LE
  misc_feature 65..1093: note = CDS
  misc_feature 1094..1362: note = RE
  misc_feature 1122..1348: note = bridgeRNA
tgatgtcgtggacggcgctccatccgctgctgcaggttaaggcggcttgagatggaggagaaccatgggagaggttgcgacggttggactggatattgccaagtcggtttttcaagtgcacggcgtcgatgctgaaggcacggtcgtggtgcagcgccgcctgacgcgagggcgggtcttgctgttcttcgagaagctggcgccatgcgtggtcgggatcgaagcctgcgcttcggcgcatcactgggcgcgacagttgcgcgtgttcggtcatgaggtgcgcctgatgcccccagcctatgtaaagccttatgtgaagcggcagaagaatgatgcggccgacgccgaggcgatctgcgaggccatcacccggccgaacatgcgctttgtggcggtaaagacgccggagcagcagagcgttctggtgcttcaccgtacgcggcaggtgctcattcgtcagcgcacccagatatccaacgccattcgcggccacatgagtgagttcgggctggtcgcgccgatcgggcgccgcggcctgcagattctcaccgagattatcggtcatgaagccgatcagagagtgccggaggctgcacgcacatgcctggcgatgctggttgatcagctccggttggtgaacggtcagatccttgagactgatcgccggatcatggccagtgcacgggctacggaggtaggtcgtcggctgatgggcattcctggcgttgggccattgctcgcgagtgcgctggtcgcgacagtcccagaccctcacgccttccgctcgggccgcaatctggcagcctggatcggccttgtgccgaagcagaactccagtggtggcaaggaacggctgggcgggatcagcaaacaaggcgatcggtacctgcggcagatgcttgtggtcggtgcgctggcggttatccgccatgccgagcgacacggatctcggcgctcgtggctcgtgcagcttatggcgcgacgaacgaccaaggttgcggcggtggccctggctaacaagacggcacgcatggtctgggcgatcatgaccagcggccagccatatcgtgagccacaactggttacagcgtgagattgggagattcggcgtaaaacgccgatcagcttgggaagggcggacaggaggtaatgcaatcagccggtcgatacagggaagcggggaaaacccacttgggtcaaggcgccttggagcgcgtgcttttgatcgggacccagcttcgcggaaggcattatggccagcggctcatgcgtgccgcaccaacaggtcgaacacatgaccgcaccgaccaggctttgcataacctatctgaaaacccttgccatcggagcgccgtccacaca

SEQ ID NO: 2259 - DNA, 1380 bp, unidentified
  source 1..1380: mol_type = unassigned DNA; note = element_3247322
  misc_feature 1..2: note = core
  misc_feature 3..78: note = LE
  misc_feature 79..1116: note = CDS
  misc_feature 1117..1380: note = RE
  misc_feature 1145..1366: note = bridgeRNA
gatggggtggacgccccccctgacggcatcgatgtgccaaagtggaggtgttgaaacactactgaagaggaggcgtccgtggataaagttagcacagttggtcttgatttggcgaagtctgtttttcagttgcatggagcggatgccaagggagcggtggttttccgaaagaagcttcggcaagatcgtttgctggtcttcttctcggagctgcaccactgtctggttgcgatggaagcgtgcgcgagcgctcatcattcggcacgggagatcggcaagtttgggcatgaggttcggttgatccctcccgcctacgtgaagcccttcgtgaagcgcggcaagactgatgctgctgatgcagaggccatttgcgaagcctttacacggccaatgatgagcttcgtgactgtgaagtcacgcgatcagcaagcaatcatgtcgttgcatcgcacgcggagccttctggtcaagcagcgtacgcaatcgatcaatatgatgcgggcgatactcgcggaatttggcatcaacattcccgaggggctggagcgagcattgcagttggcgcgccaaacagccgccgagcggtcgcaagacgttccagaagccgcgggggctatggtggagatattggctcagcaggcgctgaatacccattcacagattttggacattgatcgtcggcttatgcgcttgcagcaatctgatgaggttgcacaacgcctggctacgatccccggtataggtcctgttggcgccacggctctggctgcggctgtagctgatccaacgcagttcagatcgggtcgacattttgcggcttggcttggccttacgccgctccaaaattcaagtggaggcaaggaacagcaaggcgggatttcaaagatgggtgacaaatatctgcgccggcttctcgtcatcggcgtaacatcactcgtgcgtcgagcgaagtatcagccagaaacagcggatcctcgcctcgttgcccttctcgccggaaagcccgtccgggtcgccacggtcgtgatggcaaacaaaatggccagaatcgtttgggctatattgttgcgaggcggtgtttatgaacgctgccatgcccccatgctggcagcataacaggaaaggcaagagcaaatagaatttcaggaggttgttggggcgatgcgaagtgatggcgaaaccggtcagaccgggaacagggacaacccagcgccattccaaggcgtcatagcctgataagcagattgggaccctattcgcggactccatcagggcccgcagtccatgccgactgcatcaacaggccgaacagaagactacacccgaccaaaacgccaaaacgtcaaatcgtgcttgacaacgcgggagccatccacagag

SEQ ID NO: 2260 - DNA, 1358 bp, unidentified
  source 1..1358: mol_type = unassigned DNA; note = element_32510a7
  misc_feature 1..2: note = core
  misc_feature 3..71: note = LE
  misc_feature 72..1097: note = CDS
  misc_feature 1098..1358: note = RE
  misc_feature 1124..1346: note = bridgeRNA
tgatgccgtggacggctctccaccacggcggagtcggattaatctgctccgctcacgctgaggagagtgtcatggcagacgttcgggttatcgggttggacatcgcgaaatcggtctttcagctgcacggcgtcgatgaagccggggcaatagttttgcagaagcgtctgacgcgatcgcgcttgctaccgttcttggagaagatgccaccctgtgtgatcggcatggaggcgtgttcgacctcacactattgggcccgcgagcttgccaggctcgggcaccaggtgaagctgatgccggctcaatatgttaagccgtatgtgaagcggcagaagaacgacatggctgacgccgaggcgatcgccgaagctctcacccggccgaccatgcgcttcgtggctccaaagtcgccggccgagcaaagtgcgatgatgctccacaaggtgcggctgatgctcaaccggcaggtggtcatgatcaccaacgccattcgcgcacacatgtcggagttcgggattatcgcgccagtcggacgaggcggggtcgatcgactgatcgagcatgttgaagatgaaaacgacgaccgcatccctgagaccgctcgccattgcctgcaaatgctcgtgactcagctcaagctcgttaagctgcagatcctcgataatgatcggcaggttctgtcgctcgcccgatcgaccgagctcggccgcgggttgatggaaatcccgggtgtaggcccgctcgttgcctctgcgttgatcgcctgtgtacccgatccgtcgatgtttaagtgtggtcgcaacatggcggcttggctcggcatagtcccgaagcaaaactcatccggtggcaagtcgcggctgggatccataacgaaagcgggcaatcgctacctgcgccagatgctcttcacgggtgctatggccgtcgttcgacgagcaatgcagggcacgcgtaggacgtggcttgtccgtatgctcgaacgccgtagaccgaaggtcgctgcaatggcgctcgcgaacaagaacgccaggatcgcctgggcaatgatgatgagcggcgaggcttatcgcgaaccgatgatgctcgccgcatgatgagatcgcgcagctgaggcggcgcatcgaggttgggaagggcaaaggagctattgcacgaacgacggtcgacaccgccagatcagaccaccccatttgcgccctgcacctcgaatgcgcgaaattgattggggacccgatctgcggaaggcattatggccagcggcgatgaaaggccgcatcacaggccggacacatggccgcaccgaccaccaagtgcagatgctcaatagcccttgctaacggagagccgtccacaca

SEQ ID NO: 2261 - DNA, 1354 bp, unidentified
  source 1..1354: mol_type = unassigned DNA; note = element_3258d19
  misc_feature 1..2: note = core
  misc_feature 3..69: note = LE
  misc_feature 70..1092: note = CDS
  misc_feature 1093..1354: note = RE
  misc_feature 1118..1342: note = bridgeRNA
tgatgatgtggacggctctccaccctcttcggcaggatagtctgcggatgagtcggaaggagagccacgatgggaacggtgacaacgatcggtttggatatcgcaaagagcgtgtttcaggttcatggtgtcgacgcagatggaggtgaagtacttcggcagcgactgacgcgcagccgcatgcttaagttcttcgccaagctaccaccatgtttgatcggcatcgaggcatgcgcgtcatcgcattattgggcccgcgagctgttggcgctgggtcacgatgtaaagctgttgccagcgcagtatgtgaagccctacgtcaagcgcagcaagaacgacgcggccgatgcagaagcgatctgtgaggcggtgacgcgtccgaccatgaggttcgtcgggattaagtcgccagagcagcagagcgcaatgatgctgcaccgagttcgcctgatcctgtgccgccagcgcactcagctctcgaacgcgatccgggcgcatctcgcagagttcggcgtcattgcaccaatcggccggaacggtatcgagcaactgctcgatgtgattgcggatatgaccgatggtcgcgtgcccaccgatgcgcgtatgtgccttgagatgttggctgtgcagttgcggatcgtgaaggagcagatcctcgaaaatgatcgccgcatcctggccagcgcgagagagactgagcttggtcggcggctcatggagatcccgggcgtcgggccgttgctcgccagcgcgatcgtcgcgaccgttcccgatccagcgatcttccgctcagggcgcaacctcgcggcctggatcggtttggtcccgcgacagaactcaagcggcgggaaggagcgtcttggcagcatcaccaaggcagggaatagctatctgcgccagatgctcatcgtcggcgccatggcggtcgttcgctacgctgagcgcaacggtgcgaagcgaccttggctggtgcagcttctcgcacgtcgcaagaccaaggtcgcggcagtggctttagccaacaagaacgcgcgcacgatctgggcaatgatgacgagcggcgaacggtatcgcgagccgctggtcgcgtaggaacacggcgcgggcaacggcgccatgaggttggaaagggcggacaggagctaatgcagaaagtcggttgaaaccgccggatcgggaaaacccatctcgccccaagcacctcgagtgcgtgaaattgatcgggacccgaaacgcgcgaatggcattacggccagcggcatcatgcgccgcaccaacaggtcggacacatggccgcaccaaccaacaatgcgacgctcaatatgccacttgccaacggagggccgtccacaca

SEQ ID NO: 2262 - DNA, 1584 bp, unidentified
  source 1..1584: mol_type = unassigned DNA; note = element_326a214
  misc_feature 1: note = core
  misc_feature 2..234: note = LE
  misc_feature 235..1467: note = CDS
  misc_feature 1468..1584: note = RE
  misc_feature 42..238: note = bridgeRNA
cgttacctttttagtagcccctaaatgaacaagaattggggttgctggcctgtcggtctcggcatgattgattcccccagtcgtatgcatgatccggggggtgttgtcaccgaggctcgataggcaccagaggatcgctgatggggaccagaccagccgcggcagagacgctgtcattggtaggtcggaccgtaacgtggatgtcgaactctggagccgcaggacagggccggcatggtctcattgggtctcttatctggaggtagcatgatcgaggatcacgggcaggtcgatgtattcatcggcgtcgacgtcggcaagacgaaccaccatgcggtcgcagtggatcgggacggtaagaaactgctggacaagccgttgccgcaggacgaggacaagttgcgggccatcatcgacaaactcgccaaacacggcacgatactgctggtcgtcgatcagcccgccacgatcggcgctctgccggtcgcggtcgcccaagacgcaggaatcatggtcggttacctgcccgggctggcgatgcgccgcatcgcggacctgcatccgggcgaagccaaaaccgatgcccgcgacgcgttcatcatcgccgaggccgcccgcacactaccgcacacactgcgctcgatcgccgtcgccgatgagcagacggcggagttgtcaatgttgtgcgggttcgacgacgacctggccaagcagtccaccgcggcatcgaaccggatccgcggtctactcacacagatccatcccgccctggaacgggtcatcggtccgcacttggatcatcccgcgatggccgaactactgcggaagtacccgacgcccgccgcgttgcgtcgcgccggccagacacggatcgctacttatctgcgccggtgggcgccgcgggcgggtaagcgctgggccgccgacgtcatcactgcactgtcggagcagaccgtcgtcgtcgcaggtaccgacgctgctggcatcgtgctgccccaactggccgcccagctgacccagctgcgtgcctcccgggccgaagtccacgcgcgggtcgaggccatcgtggaggcccaccctcttcaccccgtcctgacctcgataccggcggtcggcgtcaggactgaagcgcgcatcctcaccgaagtcgtcggcaaggacttcaaaaacgccggacatctggcctcctatgccggactggccccggtcacgtggagatcgggtacctcgatccgtggcgatcacccttcccgcaagggcaacaaggtcctcaaacgggcgctcttcttgtccgcgttcgcggcgttgaaagacccggtatcgcgggactattacgaccgcaaacgtggcgagggcaaacgtcacaaccaagcgctcatcgcgctggcccggcgccgctgcgacgtcctttacgcgatgctccgcgacggcacattctacgagacgccgactgccaaggccgcctgaacccgccaccccagccgacgcatgccacggcgtcggcggttaccccctgcccgaaaaccaaacaaaagcgctaaagaaaaaccgctcagcggcttgacaaaaaacatagggacaccc

SEQ ID NO: 2263 - DNA, 1473 bp, unidentified
  source 1..1473: mol_type = unassigned DNA; note = element_326e288
  misc_feature 1..3: note = core
  misc_feature 4..237: note = LE
  misc_feature 238..1452: note = CDS
  misc_feature 1453..1473: note = RE
  misc_feature 7..232: note = bridgeRNA
ctaatggggatcgaccacctcgttggctgagtcgatgaggctggttgccgagccgccaggaggtcagcactagcgtagccagagcgttcaagttctagttctagatcgtgcgcctgctggtcggtgaggtcgatcgggacaactggtgggatgacgtgcttcgagcactgaaccattaggtcgctgccggtcgcctcgggcttgtgtccagggtcggtcgagcgaaggaggcagagattggggcaggtgttcgtgggccacgactgggccgaggagcatcacgacatcgacatccgcgacggcgagggccgctcactcgggcgggcccggctgtccgaaggggtggagggcgtggcccgcttccacgccctggtcggcgccttggtggaacatccgagcgcggtcgtggtggcgaccgagacggatcgtggcttgtttgtcggttcgctggtggcggccggctatcaggtctacgcggtcaacccgatgtcggtggcccgctaccgggagcgtcactccacctcgggcgccaagtccgaccccggcgacgccgcggtgctggccgagctggcccggaccgaccgccatcatcatcggcgggtggcgggcgacagcgacctggccgaggcgatcaaggtgctggcccgggcccatcagagcctgatctggacccgtcagcgtcagctcaaccagctgcgatccacgcttcgggagtactacccggccgccctcgagctcggtgacctgcacggccccgacgccttgggggtgctcaccgtcgctcccaccccgagcctgggccggaggctgtcgcgcacgcggatcggctcggccatcgcccgggccggtcgacagcggcgagtggagcaacgggcggccgagatccaagcggtgctgcggaccgaccagctcagccccccggccgtaatcggcgaggccatgggcgcgtcggtgtcggcgctggtggcggtcgtcggcgagttcaacacccagatcgcccggctcgaggagcagctgtccgagcgttttgatcagcacccggacgccaaggtcgttcgctccctgccaggactaggaacgatcctgggcgcccgggtgctcgcagagttcggagatgacccgaaccgctacgacagtgccaagtctcgcaagaactacgccggcacgtcacccatcaccaaagcgtccggcaagtccagagtcgtgctggcccgctacgcccgcaaccggcggctggctgacgcttgctacctgtgggccttcgcggccatcaccgccagccccgaagcccggagcttctacgacgcccgccgcgcagccggcgacacccacaaccgggccctacgggccctggccaaccgactggtcgggctgcttcacgggtgcctccgacacgacacgctgtacgacgcacatgccgcctgggaccatcgccaccagcgagcggcttgacatgctaacgacgtgggatgt

SEQ ID NO: 2264 - DNA, 1519 bp, unidentified
  source 1..1519: mol_type = unassigned DNA; note = element_32707fe
  misc_feature 1..2: note = core
  misc_feature 3..213: note = LE
  misc_feature 214..1497: note = CDS
  misc_feature 1498..1519: note = RE
  misc_feature 6..208: note = bridgeRNA
ctgatgggactaccttccacagacataggggtctcctgcggggaacgcttccagcgcttgtccctcgaggactgacgtgagacggcgtccccgcaggacggccctgaaggcctgacgcccacaagggtgttgtcctgcgaggactggtccatcagcacggcgccgcgccttcgcccgccccgtccgtgacccaccgtaagggggtggatgttcatgcttggagtaggaatcgactgggccgaggagttccacgacgtggcgcttggccgacctggcgacggcgtgttcgacgagatccacgtcgaccacacgcccgccgcgctggacgcgctgatcgcgcgcatcgtcgcgctggagccggatgcggccgaggtgcgggtggtgatcgagacccgacacgggctgctcgtggagcggctggtggacgccgggttcacggtgctgccggtcaaccctgacctgatcgcacgccggcgcgggccggcgaagaagaaagacgacgccgccgacgcccgcatcgcctgtcggctggcgctggaccggttcaccgacctgcgcgcgctggtgccccacggtgagcaggctgggcagctgcgcgcgatcgcccgcgacgacctgcgcgcccagcgcgacgcccgccggctgctcaaccggctgcgcgccgacctgatcgccacgttccccgccgcactggccatcgccggtgacgacatggccgccccgaccttcctcaagctgctgcagcgctggcccaccgcagacgcgctggccagcgccgcccgagacgagctggaggcgttcgcgcgctcgtgccgtcacggctggcccgaccgcttcaccgacaaggtcaccgccgcgctggccgccgaccagctggccgccaagccctacctcgtgcgcgcaaaggccgacaccatccgcctggccgccgcccagctgctgctcatccacacccaacgccacgcctgggagaagcgcatgggcgcgctgctgctgggcgccccacgcgaaggccgagcccaccagcccggagacgaccgggggccggcggtccctggcggcgagatctacctgagctttcccggcctcggtgatcgcctcgccgccaggatcgccgcagagatcggcgacatcaccacgttcaccacagcgaacgcgcggcaatgctacgccggcaaagcacccgtcacgaggcgatccggcaagtccgagctgaccgtggcgacccgcctggcctgcaaccgcttcctcgccgacgccgtccagcaatgggcgttcaccagcctgctgcgctcccgctgggcgcgcgagttctacgacgccaagaccgctatcggtaacaaccaccacaaggccctgcgcgccctcggcaaccgctggctcgaagtcctgtggcactgcctcacccacggcgtcgcctacgacgaagccgtccacgtcgccaaccgcaaccgcgccctcggacggctcaaccagccgcgaaagcaagccgcttgaagaagaggttgacaaagggtgt

SEQ ID NO: 2265 - DNA, 1512 bp, unidentified
  source 1..1512: mol_type = unassigned DNA; note = element_328700e
  misc_feature 1..2: note = core
  misc_feature 3..276: note = LE
  misc_feature 277..1470: note = CDS
  misc_feature 1471..1512: note = RE
  misc_feature 32..249: note = bridgeRNA
ctcgtataataaatttaaggataatttaaagagaacccttatgaaaactctattgtttatcacacagaaatgtgagataataaatctgtacagtcagggggcgctgtttttactccttgaagttatgcttcctcagaaagagtagcgcctctgctttacggacagatgcgaatgagctggatagcattttagtgctgaatgtctaacgaggttgtgtttccgtaaaatacagaggataacctttgctgtataaatttaatttttgaggtgtatcctatgttttattgcggaatcgatattgctaaacataagcacgaggcttcagtcatcgactctgaaggtaaagctttaattgaaagcatttctttttcaaacaccaaagaaggctgtgaaaagataactgccgtttttgagaaacttggtgcttctgtttcagatgttgtcataggtatggaagcaacaggtcattactggctttctgtgtatacttttttcttggaacttggtttttctgttaaagtgattaaccctattcaatctgaagctttcagaaaaatgtatatacgtcaaactaagaatgattctgttgattctttcataattgctcagataatgcgtttcggcgaatattcttcaagcggtcttgctgaagaatatattattgctcttcgccaactttcacgttaccgtcttgctttagttgacgcttgcggtgattgcaaacgccgtgttatcgctcttttggaccaggtgttccctgagtataacagtctgttttccgacactttcggtaaaacctctgaagaaattcttctttcctgtcctactcctgaagaattgcttgaagtttccactagaaagcttaccaatattcttaacaaagcaagtcatggaagattcggtaaagagaaagccgaacagttaaagactgctgctaaagaaacttttggtattgcttttgccaaagacgctttttcttttcagatcaaacaacttatggagcaaattgtttttcttgaaaatcaactttcagagcttgaagaacagatttcaggtctgcttcatgaaactaatcaatacataacaaccataagtggtatcggtgacaccatagggacaattattgttagtgaaataggtgatatcaaccgatttgaaagacctaatcagcttgttgcttatgccggtcttgatgttactgttaagcagtccggtgaattttccggcactaagaacaggatatctaagcgtggttctccttatctcagaagagctatttggcttgcttcgcaaagagctgcattctgcaaccctattttatctgaatactatcaatccttaagagccagaggaaaacatcatctaactgctgttggaggcgttgcaagaaaaatgtgcaacatcattttcgtcattctcaaagagaacagaccttatcaacctttgcctccaaaacattttaaaaattaattatgattttttctcttttagacttgactttttatagctggt

SEQ ID NO: 2266 - DNA, 1604 bp, unidentified
  source 1..1604: mol_type = unassigned DNA; note = element_3288aff
  misc_feature 1..2: note = core
  misc_feature 3..264: note = LE
  misc_feature 265..1248: note = CDS
  misc_feature 1249..1604: note = RE
  misc_feature 12..284: note = bridgeRNA
ctattacaatataatttggttggaacccctggcaaccagccgggggtttttgaccgtctcgtgccaaagctacaataagaggagcaactggctgacctatcgctccttgggctgcgaagcccgtgcaaaagactgtcagccatcctcttgttgcggcgttcggtttaagcgggttgagccttgagttcgcgtcactcaatagattgaatcggcaacgagaaaaagatggattccggttgcagactttgtattggaggaatgagcgtgaactgtgtaggcattgatgtttccaaaggcaagagcatgatcgccgtcatgcggcctttgggagaagtggtgatcccgccctttgaggtcgggcacaccgaaagtgaattgtgtgagttgtcaaagctattggggaacttggatggcgaaacccgggttgtgatggagaccacggggaactaccatttgccggtagccagcttcctctatgattccgggttttacgtttccgttgtgaatgccatgctggtacatagttacgggaacaacagcctgcggcgggccaagactgataagaaggacgcaatcaagctggccaactacggtctcgaccactggctgacactgcccagatacatcccagaggatgatgtgcggctgatgctgaaaactacataccggcagtaccagcaatgcgccaaagtacaaaccatgcttaaaaacaatctgatctccttgctcgacaccgcttttccagacgcaaaccgcctgtttgcaagccctgccagggcggacggcagtgagaaatgggtggacttcgtagccgctttcccacactgtgaatgtgtctgcgggctgtctgaaagggtgtttacagccaaatatcagaagtggtgcaggaagcatggctacaactttaaccaagacaaagcgctggacatctacgcctccgcctgtgggcatttcagcgtcatgcctcgaaccgatacggccaagctcctggtggtgcaggcggtgtcccagctccgagctgcttccgcttccctggctgcgctcagaaacgagatgcaatccctggcggcgtccctgccggagtaccccgttgtgatggggatgttcggcgttggacctgccctcggtccccaactcatggcggagattggcgatgtgcgccgcttccactccaaaaaggctctggtggctttcgcgggcattgacgcccgcgtaccagtccggccaattggaagtacgcagtcgtagcatctccaagcggggttcttctgctttgcgcaggacgctgttccttgtgatgagcgtagtcctacagcgttcgcccgctgacgagccggtgtaccagttcatggacaggaagcgtgccgagggtaagccctaccgagtctacatgatggcctccgccaacaagttcctgcgcatttactatgccaccgtaaagcaatacctggacagtctcgaagtctaacaaccaatctcagatccacatatctcaggccagcgtcaaaatttttaatggcggtggcttgagttgttatactcttttttcagccatccaagaatcactccttcttctattttgggcttgacttttattagcgggt

SEQ ID NO: 2267 - DNA, 1358 bp, unidentified
  source 1..1358: mol_type = unassigned DNA; note = element_328b73d
  misc_feature 1: note = core
  misc_feature 2..65: note = LE
  misc_feature 66..1115: note = CDS
  misc_feature 1116..1358: note = RE
  misc_feature 1128..1352: note = bridgeRNA
taatgggatgacctgccccgccctccatcgcaacctgaagcgagagaaaggaaggaggaccgacgatgatccgaaacgcaccacgggatgccgccgtttatggcgtcgatctcggcaagaatattttccatgttgtcgggctcgatgagcgcggcgcggtcgtgcagcgcgtgaagttccggcgcgacacgctgctgagcttcttcgaacgcgccaaacgctccgtcgtcggcatggaggcgtgtcccggtgcgcaatggttggcccgcaagctgatcgcaatgggtcaccaagttcgcatcgtcccggtccagttcgtgaagccctacgtcaagtcgcagaagaacgacacgatagatgccgaagcgattgcagaagcggtcacgcgcccaacaatgcggttcacgcatattcgaactaccgaacaggtcgatctgcaggcactccaccgcatacgcgaccagctcgtcagcagtcggacccggctgatcaaccagatgcgaggcttctgccttgaatacggcgtcgccatccgccagggagctggggtcttccgcctcgatttgcctcgtgtgcttgccgatgaagggaatgacctcactctctccatgcgacgcatcctcgccgaacttttcgaggatgtcggtcgcatcgatcagaggcttgccgctgtaacacgggaaatcgagggattggccgcacgtgatgatcgcgcccggcggctgatgacagttcccggcatcggtccgctcgccgccaccgcgctactcgctgctgtcggcgacggccgccaattccatcgcgcccgcgatctcgcggcatggctggggctggtgccgcggcaatattcaaccggcggcaagaccacgctgcttggcatcagcaaacgcggcaatcggtatgtgcgaaagctgctgatacacggcgcccgctcatgtgtcgttcacctcgaccgcagccgcgaccggctcggcggatggctggatgccctgcagacaaggatgcacgtgaacaaagtcaccgtcgcgctcgcagccaagatcgcgcgaatggtctgggccatactgaccaaaccaggcgcctcttacgaacgtagagatccggccatcgcctgagcggaggtcggggcagaaagcgaggctcgggaaacgtgatgacgaaacagtcgatcggcgcattgtaagctcttggcaaaaaagcgtgctctgtgcacggaccatttatctgagaacaatgcgcgcggatctcatcatggcctggctgcaacagcagcccactcgcgagaggccggatacatttaggcggactgccgtcgtcaacacgatcacgaaccttgcccgggcgggacaggtcataca

SEQ ID NO: 2268 - DNA, 1349 bp, unidentified
  source 1..1349: mol_type = unassigned DNA; note = element_3295af3
  misc_feature 1: note = core
  misc_feature 2..71: note = LE
  misc_feature 72..1103: note = CDS
  misc_feature 1104..1349: note = RE
  misc_feature 1106..1339: note = bridgeRNA
tatggaatggctcgcccctttccctcggcgcatgattgcgtcgtcgatcaggatggcacgaaggcaagcttatgaatgagatcagggtccttggtatcgatcttggaaaggacatttgcagcgtcgtcggtctggacgaaaccggaaaagtgctgctgcggcgccggatgcgtcgggacaacgtgctgaagctggcggatagaatgccggactgcgtgatggcgatggaagcctgttgtggagcccatcatctcggtcgacagcttcgcgagcagggccacgatgtacggctgatgtcgccggaatatgttcgtccttacgtgaaggcgcagaaaaatgacgatcgggatgcagaggcgatagcggaagccgcgacccgccccacgatgcgcttcgtcgatttgaagagcgacgagcagctcgatatgcaaattctgcatcgggcccgggatcgtctcgtcggcgagcgcacgacgctgatcaaccagcttcgggcgatcctgctcgagcgagggattgtgattgcgaaagggcgaagcacgctggagcgccagcttgaccaactcctcgcgggcgaaatggcgattagccgccggatccgggagctgatcgaagatatgcgggacgagtggcgcgccctcgatgaccggatcggcgccctcgatacggagttcgcggacctcgcccgcacggatgggtcgatgaagctgctgtcgacaatcccggggatcggtcctttgaacgcgaccgccttcgtagcctcggtcggaaaggccgagacgtttaatcgtggccgcgatcttgcggcgtggctcggtcttgttcctcgacagatgacgaccggaggaaagccgcggctcctggggatcaccaaacgcggcaacgggtacctccggcggatgctgatacacggagcgcgagcggccctgccgtcgctgtccaagggcaagacactgatgggcgagtcgctgcggggattgctgtcgcgagcgcacaagaacacggccatcgtcgcgttggccgccaagatggcaaggatcatctgggcggtattgagaaccgggcggcccttcgacctgaaggcgatcccgtcggccgcataatcgagttcggctggaggggagactttctggccagcgttgtctgcgagtggactgaaaagatggcctgacagtcgaacggtgtgccgagatcctgatccaaaaaatggcgtctgacgccgacgattttatgaggaccggtacgcgcggaagctccatcttggccggggccaatccccgagaccggatacgttggcgcagactgaagagccggaaaagaaattccttgcagtcggggcgagccatacg

SEQ ID NO: 2269 - DNA, 1355 bp, unidentified
  source 1..1355: mol_type = unassigned DNA; note = element_329a7cb
  misc_feature 1..2: note = core
  misc_feature 3..82: note = LE
  misc_feature 83..1105: note = CDS
  misc_feature 1106..1355: note = RE
  misc_feature 1113..1351: note = bridgeRNA
ttaatgagatggtcagcctgaccgagaagccctgcaggtttacgcttgcagggcttttctcgttttcggcggaggatctctcatgaacacgatgacgcttctcggtatcgacattggcaaacacagtttccacctgcatggccaggacacccaaggccatcaggttttgcgcaagaagatgacccgtggacagttgctcagaagcttggggcagctaccaacctgcacggtggtgatggagtcttgcggtggcgctcactggttggctcgggagattggcgcattgggacacgaggtgaagttgatcgctccgcagtacgtcaagccgttcgtcaaaggtaacaaaaacgacttcattgatgccgaagcgatctgtgaggcggcgagccgccccacgatgcgcttctgcccgatcaaaacggcagagcagcaaacgctttctgccttacaccgtgttcgaggctcgctgattgagcatcggacggcggcgactaatcagattcatggttttctgctggagttcgggattagcctgcccatcggtgtcacggccttgcaccgcatgccggcgctgctggacgatcctcaacacccagttccattgcgtctcaagggcctggtgatgcgcctctattatcaaattcaacagctcactgatgagatcaaggacatcgagtccgacctgaaacaacagttgaaagaagacgatgccgggcaacgtttgcagagtattcctggtatcgggccgatcaccgccagcgcggtattggccgacgtgggggatgtctcgcgctaccgcagcggacgtgattttgcggcttcgttagggctggttccggggcaatactcgacgggcggaaagacggtgctcttggggatcagcaagcgtggcgataagcacatacgccaactcttggtgcagggcgcgcgggccatcatgcagcatatcgataaacgggaagatgcccttgggccttgggttcaagacctgctgaggcgccgacactccaatatcgtggcctgcgccttggcgaacaaactggcgcgaatcgtgtgggcggtactggccaaaggcggccagtacgacccacatccgaacgcttgaacgtacagctttcccaccggcttttgcgacgtcactgactgatgacagtaaacggcaaacggcccgactgagaacctggcaacaaaatcagctttagaggctgagggttttttcaggacagtcgggagcggctactcatcgagggccgagcgttgttagcgcaacgctcactacgagcccggatacattagcgcaagccagctttaccgaaaacagcccatggggttgcaggagatgggctgaccataca

SEQ ID NO: 2270 - DNA, 1423 bp, unidentified
  source 1..1423: mol_type = unassigned DNA; note = element_329cc52
  misc_feature 1..4: note = core
  misc_feature 5..206: note = LE
  misc_feature 207..1409: note = CDS
  misc_feature 1410..1423: note = RE
  misc_feature 1..193: note = bridgeRNA
ctccgtaagttgttaggtggcccgggagggccggatgtggcttatgaggtcttgccttcagtggctcgatgggagtggccgtccggctctccggggcgccctggctgctgattgagatgtgcgcgcttgtgcggtcgctgattacggagatgacggcggggtgttcctcgggccaacggcacgctgtgcggaacgaggaggggcgagtgagcgaccgacggagcgaggtctgggtcggtatcgacgcgggcaaggggcaccactgggcggcggtggtcgatgggaccggtgcgacgttgtggtcgaagaagatcgagaacgacgagtcggcaatccttgccgcgctcggcgagatcctggagctggcggacgaggtccgctgggcagtggacatctcggggacgtcctcggcgctgctgctggccctgctcgcggctcacggtcagcaggcggtctacgtgcccggccggactgtcaaccgcatggccggtgcctatcggggcgaggcgaagaccgacgcccgcgacgcttacgtgatcgccgagacgtcgcgtcaccgtcgggacttcgccgcgattgatgtgccggctcagctggccgccgacctcgcgctgctgaccgctcaccggtccgacttggtggccgaccgggtgcggatgatcaaccggctccgcgacgtgctgaccggcgtcttcccggccctggagcgagcctttgactactcggcccacaagggtgccctggtgctgctgaccgggtaccagactccggctgcgatacgccgccgcgggcgggcccggctgacagcctggcttgccaaccgcggtgtccgcaatgccgacgcggtcgcggccaccgctctggaggccgctcaagcccagcagaccgccctgcccggtgaggacgtcgccgggccgatcgtcgctgagctggctgccgagattctcgcgctggacgaccggctgaagcgcatcgacaagcagatccgcgagaccttccgcgcccatccgcaggccgggaccatcgagtctctgcccggcatgggccccatactcggcgccgagttcgtcgttgccgccggcgacctcacggcctatgcggacgccggccacctggcctccgctgccggtctcgtgcccgttccgcgtgactccggccgcaggactggcaacatgcaccgtcccaagcgctacagccgtcgcctgcgcagggtgttctacatgtccgcgcagaccagcatcatccgcgaggggccgaaccgggacttctacctcaagaagcgtgccgaggggtgcaagcacgtccaggccgtcatcgccctggcccgccgacgagccggcgtcctgtgggccctcctgcgcgacaaccgggtgttcacctccgacccaccggtcgcgcacgcggcttgactcagtcattgaga

SEQ ID NO: 2271 - DNA, 1142 bp, unidentified
  source 1..1142: mol_type = unassigned DNA; note = element_329d38f
  misc_feature 1..2: note = core
  misc_feature 3..173: note = LE
  misc_feature 174..1127: note = CDS
  misc_feature 1128..1142: note = RE
  misc_feature 26..168: note = bridgeRNA
cttgtatctttaaaaataataatattgaaaacgggagacagaccgacaaatacttggtggataacaccgttgtttagcgaggtcgtctcctgaaagattcctaaagcccgaacagttgcatgagttaaccaaactcgtatctgcaaggatgggatacaggaagaaggagatacatggagaaaaataactacataggcatagatattgccaaagaatctatggaggtgatggtatacgaaggaaaagagcactgggcttacaccaatgatgaaaaagggcttgctaaattgttggcgaaaatgaaaagattgtctccctgtttaatagtactggaagctaccggcggttacgaaattaccgtggctgcagagcttcaatcccatggtttccccgtggctgtagtaaatcccaagtatattcgcgattttgctaagtctacaggtatactggcaaaaaccgatattctggatgcccaagtgattgctcgctatgctgcaacggtgaagccggctccccgcgtcttgccgtcggaagagacgcgtaagctgggagtgataataatgcgtcggcggcaaataacaaccatgctgacagcagaaaacaaccgttttcagactgctgatccggcagtaaaagcgcgaattaaacttcatattaagtggttggagcaagaactggatgatattaataaggaactgaagcaaaaagtacaagataatcctgattggaaagaaaaggacgcaatactacagagtgtgccaggtgtaggacccaatctttctattacgcttttggcagattttcctgaattgggaaatttgaatcgcaagcaaattgcagctctgggtggagtagcgccatttaatcgtgatagcgggaagatgcgagggaagagaacgatctggggaggacgcgacagcgtacgaactgccacttacatggcagctttttcagcaatacgatgcaatgctctgttcaaatctttttataagcggctgattactgccggtaaaaaatttaaagtagccatggtagcgtgcatgcggaaattgctttgcgtattgaatgcaatgcttaaaaatcgtaccccttggaattatagtgttaaccaatcaattagtccttgacaagtaacacagttg

SEQ ID NO: 2272 - DNA, 1326 bp, unidentified
  source 1..1326: mol_type = unassigned DNA; note = element_32a6a15
  misc_feature 1: note = core
  misc_feature 2..70: note = LE
  misc_feature 71..1111: note = CDS
  misc_feature 1112..1326: note = RE
  misc_feature 1110..1314: note = bridgeRNA
ctatgtatggactcctccaacccagtcacctaggttggaaggtcgaccaaaaccagaacggagtccatacatgtcatattcaactacagtcggtgtcgaccttgcaaagaacgtcattcaggtctcagtcgtatcgagccacggtaaagagacgttcaaccgctcactaacgcgcaagaagttcgcggagtttctgggtaaacaggtgctatcgctggtagcgttcgagtcgtgtgcgagtgcgcactattgggctcgtatggcgcagcggcatggacacgagacgcgcattattccggccaaagccgtggtgccatttcggcagggccacaagaccgacgccaacgacgcactggcagttgccgaagcggcgcgtcgaccaaagatcaaggacgcaccgatgaagacggtggagcaacaggggctgcaggcgatccagcgggcccgggaactgttgattcaggagtgtgttgcactatcgaaccatatgcgcggcatcctgctcgagttcggcatcaccataccgcagggctttgcatcgctgctgcgcacgctgcctgaggtgcttgaggctggcgacaacgagttaccggacttctaccggcccacactgcatcgtctgtacggccgcatgctcgagcttagggaagacatcgaggcattgaccaaagagaccgaggtgctggtcaaggatcacccggtttgcaaccgcctgacggcactggaaggtgtcggtccgatcggtgcgacatcgctgtacgcgacgctcggatcaggccaggcgtttgccaggggccgcgagttctctgcttacctcgggctgacgcccaggcagctgagcagcggcggcaagacaaatatcattggcatcagtaagaaggttggcaatcggcggttgcgatcgatactgatccagggtgcgctagcttacgtgtatcgcatgaaggagccgcggtctgcgaaagaccgatggctgaaggaactcatcgaacgtgctggtccgcggcgcgcggcggtggcactggctaacaagaacgcgagaactgcctgggccctggtgactcaggggacagaatatcaacgtcaagcgaaactggaggtggctgcttagaacgtcctgcaaacagaaaccacgtatcagataacgatatctacccggtcaaacctgcaccgctttgaggccctagagcccactgacccttagaggaaccggggtgcgcatacatagagggccaggagatagcgtctccgactaaaggccgaatatacaaacgcgtctgaattctgatcacggaaactgtttgctagactggaggagtccatata

SEQ ID NO: 2273 - DNA, 1276 bp, unidentified
  source 1..1276: mol_type = unassigned DNA; note = element_32a7a43
  misc_feature 1..2: note = core
  misc_feature 3..251: note = LE
  misc_feature 252..1172: note = CDS
  misc_feature 1173..1276: note = RE
  misc_feature 15..202: note = bridgeRNA
cttgtattatccctccagtgcagagaaaatcggccagttttctctgcctgcagtccgcatgccgtatcgggccttgggttctaacctgttgcgtagatttatgcagcggactgcctttctcccaaagtgataaaccggacagtatcatggaccggttttcccggtaatccgtatttgcaaggttggtttcactatggaacatgaacttcattatatcggtatcgacaccgctaaagagaaactggatgtcgatgtgttgcgtcctgatgcgtcatcgcaccaaaaaattcgctaacaccactaaagggcacgatgagctggtgagctggctgaaaggtcacaagattgaccatgcgcatatctgcatcgaagcgaccggcacctatatggaacctgtcgctgagtgcctttacgatgctggctacatagtgtcagtcattaatcctgcgctgggtaaagctttcgctcagagtgaaggactgcgtaacaagactgataccgtggatgcgcgcatgctggcagagttctgtcgtcagaagcgccctgcagcctgggaagcgcctcacccgcttgaacgcgcgttgcgtgccctggtagtccgccaccaggcgctgacagatatgcacacgcaggaactgaatcgcactgaaacggcgcgggaagtccagagaccgagcattgatgctcaccttctgtggcttgaagcagagctgaagcgtcttgagaagcagataaaagacctgacagacgatgatccggatatgaaacaccgcaggaaactgctggaaagcatcccgggtatcggagagaaaacatctgcggtattgctggcttatatcggtctgaaggaccgcttcgcccatgccagacagttcgccgcttttgcgggtctgacaccacggcgttatgaatcaggtagcagtgtgagaggggcgagccggatgagtaaggccggacatgtgtcgcttcgcagggcgttgtatatgcccgcaatagtagccaccagtaagactgagtggggacgggcgttccgcgaccgtctggcggctaatggcaagaaaggaaaggtgattctcggcgcgatgatgcgcaagctggcacaggtggcgtatggagtgctgaagtcaggcgtgccgttcgatgcgtcacggcataatccggtagcggcgtaaaaatcgcggaagggatgaaaaaacagcgcctgacggcgctgtgtctggcatgcctgcaatccgggaaaccggaccaggaaaaaacttgcaggccataacagtat

SEQ ID NO: 2274 - DNA, 1508 bp, unidentified
  source 1..1508: mol_type = unassigned DNA; note = element_32a9a16
  misc_feature 1: note = core
  misc_feature 2..262: note = LE
  misc_feature 263..1402: note = CDS
  misc_feature 1403..1508: note = RE
  misc_feature 5..253: note = bridgeRNA
cattacagtttgagccgtccgaaaggacggctcttttccgttgcacggttatacgattgagccgtaccggtggtcgctggccgaccgccccggacggccgtcagcccctgccccgtagagggcccgggacgtgttgccgccggggcgggaggggccgcggggaacgactgatagagatgtgccgggcccggaccgggccacggcggggtaatgtgggtgtcgcttccgcggctaacggccggctcaagggagaggatacaccatgcctgcagcagagacgcccgtggcctacctggggatcgacgtcgggaagagctcgcacagcgcgtgcgcgctcgatgcgggagggggcgtcgccttcagggccgagctggcaaacaggcccgacgacatcgaccggctgctcgagcgggccggctccggcgcgctggtcgtcgtcgaccagaagcgaaacatcggcgcactggtcctcgcgcgcgcccatgcgcacgggaacccctgcgcctacctgcccggatatgccgagaagcaggcccgcgggatgttccccggcatcgcgaagaccgacgccatcgacgccgaggtgatcgcgcgcaccgcgctcggcgtgccccgcgccctcaggccggcgcccgaggagcccgaggggaccgcctcgctgcggatcctgtcgtcgcagcgcgagtttgcgtcgtccgccaggacccgcgcgaagaacaggctgcgcgcgagggcgcggtcgacccgtcgagccgctggcaggtgtcgatgctggccgagttcggcggggccgccgggtgctcggccgccggctggcgcaggttctcgaacgccgccaggcgcgcgggcgcccccgcggcgggggccaggaggctctgggaggcgctgctggcccccgccgcgctcgggaaggcggctcccggccggcgaggacgtcgcggtccggatactcgcccgggagatagcctccctcgacgccgacatcgaggaactcgactcgctcgtggccgactcgctggcgggcgacgaggtctacgagtgcctcctcacggtgcccgggatcggccccaagaccgccgcggcgctggtgacgtcgatcgacatatccgcgttcagggggcacgacgagctcgcgagctattgcggcgtggcgccgtcagacaggcgctccgggagcagcatcaggtcgacgtcgcctcagcacggcgggaacaggcggctcaagaacctgctcatattcagctgcaactccctcatcggcacggacaacaggttcgggaggtactacggggagtgcagggcgagggggatgaggcacagcaaggcgctgaaggcggtcgcgaggaagaggctcaaggtcatctacgcgatcatgcgcgacgccgtcccgtacgcggcctagcgggcggcgggatcaaccgaagaggaaaccaagcgggggcgccagatgcccggatgcgtcatgccgaaatggcgcgaagcacgcggttgacaaaactatagagaca

SEQ ID NO: 2275 - DNA, 1205 bp, unidentified
  source 1..1205: mol_type = unassigned DNA; note = element_32ad0b5
  misc_feature 1..2: note = core
  misc_feature 3..206: note = LE
  misc_feature 207..1190: note = CDS
  misc_feature 1191..1205: note = RE
  misc_feature 12..188: note = bridgeRNA
cttgtatcttgcaatcggtagtggtgagccaccactgcctggagccgaagcagcttgggcccaaccttaaggccagaccttgagccgtagataaagccttcgactccacctcatcgccaaatccgacactgaacggtagccaagggttcgaccctgcatgcacaaggcaaatgggcgattaggcattttccgtgaggacccgctttatgcattatctcggaatcgatgtagccaaagccaaactagactgcactcttttgctggatgccgccaataaacgcaaagccaaatgcgtgagcaacgataaaaccggcattcatgctctgttgtcatggctgaccaaacaaggcttggagccccggcaggttcatgccgtgatggaaggcaccggcgtgtatcacgaacaagcagccatcgccttgtgcgatgccggtgtgatcgtttccatcatcaacccggcgcaaatccgcgacttcgctaaaggcttggcgattcgaaccaagaccgatggcgtagatagcttggtcctggcgcgttatggtgccttgctccaacctatggcctggattcctcccagccggcaagcccgtgcgctacaggcgttgctggctcggcgcgaggcgctgcaacaggatcttcgccgtgagctgaatcggcaagaaaaagccgaagccaccgatacaccagagttgattcagcagtcgctgatcgagtcgattgcgtttatcggaacacaactggccaagttgcagcaggatatcgacgaccatattgaccatcacccggaattgaaagcggacctggccctattgagcagcattccggccattggcccgcagtcgggcagcaatcttctggccatcatgcatacccatcatttcgtcagcgccgagcaattggccgcatatctcggtttggtgccagtggaacgtcaatcaggcagttcgctcttgggccgagctcacctatccaaagctgggccagcgcgccttcgagccgtgctgtatatggcagcagtggtcgctatacgatacaacccacatgtgaaggcgctatatcaacgattgctagcccgaggcaaaacgaaaatgtccgccctgggagcagctatgcgcaagttggtccatctgtgctttggcgtgctgaaaacacgccaaccttaccgggctgattacgcaggagccgcttgacgtgaaagacggtat

SEQ ID NO: 2276 - DNA, 1352 bp, unidentified
  source 1..1352: mol_type = unassigned DNA; note = element_32affc0
  misc_feature 1: note = core
  misc_feature 2..62: note = LE
  misc_feature 63..1112: note = CDS
  misc_feature 1113..1352: note = RE
  misc_feature 1124..1346: note = bridgeRNA
taatgagatggtccgctccgtccaccgatgcgacgatggcgatgcagacaggaggagtgatcatggcacatcgcaaacctacgaacgccgcggtctacggtatcgatctcggcaagaacatcttccacatcgcaggcgcggatgccgacggtgcaatcatcggcaactggaaactccggagagatactatcttgcagttcttcagagttgcagcgccagcactgatcggcatggaggcctgtccgggatcgcagtggctggcgcgccatctgcaggcattcggacaccgggttcgcattatccctgcgcagttcgtgaagccttatgtaaagtcgaacaagaacgacattatcgacgccgcagcaatcgcggaggcggtaacacggccgacgatgcgctttgtcgagatcaagactgccgctcaggccgagctgcaggcacttcaccgaatccgtgatcgaatggtcgccagccgaactcggctggtctgtcagatgcgggcgatgtgcatcgagtttggcgttgcgatccaccagggcatcggcaagtttaaggctgacatgccgcgcgtactggtcaacgaggagaacgatctgacgccgatgatgcgacggcttctggctgatctgttcgacgatttgcgtcgcctcgaagagcgtatagccgcggtgacccgtgagatcgaagccaatgccgcccaggacgaacgatcccgccgattgatgacggtgccgggcatcggaccacttgcggctaccgcgatcctggcgtcagctggagatggtcggcaattccgatcggcccgcgatatggctgcatggttggggctcgttccgcgccagcactcgaccggtgggaagtccacccttttgggcatcagtcgacgtggcaatcactatcttcggcgcctgctgatccacggtgcccgatcatgcgtcatgcacctcgatcgaagccgagaccgccttggtgcctggatcgacagacttcaaaagaggatgcacgtaaacaaggtcactgtcgcgcttgcggccaaagtcgcacgcgtcgcatgggtgatcctcaatcggccgggagcgatctacgaacgtcgtgaacccgtgacagcgtaggttcatggtcgacagactgcgaggttcgaggagacgatgacgagacagttgatcggcgcactgtaagccttcctgccgaaagcgtgctcaagcacgatcaagttatccaggaacagcgcgcgcgtatctcatcttggcctggctgcaacagcagcccactcgcgtgaggccggatacatttaagcagactgtgctcgttacgagatccaaaagccttgcaaggacggagcggaccataca

SEQ ID NO: 2277 - DNA, 1339 bp, unidentified
  source 1..1339: mol_type = unassigned DNA; note = element_32b3f09
  misc_feature 1: note = core
  misc_feature 2..282: note = LE
  misc_feature 283..1296: note = CDS
  misc_feature 1297..1339: note = RE
  misc_feature 104..262: note = bridgeRNA
ctctaagtttgcagatgattgcggctcagccgcccaagaaagcaaattggtcgagaaaaacaatagcaattcaagacagtttcttacctttgtcgttgtaaggaagaatcggtctgtcgaagaggtaaaccagtcaatcttccagaacggagtctatagattgtttaggacctccccgacatagttgcaaagacaagatagaaagttatcggcatagagcctcgttagagtgttagtccatacaactattgaccaattctttaaaaatacagatacaaaagtatgaaaaaattatttattggaattgacttttcgaaagaaaaaattgatgtggcaatcatttttgccgaggggctgacagaaacctccatgagattgttcaatgagttcaagaactccgtatcaggttacaagcagctggtcaaatgggttgaggagagctcaaacgagacagaaccgtcactgtggttgttctgcggcgagaataccggcgactacagcaagccgttgtgcaacttcctctacggaaggggctttgacatgtggcttgagaatgcaaaaagcatcaaggacgcatctggaataaggagacttaaatccgaccgcaccgatgctaacatgattgctgaatatgcaatgcgaaacaatgacaaggctatagtttatgaacctctcagcgagagtctgtcgcagctccgcgaactgtttctctacagacagatggtagtaagacacagatgcagttttcaagtcagaagaggcgagaaaagactcaacatggagaagtcacctgtcaagacaatgatctcccagagcggacggcatatcgttaccgaactgaacaagatagacaagcgtattgcggagctgatagattcagatgaagaacttgcacaagtcttcaccatcgtaacctccatacctggcataggaacgcagaacgccgtatgtctgatggtttacaccgataatttccgcaggttcaactttgactcaaggaagattgcctgctattatggaatagccccattcggcagggattcaggaacaagcgtgcataccgatccacacgtgcactacatggcaaacaggcagattaaggcaatgctgtctcaggctgcactttctgccgccaaattcaatcccgtcatagcctcatactattcaaggcttatagaaaggggcaaaaagaggcagatagtacttaacaatgtcaagaacaaacttgtacacattgtgacagccatggtcagaaacaagcagcttttcgacaaggattataaaatatcagcataaacctaaaaaaatggtcgaaatatttggattttaacatagaaag

SEQ ID NO: 2278 - DNA, 1530 bp, unidentified
  source 1..1530: mol_type = unassigned DNA; note = element_32be715
  misc_feature 1: note = core
  misc_feature 2..79: note = LE
  misc_feature 80..1123: note = CDS
  misc_feature 1124..1530: note = RE
  misc_feature 1291..1520: note = bridgeRNA
taatgggatggcccggccgtgctcagcggcctaatttgctggactgtggctgggaggcgtgaagcaaagctcaaggagcatgcgatgcgcacatctcagaagcacgatcgggatcgacatcggcaagaacaccttccacctcgttggctttgaccagcggggtgccatcattctgcagcagaaggtgtcacgcagtcagctcgaacgccgtgtcgccaatattccacgttgcctgatcggcatggaggcctgctcgggctcccatcacatcggtcggcagctggcggagatcggccacgatgtgcgtctgatcccggcccagtacgtgaagccgttcctcaaagggcacaagaacgactaccgcgatgccgaggcgatcgcggaggcagtgcagcggcccaccatgcacttcgtgacgatcaagacgccggaacagatggatttgctggctttgcatcgcgtgcgctcacgtcttgtcggacggcggacgggcgtgatcaaccaaatccgcggcttcctcatcgagcgcggcatcacggtgcgtcagggcccgatgcccttgcgcaaggcgctatcggaaattctaagctcagacactggcgcgctttcgcccagaatggttggcctcatcgctgacctggcccaagactggcgtcggcttgacgagcgcattgcagccgtgtcgaccgaaatcgaagcgctggcggaacaagaccacagttgtcagcgcctgatgaccgtacctggggtcgggccgatcatctcgagcgccgtggtggcggcgatcggcaacggcaccggattcaagcagggccgcgactttggcgcttggctggggctcgtgccgaagcaggagtcgacgggggatcgcacaatcctgggcaagatctccaagcgcggcaacaagtacctgagaacactgttcgtgcaggccgcgcacgtcgttctcgagcggcggccgagcgcagcgatgcggggtttgtggccctgggccgagcaagcttcaaaacggctgcaccgcaacatgctggcgatcgcgctcgccaacaagctcgcccgcatcgcctgggcggttctcgcgcgcggtggcacctatcaaccgaggatcacccatgcagcatgacaaaggctcgctcaggttcaccaaggagatgcccgccacccctctccgccaccatcactcgcctcatggggcgagcgagcgacggtggctccgaggggatggcttcacgtgatccggctgacgtcaaacatcagaacgaagactgagtagtttagtatcgacagctttcccaccgaggtctgcgagatggaatgaagagatggacgaacggtctgcccggcgcaaccaagagactgggtgccatgatggcccaacgaggtctttccgctagtcagcctcggatgcgcgcggatacccatgatggcccggagcaaatgctccacgttagaggcctgatacattgttgcagctctcacgttcgtcggtcttggagcttctgtcttgcaacgcacggcccgggccataca

SEQ ID NO: 2279 - DNA, 1297 bp, unidentified
  source 1..1297: mol_type = unassigned DNA; note = element_32d57f3
  misc_feature 1: note = core
  misc_feature 2..145: note = LE
  misc_feature 146..1174: note = CDS
  misc_feature 1175..1297: note = RE
tgtatgatgatcccatcagaaagaaccggccagttctctctgatggcagtccggatgccgtggccgggcttaggcttttgcgcctgttccgtagatctttgcaccggactgccgttctttcttatgtgacaaaccggacagtatcatggaccggctttcaccggtaacccgcattcgcaaggttggtttcactatggaaaatgaactgtacttcatcggcattgatgttgccaaaactaagctcgatgtcgatatcctgcgccccgatggccggcatcgcggtaaaaaatttgaaaataccgcctccggacatgaagagcttgtccgctggcttcgcagccatgatgtgaaccaggctcatgtctgcatggagtccaccagtacctacatggaagaggctgccgcgtatctgagtgatgccggttataccgtctccattatcaaccccgccctgagtgccgccttcgcccggagtgaagggttgcgcagtaaaactgacaaagtcgatgcccgtatgctggctcacttctgtcgggagaaacgcccgtcggcatgggaggctccgcacccgacagagcgggcgctgaaagcgctggtgctacgtcatcaggcgctgacagagatgcagacgcaggagaaaaatcgtcaggaaaccgccccggaggtccagttagccagcatcgatgtgctcctggaatgcctgagcgctgaactgaagcgtatcgaaaaacagataaaggacctgacggataacgacccggatatgaagcaaagacggaagctgctgaacagtatcccgggcatcggcgagaaaacggcggcggttctgctggcatacacggggctgaagctgaagttcgacacggcgagacagttcgcggcctatgccgggctgacgccgaaacagcatgaatcggggagcagcgtgatgcagacgagccggatgagtaaagcgggtccggttcagttgcgcagagcattatatatgccagcaatatcagcgctgtatcacacggcgtggggaaaagcgttcggaaagagactggaaggtaatggaaagcgcccgaaagtcataataggcgcgatgatgcgcaagctagcacaggtggcgtacggagtgctgaagtcaggtgaaccgttcgatgcatcacagcatgtaatagcggcagcgtagggacgaatcggctgcgtgaatagagctacagcaccctccgggtgctgtagctggtgtgcctgtcatccagaaaccggagaggatcccggcaactaaaaaatgattgccgggactcacagtatc

SEQ ID NO: 2280 - DNA, 1610 bp, unidentified
  source 1..1610: mol_type = unassigned DNA; note = element_32d74ec
  misc_feature 1..2: note = core
  misc_feature 3..281: note = LE
  misc_feature 282..1496: note = CDS
  misc_feature 1497..1610: note = RE
  misc_feature 17..304: note = bridgeRNA
ctcctaatataggtagtgtaaggttcaagcacccaacagccagttgggacttatccttctcattgtttaagctgtataatgattaggcatcggtctgacagattcctccttggacccaacataggcgtccgtagaaaagcccgtcaaccagccatcatttgcagccgttcgatttatgcaggttgaactactatgaagtacgttcgtttgataccccaggagatggaataagcaatgagtaaagctggaaccatgcaaattcacttttggaggtacgtagaatgtacaacgcagtaggtgttgatgtttcaaaaggcaagagcaccgtcgcagtcctgcagcctggtggtgttatgattcgtaagccctttgatgtgctccacacatccggggagctaaaagctctctctaaatatcttggtaaccttgaaggtgatactaagattgttttggagtgtacaggcagataccatgagccactggcaatcgtcctatatgaggccggattattcgtttctttggttaatcctcatctcattaaaaactttgctaacaactcacttcgcaaagtcaaatctgaccctgccgatgccaagaagatagcacgctatactcttgacaattgggctgaactgcgtcaatattcaagcatgaacaatacacgtactcaattaaaaactttaaattcacaattcagcttctttatgaagcaaaaggttgccgcaaaggcaaacctgattgcactgttggataatacatatcccggtgtaaacaaactctttgacagccccgtccgtgatgacggaagcgaaaaatgggtggattatgctttctctttctggcatgtggactgtgtccgcaagatcagtttaaaagcctttaccgagcgctacagcgctttctgcaagaagcatcggtataactttcagcctgcaaaaccggaagtgctgtttcacgcctcaaaagaacttgttgccgttttcccgaaagagaaaacttataagctgttgatcaagcaaagcatccagcaattaaaccttgcttcagaacatgtcgagcagctccgcaaagaaatggatattcttgcttccgctttgtctgagtatacgactgtcatgagtatttatggtgtaggtaaaacttatggtcctcagctcattgccgagattggtgacatatcaagattcacccacagagaagccttaacagcctttgctggtgttgatcccggtgtggatcaatccggtcagcacaactccaagagcaacagagcctccaaggtcggttctgcaaggctgcgtaagactctgttccagatcatgaccaccttgctccagaatgctcctgaagatgatcccgtatacagttttcttgacaagaaacgttcagaaggtaagccttactatgtctacatgactgctggtgccaataagttcctgcgcatctactatggcaaggtcaaagagtgtctgcgtaatttagagcagaacaactaacttctatccacatctcctttctctttacaaaccggcttttcaggcggttttaatgttatgcccaaaaatcaatttaaaatatttttcaaaaacacttgactttttattagcagg

SEQ ID NO: 2281 - DNA, 1373 bp, unidentified
  source 1..1373: mol_type = unassigned DNA; note = element_32d80e8
  misc_feature 1..2: note = core
  misc_feature 3..76: note = LE
  misc_feature 77..1114: note = CDS
  misc_feature 1115..1373: note = RE
  misc_feature 1114..1360: note = bridgeRNA
tgatggggtggacggccccctacggcatcagtgtgccagaatgaggttgttgcaatctcagacaagggagccgtccgtgagagagattatccgcattggggtcgacacgtctaagtatatttttcagctgcatggggtggacgcggcggagcagccggtgcttcgcaagcggctgtcgcgcaggcagatgctggagttttttgccaagctgccggcgacgaaggtggggatggaggcctgcggcgcggcgcaccactgggcgcgggaactgggcaagctggggcacgaagtaaagctgatggcgccgcagcacgtgaagccctacgtcaagcgcaacaagaacgacggacgcgacgccgaggggctgtgcgaggcgatgagccggccgacgatgcggttcgtgccggtgaagacggccgagcagcaggccgcgctgatgctgaccggcatgcgcgagcagatggtggcccggcgtacccagctcagcaacatgatccgcggctatgcggccgagttcggtatcacggcggccaaggggctcgacaagatcgaaccgctgctggccgagatcgcacaagacgagagcgtgccggttctggcgcgcgaactgttggcgcagcagggccaccaatacgcgcagctgcaggcggagttgaaggcgatcgaagccaggctgagggcctggcaccgcgccaaccccgacagccggcggctggcagagattcccgggatcgggccggtcggcgcgccggagttgatcatgaagacgccggatccgggcgcgttcacttccgcgcggcattttgcggcctggatcgggttgactccaaaggaccattccactgccggcaagacccggctcggcaagatcacccgtgccggagacgagaggctgcgcagcgtactggtggcaggagcaaccgcggtgatcaagcaagccaggcgcggccgcggccatccgtcgccctggttggtggctctgctgaagcgcaagccgcccaagctcgcggccgtggcgctcgccaacaagaatgcccgcatcgcctggaagctgatgatgacgggggagagatacaacggcgcgcggatgcaggctgcatccgcggctgcctaagagatcggccgaccggttcgttcgaacggccgaagccggagctgcaagaggagcagatggtaggatcgatcgatccgaggtgcgagacatcccgtgggacccatcggccgaacccaggtcgcgtggttgattggagctcgcgtcgcggaaaccatcttggccagtggtccaaaccgaccacaccaacaggccggacatatggacgcaagcgatccgatcagaccgtcaaacctcttgtgccacgggggccgtccacata

SEQ ID NO: 2282 - DNA, 1555 bp, unidentified
  source 1..1555: mol_type = unassigned DNA; note = element_32dc5cd
  misc_feature 1..2: note = core
  misc_feature 3..236: note = LE
  misc_feature 237..1418: note = CDS
  misc_feature 1419..1555: note = RE
  misc_feature 6..219: note = bridgeRNA
ctcgtattattaaattgcgctaaacgaagcgctagttgtctagtgttttgtataatgcacacaggcgctgtggactggtttatcctcctaccgctagacggtttctttttaggctccagccacagctttttgcttaattggttatgagtcagataccgttcgacggtttatatggaacgaggatccagtagcagaaagtctgtggagcattcagcgtacttttaaagaaagttggtatggacatgatttatgttggaatcgatgtcgccaagaacaaacacgattgctgtatcttaggcagcagcggagcggtgctccgtgaggcatttactctcagcaatgatcggaagggatttcaagaacttttctctgcaattcacgaggccttactccaggaaggcacagaccaaataaaagcaggacttgaagctaccggacattacagtgagaaccttgtggctttcctccgtaacagcggaatccagccggttgtcttcaatccgttacaggttaacctgtttcggaaatcccaatcccttcgcagaaccaagacagacaaggtagatgcaaaatgcatcgctcagttgctcatgtcagcagaatcaactcctgtatttgcatcttaccagattcaggagctaaaaacactaaccaggcacagatcccgtctggtctctcaacgaagcaaactcaagcaatatatttctcgtctggtcgacattctttttcctgaattaccctctgtctgctgctcggctacacaggcttccatgaggactttgctcctggaacttccaagcgccagacagatcgcagcctgccggattgatcgtttaacaaacttgctgtatgcggcctccaaaggccactattcccgtgagaaagctctcgagattaaacagttagctcagcagtcgattggtgcgaatagtcctgcttcagagctggaactccgccttactttgcagcagcttgatttccttttggaccagctcaagcaactggaaaaagccattcagacaattgttgctgcgattcactctcccatcctttctattcccggtatcggtcccacgctcgcagccatcattctcgcagagattggcgacattcatcgcttcagttctccggataaattgcttgcgtttgcaggcttggatccttccacttaccagtctggaaagttcaaggctggctacacgccgatggtcaaacatggctcgacgtatcttcgctgggctttgatgcaagctgctcgtctggcttccatccactgtgctaccttccgggactatatggattctaaacttgctcagggcaaacattactttgtcgctctggggcacgtttctaaaaaactcgtacgcgtcatattccacattcttactactaacgaggcctttgttcctcaagcgtagctcgagtcccttactccttgtctcaggcttgaactttagggttcaggcctgttcagcatgcattattttcaaagttcattgcgtctagcgtttacgctacttttttcttatttaggacttgactttatatagtcagt

SEQ ID NO: 2283 - DNA, 1354 bp, unidentified
  source 1..1354: mol_type = unassigned DNA; note = element_32dd57d
  misc_feature 1..4: note = core
  misc_feature 5..200: note = LE
  misc_feature 201..1340: note = CDS
  misc_feature 1341..1354: note = RE
  misc_feature 1..195: note = bridgeRNA
ttccgtaagactgtgcgtggcccgggagggccgggtgtggctgaggtcgccttgcgttctggtcgcttactgggaatgtccgcccggccctccctggggtgccctggctgctgattgagatttgcgctcggtcgctggttacggatgtgtcagctgggtgctccacgggttcgtcaacgccggatctggagaaagggagcatgcgcgtgccagcagcagcggacaaggcctgggcagggattgacgtcggcaagaggcatcactgggtctgcgtggttgaccgggacggccggcagcttctgtcggccagggtcgccaatgacgaggctgggatcgcggctgtgatcggctcggtgctcagccagtccggccagcacgtccgctatgcgtccgggcggctcgtcgcggccatgagcggtgcctataccggagagggcaagacagatcccaaggacgcctttgtgatcgccgagaccgcgaggatccggcgcaacttgccagttaccggccacaagggtgagctggtctgcaacctgagcctgctgaccgcccaccgggcagacctgatcgctgaccgggtgcgcatgatcaaccggctgcgagacgtcctgaccagcgtcttcccggctctggagagggagttcgactattcctcctgcaagggtgccctggtgctgctgaccggctacgcctgcccagcccggatccgccgcatcggccaggcccgcctggccagctggctgcggcaacggcgcgtgcggggctatgccagcgttgccgccagggccatcaccgcagcgcaggcccagcggatcaccctgcccggccaggacatcgccgcagacatcatcgctgagctcgcccgcaacctcctggccctcgatgagcgcgtcacagaactcgacacgcagatcgcggccctgttcgctgagcatccgcaggcagaaatcatccagtccatgcccggattcgggccggtcctaggcgcgacattgctggtgacggctggagacctggcagcattccccagccctggccacctcgccgccgcagccggcctggtcccggtccccaacgactccggccgccggtccgggaacctgcacaagccccgccgttacagccgcccgctgcgccgcgtgttttacctctcggcgcagaccagcatgatgcgcgaggggcccagccgggattactacctcaagaaacgccagcacgcgcgcccccacaaccaggccgtcattgcgctcgcccgacgccgcatcgacgtcttgtgggcacttctgcgcgacaaccggacctatgcggcgaccccgccagcacccgccaaagctgcttgataacaccattgaga

SEQ ID NO: 2284 - DNA, 1199 bp, unidentified
  source 1..1199: mol_type = unassigned DNA; note = element_32debff
  misc_feature 1..2: note = core
  misc_feature 3..224: note = LE
  misc_feature 225..1184: note = CDS
  misc_feature 1185..1199: note = RE
  misc_feature 37..203: note = bridgeRNA
cttgtatctagctgacgagcggattttgcagccagtttgatcggggcgccagctcgatgtcgtctgggtggagcgtgcacgcgaacaccgtgcgttagccgcagcggcgttcccgatcctcgtcgttcgagcccgaacagttgcgtgggccgcatccctggcgagcccgaattctgacaaggacgggccagcacggcgagtctcctttcgcagcggaggcgggcatgctcgtcggcattgatgtcgcgaaggccgagctggtggtcggcacccggccggcggccgaacgctggaccgtcgccaatgatgagcgcggggtgcgcacgctcgtcgagcgcctcacacgcgacgcacccgcgctgatcgtactcgaggcgaccggcggctatgagctgctcgccgtgggcgcgttggtagccgcgggcctgcccgtggtggtcgtcaacccccgccaagtgcgagacttcgcccgcgcgacggggcagctggcgaagaccgaccggatcgacgccgacgtgctcgcgctcttcgccgagcgcgtgcgccccgaggtgcggccgctcaagggcgaggccgcgcaggagcttgatgcgctcctcgcccggaggcggcagctcttggacatgctccaggcggagaagaatcgcctgggccaggtcttcggccgcggccacgtgcgcgtgaagaagagcctcaagacccacatcgcctacctcgaacgcgagctgcggatcgccgatacggatctcggcacgatgatccgccagagccctgtctggcgcgagcgcgacgagctactgcggagcgtccccggggtcgggcccgtgctctcccgcacgctgctcgccgacctccctgaactcggtcgcctgtcccgccgcgagatcgcgaaactcgtcgggatcgcgccgctgagccgcgattcggggacgctccgcgggcggcgcttcatccacggcgggcgtgccagcgtgcgcgcggtcctctacatggcggcgctcgtggcgacgaagcgcaaccgcgtgattcgcgccttctaccagcgactcgtcgccgcgggcaagccgaagaagctcgccctcgtcgcctgcatgcgaaagctgctgaccatcctcaacgtcatggtccgaacgcaccagcgctggtgtgcggagctcgcacaaccagcgctggcgaatgcttgactttcaagacagttg

SEQ ID NO: 2285 - DNA, 1382 bp, unidentified
  source 1..1382: mol_type = unassigned DNA; note = element_32e0920
  misc_feature 1..2: note = core
  misc_feature 3..88: note = LE
  misc_feature 89..1114: note = CDS
  misc_feature 1115..1382: note = RE
  misc_feature 1088..1368: note = bridgeRNA
agatggggtggatgccagccttcttcgacggcatcgcaatgtgccaaggtggtgttgttagcgccacaagaaggagaggcaggcatccatgcagacggttaccatcatcggggttgatctggcaaagagtgtatttcagctgcatggggcggcagctgatggttctgtagtgttccgcaagaaattggcgcgctcgcagttccgaaagttcatggcgtcccacccgccatgcattatcgcgatggaggcgtgcgccagctcccattattgggctcgcgagatggctcggctcggtcatgaaccgagacttatcgcgccgcgttacgtcaaaccgtttgtcaagcggcaaaagaacgatgcagcggatgcggaggccatcatcgaggcggcacagcgaccaacgatgcgctttgtcgaacacaagacggaggagcagcagtctcgagccattctgtttcgtacccgggaacagctggttggtcagcgcactgagttggtcaacgctcttcgcgcgcacctgtacgagttcggttacgtcgcgccgcagggcatccgctatctgagccgacttgaagagatcgttgaggacgagagcgccagggtgccgcatttggtccacgatgtctgccgcgatctgctggaacagatctggcgaatgaccgggcgcgtggaggcgctgaataagaagatcgatgtgttgtccaagcaagctgatacgtcccgacgcttgcggacaatgccgggagttggtgcaatcgccgctcttgcgatcgaaacctttgctccaccgatggaaacgttcaaacgcggccgtgattttgccgcctggcttgggctggtgccgttgcagaattcaaccggcggcaagcggctaggaaaagtatcaaaaatgggccagcgcgacattcgacgattgctcgtcatcggagccatggctgtggttcgatgggcatccaggaagggtgcgcgcgaaggctcctggttaggccgcatgatggcgaagaagccgcgcatgctggtggcgatcgcgctggccaacaagatggcacgggggatctgggccatgatgacgaaagaggagaattaccgagatccggcgacggtgtctgcctgattaatcagcggcgcatctgaaactgtatgtcgggaatgtgaggaaggcatgaactgcatggacaaatgatcgaccagatcggggtcaggaaaaccagaatgacgcacagagcctcgcgctcgctttccagattcggacctgatccgcgtatcaccataccggcctgcggcacgtgaaaggccgcgacctaaggcctgacacaagaccgcactcgatcacacgttcaaaggttcaaattcttccttgcaaaacggctggcatccacaca

SEQ ID NO: 2286 - DNA, 1427 bp, unidentified
  source 1..1427: mol_type = unassigned DNA; note = element_32e207f
  misc_feature 1: note = core
  misc_feature 2..132: note = LE
  misc_feature 133..1149: note = CDS
  misc_feature 1150..1427: note = RE
  misc_feature 1189..1423: note = bridgeRNA
atggtatggacgcctccccccggcaacggggcggcaggggctctgaagacgacaggtgacccctcgctgcatcggcatcttggtgccaaagtggagatgtcgatttaacccacctgagcaggaggagccgagatgaagattagcgtaatcggaatggacatcgccaagcgtgtgattcagctgcacaccgtctgtcctgagaccggagagatcgggcgcttcaagcttcagcgccgcgaaacgcttgctttcctcgcacgcagagaaccatccatcgtagcgatggaggcttgtggcagcgcccattggtggggtcgggagatcagcaaactcggccacgaggtcaggcttctggcgccgaagagcgtcaggccgtttgtgttgcgcaacaagacggatgctgccgacgcgcgtgcgatctggactgcggcgcagcagcccgaggcgcggttcgttgcggtcaagacggaaattcaacagagcgttctcgccctgcatcgactgcgcgctcaactgctgaaattcagaatcatgcagaccaacgccctgcgcggattgctctacgaattcggcgaagtcgttcccgagggctacgtggcgctgtcgaaggctttgccactcgcattagcgacgctcgattcgcgccttcccgctgctctgatcgatagtctgcgcgaacagtgggcaagagtacaacgcctcgactctgagatcgccacaatagaacgacgcctggcgggcatcctgaaagagacgccgcagtgccaatcggtggcagccattcccggtgtcgggttgctgactgcgacggccgcggtcgcgagcatcggtgatgcacgaaccttcaagtcggggcgcgagtttgccgcctggttgggattggtacccaagcagcgaggcaccggaggatgggtgcgacaacttggcttgtccaaacgcggcgacgtctacctgcggacattgctcatgcacggcgcccgagcggtgatcgtgcgtcacagcgacaagccatggctggcagccctgctcaaccgacgtccctacaatgtcgtggtggctgctgtggccaacaagttggcacgcaccatctgggccgtgctggccaaaggcacgccctttgacgcgagtcagttcgctaccgcggcgtgaggtgtgatgatgcaagatctgcactgaacactcattcaacgacttctccaaggagcgcaagcgattcattgctggtggcagacaggtcggaccgggacggggtaagcctgatagggaacgtgaacttcgagttcgttgatcagatgaggcccccgccagcggattccatcagggccagcaggcttgccgcctgcacaaacaggccggatataagactgcatccttaccttgactgtcaggcgcaaaaatcacttgtcactccgggaggcgtccatata

SEQ ID NO: 2287 - DNA, 1393 bp, unidentified
  source 1..1393: mol_type = unassigned DNA; note = element_32f11ad
  misc_feature 1..2: note = core
  misc_feature 3..91: note = LE
  misc_feature 92..1120: note = CDS
  misc_feature 1121..1393: note = RE
  misc_feature 1091..1380: note = bridgeRNA
agatgggatggttgccgccctccccaaacggcatcactttgtgccaaagtgtggtgatgtttaacgccacagaaacggagaggacggcgaaatgaaagatacaatgatcggagtagacttggcaaagcgtgttttccagctccatggtgcgtcaccggcgggacaggtaaaattccgcaagaagctgacgcgggaacaattctggcgcttcatgtcagatcaaccggcctgtgtggtagtgtttgaagcatgcggcagtgctagctactgggcacgggaaatggagaagctcggtcatgaggtccgtttaatcgcagcgcaatatgtgaggccgttcgtgaagcgccaaaagaacgacgccgcagacgctgaggcgatcgtgatcgcggcccagcggccagaaatgcggtttgtctccccaaaatctgaggatcagcaggcccgggccgtgctgttccgcagccgcgagcgcttggttcaccagcgcaccgaactggtgaatgcgctgcgggctgtgctgtacgaatacggacacgtatttccagtgggcatgatccaactgaagcggatgcaggcgctggtagaggactctgactgcgacctccccgcacttgtcatagcggagtgccaagatctgctggagcaaattgctgagaaaagcgagaggatcgacgcccggatgaagacactgaagactgtcgcggcggagacgcagacagcaaggcgcctgcagagcatgccaggtgtcggccccctgacggcgttggccgttgaggcttttgcgcccgacatggggcaattcaaacgcgggcgcgactttgctgcttggctggggcttgtgccacggcagtattcttctggcggcaaggagcgacttggacgcgtatcaaaaacaggtcagagtgacatccgacgcctgctgatcattggcgccatgtcgcggctgagctggcttggacggcgcataatctcagaaggctcgtggctcgcaaagatgctggcacgcaagcccaagatgctggtcgcgattgcgcttgctaacaagatggcacggcagctttgggccatgctcacaaagaatgaagattatcgagatccggcgcacgtggctgtggcatgaacttcatgtcatgacaaacaagcgtcggtgccaaggggagtgtgagaagacgatgacctgaatgggcgcaatgatcgaacagatctggatcaggaaaaccaggacatagctcggtgcagaaagcacgctatggagatttggacccgatccgctgatcaccatctcggcctgcggcttttggaaatgccgcacaaagaggcctgacagaagaccgcattcgatcacgcgcatttaggaccaaaagattcttgcacttcgggcggcaaccacaga

SEQ ID NO: 2288 - DNA, 1612 bp, unidentified
  source 1..1612: mol_type = unassigned DNA; note = element_32f5e42
  misc_feature 1..2: note = core
  misc_feature 3..274: note = LE
  misc_feature 275..1426: note = CDS
  misc_feature 1427..1612: note = RE
  misc_feature 15..297: note = bridgeRNA
ctcctaatatataagtgtaggttttcagtacccaacagccagttgggacttaatcctctcattgtttaagctgtataatgattaggcatcggtctgacgacacctcctaggaccattagcgtccgtacgaaagccagtcagccagcttgtcattgcagccgttcgatttatgcaggttgaactaccactccacgttcgtttgataccccaggagattgaatcggcaatgaggaatgctggaatccatgcagattcacttttggaggtacgtagaatgtacaacgcagtaggcattgatgtttcaaaaggcaagagcaccatcgcagtcctgcagcctggcggcactgtcatccgcaaacctttcgatgtctcccatacatcccagagcctcattgaacttgcacattaccttggttcattagagggctcaaccaaaatcgttatggaatgtacgggcagataccatgagcccatgcttaaggctctgtacgaagccggattattcgtttccgttgtgaatccccacctgatcaaaaacttcggcaacaactccctgcgcagggtcaaatccgatccggcagatgcccgcaggattgcacgctatactcttgacaactgggcagaattgcgccaatattcaggtatggacaatacacgtacccagttaaaaaccttgaattcccaattcagcttctttatgaagcagaaggttgccgcaaaggcaaacctcattgcactgctggataatacttatcccggtgtgaataaactctttgacagtccgccccgcgaggacggaagtgagaaatgggtggattatgcttattctttctggcatgtggactgtgtccgcaggattgggttaaaaacctttacagagcgctacagggctttctgcaggaaacaccactacatcttccagccggacaagcccgaaaaactgttccatgcctcaaaggaattggttgctgtctttccaaaagagaagacctataagctgttgattcagcaaagcatccagcagtcaaaccttgcttccggacatgtggaacgtctccgtcaggaaatgaatgcgttggcatccacccttcctgaatacagcaccgtgatgggcatctatggcgttgggaagacttatggcccgcagctcatcgccgagattggcgacgtgtccagatttacccacagggaagcactgaccgcctttgcaggcgttgaccccggcgtggatgagtccggccagcacaagtccaagagcaacagggcttcaaaagttggctctgccaggctgcgcaagaccttatttcaggtcatggcgaccctgctccagaatgcccctgagaacgatccggtatatcgttttcttgataagaagcgggcacagggaaagccttactatgtctacatgaccgccggagcgaattagttcctccgcatttattatggcaaggtcaaagagtgcctgcggaacttggagcaggcagagtaacgcccatttctatatcacccctttcaaggccggcagtcctggtggcttaaaagttatgccctaaaatatcaaatcgactttttgaaatttccttcaaaaaacacttgactttttattagcagg

SEQ ID NO: 2289 - DNA, 1177 bp, unidentified
  source 1..1177: mol_type = unassigned DNA; note = element_32f7be5
  misc_feature 1..2: note = core
  misc_feature 3..233: note = LE
  misc_feature 234..1163: note = CDS
  misc_feature 1164..1177: note = RE
  misc_feature 6..228: note = bridgeRNA
cttgtatcttctcttcggcacctgccttggataaaagagtgggtaggcgcgagatcgacgctcgaggctagctcctggttgagaccagcggagcgtgccgtagttggatcggcgcctgcccttggccaagtggaacaaaactcgaacagttattggagcggaccaagccggtttaggccaagggcaaagccggcctggccagctcgtatttacaagcaggagttgtttaacacatgaaggagccaagtgtctatgtaggagttgatgtagccaaggagtggctggatgtggcgtgggggacagagcaccagcgagtcactaattgccgcaggggatggaagcagttaggtgattggttaggggaaagtgaagtgccggtgcacgtgatctgcgaggctagtggcgggtatgaacgcggtctggtcaaagccttgcaaggttatggcattaaagtaagtatcgcccaggcaacgcgggttcggcagtttgcgcgcgccgtcggaattgccgctaaaaccgacgaaattgatgcgcaggtgctgtgtgcttatggctacgccctgcgtccgtgcgtcagcgcgacgcttggcccagagcaggagaaactgcgtgaactagagcgccagcgccgacatttaactcgtctgctggtggccgaacaaacacggggactgcaactgtgcgaagccgtcacccgaacctcaaatcgcagcctgatccgacagctaacaaagcagatcgactcgatcgatctgctcattgaaaaagtgatcgaccaatccgaagaacttacggctaaagcaaagaagcttactgcgatcagcggcgttgggcgacgtacggcggctctgctgttggctcaaatgcccgaacttggtctgcttaaccgcggccaagccgctgcacttgccggactggcgccgttaaaccgtgatagcggtaagtggcgtggcaaacgcaccatcttcggcggacgtcgcgcggtacgaagcgggctttacatggccgccttagtcgccacccggcacaacccgatactcgccgccttttatcaacgcttacgagcagcgggcaaaccaccaaagctcgctctcaccgcaacaatgcgaaagctgttgctcatcctcaacagctccctcaaacctcaatcgatgtacgcttgacgacaagacagtta

SEQ ID NO: 2290 - DNA, 1363 bp, unidentified
  source 1..1363: mol_type = unassigned DNA; note = element_3300fb9
  misc_feature 1: note = core
  misc_feature 2..72: note = LE
  misc_feature 73..1098: note = CDS
  misc_feature 1099..1363: note = RE
  misc_feature 1127..1360: note = bridgeRNA
taatgagatggtcacccccaccctacgagcgggttacgctgtagggtgtctttctctctggtgagggccatcatgcaagacgtgacgctggttggaatcgatctgggcaaacattcgtttcaccttcacggccaggaccggcacggtaaacccgtgtttcgcaagaaggtaagccgcaagcaactggtcgagttcttcgccacgtttcacgcctgcaccgtggtcatggaagcgtgtgccggggcccatcatatggcccgcaagctcgcatcgttcgggcatcaggtcaagctcatctcgccccagtttgtgcgccccttcgtcaagagcaacaagaatgatttcgtggatgccgaggcgatctgcgaggcggcgtcgcgaccagccatgcggtttgtcacgccgaagaccgaatcgcagcaaaccctgtccgccctgcaccgagtacgtgagtcgctggtgcgcgaccgcgtaaagacgagcaaccagatgcacgcattcctgctcgaattcggcatcagtctgcccatcggacaagctgtgatcaggcgcttgtcgacggtactcgccgagcattcccttccgccgtcgctggtttccattcttgagcgcctgcacgcccactttaagtacctgagcgaacaaatcaacgagatcgacaaggaattgggccgccagctcgctgcagacgacctcggccagcgcttgctgagcatcccaggtgtgggccctatcacggcgagcgtgctggccgccgaaatgggcgatggcaagcaatacggctgtagccgggacttcgccgcctcgatcgggttggtgccgcgccagtacagcaccggcggtaagtccaacctgctgggcatcagcaagagaggtgacaaaaacctgcgcagactgctggtcctgggtgcaagatcgtacatgcagcggctcgataagcacgccggccgattggccgactgggtccgcgcgatgctgacgcggcgacacccgaacgtggtggcctgcgctctcgccaacaagctggcgcgcaccgcgtgggcgctggcgacccatcattcgacattcgatgcgggctcggccgccatgcctgcctgaacagccgcgcccgcttcctgctttaccgaagtctacccatctggtttttgcgatagcctgaaatttgatgacgtgaacggtacatcggcctgacgaacaacctgccaaaaaaattggctcttgaagccgatggacttttcaggatcgtcaggcgcgactctcatcgtggcgcggggagatttccccacaacgacgccggatagatttaagcaagccaaccacaacgtcaaaaatcaggggttgcaaaaacgggggtgaccataga

SEQ ID NO: 2291 - DNA, 1351 bp, unidentified
  source 1..1351: mol_type = unassigned DNA; note = element_330aeca
  misc_feature 1..3: note = core
  misc_feature 4..82: note = LE
  misc_feature 83..1105: note = CDS
  misc_feature 1106..1351: note = RE
  misc_feature 1101..1339: note = bridgeRNA
tgatgatgtggacgcccccgccacagcgctgggagccggatactctggctcccggcgcaatcgagcaggaggaacatccgtcatggagattgccacccttgggctggacctggccaagagcgtgttccaggcgcacggcatcgataggctcggcaagacggtgttggtgaagcggctgcatcgcaagcagatgatgcctttcttctccaagttgccgccttgcctgatcggcatcgaggcctgtgccaccgcccatcattgggctcgaacgctctcgacgatgggccacgaggtgcggctgatgccgccagcctacgtgaagggctacgtcaagcgtggcaagagtgacgcgttggatgcagaggcgatctgcgaggcagtccggcggccgacgatgcggttcgtgccgatcaagacggtagagcagcagggtattcttatggcccaccgaacccgtgccttgttggtgcgtcagcggaccatggccgcgaacgccctgcgcgcccatttggccgagttcgggcttgtcgccaatcccggcatcgctcacctgcttgcgctggtcgacagaaccttcgcagatggccacaggctgccggcccatgcacgcagcgcgctggagatcttgatccggcggctcaccgagctgtccgaggagatcaatgcgctcgatcgggaactccgagcctggcatgcccagaacgaggcaagcacccggctcgccgcgatcccgggtatcggggtgaccaccgccaccgcgctcgccgcaacggtaaccgatccgacccagttccgatccggccgacagttcgcagcgtggctcgggctgacacctcagctgcagtcgacaggaggcaaggctcggctcggccgcatttccaagcaaggagaccggtatctccgccgtctcctggtcgtgggtgcgaccgccgtcatacgacacgccaagaccaaaccaacccggatggccgcatggatccgaggcttgctggccaacaagcctttcagggtggtctcggtcgccctcgccaacaaactcgcccggatcgcctgggtggtgctgacgcgaagggagagatacaggcctgaagtgctgcccgtctgacggccgcgctcaggcctaccaaatggcaaaggcagtcgatgatgcgtaacgatcgagccaatgacgagaccatcccgtgtgattcaacgcgcccaatgaggagcgcgcgatcttgatcagggagttcgtcggcggatttccatcaaggccagcggccgacaccgagccgcgtcaacaggccggacatatgaaagcaaccgatccacgctcaaggcaaacgcccttgtcagagggggcgtccacata

SEQ ID NO: 2292 - DNA, 1217 bp, unidentified
  source 1..1217: mol_type = unassigned DNA; note = element_330fa83
  misc_feature 1..2: note = core
  misc_feature 3..230: note = LE
  misc_feature 231..1202: note = CDS
  misc_feature 1203..1217: note = RE
  misc_feature 6..204: note = bridgeRNA
cttgtatctcgactaacgcccctaagcaggcgatagttcccgactgatcatcgggggaggacagcaagccgcacccacccttaagcctctaagcttgttccgtagattgcgctgtgtcctccacgctcctccccataatccgaacggtatcttgagccattgcagagctcgcatgaacaaggttggatcggagtgagtggtgatcttcgacactagtactggaggaagaaatgaccatcgtcgtgggtgtggatattgccaagcacacattcgatattgcgaccctgcagtccaatggcaaacatcgcacgaagggcaagttagccaacaacgccactgggttcgccgtatttgcggactggttggagcgctacgccgagtccggcgcctggatcgtgatggaagccacgggcatctaccatgagtcgctggcagagcatttccacgggcttggctaccggatcgctgtgctcaaccccgcgcagatcaaaagctatgcgaaaagtcagttacagcgcagtaagaccgacaaactcgacgccaagctaatcgccacctacggccatctgcatcagggtcgattcaagccctggcagcccgagccgctgaatatccggcagctgcgggcgctgactcgccgtctggaggatcttcaggaattgcgccaaatggagctcaaccgcctggaggtcagccgggacaatgtgcatgcgtcgatcaatgcggtgttacagcggctggacgagcagatagccgaaaccctcaggctgatcaagaaccacattgatgatgatcccgaccttcgcggtaaacgagacctgctcgtaagtattgacggaatctcggacaaaacggcgtccctgctattggccgaactgggtgatccacaacgcttcaacaacgctcgcgcggtcgttgcttttgcagggctggacccgcaactccacgaatcgggcaagtatcaaggctgcgtgcgcatctcgcacacaggatctgcaaggctcagagctggactgtacatgccagctgtatcctcgctgaaacacaaccctgcaatcagagcgcttgcggagcggatgaaaagccgagcgaaaaagggcaagcaaatcgtatgtgcggccatgcgcaagctgctgaccatcgcttatggcgtactcaaatcctgcaggcccttcgacgcaaatttagcggttgctcgatagcctccaagacggtat

SEQ ID NO: 2293 - DNA, 1723 bp, unidentified
  source 1..1723: mol_type = unassigned DNA; note = element_331332c
  misc_feature 1..2: note = core
  misc_feature 3..336: note = LE
  misc_feature 337..1608: note = CDS
  misc_feature 1609..1723: note = RE
  misc_feature 17..303: note = bridgeRNA
ctcgtataatatattttgtaaagatgactagtcatctttacaagtttatttcaatattggattttcctaagttataatagagttactagtcactctattattggaatttattctttcactccttgaagtatctttttgatatcttctttaaaaagtctgtctctcaactttagaatgtctctgcttaccgaatgttgtttgttcaatactttttagatacgtagcctttgatctgtattgttctattcttatggcgaggttgcatcatgtctaaagaactgaggtctttccaatattttgtttctagttttatcttttttgaaaggtggtgatcccatgaatacactctttgtaggtattgatgtatcaaccaaaaataatcaagtctgtgctgttaatcttaatcaggatgttttctttaatctctcttttcctaataaccctgatggttgtgatcttctcattacaactgtcttggcttttgttgataaggaaaagtttgattctatcatcatcgttactgaatcaacttctatatatgattatcatgtttgtgcttatctatcgtctcaactttcgattgttggcacttcgatcatcatatattcagttaatgccaaatccattgccaattataaaaagtcttatattgaaatggaaaaaactgatccccgtgatgcttttttgattgctgatttcgctcgtgttgatcgctgcaaaaatcttcgtcctttcaaagcagctcagcatattgctcttaagcgtctcactcgtgagcgttatcatttggctgaacagctcactagagaaaagaattacattctcaacaacatctatttaaaggtttccggtcttatgacccttcctcataaggatttgcctttcagtgataatttttctgcttccaacacgaagtttttaactgattatacttctccttttgatctggctgaaagacctttagatgaaatcattgaatatttcaaatctacttctcaaaacagatgtgatgattatggtaaaattgcttctctttttgataaagcgattcgttcttcctatagacttgataaaactgcatatgacccaattaccatctcaattactgcttctatcaacctgattcaatgtatcgaatctcaaattaagatggttgacaaagcaattgagaaagaaatgaaaggtctctatcctaatggttatcaatctttgatgtctataacaggtattggacctgtctttgcagcaggtatactttctgaaattggtgacatttcctatttcaaaagtgatgcttcattagctaaatatgccggtttccattggaagaaaaatgactcgggcaattttactgctgatgaaaaacattcagcgaattcatgtaataaatatttaaaatattacataactcaagctacacagatgtcagtgatgcttggttttgattatacgacttcattttatcataagaagtataacgaagcctcaacacacaagcatcgtagagcactcgtccttacatcaagaaaactagttcgtttaatttatgtcttgctacgtgacagtaaattatacgtttctgtgtctcatgacacagtcattgagtaatttgtcaatttcataaatttttttatacttctttttagcatactcttttttaaatgatcgtttttgatttatctaaaaattattttatttattctcttgacattttaccgaatga

SEQ ID NO: 2294 - DNA, 1441 bp, unidentified
  source 1..1441: mol_type = unassigned DNA; note = element_33155ea
  misc_feature 1..2: note = core
  misc_feature 3..121: note = LE
  misc_feature 122..1153: note = CDS
  misc_feature 1154..1441: note = RE
  misc_feature 1190..1390: note = bridgeRNA
agatgggataatcggccggccagcttgtggatagctgaagaactggggtgttgcgcttctggctgatggtggaaacgaggtccgcggtcgcggcctcaagcatcagaaggagaagcgcaacatggaccattttgctggactggacgtttcggtcaaggagacgagcgtttgcgttgtggatgacacgggcaggatcgtccgggaagtgaaggtggcgagcgaacctgaggcgctgttggaggtgctgacgaacccagcctaccacttcaagcggatcggattggaagcaggaccgctgtcgcaatggcttttcagcgcactcgccgaagcaggattgccggtgatctgcgttgagacgcggcacatgagagcggtgttgaaggcacagatcaacaagtcggaccgcaacgatgcgcgcggcatggcgcagatgatgcgggtgggactttttcggctggtgcatgtgaaaacgttacgcagtcagaaactgcgaatgctgctgacccatcgcaagctgctgcagtcgaaggctatcgccattgagaatgatctgcgggcgaccttgcgcaacttcggtctcaaggtgggcatggtgggaacggtcaagttcgagacccgcatcaaggagctggtcgagaaggtcaccgacctggctatgctcgtcgagccactgctcatggtccggcgagtgctgcgcgagcaggtcaacatcctacatcgccgcttgctggccgtcgtccgggacgatgatgtgtgccggcgccttatgacggtccctggcgtcggccccgtggtggcgctgacctatcgtgcaaccatcgacgtgcccgcccgcttcaggaactccaaggcggtcggagcggtgcttgggttgacgccctccaagtatcagtcgggcgagatcgaccgaaccggcgcgatatcacggtgtggagacgagatgatgcgagcggttctctacgaggcggcccaaagcatgctggtcgtttcgacgaaatggtcctggctcaaggcgtgggcgatgaagatcgccaagaaccgtgggatgaaaaaggcgattgtggccctggcacgccgcttggccgtgatcatgcatcgaatatgggttgacggcaccgagttccgctggaccagggaagttgcagcaccctgaaggccgcctggaatcaaaatgcaataggaggaaacccgaactccaccgagcggtggaatgatgtccctcgcgggacgacggatgaggtgagatcgtgagtccgcttggacctaccgtcggtctgacggtaaagccgcctgtgagattgttccgcctcgtcctcgaatcccatcctggaagggccgtggtgccgattccgaagagaagcgcgagcccgtgagtgacatcgacgccgcggtggtggaaattcagtcagaaagtgcttgacctcaaatggccgattagaga

SEQ ID NO: 2295 - DNA, 1442 bp, unidentified
  source 1..1442: mol_type = unassigned DNA; note = element_332383d
  misc_feature 1: note = core
  misc_feature 2..222: note = LE
  misc_feature 223..1263: note = CDS
  misc_feature 1264..1442: note = RE
  misc_feature 15..234: note = bridgeRNA
ctgcctgagacttctggcggacgcgacgtgtgattcgtagcgttcggaggtcctgacggagttcgctctcgaagtgcctgccggcccttgggcctggctttcgaacgaagtgcgctccatcaggatctcgccgcggcgtggctcaaaagaggaacgcacagaccagaccaaagcaggagtgccctccgcggtttccacatcggaacgtgagagggaggacagatgtcggtgatcatcggagtcgatccgcacaaggcgagccacaccgccgtggcgctcgacgaccgcgagaagcccctcggccaacggcgaatacgcgccggccagaaccaggccgaggagttgttgaagtgggcggtggagttccccgagcgaagctgggcgatcgagtccgcgggtggcctcggctacttgctttcccagcagctcgtcgctgctggtgaggcggtgttcgacgtgccggcgacgcttgcctcgcgagttcgggtccttggcaccggccgctcgaacaagaacgacccgaacgatgcgacctccgtggcggtggcggcgctgcgctcgcccggacttcgtcaggtgagcgcggtcgggcattccgagatcctccggctgctcgcgaaacgtaacaccgacatcggcaacctgcgctgccaggccgtcgagcgggtgcacgcgcttgtcgccgagctctccggcggcgggatcgacaaagagctgtatgcctcagatctgcagcgctttctcgaccacttcgtcccagcgactgaggccgaacggatccgcgtggagcttgtcgccgaactgctcgaggacatccgccggctcgatgcgcagctgaaggcatcgcgtcgtcggatccgcgatgcggtccgggcgtcgggatcctcggtgaccgagatcttcggcgtcggaccgatcatcgccgcgatgctgatcggctactcgggcgagatccgacgtttcgcgagtggcgaccgctacgcggcctacaacggaacggcgcccgtcgagttttcctcgggcgggcgagtggcccaccggctatcacgacgagggaaccgccacctcaaccatgcgatccacatggcggcaatctgccaactccgtcagtcccattccgaaggacgagcctatttcgaccgacgcgtggccgagggcaagaccaagcgcgaggcgctgagagcgttgaagcgccacctcagcaacgccgtctatcgccacctggtcgccgacgcagggcgagttgccgcggccgcgaggtagtgggcccgggaggacactagggagcgactcatagccagcgcggtcggcttctcatccctgatcaccggctcttcggcgaagtcactcccgaacccaacgaaagcctacgcagccgcgtcgctgcgtgattcgtcgcgcccaggagacgactaaagggccctcttgacacaaagaggatt

SEQ ID NO: 2296 - DNA, 1839 bp, unidentified
  source 1..1839: mol_type = unassigned DNA; note = element_332478f
  misc_feature 1..2: note = core
  misc_feature 3..108: note = LE
  misc_feature 109..1383: note = CDS
  misc_feature 1384..1839: note = RE
  misc_feature 1511..1763: note = bridgeRNA
agcattcctgtagagagttaattattgactttgataaaaaaagagctcctcagtaagatatgagtatagacaccactctaactcaaaaccttaggaggaacccctactatgaagtttaaaatgcaagacaaacaaaatcaactaatagaaagaatttccgataaacacctcgttgttggtatagacatcgctcaacaatttcacttcgctcgagcagtgaatttccgtggaattgtagtcggcgatcctcttacatttgaaaataacgaagatggatttactattttattgcactggattaacaaactaaaaaggacaaataacttagatacagctttagtcggcatggaacctacgggacattactggattaatctatcaaaatggcttttcgaacagaatattgatgtagtaacagtaaatccgtaccatgtaaaaaggaataaagagaaccgagataatacccagtccaaaagcgataaaaaagatgcactagttatcgctgatatggtgaagaatggttactattccatcgttcgtccaacttctgaatcatttgaagaacttcgagttcttatgtctaaccgtgacgtgattgttaagcgactcgttagttcaatcaaccagctaaatcgttgggtagatgttgtctttccagagctccgacaagtttttaaagacgtgaaaggtaaaggggcaatcgcaactcttcgcttatttcctaccccgatggaattgcgttcgatacaacctcataacgttgttatcgggtggaagtcattgatgaagagacagcctggattaaaaaaagcccaattacttattcatttagctaaacgttcgatcggcactaggcaagcacttgatgcttataaatttcatctacaacaattactagaggaatatgatctcgcaacaacacaactcgaaagagttgaacaacaagtcacagaagcacttaaacaaattccttatgcacatcaattgcttaccattaaaggaattagtgagatttcattggctggtatattaggagaagctggagatttaagtggtttttcccacgggaattctttactacgtcatgcaggattacacctagctgaagcaagctcgggtaagtggaaaggtcaaattgtcatttctaaacgtggaaggtctagactgcggcgttttctctacttagcgacgatgagcctagtcatgaacaaccctgagtttaaatctttacatgccactaatgttaaggtgaaaaaaatcaagaagatgaattcaattatgaaattggttggtaaactggctcgggtatttgtaggaatagctaaacgaaatgaatcctatcgtccagaaaaattacaacctataacttctttagcagcataaaaactattagattcttagaaacacttactagttctagtttccccgaaagggaaactccaataaataagaataaagagtgaatgttaattttacacttatcgaatgttggcttattcgtaggatttcaaatatgtacggagtaccagattacttaaacaaaagggcactgacccatcccgttagcataactggcctccaccccttggataggcatgacgaaggaatgatagggcaaatgacccgttgagacatgggagggaaagcctccaggggcggcgtggagaatgtacatcatatggtaaaatatggagttttttattactcctttatttcactatgccttcacgaagccatattggtcttaattcattacatttaaactgcaatctactaccaagggttatgaaatcctgcgaattagcgagcatttgcgagaaaatcgtattaaactgaggg

SEQ ID NO: 2297 - DNA, 1823 bp, unidentified
  source 1..1823: mol_type = unassigned DNA; note = element_332f21a
  misc_feature 1: note = core
  misc_feature 2..357: note = LE
  misc_feature 358..1692: note = CDS
  misc_feature 1693..1823: note = RE
  misc_feature 120..292: note = bridgeRNA
tagtataataatgatatagccacaagagctatatagttaataagttacaaagtcatatctgatgaataacagaaggagaattccatctccatcagaagttataaatatttatcatgtctgaggtttccttaatgcaccagacaaaatatagaggtataatcactgaaggcaggatcattgacgtatcctccttgggaaccggccttccggctggtgaaacctccaattaagtctgtcagtccattcggtggtgatttatgttttggctggttgggaagcctcaggctatacctgtataagccgctaggttgtgtatccgccttttggaaatggatacctgccagaaaggataacatcatgcattatcaaaaagtacttaagatgctggaaagcattccctatctctcagtcgggcttgatgtcggggcagacttcacatggatgtccatcttgctccctaacggcacccttgtcgggaagcctttcaagatcgttcactgcgatcctgcttcccgggagcttgccgtctcaaaaataaaggaagcacaagaggcgtattctctcaaaagccgctgcttccttgagtccaccgggatctaccatatcccactcctgtgcttccttcgcgataagggtcttgactgctctgtcattaatcctatcattactaagaatagcacaaacatgaatgtaaggaaactgcataatgataaatttgattcaaaaaaagctgccaaggtcggtcaggatgcctcccttaagacttccattgtcccagcggatgcagtcattgacctgcgcaatctcgtgcgtgactactattatttcaaagatctgcagtccgccgtcgtgctgaagcttaatgcggagctcaaagtgtccttcccggcatacctggatgtgttcagcaaggtcacagcccagacatccttaaagcttctggaagcttacccacttgcagcggacatgctcgcagccccaagagacgaacttgtggaaaccatacgcaatacagctcgtttcggcgaaaaatatgccctttccaaatatgatgccatatgcgccgccgcaaaggatgctgctgttttcggccgtgcccttccgagcaatgccctccggatcaggctgtacataaaaacctaccgggaataccaggcgcatctggacagtatactggaagagctgcataaggccgtggacaatctgcagggcgatccggtctatgaccgtatctgtcttctccagtccctccggggtgtcggcttcctcagcgcggttgtcctgatcgccgaaatgggctcctttgatctgttctcttccccaaagaagctctatgcctactttgggatggatcccggtgtgaatgattcaggcaagttccatggcgacagggtccatatgtccaagcggggctccagccttgcgcggcgcatcctgcatatgatcgccataaacaacctgaaagtggataaagcagcaaaagcacctgtgaacccagtcatttacgattattacatccgtaaatgtgccaacaagaaaaagattgttgccgtcggagccgtcatgcacaaaatctgcaacattattttcgctatgctccgggataataagccttttgagcttattacgccgaaagaacactgtgaacgttatgcagcagaacacccaggatccgtaaacatcgctgcctgatgggaatttgaatcaaattttaaaaatcccgtggcaatgggcttattaaagttacccttttttacatcaactgcttgaaaaaatttcttgagcatttttcattttacctattgacatttcttagctggact

SEQ ID NO: 2298 - DNA, 1177 bp, unidentified
  source 1..1177: mol_type = unassigned DNA; note = element_3341e06
  misc_feature 1..2: note = core
  misc_feature 3..209: note = LE
  misc_feature 210..1154: note = CDS
  misc_feature 1155..1177: note = RE
  misc_feature 60..224: note = bridgeRNA
cttatatcttcgatttgcttcaaacttcagttgtggcccgccgtgaggcgggctgccttaccggttggcggccatggcacagcttgtgtctcctgcgagccatcgagctcgaatcacagctcaaggcgtgtcgtggctgcctcgtttaacgctatcccgaatggttgattgatctcatttcgcatctataaggctgggagtcgatgaacatgagccaaccggttttcgtcggtatcgatgtcgccaaggacagtgtcgaagtctgctgctcggacgcctcgacgcatgcgttcgagaacactgaagccggacacgcgaagttgttgcgctggctcaggcgcaagacagttacgttggtcatacttgaggccaccggcggctacgagcgagcctgcgcggtggcgctggcgggcgtcggattgcccgtgtcggtcatcaaccctcgccaggcacgtgattttgcgcgggctatggggcgactggccaagaccgatcggcttgacgcgcgggcattggccgagttcgccgccgtgttgcatgcccaggggcatcagccccgtgcgttggccactcaggagcagcgtgagctcgtcgcacttgttacgcgccgacggcaactcgtggccatgctcgtgagcgagcggcaacgcctggccgtcgctcacgagcgggcccgtgccagcatcgaggcaatgatcgaggccttgctcagtcagttggccgacatcgataacgacgtacaacgtgtgcttcaggaacgctacgccgatctgtcggctttgctgcaatcggtcaagggcgttggcccgaccaccgccagtacactcatcgctgaactgcccgaactcggacacctcactcgcaagcagatcaccagtcttgcggggcttgcacccatcaatcgcgattcgggcaccctgcgcgggcagcgccatatcttcggcgggcgctccagtgtccgacgcgtactgtacgtcgccgcactggtcgccacgcgcttcaatccgctgatccgtagctgctatctgaggctgatcgccgccggcaagcccaaaaaagtcgccctcgtcgcgtgcatgcgcaaactgctcatcacgctcaatgccatcgcccgctcgggcgagcggtggcagccggatttcaagggcgcatgacatgggctgtctcaagatggttg

SEQ ID NO: 2299 - DNA, 1627 bp, unidentified
  source 1..1627: mol_type = unassigned DNA; note = element_3349505
  misc_feature 1..2: note = core
  misc_feature 3..73: note = LE
  misc_feature 74..1237: note = CDS
  misc_feature 1238..1627: note = RE
  misc_feature 1265..1482: note = bridgeRNA
agaagctatggggagagcggcgtgggcgtgaaatggtgcctccgttgttcaatgaaacggatggatatgccccatgaaccaagtaagtgacctgagccgttcccttgctccctttgatcaaaatgccactctgacggtggtcgttgaactgagcgaggccagctggctcgtagctgggttgattcccggaattgagcgccaacccgtaaagaagcaggggccggatccgatcgcgctgctgcggctgctggagcgctggcggttggaggcaatgaaggcaggcaagacgattgggcagattgccctcgcctttgaggcgggacgggacggcttttggctggcgcgatggctgcaggctcgcgacatcgcagtgcatgtcgtccattcgacgagcgtcgccgtgtcacgcgagcatcgtcgagcgaagaccgatcgactggacacggcgatgcttatgcgtgtgttcgtgggatggctgcgtggcgagcgcggacactgccggatggtcgctatcccaacgctcgagcaagaggatgccaagcgtccgagccgtgaacgggaaggcctggtcggcgagcgcactcggatcatcaaccgaatgaaggccactttggcccggctcggcatccgcgggttcaaaccggcgttgcgcaaggcgccgcaacggctcgccgctttacgcacacctgaggatgtgccgattccaccgaacacgcttgacgagatccgacgtgacatggatcggctcgctgtagtgcgcgaacagatcaatgcgatcgaaatggcccgcctcgcgcgcctggaaaaagcgccggcggcagggccacacgctatggtgcgcctgttggcccgcatcgtcggcgtgggaatggaaactgcagacatgttggttcaggaggtgttgtcccgaaaccttcgagaccggcgagccgtggcccgttacgttggcctcacgggttcgcccgacgagagtggcaagaaacgacgggagagaggattggccaaggcgggcaatgcccgcgcgcgtcgcgggctgatccaacttgcctggcggttcttgagattccagagcgacagcgcgcttgcgcaatggtaccgatcgcggactggtggcccgaagggtgcgcgcaagacaacaatgatcgtcgcactcgcccgcaagctgctcatcgcgctttggcgcatggtcaccatcggcgaaatcccggcgggcgtcgcgctgcggcagacgatctgaatacgcgacatggtcgtcgtgcgacggatcgactgtcgcgacgagtcgacgcgtagcgattcgaggtggcggtgacccgaacaactccatggctccaatgccgtcggcagaatgggcccgccgcctcggagccttgctgccgaagccattgactgcttcatggtcgggatcccctgcggatccaaccgaatacaaggtcgcggcgcgatgctttgcgccccacggcaggctcccctcgaattgctcgtcctgttcctgatccgggttcacgcccgcctcactctcgtggtcgaccgccccgctttttggcccaggcgccggctgtcgagaaactcaaggaaaagattgctgagagccgcactaaggacttgacagaaaaatccccataca

SEQ ID NO: 2300 - DNA, 1388 bp, unidentified
  source 1..1388: mol_type = unassigned DNA; note = element_33506a9
  misc_feature 1..2: note = core
  misc_feature 3..207: note = LE
  misc_feature 208..1116: note = CDS
  misc_feature 1117..1388: note = RE
  misc_feature 1087..1375: note = bridgeRNA
agatgggatggttgccgccctccccagacggcatcgcaatgtgccaaggtcgtggtgttcaacgccacgcagcgaggaggacgacgagatgaaggatacgatgatcggagtggacttggcaaagcgcgttttccagctccacggagcatctatgaccggcaggtgaagttctggaaaaagctgacacgggaacaattccggcggttcatgtcggagcagcccgcctgtattgtcgtgctcgaggcttgcggcagcgccagctactggacgcgggagatggaagcgcttggccatgacgtcaaactcatcgcgccgcagtatgtccggcccttcgtcaagcgtcagaaaaacgatgcggctgatgccgaggccatcgtgatcgcggcacgccagccagagatgcggtttgtcgcgcccaagacggcagagcagcaggcaaaggcggtaatgttccgaggtcgagagcgcttggtccatcagcggaccgaactggtgaatgcgttgcgggccgtgctctacgaatacggccatatatttccgaccggccttgtccatctgaagcggatcgaggggctgatggatgatcccaactccgacctgccgtcgctgatcatcgcagaatgccaggacttgctagcgcagattgccgagaagacgtcgaggatcgacgcgaagaccaagaggctgaaggcgctcgcggccgagacggacacggcgcgtcgactgcagacgatgccaggggttgggcctctgacggcgctggcggtcgaagccttcgcgctcgacatggcgcagttcaagtgtggccgggatttcgcggcttggttggggctcgtgccacgtcagcactcttcgggcggaaagtcgcgtcttgggcggatatcaaaagcaggtcagaacgacatccgacggctcctgatcatcggcgcaatgtcgcgattgaactggctcgggcgccgatcgatcctggagggctcgtggctcgcaaggatgctgatgcggaagccgaagatgttggtcgcgatttcactggcaaacaagatggcgcgccaaatctgggcgatgctgacgaagaatgaggattacagagatccggcgctggcggcgatgacatgagtatcatgtcgtagtcacccagcgtcggtgccaaggggagtgtgagaagccgacgacctgaatgggtgcaacgatcgaacagatcgggaataggaaaaccagaagcgttgtaggggctgatagcccgctacccagatttggacccgttccgcagatcaccatatcggccagcggcttctgagagcgccgcacatcaaggccttacagaagttcgcactcgatcacacgccaacagggtcaaaagctcttgcatgacgggcggcaaccacaga

SEQ ID NO: 2301 - DNA, 1348 bp, unidentified
  source 1..1348: mol_type = unassigned DNA; note = element_3357e51
  misc_feature 1..2: note = core
  misc_feature 3..61: note = LE
  misc_feature 62..1096: note = CDS
  misc_feature 1097..1348: note = RE
  misc_feature 1115..1339: note = bridgeRNA
ttaatgggatggtctgcccccgtatccttggtgctgtggcccaacctacggagacctgaccatgacgtatccagcgttcgttctcggcatcgaccttggcaagaactggctccacgttgtcggcatggatcgcgacggccgcgtcacgttgcgtaaacgattgaaccgcgcccagcttggcgagttcgccggttcggtggctacgtgtcgcgtcgcgatggaatcatgccccggctcgcagtactggggtcggtgcttcgctgcggccgggcatgaagtgcgcatcatccccgcccagttcgtcaagccgtacgtgaagtcgaacaagaacgactacaacgacgcggaagcgatcgctgaagccggcagtcgcggcacgatgcgatgcgtaccgctgaagaacgccgagcagctcgagttgcaggccacccatcgcgtccgccagcgcgtcatcgtcgaacgctccgccgtcgtcaaccagatgcgcgccctgttgcttgagcacggcatcgccatcccgatcggccgtgcgctcctcgcccgacggctcccagagatcctcgaggatgcggagaacacgctcagcgtgcggctgcgggcactactgcagcgtctacggtcacggtggcgctcgctcgacgtggaaattgcagagttgacggcgcttctcaccgagcacgcggcggagtcggaactctgccggcgtgccatcacggtaccgggcgtcggcccgatcgtctcaaccgcactggtggccgccgtcaacgacgctcacgcctttgcacgcggccgcgatatggccgcctggctcgggcttgtgccacgccaacactcgacgggcggcaaaacgacgctcggccgaatcagcaagcgcggcaacgcgtacctgcggcagctgttcatccagggtgcgcaagccctctacactcacatgaagcgtgaaaagtcgcgcctcgggcagtggctgcgggatcttgaggcacgcgctcatcgccacgtcgtcgtcgtggcgcttgccaacaagatcgtgcggatctgctggaaggtgctcacgagtggtcaagactatcgaccgttcccagcgcaaccggcctgaggatcttcaagagacaacccccacccagtattgcgggatctgatcgaacgatggcacaaccgttcaccggcgcgtcgaaagcctgccttgcaatgcggtccactatggccgaacgctttatgaggctcgatgcgcgcgggttccatcaaggccaggagccatgcgctccacaagtaggccggatacatttacgcaaacgcgcttgccgccatcgaatgaaaaagatcttgcattacgggggcagaccataca

SEQ ID NO: 2302 - DNA, 1409 bp, unidentified
  source 1..1409: mol_type = unassigned DNA; note = element_3358074
  misc_feature 1: note = core
  misc_feature 2..232: note = LE
  misc_feature 233..1330: note = CDS
  misc_feature 1331..1409: note = RE
  misc_feature 10..236: note = bridgeRNA
ccgttaccttgttcgtgaccccaggtaatctggggttggccagccaagcccggcatgactcctgcccccagtcgcccatgatccggggggtgttgtcaccgggtctggcgggcaactgataatcgctgataggggctggacccggttttttccgaggtcgcctgtaacgtggatgccgagatcagttgccatggttttgctggcctagcgttgtaaatcttccggagatggcatgaccgatattgagcagcatgacagcgtccaggtcttcgtcggtctggacgtaggcaagggagcgcatcatggcgttgcactggatcgcaagggaaaacgtcttctggacagcgccttgcccaacgacgaagcgaaattgagagcgctgatcggcaagctcaaagagcgcggtccgattctgctggttgtagatcaaccggccacaatcggcgcgctcccggtcgcggtagcgcgcgacgagggtgtgttggtggcatatctgccggggcttgcgatgcggcgtattgccgacttgtatgccggtgaagccaaaaccgatgcccgcgacgcttacatcatcgctgaggctgcccgtagcctgccgcacacgcttcgctcgctgaagttggccgacagccaggtcgcagagctcacgatgttgtgcggctttgacgaggatctggccggccaaatcacgcaagtcagcaatcgtatccgtggtttgctgacgcagctccatccggccctcgagcgcgtgatcggcccacacctggatcacccagccatgctcgatctgctcgagcgctatccttcgcccgcgcaactggcggctctgactcagaaacagttggctaatcgcctcgtcaaactcgctccgcgcatgggcaagacctgggccacgcagatcctccaggcgctgtccgagcagactgtcgtggtcctgggcactcaggctgccagcatcgtcctgccgcgcctggcgcagcagctggcggcccttcgtatccaacgcgacgaagtagccaaagaggttgagcgcctggtgcttgctcactctcttcatccggtcctgaccagcatgccgggagtcggcgtcaggaccgcagccagactcctgatcgatgtggtgagccgcgtcttcgcttctgcgggccatctggccgcctacgcagggctggcaccggttacgcgccgctccggctctcaaacgggcgatgttcctgtcggccttcgcagcgctgcgcgatccgatctccagggcctattacgaccgcaagataggccaggggaagcgtcacaaccaggccctcatcgccctcgcacggcgtcgctgtgacgtcctgttcgctatgctgcgtgatggcaccttgtactgccctccgtcgcacacaaaaccgttgacaaccacatagggg

SEQ ID NO: 2303 - DNA, 1706 bp, unidentified
  source 1..1706: mol_type = unassigned DNA; note = element_3359654
  misc_feature 1..4: note = core
  misc_feature 5..279: note = LE
  misc_feature 280..1521: note = CDS
  misc_feature 1522..1706: note = RE
  misc_feature 30..284: note = bridgeRNA
ttgctacaatgagtttgccccctgaaacagcgtgggaaatccatgctgcacagcggctcatacctaagctacaatgaaggggtaatcggtcttacggagcattgcttgagcttccacgctcgtactggcaaactgtaaaccgctccctcattgcagcgttcgatttacgcaggttgaagcatcggagactctccgtacattcgtgtaactaagcaagctgaatcggtaatgagttgcagcggtcaccgattagaaatctttttgattggaggactgcacatgaaaacgaacaccataacagcggttggcattgacgtgtccaagggaaaaagcacggtcgccattcggaggccgggcggtgaaatcgtaatggcacctttcactgttctccacacggcagaagggctggacaagctcattgacacgcttcgctcggtagatagtgaaatccgcgttgtgatggaacacactggcatgtactggaggccggtcgctttggcgctgaagagcgctggatttttcgtcagcgttgtgaacgccatgctgatccacaacttcagcgacaactcaatccgtaaagtgaaaacagataaagctgattctctcaagattgcaaactacgctctgacattctggcaggagctgcgcgactattctctagaggacgagaaccggcaactgcttaagattcagagccgcctgtatgaacgcactctgaactccagtgttgcgctgagaaatgggcttatctctctgcttgaccagacgtttcccgacgcgaataaactttttggcatggaaactcgcactacctccggtcatatcaagtgggtcgattttgtcaggcgtttttggcataaagactgcgtggcggccttatccctacattcttttgcagacaccttccaaaaatggtgcaaaagaaccggataccatttcaacctttcggatgccgaacggattcacaatattgcccgaaactcggttgccacgctaacaaaaaacgatagcacgaagttactgatcacacaagcggttgacagcctgaatgcggtctatgacacacttcaaatccttcggaatgaaatgtacaggcttgcctcgctgctccctgagtttgagattgtcatgtcgatgcagggagccggaaaaatcacggggccgcagctcatggccgagattggagatgtgcggcgctttacgagcaaaggtgctttggtcgcctttgccggagtggatgcaccgccttaccaatccggcaccttcgactctaaatcaagacacgtctcaaagcgtggctcaccgcatcttcgcagagtgttgtttacgatttgtagcgtcattctccagcatgctgatccagagaatcctatctaccagttcatgaacagaaaacgagctgagggaaaacacttttacgtctatactgtcgcgggaacggcaaagtttctgcgcatctactatgccagagtgaaagaatatctgaacgcggaagatgctcagaccgacacagtagcataacaagagctgtcacgccgagaagacggcatggtctgatgacgtcttcccttacaacaccgcagtgctgcggagcttcagatctgcaaaaatgtatggctttgcaggtctatttgttatgtccgattttctgtactggaaaacagaatcatttttcacggtttagggcttgacacctatttgcaggt

SEQ ID NO: 2304 - DNA, 1317 bp, unidentified
  source 1..1317: mol_type = unassigned DNA; note = element_3359b06
  misc_feature 1: note = core
  misc_feature 2..71: note = LE
  misc_feature 72..1094: note = CDS
  misc_feature 1095..1317: note = RE
  misc_feature 1110..1315: note = bridgeRNA
atggacacctccctaaaacggcttcagtgagccatgctgaatacatcagcaaaaatatgaagaggcgtccaatggaacaagttatcggcattgatctggcaaagcgagtgtttcaattacatattgcgtctccgctcggaaaaatgattaaaaataccgtggtaacgcgcgataaactgatgacattcattgctcaacaacccccttccaaaatagtgatggaggcttgtggcaacgcaaattactggagccgacaatttaaacgctttggtcatgaggtgaagcaaatcagccctcaatatgtcgccccattcagaatgggcagcaagaatgataaaaatgatgccgtggctattgtggaagcagacagtcgtccagggatgcgttatgtgccggaaaaaacacagaaacaacaggatattcagtgtttgcatcgtgttcgtcagcggctaatgaaaaacagaacggcgctgattaatcaaatacggggattaggcttagaatatggcattgccatacccgaaagcgctcacaaggttgagcaatgtttgcctgagcatctggaaaacgcggaaaatgacctgaccccgctgagccgtgaattatttcaggaactcttgcttgaactcaaagaacaacagcagcgtctgaaaatactggataaacgcctcaaccctttgaatgcacgagaggaagatattcgccgtctactgacgctaccgggtattggtccactgggggcatccgctttaatgatagcgctgggagagagtacggatttcaaaaatggccgccattttgccagttatctggggctagttccaagagaacacagtagtggtggcaaagtcaggttattgggtatcacgaaacgcggggatggctatttacgaggaatactgattcatggtgcccgttcagttgtttatcgggtgcaaaaaatccctgacgaacaatgtaatagattacaacgctggttaaaaggcgtgatagcccgcagcgggcccaataaagcggcagttgccctggcaaataaaaatgcccgaatagcctggactctggtcagccaacaatcgagttatgaaccacgatgagttacccatgatgtaaatgatgtagaagtccataaattgatgtactgacaggtagaaccgactctctgtgaacctggtaaataactcagtctatcgagactgttgaaataatgagggcagagagtgcggattttcatcagggctcattgaagccgaatatatgtttgcgactacgttgtcagaaaaatttactcacccacttgaattgagtcggtgtccatat

SEQ ID NO: 2305 - DNA, 1403 bp, unidentified
  source 1..1403: mol_type = unassigned DNA; note = element_3370394
  misc_feature 1: note = core
  misc_feature 2..307: note = LE
  misc_feature 308..1297: note = CDS
  misc_feature 1298..1403: note = RE
  misc_feature 13..239: note = bridgeRNA
ctacttagaaactgttcgcaggatcgacgtccggccagactcggtccaggtgtccggcgagacgctcccacattgcggctgcccaccggtgtcattggtgtggctctctcatggcctgcggcctcgccggacaccgctcgaggagaggctggaaaggggtctgttctgctcaaagtagcggtgccctcctcgtagatcgctcgtcagatcagtcgagggaggcgccgatgacggtgatcatcgggatggatccacataagagctccgcgaccatcgaggtcgtcgacgaacgcggccgggcgctggcgtgggccggtacggcaccgacaagcccggctacgcgcagatgctcgccgccggccgcaggttcgccgaccggatctgggcggtggaggggtgcaacggcatcggtcggcacatcgcccaccggctggtgcacgacggcgaggtcgtggtcgacgtgccggcgaagttgtcggctcaggtacgcgtgttcgccaccggcaacggccgtaagagcgaccctgtggatgcccactccgtggcgatggtcgcgctgcgcaccccgaacctggtgcaggtacgcgtcgacgcggacctgcaggtgatggggatgctggtcgaccgccgcgacgagctgggccgcgcccgtacccagacgatcaaccggctgcaccggctgttgttggagcttctgcctggcggggccaagaaattcctgaccgcgccccaggcccgggcgctgatcgcggccgtcaagccgcgcgatgtcgtcggcaagaccaggcgccggctcgcggtcgagctgatcggggaactggacggcatcgacaagaagatcaaggctgcggagaaggacctgaaggaactggtgaccgcccgcggctgcacgttgatggacctgcacggcatcggtccctccggcgcagctcggctgttggccgacgtcggcgacatccgccgcttcgccgaccgcgaccggttcgcctgctggaacggcaccgcacccttggacgcctcattcgggcagcaacaacgccatcggctctcccgcgccggcaaccgccggatcaaccgcacggtacacatcatggccgtcgtccagctgcgcaccgcaccgaaggacgggcctacttcgacgccaagaaggccaccgggaagacctcgatggaagccatgcgcgcgctcaaacgccggctgtccaacgtggtctacgcccgcatggtcgccgaccagaaacgacgcgaggcggcaggcccgggagggcactcggggacgactgtgcaatccagcgtgaccgacccgaccccggacgtcggctcttcggacaagccacttcccggacccgccatggcccaccctaaaccccagcctcacgacggcgccttgacataaaggggtgc

SEQ ID NO: 2306 - DNA, 1452 bp, unidentified
  source 1..1452: mol_type = unassigned DNA; note = element_3374b86
  misc_feature 1: note = core
  misc_feature 2..78: note = LE
  misc_feature 79..1137: note = CDS
  misc_feature 1138..1452: note = RE
  misc_feature 1215..1443: note = bridgeRNA
taatggaatggtccggccgtgctcctgccccgccagcaatggaagctggcaaggggcgccgaagacaaggagcacgccatgtcccagcaactcaacgcgacgatcgccgtaatcggcatcgatatcggcaagaactcgttccacttcgtcggcctagatgcacgcggttcaatcgtgctgcgtcagaagtggtcgcgtggccaggtcgaagcacggctggctaatttgccgccttgccttatcgggatggaggcctgcgttggggcgcatcacctcagtcggaagcttaaagcgtttggtcacgacgcccggcttatgccggcgaagtatgtgcgcccctactcgaaggggcagaagaacgatttccgtgacgccgaggcgatcgcagaggcggtgcagcgtccaacgatgaagttcgtagcgaccaagaccgctgatcagctcgacctgcaggcgctgcatcgcgtgcgcgaacgattggtcagccaacgcactggcatcatcaatcagattcgcgccttcctgttggagcgcggcattgcagtacgtcagggtctgcggttcttgcgcgctgaattgcctcgcatccttgccacgccgtccactgtgctgtcgcctcgaatggcgcgcatcatcgaaggtctgtccgaagactggcgtcggctcgatgagcggatcgatcacttgtccagcgagatcgcggccgtcgcgcggcaggacgccggatgcgagcggctgatgagcgtccctggcatcggaccgatcatctctagcgccatggtggctgcgatcggtaccggtgatgttttttccaaaggacgcgacttcgccgcttggctgggcctcgtccccaagcagatctcgaccggcgaccgcaccatcctcggcaagatatcgaagcgcggcaatcgctacctgcgtgtcctgtttgtgcaagccgcctgggtggtgctgatcaagccaaagacatgggagcgccacgggctcaagccctggatcgaggccgccaagaagcgactgcaccgcaacgtgctggcggcgctcgctaacaagctggctcgcatcgcctggagcgttctggctcatggccggaacttcgaagcgaggaagatcgatgaggtcgccgaaccggtctgatcgtcacgtcaccccgacgaccgatagcaaccgagcaaaatcaggagctcgcaatgccatagccaatctatgcgttaatccgccgaggtctgcgagaggatgagacgagatggaggttcggtcttcccggcgcttgcgaacactggtgaccctgatggcccggtcgaggcctgtccgctaatgagaacgcatgcgcgctgatatccatggtggccaggagcacaaagcgctccaatcaaaggccggatacattgatgcaagaccgctcaccaccaactcgaggaagactcttgcaacgcacggccggaccataca

SEQ ID NO: 2307 - DNA, 1524 bp, unidentified
  source 1..1524: mol_type = unassigned DNA; note = element_337d9f6
  misc_feature 1..2: note = core
  misc_feature 3..255: note = LE
  misc_feature 256..1485: note = CDS
  misc_feature 1486..1524: note = RE
  misc_feature 62..220: note = bridgeRNA
cttatattaggtttgttgcagattgtcatagaggagaccattgttatgtgacaccgatttcaagagcttgctggaatgaggaccaccttcatcccattcccaactacgaggatcagggggagactgtcccgtccagtgagagaacggagttaaaggttcaatagaaagttgtccccttggggaggaccgatataaggctaactttccgttcagagcccttgggattggaatttcataacggaggagcaagagaacgtgaaacgatattacataggagtggattggggagaccggctgcatcaggtgtacgtaggtgatgaggagggcaggaaagtaagagatataaaagtaccagagagcgtggaggggttggccgagatggggcgttggctcgacgagcaaagagccgagggggtggagctttgggcggccattgagaagccggcggggcggatagtggactttctgctcgaccacggggtggaggtttatccggttaatcccaaggcggtggatcgagtgcgggatcgctatcggatgagtggctcgaagagcgatgcgtttgacgcctatgtgttggcggagtttctcagaaccgatcaggcgcacttgaaagcgctgcaaccgagttctgagaaagctcaagagcttaagatgctgtgccgggatcagcgcagagtggggcgtcacaaagctcgcttgctcaatcagctcaccatcacgctcaaagagtattatgcccggcccttggacgcctttggggacctggacacggagctggctttggattttcttacacgctatccaaccccggctcatttgagtgcgctgaaacgtaaagaattcaaccgctttgccacccaagagcatcacctgagcaaacaacgctgtgaggagttgtgggagaaacttagcccagcgcaacttaaggtacccgagcatgtggtcagagccaaagcgcagttggtcgaagttctgatcgatcaactgcgggctgcgatcaaagcggtgaagagctacaaccataaggtcgagagttttttcgcctctagcccggccgctctgattgccaagacgctgccgggcggaaacagcgggaccctggtggcggcgatctgggccgaactcggcgatggcgcgggtcgctgggaatcgtttcgccaccttcaggccgaggccggagtggtgccggtgaccaaagccagcgggaagagtcgggtagttcactttcgtttcgcttgtaacaagcatctacgctacttgctgtactggttttcctttgtctcgctcaaccacagcgagtgggccaagatctactatcgccagcagcgcgcccaaggacataatcatcctcaagccttgcgcgcgctcggcgccaagtggcttaaaataatctttgtgatgtggcgtgaccataaagcttacgatgagaaattacacctggccaacatcgctttgcagaagatgcgtcaggcagcggcataaaatatttttgaaaagtccttgacaaggctcatagaaagt

SEQ ID NO: 2308 - DNA, 1644 bp, unidentified
  source 1..1644: mol_type = unassigned DNA; note = element_3380e6e
  misc_feature 1..2: note = core
  misc_feature 3..254: note = LE
  misc_feature 255..1523: note = CDS
  misc_feature 1524..1644: note = RE
  misc_feature 16..325: note = bridgeRNA
ctcctataataaagtcgtagggtaaagatgacctgacagccagtcaggctcttatcccttcattgccaaagctgttagaatagaatggcatggttatgacgctcacctccttggacccacggtgtattccgcggcgtccgtcagaaagccagtcgtccagccatcctcattcgcagccgttcggtttatgcaggttgaaccgccgttgaaagttacagtgcgttcgtatgataccccaggagattgaataggcaatgagaattctggaaccattgcaaatctttattctggaggaatcagttatgttaaacgcggtaggtattgatgtatcaaaggggagaagcacggttgctgtcctgcagccaggcggtgtcatcgtccataaaccctttgatgtacctcataagtccaaggatcttcatgatctcgcccaataccttggcgctcttgaaggagataccaaggttgtgatggagagtacgggacgttatcatgagccgatccggaatgtgctttctgaagccggtttctttgtatgtacggtcaatccgcatctgatcaaaaactacggaaacaacacaatccgtaaggtcaagacggattcagccgatgcaaagaaaatagcccgctatacccttgacaactgggccgagcttcgcgagtatacaagtatggacactacacgtactcaactgaaaactctaaattcgcagttcagcttcttcacgaagcagaaaactgctgcaaaaacgaacctgatcgccttgctcgacacgacataccctggcgtcaacaaattatttgacagccctgttcgtgccgatggaagtgaaaaatgggttgattttgcgtattctttctggcatgtggactgtgtccgcaaagccggtataacagcgtttacagaccgctacaaacgtttctgcaaacatcatggttacgagtttcaggaaaataaggcaaacaccatctataagaattccaagaacctcatagccaccttgccaaaagaggccgtttataaagagcttatccaagaaagcatccggcagttaaacctcttgtcggaaaatgtggagcacctccgtaaaatgatgaatgagctggcatctactcttcccgagtaccataccgttatgaacatgtacggtgtaggtcccactttcggtcctcagctcatggccgaaatcggggatatctctaaatttcagcatagagaagctctgaccgcttatgccggtgtggatccaggaaagaacgattccggacaagaagtacataatagcagccacgcatcaaaatgcggtccctccagacttcgccacaccctgtttcagatcatgacaaccatgctgcagaatggagtgaaggaaaatgatgctgtcagcagttttctgttcaaaaagaaggctgaaaacaaaccatatctcgtgtacatgacagctggcgcaaataagttccttcgtgtttattatggcaaagtgaaggaatgtctccgcgaccaggaggaagctgaacagtaaaactcccggccctcatatagcttccattgtcagaccgccctatgcaggcggtccggatacttgtgcccaaaatcaatctctaaacttttcccaaatcaccccttgactttttattagcagg

SEQ ID NO: 2309 - DNA, 1135 bp, unidentified
  source 1..1135: mol_type = unassigned DNA; note = element_338acc7
  misc_feature 1..2: note = core
  misc_feature 3..209: note = LE
  misc_feature 210..1124: note = CDS
  misc_feature 1125..1135: note = RE
  misc_feature 12..192: note = bridgeRNA
cttatctcttgccgatctggcactttaggtgccgagagcccggcgtgggcgaccgtgtggctctaggtcttgcgaccgctgggtagcttgggtccccacgccggtttctccctgatccgcccgaacagttgatcgagttggcgctcggactgataagactgggcaagcggggggagctctcgaccctgtcagcctagcggagttctgccatgtatgggatcgggatcgatgtaagtcaggccacgctggatgtggccgtccatgaacaggcgtttcgccaattcagcaacgacaagcgcggctttgtgcggctgattcagtggctgaaacaatggcccatcacgcaggtcgttctggaagccagcggcgggtacgagcgtgccgcactggaagctttgcacgaggctgggcttccgatggtccgcatcaatcctgctcgggcccgccgcttcgcccaagccacgggacgtgctgccaaaaccgatcgactcgacgcagccgtgctggcgcagatggcccaactcctgccgctcacccgctacgtgccaccggcgccctggcagcggcggttggccgaatttgcccagtgccgccgtcatctggtgcagatgcgcgtcagcgagatgcagcgcttgcggcagctgaccgatccagtcctgatcacgatcaagcagcgccatcttgcccagctgtccgaagaccttaaacagctggacaaggccattgccgagcagctcgccgcgcagccgtgctggaagaacatcggaacgctcaaaggcgctgggccgatcctggtcagcaccttggcctgcgaactgccggagctgggaacactggggagcaaggccattgcttcgctggtcggcctggcgcccatgaaccgcgagagcggtacctggcagggcaagcgcagcatcaccgggggccgggccgtagtgcgcgaagcgctctacatggcggcgctaaccgccatccgttacgagcccaggctacgtgacttttacgcgaccttgaaagccaaaggcaaggcgagcaaggtggcgctggtagcggtcatgcgcaagatgctggtcatcctcaacgcccgcaagcgggacgccgaggccgcgttggtctgcacctgataagacagttg

SEQ ID NO: 2310 - DNA, 1495 bp, unidentified
  source 1..1495: mol_type = unassigned DNA; note = element_3390638
  misc_feature 1..2: note = core
  misc_feature 3..242: note = LE
  misc_feature 243..1475: note = CDS
  misc_feature 1476..1495: note = RE
  misc_feature 7..236: note = bridgeRNA
ctaatggggttgcactggtccccgaggttggtgggatgggtgtccgggccgccggtggtcgagcactcgttgttgccggcccgcacgttcgaggtctaggtgtagaacgtgccgccaccggctgctgggagggtgtcaacgactggtgggacggcgtgccaagacgagcactgatccattagcgcgtgcgtgaaccttcccgaggtccgtgtcctacaccggacgaggaaggagagcacagggtgctgttcgtcggagacgactgggccgaagaccatcacgacatcgagatccagaacgaggcgggacagcgtctcgctcgcgctcggcttcccgagggcgtcgccggcctcgcccggttccacgcactgatcgccgaccacctcggcggcgacgaggatccgtcacaggtcgtggtgggaatcgaaaccgaccggggaccatgggtcggcgccctggtcgcgaccggctaccaggtctacgcaatcaacccgctctccgccgcccggtaccgcgaacggcacgtcacctcccgggcgaaaagcgaccctggagacgcgagagtactggcggacctggtccgcaccgaccggcatcaccaccgcaccgtcgccgcggacagcgacctcgccgaagccgtgaaagtcctggcccgtacccatcagaacctggcctgggcacggcaacgacacgcgaatctgctgcgttcgacgctgcgggagttccacccggccgccctggtcgcctttgacgacctcgcgagccgtgacgccctcgccgtcctggccgccgccccgaccccggcagccggccgcgcgctgaccacgacacggatcgccgccctgctccgcagggccggccggcaacgccgcgccgacacccgagcagaggagatccgcagcgcgctgcgcggagagcagctcaccgcacccaccgagatcgcgcaggcattcgggcacaccgtcatcgccgtcgtcgcggtcctgacgaccctcgtcgcgcagatcgaccgggtcgaggccgagatgaccacacgcctccaccagcatccccacgcccggatctacctgtccctgcccggattcgggccggtcctggccgcacgggccctcggcgagttcggcgacgacccgaaccgatacgagaccgctcgtgcccgccgcaactacgccggcacctcaccgatcacccgcgcctccggcaaacgccgtgtcgtcttggcccgcgtcgcggttaacagccgcctccgcgacgcactggcaacccaggcattcgccgcgctgaaagcctcacccggcgcgcgggcctactacgacagccatcgcgcccgcggcatgacccaccaccaggcgctacgcgccctcgcgaaccgacacgtcgccatcctccacggctgcctacgccaccagacggcctacgacgaagccaccgcctggccagccctcaccgacaccacccagaccgccgccgcttgacagatagaaccaagggacgt

SEQ ID NO: 2311 - DNA, 1324 bp, unidentified
  source 1..1324: mol_type = unassigned DNA; note = element_339b0b1
  misc_feature 1: note = core
  misc_feature 2..73: note = LE
  misc_feature 74..1099: note = CDS
  misc_feature 1100..1324: note = RE
  misc_feature 1111..1319: note = bridgeRNA
taatgaaatggccagcccgatccccgcgaccgttctacgataggcaattcggtccgaagtagaggagagcgccatgaacgagatcacgctgatcggcatcgatctgggcaagcatgtcttccatctgcacgcacaagatgccaagggacacgaggtgtttcgcaagaagctctcgcgcgtacagttgctcccgttcttcagcaatctcaaggcggttaccgtcgtcatggaggcttgtgcgggttcgcactggctcgcacgcaagctcaatgcgatggggcacgaagcgaagctgatttcagctcaatacgtgcggcctttcgtgaagagcaacaagaacgactacatcgatgccgaagcgatctgcgaagcagcgtgccgaccctcgatgcgcttcgtcgagcctcgaacggaggcgcaacaacttctagccgccatgcatcgtgcgcgtgagggactggtagcagagcgcacggccaccatcaaccggattcacggaatcctgctcgagttcggcatcgtcgttcctctgtcgaaggccacactacgccggctgcccgatgtgcttgcagtacacgatctgccaccgcggctgatccagcttgtccaccgactccatgctcactatcgttacctggatcagcaggttgatgatctcgagcgggatctgacggtacagcttcgcgaagacgagaacgcggcccggttactgtccatccccggcatcggcaccatcacggcaagccttctcgcgtcggaagtcggcaacgtcgcccagttcgagggcagccggaacttcgcggcttcgatcgggttggtgccacgtcagcacagcaccggcggacgaagtgtcctgtgcggcatcagcaaacgaggcgacaagcatctgcgacacttgcttgtgcaaggcgcccgagcggttatccagcgcgtggaaaaacgtacggacaggctcggggaatggattcgctcgatgctgactcgccggcactcaaacgtggtcgcgtgtgccgtcgcgaacaagctcgcgcgcatcgcctgggcggtactgaccagacacaccacatacgatcccgcgcgcttgaagctcgcggactgattcgccgtttcacccaacaaggttttgcgactgctggcaatttgatgatccaacggcacagcgaccggacgaagaacctgacaagttgtacagctcacagcagctgccgacattatgaggatcgaccggtgcgattttcatcgcggaacaacgattccggatagatttgcgcaagccatgaggacgtcagaactaggggttgcaaaattcgggctggccatagat

SEQ ID NO: 2312 - DNA, 1294 bp, unidentified
  source 1..1294: mol_type = unassigned DNA; note = element_339bb6f
  misc_feature 1..2: note = core
  misc_feature 3..371: note = LE
  misc_feature 372..1178: note = CDS
  misc_feature 1179..1294: note = RE
  misc_feature 20..202: note = bridgeRNA
cttgtatgattactccgtcagaaagaaccggccagttctctctgatggcggtccggatgccgtgtccgggcttaggctttcgcgcctgttccgtagatcctttgcaccggaccgccgttctttctcatgtgataaaccggacagtatcatggaccggctttcaccggtaacccgtatttgcaaggttggtttcactatggaaaaatgaactccacttcatcggtattgatgtcgccaaagctaaactggatgtcgatattcttcgccctgatggccggcatcgctgtaaaaaatttgacaataccctctccggacacgaagcgctggtccgctggcttcgcggccatgacgtgaaccgtgcccatgtctgcatggagtccaccagcacctacatggaagacgcggccgcgcatctgagtgatgccgggtataccgtgtccatcatcaaccccgccctcagtaaagctttcgcacagagtgaggggttgcgcagtaaaactgacaaagtggacgcccgtatgctggctcacttctgccgggaaaaacgcccgtcagcctgggaggcccctcatccgacagagcgggcactgaaagccctggtgttaaggcatcaggcgctgacagagatgcagacgcaggagaaaaaccggcgggaaaccgcgccggaggttcagctggccagcattgatatcctgctgggatgtctgagcgcggagctggcgcgtatcgaaaaacagataaaagacctgacggataacgacccggatatgaaacgacggcggaagctgctgaacagtatcccgggcatcggggagaaaacagcggctgttctgctggcgtatacgggcctgaggctgaagttcggtacagcgcggcagttcgcggcgtatgcaggactgacgccggtgcagcatgagtcgggcagcagcgtgatgcgggcgagccggatgagcaaagcggggccggttcaactgcgcaaggcgttatacatgccagcgttatcggcgctgtaccatacggcgtggggaaaagcgttcaggaaaaggctggaagagagcggaaagcgggcaaaagtcatcataggggcgatgatgcgaaagctggcgcaggtggcttatggagtactgaagtcaggaaaggcgttcgatgcgtcacagcatgagctgttgatagcgtaacaacgttccctgagaaaaaacgacagcaccagagagtgctgtcgttggtgtgcctgtcatccgggagccggagaaaagtatcggcaactaaaaatggttgcaggcgttcacagtat

SEQ ID NO: 2313 - DNA, 2042 bp, unidentified
  source 1..2042: mol_type = unassigned DNA; note = element_33a00b2
  misc_feature 1..3: note = core
  misc_feature 4..749: note = LE
  misc_feature 750..1925: note = CDS
  misc_feature 1926..2042: note = RE
  misc_feature 511..727: note = bridgeRNA
cttgtattataaagtagtagtttatagagcccctctccaagggctgtgctacactgtaagggatgctgtggattggttattgtctcctaccaccagatggttcctgaaaggttccgaccacagccctttgcagttttttgttaatcagttaaataccgccggacggtttatgtggaacaaggttacaaagcaaagcgttctgtggaggcagcatcacaattttaccgtcggagggcttgttatgatttctgttggaattgacgttgccaaggacaagcacgattgcttcatcatcaactcggaaggcgaagtcctcgcagatgtattcaccatcccaaacaacatggatggttttcatcgcctgctgcaaaggattcgagactgcacctcacctcaagacaaaataaaggtagggcttgaggcaaccgggcattacagctacaacatcctcgggtttcttcttgacaatgggctacccacctatgtcttgaaccccctgcacaccaaccttgtattataaagtagtagtttatagagcccctctccaagggctgtgctacactgtaagggatgctgtggattggttattgtctcctaccaccagatggttcctgaaaggttccgaccacagccctttgcagttttttgttaatcagttaaataccgccggacggtttatgtggaacaaggttacaaagcaaagcgttctgtggaggcagcatcacaattttaccgtcggagggcttgttatgatttctgttggaattgacgttgccaaggacaagcacgattgcttcatcatcaactcggaaggcgaagtcctcgcagatgtattcaccatcccaaacaacatggatggttttcatcgcctgctgcaaaggattcgagactgcacctcacctcaagacaaaataaaggtagggcttgaggcaaccgggcattacagctacaacatcctcgggtttcttcttgacaatgggctacccacctatgtcttgaaccccctgcacaccaacctttaccgaaaaagcctcagtctcaggaagacgaagaccgaccgggtcgatgcgcgaacgattgcagctatgcttttgtccgatgtgggcctcaagccctacacaggtacagcataccacaacgaggagttaaagtcactgacgagatatcgttttgacaaggtgaaggagcgtggaaaactcaagcagtcgattgcccgcctggtctgcatcctgttccctgaactggaaaaactggtgccgacgcttcacatggtctccgtttacgctttgctggaggagttccctggtgcaaaacagattgcggaagctcatctgacgcggctgaaaacacttttgcatgacgcttccagaggccgctatggtcgggacatggctgtggatatccgggaaacggccagaaaatccattggctcggtgatgcccgcaaagtcgttagagctttgccacaccatccgtctcatccgggagttggacgccgagatcgatgaaatcgagactgcaatccaaaacatcatgaacaagctgcattctcctattactaccatccccggcgttggcacccggatgggagctatgatacttgccgaggttggcgacttttcccggttcgggtctcccgacaagctgctggcctacgccggactttcgccctcgacctaccaatccgggcagcttcataactgctatgctcatatggaaaagcgcggttcccggtatctccgatttgccatcttcaatgccgccaagtacgtttgccattgggatccggtttttgccgcttacctcgccaaaaagcgggcggagggcaagcattacaacgtcgccgtctctcacgctgccaaaaaactggtacgcctcatttacgctttagagaaatccggcaagccttactgtctgacagcgtaatttcctcatgatagcccatgcggcattcaaccggacgcctgctttgctataccctttttgaaccatctgttttttcaccgctttcctcaatttcaagcttgacttttaatagttaat

SEQ ID NO: 2314 - DNA, 1468 bp, unidentified
  source 1..1468: mol_type = unassigned DNA; note = element_33a7cbd
  misc_feature 1..4: note = core
  misc_feature 5..414: note = LE
  misc_feature 415..1452: note = CDS
  misc_feature 1453..1468: note = RE
  misc_feature 1..231: note = bridgeRNA
ccccttaccttccttgtaggccgtgagcaagattctcggcttgggttgctcgacagcacgggcagggctttgtgcccctgtcacgcagatggcctggggggtgttgccacccgtgctgttgggcgcggttgacctctgacagggacatgcccccctcgggctgattcgtaaggtggttgacggcgacctcgcccgcgagctccctgcgaaccaaccagctccaggaggtgacatggccccagcagtgaccgggatcgacgtgttcgtcgggatcgatatggccaagcaagaccactacgccaagcgatcagtcgcgacggcgccgaactgttcaaacgcccggtcctcaacgacgaggccacgatcgcccggctcatcaacgacgctcgcgcccacggcacccaggtcgcgttcgtggtggaccagccggcgtcgggagcccaactgctgttgagcctcgccgccacgaacggcatcccggtcgcgtatgtgaccggcctgcagatgggccgagctgcggacctctacgccgggtccgccaagaccgaccccctcgacgcgtgggtcctcgcagacttcgctcgccgcaacgccgaccggttgacgtggctccaggtgactgacgacctgttggtcgagctgcggatcctcaacggccgcgacgtggacctggcgaccgacgcgacacgcacgatcaaccgttgccgcgacgccctcaccgccatctccccggcgttggagcgggcggttggctcgatgctcggtcacgccggaatccgtgacactctcgccaagtggccaacgccgacggcgttgcgtggcgctaggaaagcccggatccgcaacagggtcgcgaagcgatccccgagactcgcggccaaggccaccgaagagatctgggaggcactcgacgcccaaagtctcacgctgcctggtgaagaggcatggggccgtgtgatcgctgatctgtcctcggacctcgaccgggtcatcgcccatcgagaacagctcgctaccgagatcgagacggtgttcatgacacaccctctcggcatggtcctggtgaccctgtgcgggttcgggcccaggaccggagcacgaaccctcgccgagatcggtgacccgcaacgcttcacagatggtggccgcctcgccgcctacgccggcctcgcgcccgtcgaccgacgatcgggacgctccatcaactcgtcgtcgcaatcccgtgccggaaaccaccgactcaagaacgccgtgttcctcgcagcgttcgtcgccgcccaacacgacccgaccgccaaggcgtactaccaacgcaaacgcgccgaggggaagaagcacaacgctgcggtcatctgcctcgcccgcaaacgctgcgacatcatcctcgccatgctcaagaacgccacgccctaccagcaaccggcccacgaaaacctcccccaagccgcttgacaacaagacagggaca

SEQ ID NO: 2315 - DNA, 1312 bp, unidentified
  source 1..1312: mol_type = unassigned DNA; note = element_33a9fe9
  misc_feature 1..2: note = core
  misc_feature 3..67: note = LE
  misc_feature 68..1102: note = CDS
  misc_feature 1103..1312: note = RE
  misc_feature 1088..1306: note = bridgeRNA
ttaattagatggtccgcctcacctctaagctaaacttagagttaggcaaacaaagaggcgaaccatcatgtctactattaaagttcttggaatcgatttaggcaaatcatcttttcatgcgataggccgtgactattccgataatcaagtcatccgcaagaagttttcccgttccgctttgatcacctacctgcatcagttacctccgtgcataattgcattcgaagcttgtggcggtgcgcattggcttggtagacaatgtgaatcaatgggtcatacagttaagcttatccctccacaatacgtaaaaccgtatgtcaaaagtaataaaaatgattttattgatgcagaggcaatatgcgaagcgtcaacaagacctaaaatgcgctttgtcagcgtgaaatcggaagacgcacaagttatttcagctattcataaagcaaggcaagggtatattaaagaccgaacagcctgtatgtctcgcatagggtcattacttcttgagtttggcattgccctgccaacaggccatagcgtgatgaagcagctgtttaactggctggctcagcaaccacagaagctgccaagcttgcttatgcaagagcttatggagttgcacgaatattacctgtttctttataactccattgaaaagcaagataagaaactaaagcaactggtagacaccaacccgataggccagcttctgaaaacgatccccggtatcggtgatatgacagcaagcctttgtattgcgaacataagtagcgctacggatttcaaaaacgggagaaacatggccgcatggttgggactcgtgccagcgcagcactcaaccggaggcaaacccagattattgggaataagcaagcggggtaacaaggaactacgaaccttgtttatccatgccgcccgagccgttatgtcgaagccagataaaacaggaacagtttacggagagtggttgataaacttacgagccactaagccatttaatgttgtgacagtcgccttagccaacaagctggcgcgcatcgcatgggcagttatgaaaacaaagcaagcattcaatagcaacgagttagcaccaggtttgcaatgataaatgtgatgacgaaaacggtagaaccactggattaaaccctgacacaaaaaacagcttgtagaagctttcggcttttttgaggataatccagcgcggatctcatcgtggagcgggttgcgaaagcgcctaatcagactccgaatacattagcgcttaaccaaccccgttatcgaaatttattgttgcaataacgaggcggaccataca

SEQ ID NO: 2316 - DNA, 1354 bp, unidentified
  source 1..1354: mol_type = unassigned DNA; note = element_33b55c3
  misc_feature 1: note = core
  misc_feature 2..69: note = LE
  misc_feature 70..861: note = CDS
  misc_feature 862..1354: note = RE
  misc_feature 1114..1348: note = bridgeRNA
gaatgacatggattccccctcccgaggatcgaccacacttatgtggtacttatttgcactggaggcaccatgtctgattattcttattttggcggtatcgacttagctaaaaatcacttcagtattcatgtcgtaaactcgcaaggtaaagtcatcctgcataaatccgttacccgctctaaactactgcctacattagcaaatatgccacctatgcgtataggcttagaagcgtgcggtggagcgcattactgggcaaggacacttaatgggcttggccatgatgctcgcatcatggcggttaagtatgtcgtcccacaccgtacaaaaggtaaaaatgacctcaatgatgcgattgctatttgccaagctgtacaacattcatctacccgcttcgtacccgtaaaatcccctgagcaacaagccatactgtcggtgcaccgtatgagagaacattgggttcgtgaacgaactgctttaatgaatcgtatccgagcactgctttccgaattcggactaatcatacctgttggacgctcatcactgatgaagcaagttcccctcatgctcgaagacgccgaaaacgaactacctcatatagctaggacggttattgctgacgcttaccatcatcttgaagctttaaaccaacgtattgctgacacagaacaggtcttcgatgcttttgctaaagtcagtgacaatgttcagcggattatgaaggtgagaggcattggccctcaaaccgctacggcgatactagcgtcgatagggaatggcactcagttcgacaagagccgagacttctccgcttggctagggttagtcccaaaacagttctcaactggcggtaaaccgtaaaccaagcacggtgataaatatctacgaactttgctcgttcatggtgcccgaacggttatggccaacttgggagataaacaagataggttgagtcagtggtgccgcagcattcttgaacgtcggggcatgaaccgagccatcgtggctctggctgcaaagaatgcccgaatcatctggtcactactgcacaaccaaacggaatacgagaattacgctgcttaagttaacactaactcaagcagcgtaacgagaacacacccaccgggtcactgcagacgcaatggatggagataggttaagaccacttgcggagagcctgttaatgcggcggacataccaaatgtcatctaacgaataaggcaccgcagtcgcgcaaagtcatcagggtcacaacgtatgcgaatcgttgatataaagaccgaatgtagagcggcagtccaaaacccatcacttgaagtttagcggatgtttgacaaccgggggaatccatgta

SEQ ID NO: 2317 - DNA, 1642 bp, unidentified
  source 1..1642: mol_type = unassigned DNA; note = element_33b79cc
  misc_feature 1..2: note = core
  misc_feature 3..702: note = LE
  misc_feature 703..1620: note = CDS
  misc_feature 1621..1642: note = RE
tctaccattgtatttttacaggtgacagggccctgtagaagtacaactactaaactcacttcaccctgtgaaatacatgacacaatagcattgcacagggcaggcagggcaggcatgcctttgtcaagtagaatatctacttgacgggggtgtggctcacgaggtccgcaggcctgtaataaggcactgctcggttctgaattgccgcccccgtcttctgtttcattctagtgtctgttggaatgatgcgcatccgtaaggatggtcgctctgtaaagtagacgagaacaactggatgaggtttcatcaacctttaaaggaggttacagtgacagaccctgtagattcgtgtcggtattgatgttggttgtaaggcccatcgtgtaggtatcgcagatcctaaaggtcagctactagaagagtttgacatctcgcacacagatgctggttttcaggagttcttccgccggattgatcatcacaggcacaagttgaatcttcctgtagcagtagccatggaaggattcaatggctatgcccgtccgttggatcggctgatccaggaacgcgggtatacattgtacaacgtgaacaacctaaagctagccctgtagaagtagaaatactagattcacttcaccccatgaaatacaaacagaacaagatttcacagggcaagcagggtaaacccgattcaaggaagtgtttcctggtgcggcaaagacagatcccattgacacccgcaagatcctggagttgtttcacttaaaggatcacttaccactagctaaggatacgctgcagaaagtagtatcagccccaccagtcaatgacaggctgaagcgtcttagtcgtcgacgcagacagctggtgaatgacaaggtacgggtagctaaccgaatacagtccgatctacaggctgtttgtcctgagcttcgtgcaatcaccaaggatatgtgcaacctgtggttcctacggtttcttacctgccgtaacgacctaacacaattggcacgactacggcgtaccaccttgcttaagattcgtggtatcgggcagaagtacgccagtattatccaacagtggcagcgcaaggcaagcttctcttccgaggttagttatgtagggccgatgatcatctgtgatgctaggcggatcctcgagctcctagagcagattgttgccctggacaaggcgatggaagggctagcggataactcggagatggcaagacgccttgacagtattcctggctttggcaacacctgtgttgctgagcttgcaggtgagattggaactacgaagcgctttagcagtgaaagcagtcttgccctctatgtagggatgagtcctctttctaaagattcaggacaacatcacggtagcaagtgtccacgccaggtcaatcaccgggctaagggagcgatgatgaccgctgtagcacggcacatcgattgtgttcctgagtccagggtgtactatgacaagaagagagctgagggaaagggtcacaatcaagcggtacgtgctcttggtcggcatctggtgcgggtgatctggtcaatggttaacaacgaaagggactacgaacttcgaacccaggaggtgacaccgatgtgacttgaaaattcaagcgggatgt

SEQ ID NO: 2318 - DNA, 1326 bp, unidentified
  source 1..1326: mol_type = unassigned DNA; note = element_33c2c4d
  misc_feature 1..2: note = core
  misc_feature 3..73: note = LE
  misc_feature 74..1105: note = CDS
  misc_feature 1106..1326: note = RE
  misc_feature 1086..1311: note = bridgeRNA
agataattggactccccgcactcatagcgatactctgtcatggtcgctttgtagataataattggagaccattatgaaaaatactatcgttggtgtagatctagcaaaagacgtgattcaggtttgtgtatacacaaacaaaaatgtgcgttcgaataccgaaatgacaccgtctgatctcatagattttcttgctaattctaaatcgctaaccatagtatttgaagcttgtggaacctcaaattattggaaacaaaaagcgatatccctaggtcacgatgcccgccttatttcagcaaaattagttgctgcagtgaggcaaaatcaaaaaaccgatagaaatgatgctttggctatcattcaagctacgttattacccgatgtaacatttatttcaggtaaatcaattgaacagcaacaactgcaatctattatgaggctacgagaattgtgtgttaaacagaaaactgcagtgggtaaccaattaacagcgcttttgttggagtttaacatcaaagtatcaaaccgaaatggaggattgaagggcgcaatagaatctaccttggaggacgctgaaaacggactatcatttgagtttagagaggcattagatatggcatggaaacaatatttattattaactcagtcaataaaaacctatgatgattgcctggaaaaagcaatggaaacacactcggactgtaaaaaattacttaagctggaaggtgtaggcacattgaacgccattaacctgtacatcgctttaggctgtgctgagctaggtgtatttgaaaaaggaaaagatgcatcggcctgtattggtttaacgccagttcaatattcgtcaggagggaaaaccaggctcggttcaataggtaaatacgttaaaaacagcgtccttcggagccagctaattactggggcaatgtcagcggtcaaccatgctaccaatagagaagccagaacgacaaaagaccagtggataaaagccatggttgagcgtcgtggaaagaaatgtacggctgtggctttagccaataaaacggtaaggacggcctattccatgcttactcaaaacacagaatataaagccgaattaatctaggttttagcaagcgttcaactaacaaaaatgcacaatcgaagataaaaatcagcccgtcaaagcagtcgacaacatagagcttctagctcgcaggatagatttgctatgggtccgcgtaaatatcacagagccagggttcgctacccaaatagagctcgtacataagttcgcatttatttcttttattgatctatttttgttgacactggggagtccacata

SEQ ID NO: 2319 - DNA, 1359 bp, unidentified
  source 1..1359: mol_type = unassigned DNA; note = element_33c66a2
  misc_feature 1..2: note = core
  misc_feature 3..76: note = LE
  misc_feature 77..1060: note = CDS
  misc_feature 1061..1359: note = RE
  misc_feature 1077..1346: note = bridgeRNA
tgatggggtggacgcccccggcggcatcactgtgccaaagtggcggtgttgagaacacctttttgaggaggcgtccgtgggagaggttagcatgatcggcttggatatcgcgaagaacgtctttcaagctcatggagttgacgccttagggcgcgtggtgtttcgaaagaaaattgcccgacggaagctcatcgagttttttgtgactcagccgtcttgcctcgtggcgttggaagcatgtggcggagcccatcattggggacgggagatcagaaagttgggccacaccgtccgtttgataccccctgcgtatgtaaagcccttcgtgaagcggcagaagaatgacgcagccgacgccgaggccatctgtgaggcggcgcagcggccatacatgcggttcgtcgcggtcaaagacgaagcgcagcaagcgagctcggtcgtctttcgagcccgtgaccttctggtgcgtcagcgtacgcaatgcgtgaacgccttacgtggccacttggcggagtacggatgcatcgcgcccaaagggatgacgcacgtcgaaacgctgatcgcctttgtcaaagaccgaaccaacgctctgccaaacggtgcgaggttgatgctcgaagttctaatccgatcgctggcctctctgaaagaaaacatcgccgtgctcgatgccgaaattgttcgtcgcgcaaaagaagatccggtagctcgtcggctgacgacggttccaggtgtcggaccgatcacggcggcggcgattgcagcgctagcgccgcaggcagagtcgttcaagcgcggacgcgacttcgcggcctggcttggcctcacgcctcttcaaagatccacaggcggtaagacccggctcggcgcgacctcaaaaatgggtgagcgaacaatacgtcggttgctcatcattggggcaagcgccgttgttcgccaggcttgcagacggagcgccgcatcgagcccgtggctcaatcggatgttggctcgcaagccgcggatgctggtcacggtcgctgctgcgaacaaaacggctcgcaaatctgggcgctcttagcgaagggtggaatctatcaggctccagcggcggcgtaagcagtcgtacgctgcgaggtcgtcgaggacgtagggtggtcgaacggaaaatatggcgcatcagtcggtgagacggggtcagtcagccagttcataaccaagtgctccaagcacgcgcttctgatttggagctgatccgcgaacttccatatgggcctgcggcgtctgtgcggccgcattcgaggccggacagatgtcagcacccaactacgcgccgtgggttccgaaaaaatgccttgcgtccaaaggggcgtccacaga

SEQ ID NO: 2320 - DNA, 1570 bp, unidentified
  source 1..1570: mol_type = unassigned DNA; note = element_33c6bfe
  misc_feature 1: note = core
  misc_feature 2..268: note = LE
  misc_feature 269..1438: note = CDS
  misc_feature 1439..1570: note = RE
  misc_feature 2..244: note = bridgeRNA
ttgtatgataattaggaagttaattatcacacgtttcctttcttttaatatcgtggttcaatacaattcagatactatggacttttgattttttcctgtagcttgactactcaactggagtgtattgccactacctttatctgaatcgtttatcagctggatgttgccggagtgttttcactcagagtacttatttctatcaagtctacgatgataatcaatggtggacatcatggtatcagactttaggaaagggagatacaacctcatgaaaatttatgtaggcattgatattgccaaactcaaccatttcgccgctgcgatttcttccgacggtgaaataattcttgagccgttcaaattcacaaacgacgctgatggcttccaactgctggtctctaagctcgaatcattcgacaagaacagcatcatcatcggtcttgagtcaacggcacactacggtgacaaccttgttcgttttcttatcagcaagggctttaaagtgtgtgttctaaaccctattcagacttcttctatgcgtaaaaataatgtacgcaagaccaagactgataaagtcgacacgtttgttattgctaaaacccttatgatgcaggactccttacgattcatgaccctgaaagatctggattatattgaactcaaagagctcagcagattccgacagaaactggtgaagcagcgtacacgtttaaaaatacagctgacttcttatgtggatcaggttttccctgaactacagtatttcttcaaatctggcctgcatcagaattctgtctatgccctccttaaggaggctccgacaccagctgtcattgcttctatgcatatgacccatcttgctcaccttctcgaagttgcttcccacggccatttcggtaaggagaaagccagagatttaagagttctcgcacaaaagtctgtcggtgtcaatgacagttctttatctattcagataactcacaccattgaacagattgagttactggatagccagttgtttcacacagagcttgaaatggcaaatcttgtcacctgcctgcactctgtgatcatgaccattcccggaattggtttcatcaatggcgggatgatccttggtgagattggtgatatacaccgtttctcagaaccaaaaaaactgcttgcgttcgccggactggatccatcggttcatcagtctggtaatttccaggcacagagaacaagaatgtccaagagaggttccagggtattacgctatgcccttatgaatgcagctcacaatgttgttaaaaacaatactactttcaaggcttattatgatgccaagagagctgaaggccggtctcactacaatgcacttgggcattgttccggcaaacttgtcagagtcatctggaagatgctcaccgacaatgtcgaatttaacctcaaataagaggtctgtataccaatatcgatagattttgaaaaagcaccctaagggagctctattaaagttacccttttttaccaccgatatgaaaaagaaattttttgctaatttatggttgacttttcatagctggtc

SEQ ID NO: 2321 - DNA, 1434 bp, unidentified
  source 1..1434: mol_type = unassigned DNA; note = element_33d31eb
  misc_feature 1: note = core
  misc_feature 2..223: note = LE
  misc_feature 224..1420: note = CDS
  misc_feature 1421..1434: note = RE
  misc_feature 12..238: note = bridgeRNA
ctactagacgattcccgtaggaccggcgtccggccagactcggtccaggtgctcggcgggacgctctccatggcggctgcccaccatcagctggtgtggctctcttccggtctgcgttcccgtcgggtgccgtgccggtgcgtggctccagaggggactgcccagctcttagtagcaatgcccgcccggcgatccactatcggaaacggcggaaggcgagcgcatggcgcaggtgttcatcggggtcgatccccacaagctgtcagccaccattgaggtggtcgacgatcgcgagaaggtgctgacgaccggacggttcagcaccgacaaggccggctatgccgcgatgcgcaaacaggtatcggcctggccggagcgagtgtgggcggtcgaaggcagcaacggcgccggtcggccgctggcccaacggctgctgtccgacggcgagcgtgtggtggacgtgccggcgaagttgtcggcccgtgcacggttgttcgacaccggccacaaccgcaagaccgacgcccatgacgcgcacgcggtcgcggtcgttgcggtccgcacccaagggctgcgggtgctggcctacgacgatgagcttgaggtgctgcggatgctggccgaccgccgcgaagagctcaccaggcaacgcatccagaccgtgaaccggctccatcgattgctctcggaactgacgccgggcaaggcgaagaaggacatcactgccctgcaggccaaggcgattctcgcctcggtgcgacccagggatctggctgggaagacgcgccgccggctcgcggccgaacagctcgccgagctggtcgcgaccgagaagaagatcaaggcctcgaccaaggagttgaaggcggcggtgctcgcccgggggtcgacgttgatggatctgcgtggtgttgggccagtggtcgcggcgcggatccttgctgacgtcggtgacgtgtcgcggttcgccgaccggaaccggttcgcgtcttggaccggcaccgcacccctggacgcctcctcaggcgaacagatccggcaccggctctcgcgagccgggaaccgcaagatcaaccacatgatccacatcgccgcggccagccagatccggctcgacaccgaagggcgtgtctactaccgacgcaagctcaccgccgggaagacgcggatggaagcgatgcgctgcctcaaacgacgaatctccgacgctgtctatcggcagctcgttgccgatgcccgggcaagcgaaactggtccgggagggcactgcggggcgtcacttacatccagcgcggtcgacctgcccccgcacatcgacacttcggatcagccacttcccggacccgcgaatccgacgttaccgccgaccccgcgaccccggaagacctcggcgaggacacacgccatgatggccggttgacaacagaggggagc

SEQ ID NO: 2322 - DNA, 1324 bp, unidentified
  source 1..1324: mol_type = unassigned DNA; note = element_33e3765
  misc_feature 1: note = core
  misc_feature 2..73: note = LE
  misc_feature 74..1099: note = CDS
  misc_feature 1100..1324: note = RE
  misc_feature 1106..1320: note = bridgeRNA
taatgaaatggccagcccgatccccgcgaccgttctacgataggcacgtcggtccacggtagaggagagcgtcatgaacgaggtcacgctgatcggcatcgatctgggcaagcacgtctttcatctgcatgcacaggatgcaaagggacatgaggtgttccgcaagaagctttctcgcacgcagttgcttccgttcttcagtaatctcaaggcggttaccgtggtgatggaagcgtgtgccggatcgcactggctcgctcgcaagctcaacgaactggggcacgttgcccggctggtttcgccgcaatacgtacggcctttcgtgaagagcaacaagaacgattacattgacgccgaagcgatctgcgaggcggcgtcacggccggcgatgcgcttcgttgaaccgcgaacggaagcgcaacagcttctggtagcattgcaccgggcgcgcgaggggctggtcaccgaacgcacggctacgatcaaccggatccacggcatcctgcttgagttcggcattgttgttcctctgtccagagctacgctgcgtcgtttgcccgacgcgctcgctctgcacgatctgccgccacggctagtccagttgatcgaccggctccattcccactatcgttacctggaccagcaggttgacgatatcgaacgtgatctgacgtcacagcttcgcgaagacgagaacgccgcgcggctgctgtccatccccggcatcggcgccattacggcaagcctgctggcatcagaggtcggcaacgttgcgcagttcgatggcggtcgcaactttgcagcgtcaatcggactggtgccccggcaacacagtaccggcggacggagtgtcctgtgcggaatcagcaagcgaggcgacaaacatctacgccacttgctcgtgcaaggtgcccgtgcggtcatccaacgcgcagagcagcgcacggacaggctcggtgcgtggatccggtccatgctgacgcgaaggcacgcgaacgtggtggcctgtgcggtcgccaacaaactcgcgcggatcgcctgggcggtgctgactaaacacgctgcttatgatgccgcgcgcctggagcccgcgaactgattcaccgtttcacccaacatggttttgcgacggctggaagtttgatggtccaacggcacagcgaccggacgaagaacctgataagttgtacagctcgcagcagctgccgacattttgaggatcgtccggtgcggttttcatcgcggaacatggattccggatagatttgcgcaagccacgaagacgtcagaaccagaggttgcaaatctcgggctggccatagat

SEQ ID NO: 2323 - DNA, 1165 bp, unidentified
  source 1..1165: mol_type = unassigned DNA; note = element_33f55c6
  misc_feature 1..2: note = core
  misc_feature 3..205: note = LE
  misc_feature 206..1153: note = CDS
  misc_feature 1154..1165: note = RE
  misc_feature 13..211: note = bridgeRNA
cttgtcttatgacgtccctcgccctttccggcaaagatggtgctgccggcgaggttcgaactcgccggcagcgggaggggacgggtcgtgaaagtgctggccgtcatgggccgagctagagtgtgaccgcctctctcttttcctcgtggcctgaacggatacccgggcatcacggcccggatgacaagcaaaggacctcgaaaagatgaccgccaccatagcccagactgtcggcgtcgacatctccaaactcaccctcgacgtctatctccacccccaagccacagcgcggcagttccccaacaccacagccggcatcacagccctgctgacgtggctcggccaaaccgccgtccatcgcgtcatcttcgaacccaccggcgcttaccatcgaagccttgaacgccaactcggcaatgccgccatccccatggtcaaggtcaatccgctgcaggcacgacgcttcgccgaagccatcggacaacgtgccaagaccgacgccgtcgatgccgccatgctcgctcgcttcggcgcgctcgacgcactgcagacccggccggtcgtcagccagacgctcagcgacatgaaggagctgctcgtcgcccgccgcggactggtcaaagaccgcgtcgccaccacgaaccgcaaccatgtccaccgcgcccccctgctcaagcgcctcgccgaccaacggttacgccaggtcgagcgccagatcgccgccatcgatgccgcgttgcgcgccttgtgccgggccgatgccgaactgaaggcgcggctcgacatcctcgtcagcatcccaggcatcggcgaagcaaccgcgctgaccatgctcatcgagatgcccgagttgggcacgatcgacaacaaatgcgtggcctccctcgccggactcgccccgatcgctcgagactcaggacagcacagcggcaagcgcttcatccgcgccggacgcgctcacctgcgccaggccctctacatgcccgccctggtcgcgatccgcttcaacgcggacatgaaggccaaatatcaggcgctcgtggccgccggaaagccgcccaaagtcgccatcaccgccgtcatgcgaaagctcgcgatcctcgccaacgcgctcctccgagagcagcggaactggacgccaaaactcgcttgatcaagacggata

SEQ ID NO: 2324 - DNA, 1519 bp, unidentified
  source 1..1519: mol_type = unassigned DNA; note = element_34095b6
  misc_feature 1..3: note = core
  misc_feature 4..242: note = LE
  misc_feature 243..1388: note = CDS
  misc_feature 1389..1519: note = RE
  misc_feature 3..217: note = bridgeRNA
cttatattatatttagtgcagttagctactgccaaagcccaagtgttatacttggaaaaaccactgtggattagtatttcctccaatcgcttgacgatttacgaaaggctctaaccacagctttttgtttcaattggtaatgagtttgataacgcaatgacgtttaatcttcagtaaggtgacaagacaaaaagtaagtggataccaagtgggttttatacttaatattcggaggtgctcttatgctctatgttggcattgatgtcgctaaaaacaaacatgatttcacagtcttagatggaactggtaagcaagtcttaaagactattaccttcaccaatcgaaaacaaggatttgaattgcttcataataccttaaaacaacttggtcaagactgtcttatcgcaatggaagatacgggacattatgccttaaaccttttgaaattcttacatgaaaaagcttatcaagtctatacttacaatcctcttctcatcaaagaatttactaaatcaatctctctacgtaagactaagacagacaagaaagacgcccgagtcatcgcacttaaactagtaacagatcccaatcgagaactctttaaacacgatgacaagcaggaagaactcaaaattctgacccgtcatgtcagccgactaaagaggcatcaaaccgattggaaagtccaatacaccaaatgcttagacattctctttcctgagtttcatcaagcagtgacaaagcattctgactacagctatgagttacttaaagcatttcctgctcctgaaaaaatgatagaggctggatttgaaaagctaatggacattaaacgattaacagttaaacatgcacaggatattctcgaacttgcttcaaacaccattgggacgacatctctcgctcgtgaatttgaattggttcaaatcattgagaatatccagcactacgaaaaactcatcaaacaggcgaatcataaaattgatgagttgatggctgaaatcaattcggtcatcgtatcagtaccagggattagtaaccgtctagggtctgttatcttagctgaaatcagaaatatcaatacctttaatactcctgctcaactacaagcattcgcagggctagaaccgtctatctaccaatccggacaaatagataccaaaggtaagatggtcaagcgtggctcaacacatctacgttgggctctcttacaagctgctatcaaagttgctcgctattcacctgcttttaaagcctattttagaaccaaactagcccaaggaaaacattataatgtcgctatgtcacatgtcgccaaaaaactcattcgggtactgttttacttacttaaaaatcatatagcatttgaagaatccaaagtgagataacttttatcaaacctataaacgaaacctttttaaaacagatctttaaaaaggcttttttgtcgtatctaaaatacggttcaatgtgttctaaaaaaatttagaacaaactattgactttccttatagtttgt

SEQ ID NO: 2325 - DNA, 1220 bp, unidentified
  source 1..1220: mol_type = unassigned DNA; note = element_340d6c7
  misc_feature 1..3: note = core
  misc_feature 4..222: note = LE
  misc_feature 223..1185: note = CDS
  misc_feature 1186..1220: note = RE
  misc_feature 38..199: note = bridgeRNA
gttgtatattcaaaatattttttgtacctttgcagccgatttgacatctaaagtatggagtaaggccgatcctttgtttgtcacaagaccgtaatggacgttttgcccccatactttatacatctaaaaactggatagttcattagggcacagaccccgcatttgcaacgatagtgttcagatgtatcgatgtttaatcagcgcaataaatcaaatagcattatgacctacattggtattgacgtaagcaaggattcgttcgtagcagcctatccgactaagggagattacaaaacccaaaagttccctaacaccactagtggtgtgcgtaagttcattcaatcgcttccggctgaatgtcattgtgtgatggaggcaaccggcaactatagtatgcttctcctctatctgcttcaacaggctaatattaccgttagcatggagaacccgcagaagattaagcattttgctcgtgccatgttgtccactaccaagacagacgagatcgatgctaaactgattgctatgtatggtgagaaaatggagccagcgccctataaaatcccgtcagagagcatcattcagctaaagcagaaacgcactgtccttcggcaacttaagaagcaacttacgatgatgatcaatctacagcactccttgtcggttctacccaagcaagaccctacggctaaagttgcaaccgagcaaaccattaagttcctgcgtaagcaaatttctaagttagaagacgagattacccatctatctaacaaggagtttaagcgccaaatggagttactcacgtccattaagggaatcggcgaaaatatcgcttctgcactcataatggcaacaggaggctttacgtactttagcagtgctaaacagatctcgcggttcctaggactttgtcccacctaccagcaatcaggtacgtcagttaatttcaaaggtcacattaatcgtaacggagatacacatctacgcagtcaattgtatattgtcgcggttgcatctataaagtgtaatgcggcttgtcgagatacattcgtacgtttacgcgagagaggcaaatccggcaaagctgctatcattgctgtcgctaataaacttatccgcatagctttcgctgttgttactaacaatcgaccatatatagatggatatgtatcaacattagcataaaaaatcatttttttgtcacttttttaatatagttc

SEQ ID NO: 2326 - DNA, 1432 bp, unidentified
  source 1..1432: mol_type = unassigned DNA; note = element_341022f
  misc_feature 1: note = core
  misc_feature 2..110: note = LE
  misc_feature 111..1136: note = CDS
  misc_feature 1137..1432: note = RE
  misc_feature 1176..1389: note = bridgeRNA
gaatgaaagggacttccccgtcccgaggctgcggcggaagccgcgaatcggcatcacagtgccatgatggagtctcgaaccttcatcaacaccaacaagaggggaagtccatgccaattgtcaccgtcggaatcgatcttgccaagaacgtgtttgcgattcacggagtggacgagtccggcaaggctgtgctggtcaagccgcgcgtaatgcgcgaccaactcacagcgctcatcgctcagttgccgccttgcctcatcggcatggaagcctgttccggcgcccatcactgggcccgcgtgttccagcaatatggccacaccgtgaagctgatggcgcctaagctcgtggcaccctaccggatgtcgggcaagcgcggcaagaacgatgcggcggacgcggcggctatctgtgaggcagtgacgcgcccgagcatgcgtttcgtaccgctgaaggacgaacaccagcaggccacgctctgcctgcatcggacgcggcagggtttcgtcgaggaacgcactgcgatctacaaccgcatacgtggcctgctctccgaattcggcgtggtgctgccgcagagcccggagcgtctgcgaagggagatcacggttcctctcgaggcactgccgggctgggccagacgctgcatcagcgatctgctcgagcacgcaggcaacatcgaggaccggctggccgaatacgaccgcgcgatcagcgaaatagcacgttacgacgcgcgcagtcggcggctcatgcaattgcggggcatcggcccgaccacagcgagcgcgctgcttgcgagcctgggtgtcggacatgatttcagcaacggtcgtcaggtggctgcctggcttggcctgacgccgggacagcatagcagcggcggcaagcagcggctgggcagcatcacaaaggcgggcgacgcctatctgcgcagtctgctggtgaacggtgcacgcgccgtcctcgcgaatctcggcgagaagcaggaccgcttcagccgctgggtgcgaagcctcgtggagcgccgcggctactggcgtgcggctgtggcgatcgcggccaagaatgctcgaatggcatgggcggtcctgaagtacggcgacgacttcaagcacgacccggtcgtcgcgtgacttccagacggattcatcaaccgcacaccaacgagaagcaacgtacgatgagccaataaacgatcactttgcactgccagcggtgatgtgaagcgggttggacccgcgcggggtatgcctgataaggctacagggatttcagtcccggtcagcgaacgaggccctcgcgcgcgtctttcatcagggtccgggccattggcccaacatgaccggttgtagtacagcagtccttcaaggcagcatggcaacaacagaaaaccacatttgtgcttgcgctcaatggggaagcccttgta

SEQ ID NO: 2327 - DNA, 1433 bp, unidentified
  source 1..1433: mol_type = unassigned DNA; note = element_3419832
  misc_feature 1..2: note = core
  misc_feature 3..142: note = LE
  misc_feature 143..1162: note = CDS
  misc_feature 1163..1433: note = RE
  misc_feature 1202..1433: note = bridgeRNA
aaatgtaatgaacacatcccccattaagtaaggtgcacggtgatgaatgaaagggaaatgtatggaggtagcctcacagatttccggcatcatagtgccaatacaggatgcataagctccctcagactggagactccacaacatgaaatatacaccggttggcgttgatatcgcaaaacatctgattcaggttcacttcatcgatgagcacacgggggaagtggttgataaacagctgcgtcgccaggattttctgacgttcttctgcaaccgtgagccatgcctgattggtatggaggcatgtggaggttcccagcactgggcgcgtgagctgaaaaaacagggtcataaagtccggttgttacaggcccgatttgtaaaagcgtttgtcatgggcaacaaaaacgacgtaatggatgcccgagctatctggatggcggtacagcaacccggtaaggaaatctctgttaagactgaagaacagcagtcgatactggtactgcaccgtacccgcttgcagttggtgaagttccggaccgcacagattaatgccttgcacggaacgttactggagttcggcgaaaccgtccacaaaggccgggccgcgatggacagagaactaccggcagccctggagagaatgaaagcaaagttaccaccgtatctcatcaccgtactggaagaccagtacagcaggctgagtgaactggattcgctgatagatggccttgaaaaacagctcaacagtgtggcgcgacagaatgaaatctgtaagcgactgatggagatacccggtgttggggcgttaattgccacggcagcagttgcaacgatgggagaggcgtcagcgtttaaatcagggagagcattcgcctcttatgttggtctggtaccaaagcagaccggttctggaggaaaagttcgcctgctggggataagtaaacgtggtgacacttatctgagaaccctgtttatccacggagcaagatcggcatcactccgtgtaaaagaacctggttcatggatcacggaactgaaaaaacggcgtccgactggcgtggctgtcgtggcgatggcgaacaaacttgcacggactgtgtgggcgatagcagctcatgaccgaaaatacaataaagatcatatcagtatcaggccatattaattgctgataccgatataaacattaactcttaagaaagggtgaatgctgaaaggttgctctggcggccatcgtgatgacaaagacaggtaagaccggggctcactaaacctgaatgatgtgttgtgcttgaagctcgcaggagaaataaggcgtgagtcagcgaattacataggggctcgcagcttgatggctgcaaaaagccggatataaagctgcaacctaccgtcaatgtcagaacaatggaagccttgcaaacgggatgtgttcatat

SEQ ID NO: 2328 - DNA, 1390 bp, unidentified
  source 1..1390: mol_type = unassigned DNA; note = element_341fd7c
  misc_feature 1..2: note = core
  misc_feature 3..85: note = LE
  misc_feature 86..1114: note = CDS
  misc_feature 1115..1390: note = RE
  misc_feature 1088..1377: note = bridgeRNA
tgatggcgtggatgccccctcctgacggcatcgtaatgtgccaaagtgatgagtgctgaaagcatcacagaaggaaggagcatccatgtccgaagttactatcatcggtatcgatttggcaaagcgcgttttccaagttcacggggcgtgtagcgacgggtcggtcgcattccgcaagaaactttcgcggagccaagtgttggcgttctttactcagcaatccaggtgcgttgttgcaatggaggcctgcgccactgcgcatggctggggacgcgaactcgagaggctgggatacgaggtccgtttgatcccgccggtctatgttaagccgttcgtcaaacgacagaagaatgatgcggcggacgccgaggcaattgtcgaggcggctttgcgacccacgatgcgtttcgtcgcggttaagacggaagaccaacaggcccgcgccatgctgtttcgcacgcggcagatgttcgtcggtcaacgcacccagttgatcaacgctttacgcgggcacctcgccgagcacggcctggtcgcggcgaccggcacagcgcagctcaagcgcctcgcagatgcgattgaagattgcggcacagccttgcccgagggtgttcgggacttgggccagatatatctggcgcaaattgcggggctgaatgctcgggtggcagagcttgacatgaagatgagaagcgtcgccaaagaggccgatttggcacgtcggttccaaaccatgcccggtgtgggtccgatcacagcgcttgcaatcgagacattcgccccagatctaacgacgttccggcgcgggcgcgactttgccgcctggcttgggcttgtgccaaagcagcattcgaccggcggcaaatctcgactgggtagaacgtcgaagatgggccagcgtgacatccgcacacttttggtctcgggcgccatggcggttctgcaagcggtcgagcggttcggcacgccaaacaaaggctggctaacgcgcatgcgggctcgaaagcctcgcatggtcgtggcgattgcactggccaataagatggcccgtggcctttgggccatgatgacgaaacagcaagactatcgggttccggtggctgcaatggtataagcgcaccgcgcttttctattgcctgccggcgcatcgggagtgtgaggaggtcacttaacagtaagggcaaaggatcgacaagatccgggtcagataaagcagtatttgtgctggagccaatgagctcggtctgttgatctgcttctgatccgcgcatcgccataccggcccgcggctgtgtcaatcgccgcaacatgaggcctgatacatgaccgcacccgatcacacgctcaagccgttcaaaaaaccacttgcaccaacgggggcatccataca

SEQ ID NO: 2329 - DNA, 1586 bp, unidentified
  source 1..1586: mol_type = unassigned DNA; note = element_342140c
  misc_feature 1..2: note = core
  misc_feature 3..259: note = LE
  misc_feature 260..1432: note = CDS
  misc_feature 1433..1586: note = RE
ctactattaaatgtgtgatagccatatctttaccttttctacaggtttggctatgctgttgaagatgctgtggattggtattctttctcctaccgcacagacggtttatacgagggtccaaccacagcatctttgctacagtgttaatcagttagataccgcatgacggtttatgttgaagtaggttacatccggcagagagccctgtggataatcagcagcatcacgtactattcatttcacacagaggaggttctctatgatctatgtcggtatcgatgttgccaaggataagcacgattgctgtatcctgggctctgacggggagatcttattctctccattcacttttcagaactcgttacagggattcgatgcgctgtatgagaagattctgtcgttaacttcagatctttcagaaataaaagtaggtcttgaggctaccggtcactatcatctcaaccttctgcgctcgctccttgataacggcctggccagctttgttatcaacccgttacacacaaatctttacagaaaaggtcaaagccttagaaagacgaaaacggataaggtcgatgctgcttcgattgctatgatgctgcttaccgataggtcactcaagccctactcggacacatcataccataacgaagagctgaagtctcttacaagataccgtttcgacaaggttcaggaacgggctcgcctgaaaatatctgtatccagacttgtcagcatcctgttcccggaactggagaagcttgtaccgacactccatatggcttccgtttatgcattgctgtccgagtttcccggagcttcttttattgcagcagctcatctgacacgcctcaagcatctcctttatgatgcttcaaaaggccactacggtagagatatggctcttactgtccgtgatgccgccacctcgtctatcggctctgtcataccggccaagtctctggaactgaaacatacgatccatctcatccaggtactgtctgcggagattgatgaaatcgaggatgccatcaacgccatcatggatacgctcgattcgccgatcaccacgatccccggaatcaagaaccggatgggctccatgatccttgcggagatcggtgacgtttcccgtttcgataatccggatcagatccttgcctatgcaggcctttctccttccacttaccaatcaggacaactaacttcttcctatgcccacatggagaaacggggctcgcgatacctgcgctatgccttgttcaatgcagccatatatgtctgtcactgggatccaactttcaaagcatatcttactaagaaacggaccgaaggaaagcattattacgttgctgtttctcatgcctgcaagaagctggtcagagtgatctatcggatgcagctgactggagaaccttacagagtcgcctgagtcatttcttgcccttttctatgtgagcacccttttggatgctctgttcgtcatgcagttttcaaggtactgaccgcatcagcatcggctgatgccttgatataaaaaacctacaacttgtaactttctttattgactttctttaatagttagt

SEQ ID NO: 2330 - DNA, 1424 bp, unidentified
  source 1..1424: mol_type = unassigned DNA; note = element_346eb79
  misc_feature 1: note = core
  misc_feature 2..301: note = LE
  misc_feature 302..1411: note = CDS
  misc_feature 1412..1424: note = RE
  misc_feature 14..248: note = bridgeRNA
ctacgtgtttcattgacgtcaggagcgggcctggccaggctcggtctgaggtgaccggggttgccgctctcagtgcggctgcccacgctcttggtgtgaggctcacatttggcttgcgctgccccggtcaccgccagggctgcgagaggctcaagaggggtatgcccagccgtacgtagcggtgccctcccagctcgacacccacctgttggcacgagcaagggagcagagcaacggacatcgaggtcgcacgggtcgtgatcgggatgacccgcacaaacgcagcgtgacgatcgaggtgatgaccggcgatgagtcggtcgtcggcgggggtcggttcagcaccgacactgacggatacgcccggctgctggcgtacgcccgggcgtggccgcagcggcagtgggcggtcgaaggctgcgcgggtatcggcaagcacgtcgccgaccggctcgtcgctgacggtgaggacgtggtcgacgtgccggcgaagatgtcggcccgggtgcgggtctttaccaccgggcagggtcgcaagaccgacgccaccgacgcgcactccatcgccctggtcggggtccgcatgtccgggctgcgcccggtcgtcgacgatgagcagctggagctgctgcggatgtgcgtggaccggcgtgcctcgctgggccgcgaacacacccgcaaggtctcccagctgcacaaactcctgctcgagctcatccctggcggggccaagcgatccctgtccgcggcccaggccaaggagctgctgcgcaaggtccgcccggccacggctgcgggcaaggtgcgtaaggcccacgccgccgagcttgcggccgacctggccacgatctatgcccgcagcaaggccgcggacaaggagctgaaggcgctggtcaaagcgacaggcaccggtctgctcgatcggcacggcatcggcccctccggcgccgctcggctgctcgccgaggttgccgacgtcacccggttccccgaccgcaaccacttcgcgtcctggaacggcagcgccccgatcgatgcctcctccggggaccacacccgccaccgcctctcccgcaagggcaaccggcagatcaaccgggtcctgcacatcatggccgtcgtccagctgcgcaacgccaccgagggacgcgcctactacgaccggaagaaggccgccgggaagacctcgatggaagcgatgcgctgcctcaaacgaagactgtccgacctggtgtacaaggcactcctggacgacctcgccggacacgcgacgacgggcccgggagggcacctgggtgacgactctgactccagcgcgaccggctcacaacccgctaccggctcttcggacaagccacttcccggacccgccatgagtaagcctacgaccaccctcccagcggcctgttgacacagaggggtgc

SEQ ID NO: 2331 - DNA, 1365 bp, unidentified
  source 1..1365: mol_type = unassigned DNA; note = element_3471c12
  misc_feature 1..2: note = core
  misc_feature 3..257: note = LE
  misc_feature 258..1301: note = CDS
  misc_feature 1302..1365: note = RE
  misc_feature 35..208: note = bridgeRNA
cttgtatcttgcttgcatctccccggttcattcgctctgtgctacttgggagccagaatcgggtttcggcgggaggccgatcgcaccctaacaggcgctgtcgttcgcagcctggattgtagataggccccccgccctcctttctgacgccgtggagaatccgaggccacatgagcctgcattcacaaggtcggcgagagaggttgcacagggtcggggagccgaaaccgagtctaatccagtctcgaggagttgagatgacgaatcgttctcagctaaatggcgaagtctttgccggtctcgacgtcagcgcacgtgagatcagcgtcgcccggcttcgaagcaaagaagggacgccgacggtcgctagctttgcgaataatgcctctgggcataaggcgctcctggcgtacttgctgcagggaaccgagcatgtacgcgtttgtctggaagccagcggcaactacagtctcgatctagccttggccttgcatgctcaccgtcatgtggaggtcagcgttgttaatcctcgtcgtgcacgccgcttcgcggaatcgctgggccagcggagcaagaccgatcctgtcgacgcccgtgtgctttgccagtacgccgtgcggatgccgtgggtggcctggcgaccgccgaccgcacgggccctgcggttgcgcgccatcacccccgccatcgaaagcctcggcgttatgcatacccaggaaaagaatcgtgagcatgcgttgaaggccagtctggctttgccatgcttggtgattcgggagatgcggcgtcaccagcgttacttggagcatcgcatggagcagctccgccgcgaagctcgccggctcatcgcgaaggaccccgagctagatcgtcgctttcgtctgatggtgacagtccccggtgtcgccgagaccagcgcgctgcagatcctcggagagctagttgtgctgcccgacggcctagatgctcgccagtgggtggccttcagtggccttgatccctcgcaatttacttccggcacgtccgtggaaaagaagccgaggattagccgaggaggcagtcgccatcttcgccacgcgctgtacatgccggctctggtggccctgcggcgcgagcctcatctgcgggccttctatcagcgtttggtcagccgtggcaaagctcggctgcaggccgtggtagctgtcatgcgcaaactcctgcacgccttgttcgctatgttccgctccgatcaaacctacgacggttccaagctctgctcccacgagctccccgccacggtgacgacgtcctgtgcttgacgggaaaagagagaggttctccgcacctctccagagagaaacaaattgaaattcaagagagaat

SEQ ID NO: 2332 - DNA, 1476 bp, unidentified
  source 1..1476: mol_type = unassigned DNA; note = element_3478065
  misc_feature 1: note = core
  misc_feature 2..235: note = LE
  misc_feature 236..1462: note = CDS
  misc_feature 1463..1476: note = RE
  misc_feature 9..233: note = bridgeRNA
cgttaccttgttcatgtccccggatggtgtgattatcggggatgttggcccgtcgggtccggcctgattattgcccccagtcgttgatgatccgggggggtgttgtcaccggatttgactggtgtcaggtgatcgctaataggggccgtactgaaacccaggccattcgtaacgtggatgtgagactcgataccgcggcgctgaccaacataacggttcagagacgggagtaatcatgattgagcactacgactccgtggacgtgttcgtcggcgtcgacgtggggaaaggagagcatcacgcggtcgcctacgaccgcgctgggaaagtgctcttcgacaaggccctgcccaacgacaaggccctgcccaacgacgcggccaaacttcgcgaggtcatcggaaagctaaaaaagcacggtcaagtcctcttcgtcgtcgatcaacccgccacgatcggtgccctgcccgtcgcggtcgctcaagcggagaacgtcctcgtcgggtatctgccgggcttggccatgcgccgcatcgcggacctccacccgggcgaggcgaagacggatgcccgtgatgcggccatcatcgcccaagccgcccacactcttccccacgcgttgcggtccattcaactggccgatgaacaggtcgcggaactgtcaatgctgtgcggtttcgacgacgacgtcctcggacagattgtcgcgaccagcaaccgaatccgcggcctcctcacccagatccacccagcattggagcgggtcctgggcccgcacctcgaccaccccgcagtgctggacctgctgcagaaacacccgtcgccagcatcgatgaaagccgccggcacggtccgacttgggaaccgactgatcaagcgggcgccgcgcatggggcgtcgcctcgccgcccagatcacgcaggccctcggcgagcaaaccgtcgtcgccgtgggcacgaacgcggccaacacggtgcttccccgcctcgccgaacaactctccgccctgcgccgacagcgtgacgagatcgcggtcgaagtggagagactcatcgatgcccaccctcttcagcccgtcctgatcagcatgcccggagtcggggccaggaccgccgccagactcctcaccgaagtctccgggaaggagttcgccaacgccggacacctcgcctccgacgccggcctcgcccccgtgacccgccgttccggctcgtcgatccgcggcgaacacagctcccgacgaggcaacaaagccctcaaacgagcgctgttcctctccgccctcgctgccctccacgatcaagcatcacggacctactacgaccggaagatcgccgagggcaagcatcacaaccaggccctgctcgccctcgccaggccacgctgcaacgtcctctacgccatgctgcgcgacggcaccctctacgaaaacgaacccaaaaagcacgccctcgccgcttgacaaaaacatagggg

SEQ ID NO: 2333 - DNA, 1567 bp, unidentified
  source 1..1567: mol_type = unassigned DNA; note = element_347b07b
  misc_feature 1: note = core
  misc_feature 2..248: note = LE
  misc_feature 249..1457: note = CDS
  misc_feature 1458..1567: note = RE
  misc_feature 12..220: note = bridgeRNA
aaaaacatactaagattagctgtgaagaaatttatgacgatagatttcttcacagctattttttatagttgtagagagaagtagatcgcgcagtctcgtggatctttgaatccgtaaaaaaactgatcagctttactccctttttgaaattcgattgaagtatgttgggttctagaaaccgtgtataggaaaatgaaatgaaaaaggctaagtaaagttaaagatttctcaattcaataaagaaaggtatgatttttatcaactgtttaggtattgatataggtaagtcagaaagtgtggtcgcacattataaggatgaagttttggttaaagaaatggtcattcaaaataatcaaaatggctatcgttatcttaaaaattacatcaagcatcttgattctctatttatcctctttgaatcaacaggtatttattcaagaggcatgaaacgcttttgtgaaattcacaaaatagattacttagaaatgaatcccctagaagccaagttcaaaacgagctcattaagatcatggaaaacagataagtcagacgcacataaacttgcacttcttgcctttagaatgaaagattcaaaggtacaacgtcagtctgaagagatttactttgaactgagagaacgtgcgcgctttcacttagaaatggagataaaccaaaatcgtctcaaagttgagttagtcgaaacactacatcaaacatttccagggttagaaaagctatttactaacagatattcaaaaatcgcattaaatatagctaaagcatttcctcatcctgattttgtaagtactttgactcatgatgaattggtggaaaaagtacttcattcaactgataaaggcatttcagttaataaagctcacaagtatgtccaaaaattaattgaaatacagattaatagttttccgaatgtggacaagtcttctttcctcctacaaaaagtccaatacttatgcgacaaactgcttattgggatagaagaaatgaaagaatttgatcaggaaatgattgacttagctaaaaatacaactgagtttgaaaacattatttcaattcctggcatcggagaactcacagctgcattgcttattggggaacttggtaatattagagaatttaaaacaaataaacaattgaatgcatttgtaggtattgatattaaacggtatcaatcaggaacttcaaaaagtagggatacgatcaacaaaagaggaaataaaaaagcaagacgtttattgtacttaatcattgtgaacattattaggggaagaaatcattatcaaagccatattgtggattattattataaattaagagagcagcctcatgggaaaacccacaagactgccgtaatagcgagtatcaatcgcttattaaagaccattcactacttgatagtcaataataaattatatgattatcagaaagcaccacactaacgcaaccatataatcatatacatcataacaccttattcaaaaaagtaaaaattggacggtctagttcagtaatgtcaattttaattattgaacccttgacaaatcgtagg

SEQ ID NO: 2334 - DNA, 1456 bp, unidentified
  source 1..1456: mol_type = unassigned DNA; note = element_348c445
  misc_feature 1..2: note = core
  misc_feature 3..87: note = LE
  misc_feature 88..1119: note = CDS
  misc_feature 1120..1456: note = RE
  misc_feature 1148..1378: note = bridgeRNA
tgatgcagtggacggctcccacccaacggcatcgcaatgtgccaaaatggtggttttcatgaaccacagggaaataggagccgtcctatgaacgacgttatcacgattggtgttgatcttgcgaagaacgtatttcaggtccacggcgttgatgccgagggtgccgtgatcgtgcgccgtcgattgagacggggtcaggtgctgcccttcttcaagaaacagcggccctgcttggttggtatggaggcctgcgccacctcgcatcactgggcgcgggagatcgcggccttggggcaccaggtgcgtttgatgccgccgcgttacgtgaagccctatgtgaagcggaacaagaacgacatggcggatgcggaggcgatctgcgaggcggtgacccgtccgaccatgcggtttgtcgagatcaagacagcggatcagcagtccgttctgatgctgcaccggacccgccacctgttcgtgcgtcagcgcaccacgctgatcaatgccctgcgcgctcatctggccgagttcggaattgtcgcaggcgtcggccgcaatgggctggagcggttgctgaaggtcatcgaggatggcgaggatgaccgcgtaccgccgagcgcgcgtgactgcctcctggccttgcgcgatcagcttgagatggtgaggcatcagattttcgaagcggaccggcgcattcttgcctggcacagttcgagcgagatcagccggcgccttgacgatatccccggcgttggtcccctgattgcgaccgctttggttgcctctattcccaatccgcatgccttcaaatcggggcgcgacttggcggcctggatcggattggtgccaaggcagaactcgacgggcggcaaggagcggttgggacacatctccaaggcgggcaaccgttatctgcgcatgctcctggtggtcggagctctttcagttatccggcgggccaagcagacgggttacacgcgccgaccctggcttgccgagctcttgcaacgccgctcgacgaagatcgccgccatcgcgctggccaacaagaacgcacgcacggcctgggcgatgatggcgcacgggacattttaccaggagcctgaatcacaggccgcttgaaacacgcgcgggcacgcgctcgcgctcacgaggttggaaagggcaacggacgaataatgcacccagccggtcgttccggaagatcaggacaccccatcttagccagtgcagcattgagactgcgtgcttgtgaccgggacctgatctgcggagagcattatggccagcggccatcaaagagtgccgcatcaacaggccgaacacatggctgcaccgaccagctctgcattaccgtcaaaacatcccttgccaacagggagccgtccacacatggctgcaccgaccagctctgcattaccgtcaaaacatcccttgccaacagggagccgtccacaca

SEQ ID NO: 2335 - DNA, 1212 bp, unidentified
  source 1..1212: mol_type = unassigned DNA; note = element_3490d5e
  misc_feature 1..3: note = core
  misc_feature 4..207: note = LE
  misc_feature 208..1191: note = CDS
  misc_feature 1192..1212: note = RE
  misc_feature 7..218: note = bridgeRNA
ctaatggggatcgaccaccccattccgttcgtggatgaggctggtcaccgagccgctggcaggtgagcactgacggtcccagggcatggagccccacgtttagatcgtgcccctgctggtcggtgaggtctcctcggatggctggtgggatgtcgtgcctcgagcactgatccattaggaagctgctggagtcctcgaggctcacctgtggtgtcgacctcccgctatcgggaccgacactcgacctcgggagccaagtccgatcccggggacgccaaggtcctggccgacatggtccggaccgatcggcacaaccatcgaccggtggccggggacagcgagctggccggggccatcaaggtcctggcccgggcccaccagaccatgatctggtcgcggacccgccagaccaacttcttgcgctccacgctgcgggagttctacccggcagtactagtggccttcgacgatctgaccagcggtgatgctctcgaggtgctgaaggtggctcccaccccgacccttggggccggactgtcccgctccaagatcgccgcagcactgcggcgcggtggtcgccagcgtcggatcgaccagcgggccgaggagatccaagtggcgctccgggcaccgcagctccaaggcccagctctggtggccacggccatggggtcgtcggtctcggccacggcagcggtcatcgccaccatgaacgctcagatcgttgagctggccaaggagctagacgcccattttgagcaacacccggatgccgaggtggtccgatccctgccaggactagggaccatcctcagcgcccgggtgctcggcgaattcggcgatgagccgaatcggtatgccaccgccaagtctcgcaaaaactacgccggcacgtcgcccatcacccgggcgtcgggaaccaaacggatcgtgctcgcccgatttgtccgcaacatgcgcctggccgacgccatctatctatgggccttcgcctcgcttagtgcgtcaccgggggctcgggccttctacgactaccgcagagccgccggagacacccatcacgcagcgctgcgccacgtcggaaatcgcctcgtcggcatcctgcacggtggcctcattcgccacaccaactacgacgagaacactgcctggggacaccgggcagaactcgaactggcccgagccgcttgacaagttaggaccgtgggatat

SEQ ID NO: 2336 - DNA, 1499 bp, unidentified
  source 1..1499: mol_type = unassigned DNA; note = element_3491540
  misc_feature 1..3: note = core
  misc_feature 4..80: note = LE
  misc_feature 81..1181: note = CDS
  misc_feature 1182..1499: note = RE
  misc_feature 1225..1486: note = bridgeRNA
tgatggggtggatggccccctcacggcatctgagtgccaaaatggtggtcgtcgaagatcaccagcaacgggagccatccatgggcgagattaccactgtcggcatcgacatcgcgaagtacgttttccagctgcacggagttgacgcggccggggaggtggtgctgggccggcgtttgcgccgcagccagatcgcagccttcttcgctgctcttccgccctgtgttgtagggatggaggcttgcggcactgcgcacttttgggcacgtgagatcgccgcggtcgggcatgacgtgcggctgatgccgcccagctacgtgaagccttacgtgaagcgcaacaagcacgatgccgccgatgccgaagcggtctgcgaggccgtgcgtcgaccgtccatgcgcttcgtgccggtgaagaccccggagcagcaggcagcgcttgtcgcgcacagtgtccgcgatctcctggttcggcagcggacaatgctcgtcaacgcgttgcgcggccacctggccgagttcggcatcgttgcgccgcggggcattcacaaggccgaggaactgatcgccgtgatcggcgatgtctccgatgagcgcatcccttcggccgcccgacgcgtgctgccggtgctcgccacggagctcgccgcgctcggcctgcggatcaccgcgatcgaggccgagatcgttgcccggaccagagcggaccctgtggcccggcgtctcgcgacgatccccggaatcggtccgatcatcgcctcccggatcacggccacggtgccggacccttcgatcttccaatcgggccgcgacttcgctgcatggatcgggctcgtgccgcggcaaaactcgaccggcggcaagatccgtctcggcggcatctccaaacgcggcaacggcaccctccggcgcctgctcgtcggcggcgccatggcggcgatgttccgaacgaaggtcctgcagaacgatccctggctctgccagctccgcgctcgtaagccggcgaaggtggcagcggtggcgttggccaataagatcgctcgcacagcctgggcggtcatgcagcacggccaggactggcggccagccacggcgttatcgtcccgaccgcaagagcctgccgccgtgctcgccgccgtcaagaccatgccgccttcggcgatggccttcggccagtcttgaccgcggctgcgcgcgacggcgcccgcgtggtaggtcgggacggagaaacggtccctcggtcgaaccgagaaacgcacgcttgcgagggcaaaacgagctgatggatgttacggacggtcggtcgaaccgacggaccgagctacacctgcagtgtctcatgggacttcgatcccggcaaactgatcaggcctcggtccgcggattccatcaaggccagcggccatggcgccgcgtcaaaaggccggacacatgaccgcaagcgacctcgtccttcccgtcagctccgaaagtccttgcatgccgggggccatccacaca

SEQ ID NO: 2337 - DNA, 1447 bp, unidentified
  source 1..1447: mol_type = unassigned DNA; note = element_34947e1
  misc_feature 1: note = core
  misc_feature 2..224: note = LE
  misc_feature 225..1433: note = CDS
  misc_feature 1434..1447: note = RE
  misc_feature 12..236: note = bridgeRNA
ctactagacgattcccgcaggaccggcgtccggccagactcggtccaggtggtcgacgggctgctctccacgcggctgcccacccgggccgggtgtggctctattgcggtctgcgcgcccgtcggctgccgtgttgaggcgtggctccagaggggactgcccagctcgcagtagcaatgcccgcctcgcgtccacgtagacagcggcagaagggcgggaagcagatgaaggtgttcatcggggtcgatccccacaagctctcggcgacgatcgaggtcgtcgataagtacgagacggtcctggccagcggcaggttcgacaccgacaaggtcggctacgcggcgatgaagaagcacgtcgttgcctggccagatcgaatctgggccgtcgaaggcagcggcggtgccggccggccaatggcgcagcggctgctcgccgatggtgaacgggtcgtcgacgtgccgccgaagctctcggcgcgtgcccggctcttcgacaccgggcacaaccgcaagactgacgcccacgacgcccacgccgtggctgccgtcgcggtccgcacgaagggcctgcgcgtgctcgcccgcgacgacgacctcgaggtgctgcggatgctcagcgaccgccgctctgagctggtcagccagcgcgtgcagacggtgaaccggctgcaccgcctgctgtccgagctgatcccaggccaagcgaagctgaacctcaccgccccgcaggcgcgggagatcctgtcccgacgacgtccgcgcgacctggccgggaagacctgcaagcgcctcgcgctcgagcagctcgaggacctggtcgtgatcgatcgccgaatcaaggccagcgagaaggagctgaagaccctggtgatcgcatcgggatccaagctgatggacctgcccggcatcggcccgatcggtgccgctcggatcctggccgatgtcggcgacgtgcaccggttcgccgaccgcaaccggttcgcctcctggaccggcaccgcgcctttggacgcctcctcgggcgagcagatccgccaccggctctcacgtgccgggaaccggaagatcaaccacatgctgcacatggcagcgctcagccaggtccgcctcgacaccgacggtcgcgcctactaccgacgcaagcgcgccgcggggaagacccacctcgaagcgctgcggtgtctcaagcgacggatctctgacgccgtctaccgccagctcctccacgacgccaccgacgccaccgacgccgcagctggtgcgagtccgggagggcactgcggggcgtcactcacatccagcgcggccgactctcacccgcttatcagcacttcggatcagccactcccggacccgcggccacgacgctacgccgcgacgccaccgccaaggaagagccaacacggcagacccctcgagcacgccggttgacaacagaggggagc

SEQ ID NO: 2338 - DNA, 1411 bp, unidentified
  source 1..1411: mol_type = unassigned DNA; note = element_3498df9
  misc_feature 1: note = core
  misc_feature 2..309: note = LE
  misc_feature 310..1128: note = CDS
  misc_feature 1129..1411: note = RE
  misc_feature 1180..1403: note = bridgeRNA
taatggaatggtcgccccttccttacccggcatctgagtgccacagtgggagcgtgaagcaaaccacttaacagaaaggggcgaccgagatgaagattacgacagtagggattgatgtggcaaagacgttgttgcaggttcatggtgtggatgagcgaggtcgggcggttattcgaaaacgattgaagcggggacaggtattggcctatttcgccaacgtaacgccctgcctgatcgggatggaagcctgcggtagcgcgcattactgggcacgtcggttggcggcgttggggcacaccgtggaaactgatggcccctcagtttgtgaagccgtatgtaaaaaccaacaagaatgatgcggcggatgctgaggcgatatgcgaggcggtggcacggtcgaacatgcgctttgtgccggtgaaaagtgccgaacagcaaggggtgctggcgctgcaccgagcgcggcaagggtttgtcaaagcgcgcacggcgcaagccaaccagatccgtgggttgctgggcgagtacggggttgtcatcccgcggggtatcggccacatcaccaggtgcctgccggcgattttgggagatggtgagaacgagctgcccggtcccttccgcgcgttgctgcaccggctgggcgagcacctgcaggtgctcgatcggcacgtcggggagttggaggtgcagattcagatctggcatcagcacaaccccatgagccggtgtttggcacagatccccggtatcggaccgatcacggcgagcgcgctggccgcctcgattggcgatgcgaagagtttcacgagcgggcggcagttggcggcctggctggggctggtacccaaacagcactccagtggcggaaaggcgctgttgctgggcatcagtaaacgcggcgatacctatctgagaaccctgctgatccacggggcacgcgcgctcatccgggtagccaagcaccaggctggttacgaggacagttggctggcacgcttgatcagccgacgccaccagaatgtagcggcggtggcgctggcgaacaagaatgcgcgcattgcctgggcgctgttggcacacgagcgggtgtatcaatccgactatgcaccatccgccgcaaccgcctagccgatagccaaggcatgttctaaccggaacattgggccaaagaggagcaacgcaccgattgcacaggcactcatgacgtgatggcagaacaggtcagaccgtgaccggtaaagcccggctatctcaacgtgtcgagaacacgtgattttgattgagggaccggtcagcggattccatcagggacaggggtatctacctcagacaaagtccggatgtatggctgcaatctctacctcctcaccatcactaccttgggggcttggcaaataggggcgaccatgta

SEQ ID NO: 2339 - DNA, 1350 bp, unidentified
  source 1..1350: mol_type = unassigned DNA; note = element_349eae5
  misc_feature 1: note = core
  misc_feature 2..76: note = LE
  misc_feature 77..1108: note = CDS
  misc_feature 1109..1350: note = RE
  misc_feature 1124..1346: note = bridgeRNA
taatgaaatggtcctcccaggactccccagtgaaagcctaagctttcactgggggatctaactggagatcgccgttatgaatactcagaatcttgctcttaccagcttggatctaggcaaaaattgtttccatttccacggccaggatagccgtggccagtacctgttccgtagcaaaatttctcgcagcaaggttttttcctacatcgctcaactaccaccctgcaccttggccatggaggcctgtggaggcgctcatttcatggctcgattcgcagccagctgtggtcatcaacccaaattgattgccgcgcagcatgtacgaccttatgtcaaaagtaacaaaaacgactacaccgacgccgaggccattggtgaagcagccagtcgttcggcaatgcgatttgttgcaatcaaaagcgaagcccagcaagcgctgagcatgctcaacatgacccgtgaagctttcattcgggaccgcacagcgacggtcaatcgaatccatgctttcctgcttgagtggggcgttagcctggcgccaaccttcaagtcggtcagagagttaccggaaacgttggaaaaacttcatgctcctggctcggtaattcgccttttccaacagtttcatgcgcacttcaactaccttgacgaacaggtcaaggtactcaccaaagagctggagagccaggtcgctggagatgatctggcaacccgtttgatgaccataccgtgtattggaccgatcacctccagcgccctggctgcagaattaggtgacggtaagcagttcaaacgaggacgtgactattcggcctcgataggcctggtgcccaagcagctgaccaccggcgggaaaccgcgcttgctgggtatcagcaaacgcggtgatcgcaatcagcgacggctactggtgcagtgcagccataccttcatcaaccacctggataagcaatctgggcgattggctgattgggtgagagtgttgctgactcgccatcacccgaatgtggttgtgtgcgccttggcgaaccggctagcacggatagcttgggcaatcgcacacagccatggcatttatgaagcagggccaagcgcacagaacgcttgaccctgcgctaccaagcaccacccaacggtttttgcgatgctggataacagatgacgtaaacggccaaccgacctgacgaaaaacctgggctcccacgcggctctaaagccgatttacctaatcaggatcgtcaggcgcgactttcatcaaggcgcgaaccttaacccttcgacgccgaatagattgcggcaagccaactacgcatccagattcagtattgcagaaactgggaggaccataga

SEQ ID NO: 2340 - DNA, 1170 bp, unidentified
  source 1..1170: mol_type = unassigned DNA; note = element_34a1da1
  misc_feature 1..2: note = core
  misc_feature 3..210: note = LE
  misc_feature 211..1155: note = CDS
  misc_feature 1156..1170: note = RE
  misc_feature 3..180: note = bridgeRNA
cttgtatggttagacttgaaggggtggtgggacgaacagttcgcatctgactgctgtaacagtacagaccgtgggagacctcgccccaccccttccaccaaaagcgccgatagagaatgcttcgttcaagcgacgatagaaacaagcctgcgcctctgggtgaaacccctacaagtcgtaaaaccttagcgtggagaagtgtcagtggcaatgcgcgtgtcgaagtcaattgtgggtgtggacgtcgccaaagctgaacttgttatttatttagcagatccagatctgctcacctcgataaccaatgaaaagcccgtcataaagcgctggcttaaaacgttgccgggacccaccgccatagctgttgaggcgacaaatgtttatcacgtcgacttggttgagttggctcatgagtcaggccacgacgttttcatcatcgacggttttcaactcagtaattatcgtaaaggtgtcggtggccgtagtaaaacggacgcatctgacgcccgtcttctcgcccgttttctaaaaaatgaaggcgaagatttacgcccctggaccccacctccggcggtctacggcaagctgcaaagccttctacgacgtagagcttcgctgatacaggccaaaaccagcctgacccagagctgggcaaatgacgccagcttgaaagccgtgttcgcaactttcgtaaagtccatggaaaggctggatttgctagttcagaaaaagctcaaggaaatcttgcgtgaagctggtttgctggaagaagttgccagatgccaagccatcgaaggtataggctttctaactgcaactgctttggtcatggcatacaaccgaggcgactttaccagtggcgactcttatgtcgcgtttttaggcatggatctgagagtgagcgactcgggccaaaaaaatggccgtagatatttaaccaagcgcggatgctcggaggtgcgacggttactgcataacgccgccatgtcagcctgccgatcaaatgcctggaaggcgttctacaaccaccatctcagctgtggaaaagcgactacacaggtactggtgatgctcagccgtaaactcgcccgcatagcgttcgccctgatgagaaaccagagcgaatatcaatcgaaaggggcagttatcgcttgaggataaccatagaat

SEQ ID NO: 2341 - DNA, 1502 bp, unidentified
  source 1..1502: mol_type = unassigned DNA; note = element_34a83c5
  misc_feature 1..2: note = core
  misc_feature 3..248: note = LE
  misc_feature 249..1481: note = CDS
  misc_feature 1482..1502: note = RE
  misc_feature 7..242: note = bridgeRNA
ctaatgggagctgccgggtcggtgttgtggcaggctcggacccggtagccgccagtggatgagcactctcccatccaggagttgtcgagtcctaaagacagatcgtgccgtcgctggtggtcgggagtgttgaccgctgatgggatgacgtgccgttgctggttggcgagcacttgaccattaggtcgctggtagcgctcccgctggctgctgggaagcgagatcgtcgtcgcgggagaggaggagcgttgctgctggtcggggatgactgggccgaagatcatcacgacgtcgaggtccaagacgagaccggacggcggctgggcaaggcccggctgccggaaggggtaagcgggatcgcgcagctgcacgggctgatcggcgcgttggtgccccagggcgccgcgccggaccaggtcgtgatcgggatcgagacagaccggggcccgtgggtggccgcgctggtggctgccggttaccgggtgttcgcgatcaacccgctgcaggtggcccgctatcgggagcggcagacgacctcgggcgccaagagcgacgccggcgacgcccatgtcctggccgacatggtccgcaccgaccggcatcagctgcggcccatcgctggggacagcagcctggtcgaggcggtcaaggtcgttgcccgcacgcatcagacactgatctgggaccgcagccggcaggtgctgcggctgcgtgcggcgctgcgggagttcttcccagccgcgctgcaggcgtttgatgacctgaccgccgccgacgcgttggagctgctcgccgtggcgcccgagccggtcagcgcggcgtgcctgtcgaccgcccagatcatcgcggcgctcaagggtgcccgccgccaccacgtggccgacaaggccgcaacgctgcaggctgcactacgcggcgagcagctggcccagccgagcgtcatggtgactgcctacgcggtgaccgttcgggccacggtcgcggtgatcaccacgctcaacacccaaatcaagcagctggaagcgcaggtggaggcacattttggcaagcacccggacgctgaggtctaccggagccagccagggctcggggaggtgctcgcggctggggtgctgggcgagttcggcgacgacgccgaccgctacccaggcgtgcggtcccgcaagaactacgccgggaccagcccgatcacccgcgcgtcgggcaagaagaagctcgtactggcccgctacgcgcgcaacgaccggctcgccgatgccctgcaccagcaggccttctgcgccctacgggcctcggcgggcgcccgggcctactacgacgcgctccgcgcccgcggcgtcggccaccacgccgcgctgcgccagctcgccaaccgcctggtcggcatcctccacggctgcttgaagacccacacccgctacgacgaggcgactgcctggccgcgccacagcgagcaggacgcagaagctgccgcggcttgacaactaaacgacatgggatgt

SEQ ID NO: 2342 - DNA, 1540 bp, unidentified
  source 1..1540: mol_type = unassigned DNA; note = element_34b383e
  misc_feature 1..2: note = core
  misc_feature 3..242: note = LE
  misc_feature 243..1421: note = CDS
  misc_feature 1422..1540: note = RE
  misc_feature 3..218: note = bridgeRNA
cttgtattatagagtagtagttattagagcccctctccaagggctgtgctacactgtaagggatgctgtggattggttgggttctcctaccacaagatggtttcagaaaggttccaaccacagccccttacaattttgttaatcagttaaataccgccggacggtttatgtggaacaaggctacaaaagtaaggtgcactgtggatgcagcatcataattctaaccgctggaggttcttgctatggtagtttctgttggtatcgatgtttcaaaggataagcacgactgctttatcctcaactcggaaggcgaaatcctttcggatgtgttcaccatcccaaacagtctggacggttttaccattctgctgcaaagaattcgggactgctcttcgtcccaagacaacataaaagtagggcttgaggcaaccgggcattacagctacaacattctcgggtttcttcttgacaatggtctacccacctatgtcttgaaccccttgcgcacaaacctttacagaaagagccttagtctcagaaagacgaagactgaccgggtcgatgcgcgaacgattgcggctatgcttttgtccgatgcaggcctcaagccctacacagacacagtttaccacaacgaggagctaaagtcattgacaagataccgttttgacaaggtaaaggaacgggcgaagctgaaaagttccgtttcaagacttgtctgcatcctattcccggaattggaaaagcttacgccaacgttgcatatgccttccgtatacgctctgctggacgagtttcccggcgcaaaacaaattgccgaggcaaacttaacacacttgaaagccatccttcacaacgcatccaaaggccgctataacagggataaggccatagatatccgcgagtcagccagagcatctattggggcagtaatgtctgcaaaatcactggagcttcgccacaccatccggctcatccgagagctggacgctgagattgaagatattgaagcagccattcaaagcatcatgaacgagatgcattcgcccattaccaccatccctggcatcggcactcggatgggtgctatgattcttgccgaagtaggcgatttttcccgctttgattccccggacaagctgttggcatatgctggtatgtccccgtctacctaccaatctgggcaacttaagaactgctatccccatatggagaagcgcggttccagatacctgcgctatgcgctttacaacgccaccaagtatgtctgcctatgggccccaacctttgctgcataccttgcaaaaaagcgggcggagggcaaacattacaacattgcgctttctcacgctgccaagaagctggtgcggcttatttttgctatggagaaatccaggcagccgtactgctcggcaacgtaaattcctcttgatagccagcactggggttctaacgagctcctgctttgctataccctttttgaaccatctgccgttttaccacatccattcatttttagggttgacacttaatagttaat

SEQ ID NO: 2343 - DNA, 1430 bp, unidentified
  source 1..1430: mol_type = unassigned DNA; note = element_34bd28d
  misc_feature 1..2: note = core
  misc_feature 3..125: note = LE
  misc_feature 126..1148: note = CDS
  misc_feature 1149..1430: note = RE
  misc_feature 1189..1430: note = bridgeRNA
gaatgaaatgaacgcgtcccaccccgttaccgagtgagcaaaggaaggaggatcctcacgggccaacggcatcgatgtacccaaggtggaaaatgcgaagttttccaaggcaaccggaggatccagtgatcaatggtacggcagtcggcgtcgatatcgcgaagtcggtgtttcaggtgcattacgtcgatcaggaaaccggcgagatcgtgaacaagccggtcaagcgggcgaagtttctcgaattctttgcgaaccgtgcgccgtgcgtgatcgggatggaagcgtgcggcggagcgcaccactgggcccggcaactgacgaagatgggccatcaggtaaagctgatggcggcggagttcgtgaaggcgttcaacatcaggaataagaatgatgcggcggatgccagggcgatctggatggctgcgcaacaacccggcaagccggtggcggtgaagaccgagatgcagcaggccatgctggcactgcaccggatgcggcagcaattgatcaagtttcgcacgatgcagagcaacggactgagaggattgctgacggaatacggcgaagtcatgagcaagagtcgggacaagctggacaaggaaatacccaccgtgtttgagcggattgctgcgcgtctgcctgcttcattgatcgatacatttcgcgaacagtggagcggcttggcaaagctggacgagcagattgcagagatcgaccggcgcatgcgcgagtggaaaaaggaagacaaggcggtgaaggcgatcagcgagattcctggagttggattgctcacggcaaccgcagccgtggcgacgatgggtgatgcgaaggcattccggtctggccgcgagtttgcggcatgggccggtcttgtaccgaagcagaccggctccgacggcaaggtgaacctgcacggtatatcgaagcgcggcgatacctatctacgcacactactaattcacggcgcactagcagtattgacgcatgcgaaggagcccgaccggtgggtcgagcggatgcagaagcgcaggccgaagaatgtggtgatcgtcgcgctagccaacaagatggcgcggacgatctgggcggtgctagcccatgaccggccgtaccaaaagggatatgtgagcgcgaaacctgtttgagcgaaccgcgccatgtagcagttcaacgtttaacacagggatgaacgtcgaaaggttgcgcagcaatcgagtgtgatgacaagccaggtaggaccgggactcacgaaacctgaatatcatcgagagccttgagctcgctaggagaatgaggcgtgggtcagcggatttcatagggggccgcgacggcagtatcgtctgcaacaagcccggatatagagatgcagcccatccttgtctgtctgaaactcacgaaagctgttgcaaacgggacgcgttcatata

SEQ ID NO: 2344 - DNA, 1331 bp, unidentified
  source 1..1331: mol_type = unassigned DNA; note = element_34cc0a8
  misc_feature 1: note = core
  misc_feature 2..262: note = LE
  misc_feature 263..1315: note = CDS
  misc_feature 1316..1331: note = RE
  misc_feature 13..258: note = bridgeRNA
ctgtgaggatccacctcgcagcccagtgtcgctgctgggctgtgggttggtgatctcgagcgtgaccccatattcagactggctgcgtgcctttgatccgacatgtccgctcgtgattgccggccccggcccggttggagctctggcctgatcaggagcttgaccgcccccggtgtgctccggcggcgtgtcccatcacagtcctgcctttctccgtccggaccgggaaccgaccacgtccctccgagcaaaggagcaacgcatggacagtctgtctgagatcgtcgacgtcgtgatcggtgtcgacacccacgtcgcgagccacagtgcagcggtcgtgagtgcacacaccggtgccgtcttggcggagatcaccgtcgaagcgacacctgagggctatgaggagctcgttgagttcgcgaacgagcacagtggccttcgggcgtggtcgatcgagggaaccggcggtcatggtgccgggcttgctcgtcatctcgcgaagaacgacgagctcgtcgtcgagctcgaccgtccggtgcgccagaagcgccgcaacggtgcgaagtccgatccccttgatgccatccgagcggctcgggaggcgctcagccgcaccaagctcggcacgccgagaagcacgggtgagcgccaggcgctttcggttctgttggcagcgaggagctcggccgtcggggcagccaaggttgcccagcaacagctgttctcactcgtcatcgccgctcccgaacagctgcggtcgaagcttcgaggcgagggcacgcttgcgatggcgcgcactgcgtcacgctttcgcctgcagacccactgggacctcgagacgcgaaccaccgcagcagtgctgcgagaccttgcacagcgggcgcttgagctcagggtggaggccgatcgccacgagaaagcgatcctcgccattgtccgcgcgtggcgcccggagatgctcgagcgcaaaggtgtcggaccgatcgtcgcggccacggtgttgtgcgcctggtcacacccagggcgagtccgatccgaggctgcttttgcgatgcttggcggcgtcgctcccatccctgcaaactccggccaggtgaccgcgcgctttcgcctgaacccttatggcgatcgtcagttgaaccgtgccttccacaccgtcgtgctgtcccgactgcgttgggacgaagagacgaaggcttatgtgaagcgcagaactgccgagggcaagacgccgcgcgagatcaagcgatgcctgaagcgctacgtcgctcgggagctgttccgattgcttgagaacgagccgtcaagaacttgacggaccataggagcgt

SEQ ID NO: 2345 - DNA, 1156 bp, unidentified
  source 1..1156: mol_type = unassigned DNA; note = element_34d9e2e
  misc_feature 1..2: note = core
  misc_feature 3..208: note = LE
  misc_feature 209..1144: note = CDS
  misc_feature 1145..1156: note = RE
  misc_feature 37..214: note = bridgeRNA
cttgtcttatgacattggctgccgaacaggtcagaacggaaccgctgcgggagggtcgccgccctcccgcagcggcgagggtcggatcgttggaattgcggaccttttgatgggtcgagctagagtcggatcgccctcgtctttcccttgaggcctgaacggatacccggagttcggctccggatgacaagcacaggacaagcgaaagatgatgaacgatagcatcggggtcgacatctcgaaagaccatctcgacgtccacaggctgagcgacggtgtgagccggcgcttcgccaacgacagccgtggccataggacattgatcggctggttggagcggcctgggctgcgtatcgtctgcgagccgacaggcccctatcatcgggaccttgagcacaggctggcagaggcgggcttcgcgctggtcaaggtcaatccgcgtcaggcgcggcgatttgccgaggccaccggcaggctcgccaagaccgaccggttggatgctgcgatgctcgcccgcatgggggcgttgctcgaacttcaggcgcggccggcgcgaggcccgaccctcaacgatctcaaggacctgcgcatggcccgcgaggcattggtgaagaaccgaacggcggccaggaacagggcgaaaaacctgaccttgccgatcctcaagcgccacaacgccgaacagctcaggcagatcgagcgccagatcgcggccctcgaaaacgagatcatggcgctcatcaaggtcgatcccgacctcgcacgacgcttcgacattctcgtctcgatcccgggcgtgtcagcaatcaccgccttcgcgcttctcatcgacatgcccgaactcggtacactcgaccaggcccaggtcgcttccctcgccggcctcgctccggtcgctcgccagtccggacagtggatcggccgcgccttcatccgcggcggccgggccaatgtccgacgagcactctacatgcccgcgctcgtcgccatccgcttcaatcccgacctcaaggccaaatacgaccggctcaaggccgccggaaaagcctcaaaactcgccattaccgccgtcatgcgaaagctcatcatcatcgcaaacgcattgctcagggatggccgcatatgggaaccaacccgtacttgaccaacacggata

SEQ ID NO: 2346 - DNA, 1667 bp, unidentified
  source 1..1667: mol_type = unassigned DNA; note = element_34de4df
  misc_feature 1: note = core
  misc_feature 2..292: note = LE
  misc_feature 293..1570: note = CDS
  misc_feature 1571..1667: note = RE
atctccattccgcaggcaagccgcggcacaaatagtaatgaaagtgttttacatctcaactctgtgatttaaaatatataacaagaagctatactacaaagcacgggaggtaaagttgtaaaaactttctctgtttttagacagcataaaaaaatcagtgtaagttctgtctttttcaagcacaaataagtggtatcatgaatccgtacactagaattgttaaagctctttgtttttattgtgtggcagttcagtcaatggcttcttatctttttacgaaaggagttacactatgaaagttacttatcaaacctgttgtggtgtcgatgttcacaaatcttttctcgttgccacaatcatcaaaactaccgccggtattgaaccttcttatcaaaagaagcgattctctaccttcaacaattctatttttagacttttaaatcgtggcttcttgaaaatgaatgccatgatgtctgtatggaatccacaggtaaatactgggttcctgtctttaatcttctcgaagatcaaatcaacgttaccattgctaatcccaaatgggttaaaagctgttaagggtaacaaggacgataccaaagattctaaatggattggagacttattccgactgggacttgtgaaaagcagctacattccttgtaggttgatccgtattcttagagaatacacaagatatcgttacaagcttgtttcttgccgttcaagtgaaaagaatagatatcagaatgctcttactgtttgtaatatcgcattagattctgttgtatccgatatctttgggaagtcatcctcatccattatcgattatctgcttgaacaatcaggtactacgattaaccatgaagaaatcgcttcaaaacttcttaagagcctcaaatccaaagaagacgctgtgattgaatctatcgaaggatatcagatgactgatgcccagaaatatcgtatgcgcctaattcgcgcacatatggattatatcacagctgaaatcaatgatatagataaacagattgaatctttgatttcttccgatcctgattatgataaagctatccggttactaactaccattccgggtgtcaaacgtgatagtgcaattactatcatctccgaaattggtattgatatgtctcagttttgtaattctaaacgcttatgttgttgggcaggtcttacccccggcaacaatgaatctgccggtaagaagaaatctgtccgtattacacgtgccggtgtctacctcaaacctgcattagtacagtgtgctcatgcagccgtgaaatctgacaagtctccttactacaaaacgaaatatgaatcccttgttaaacgccgtggcaagaaaagagctgttattgccattgcccgtatgattcttatagccatctaccggatgctgtctaccggagaggtatggaatccaagcgatctttacaaaatcgatatgcctgcacctttagctgaaaaacagaaggctaaggctatcaagcaagccaaaaaacttttacaaaaggaaggactgcttcctcctgatgaacctttagcttcttgatcaatctactaaatctatatcctcaaataagttgcctacttaagacagcttatttaagtgcgccggtttacggcttacctctactttctttcacact

SEQ ID NO: 2347 - DNA, 1474 bp, unidentified
  source 1..1474: mol_type = unassigned DNA; note = element_34e0b2d
  misc_feature 1: note = core
  misc_feature 2..261: note = LE
  misc_feature 262..1458: note = CDS
  misc_feature 1459..1474: note = RE
  misc_feature 1..210: note = bridgeRNA
ccgttaccttcttgatcaaccccggaaccggggttgcaggccaccggcctcggcatgactggttgcccctgtcgttgatgatctggggggtgttgtcaccggggtcggcgggtgccagtgaccgctgatagagacccgacccgatcctgaggtctgctcgtaacgtggctgccggcgcgggggcccgggcttggcctgcccatgacgagacgggggtcttcgttgtcgggttcggacacatttgatgttggcgggtacgccgtgttctgcggcgtcgatgtcggcaagggtgagcatcacgcgtgcgcgctggaccggtccgggaagcggctgcacgatcgggcgctgcccaacgacgaggccgccctggtcggcgtgctgagcgggttggccgggcacgggccggtgctggtggtcgtggaccagccggcctcgatcggcgcgctggtgatcgcggtggcccggtcgctgggcatcgccgtggcctacctgcccggtctggcgatgcgccggatcgctgacctgcacccgggcgaggggaagaccgacgcccgtgacgcctacgtcatcgccgatgccgcccgcaccatgccgcacaccctgcgccgggtcggtaccgacgatgagaccctcgccgagctgggcgtgctggccggctacgacgacgacctcgccgcccagtcgacccggctgaccaaccggctgcgcgacgccctgctgcacatccacccggccctggaacgcctgctgggcaagcacatcgaccgcggcggggtgctggacctgctcgctgccgcccccaccccgccggcgctgcgcgagctcggccaggccgggattgcagaggtgatgcggccgcggtcgccgcgactgtgccgcaccctgcccgcgaagatcctcaccgcgctggacacccagaccgtcgtggtcccgggcaccgccgcgttcggccgggtcatcaccggcgtcgcggcccaactgcgcgacgtccacctcgaacgcgccgacctcgccaccgacctcgaagcccgcctggaggcccaccctcttgcccaggtcctgacctcgatgcccggcatcggggtcaggaccgccatcaagatcctcaccatcgtcggcgacggcaccgcgttccccaccgccggacacctggccgcctacgccggcctgtccccggtcacccgccgatccggctcctccatcaaaggcgaaacccgctcccaacgcggccaccacgccctcaaatccgccctgttcctctccgccttcgccagcctgtccgaccccgccagccgcgcctactacgaccgcaaacgagccgccggcaaacgccacaacgccgccctcatctgcctcgcccgccgccgcatcgacgtcatctacgccatgctccgcgaccacaagccctaccaacaccccacccccaacaaccccgaacagaccaccgccgccgcttgacaacgccatagagaca

SEQ ID NO: 2348 - DNA, 1406 bp, unidentified
  source 1..1406: mol_type = unassigned DNA; note = element_34eb85b
  misc_feature 1: note = core
  misc_feature 2..87: note = LE
  misc_feature 88..1125: note = CDS
  misc_feature 1126..1406: note = RE
  misc_feature 1172..1396: note = bridgeRNA
atggaatggacgcccccacccgaatggcatcgatgtgccaaagtggaagtgtcgaagcaaccacttgactcgaggggagcgcccatcatgaagattacgacaatcggcatcgacctggctaaatcagttttcgctgtacatggtgtgaatgaacacggccgcgcggtgctgcgaaaggtagtcaagcgagataaattgctggcgctcttcgcaaatcttccggcgtgcctcattggaatggaggcctgcggcagttcacacttttgggctcgcaaactccaagcaatgggacacactgttcgacttatcgcaccgcagttcgtgaagccgtacgtcaagacaaacaagaacgatgcggcagacgccgaagccatttgtgaggcagttgcgcgtccacacatgcgattcgtgccgatcaagaacgtagagcaacaatctgtgctgtcgttgcatcgtgtgcgtcagggattcgtaaaggcccgcactgcacaggcgaaccaaatccggggacttctcagcgagttcggactcgtcattcctcaaggcatcagtcatattgcccgtcgcgtgcccgaattgattgaagacgcggagaacggcctgaccggttccttccggtcactgattgggcgtctgatggatcacttgaaggagctcgatcgacaagttcgagagttggaggcacaaattcaaagctggcatcgcgaaagcgatgatagtcgcaagcttgcacaggtgcctggcatcgggccgatcacggcgactgcgttggtcgcttcggtcggtgatgccaagagctttacaaacgggcgccagctcgcagcatggctcggcttggtaccccgacagaactcaagcggagggaagaatgtgctgcttggtatcagtaaaagaggcgacacctacttacgaacgttgctcattcatggggcacgtgctgttattcgcacggctcaaaatacagacaacaacaaggacggatggctccctcggctgctacagcggcgcaatcacaatgtagctgctgtcgcgctggccaacaaaaacgcgcgagttgtatgggccttactgactcatggtcagacatatcgacgtgactatacgtccgccatgccgaccaaatgaactgaacccaagctgcagcttgcttgcagcaaatcgcaagacacttccgccgattgcctaggcaatcatgatgtgatggcaagacaggtcagaccgtgacgagtcaaacccaactctctcagagagccccgagctcgcgaacctgattgggacctcgtcagcgcattccatcagggacagccggccagcacacggcgcgaaaagtccggatgcatggctgcaatcacgaccttcgaacctcgcagaatgaagccttggcaaaccgggggcgtccatgcatg

SEQ ID NO: 2349 - DNA, 1608 bp, unidentified
  source 1..1608: mol_type = unassigned DNA; note = element_34eb91d
  misc_feature 1..5: note = core
  misc_feature 6..267: note = LE
  misc_feature 268..1446: note = CDS
  misc_feature 1447..1608: note = RE
ctcctacattaaatacgttgcatttttcagccttctattgaatgctcttaggtgcaatgcagtgactggtgggcagggatgccgtcatggcgtgtgagagctttcgcatctcggcaaggagggtggcatcctgccccgttcaggcgaggccgcggattagctggatgaaggggcgggcgcccacttcgggtctcttttgggaggttgcggtcctggacggacaaggcagaggccccaccatggcaaccggagagaggagatgccgcgatgatctatgcaggcgtggatatcgccaaggcggaccacgtggtcggcgccgtgggcgagacgggcgacgaggtcgcgaagccgatgcccttcaagaactccaaggagggcttcgagaggtgcgtcgcatggctcgagggcgtcgccgagacgcaagacgacgtggtcgtcggcatggaggccaccggccactactggcaggcctgcttctcgtacctgacgtcttgcggctaccgcgtggccgtgataaaccccatgcaggtgaaggcggtgcgcaggctcaagagcctctcgaaggtcaagaacgaccgcatcgacagcgtcgtcatcgccgagacgctgcgaatcgggaacttcgacgagaccgcgctcgccacagacgagctgcagtccctgaagaccctcacgcgctaccggcagtcgctcaaagagcagatcgcggccgtgaagacccatgtcgtatgcctcatggacacctacttccccgagtacgacggcatcttctccaacatgttcgggaaggcgtcgcttgcggtgctcgccaagtgccccctccccgccgacatcgcccgcgtgcgggaatccaccctcgagaagatcgtaacggaggcgtcgcatggcagaagcggcgccaggcaagcggccaagatcaaggagcgggccaaagcctccatcgggttcaccctcggctccgaggccgcgtccttcgagatcagatcctacatctcccagatcgggtttctgcttgcgcgcatcgccgaggctgacgggaggatagccgtgctgctcgaggcaatcgagcctttgatcctcacggtcccggggatatcgaccacgacgggcgcgcagatagtcgccgagataggagacgtctccaggttcaaaaacgccgccgccatcgtgagctacgccggcatcaactcgtctgtcaaccagtccgggaagttcgagctggaaggcggatcgatcacgaagcacggctcgccgtacttgaggcgggcgctctaccttgcagcccaaggggcatatcggctggatcccggcctgcgcgccttctacgacaagaagagaagcgagggcaagtgccacagggtcgccgtgatggccgtagccagaaagctttgccacatcatctatgcgatcctgcgcgatcaagccccgttcgagtcgcggggctaaagacctgccagcacctctttccgcgcaaaccctgcggggtctcggctcattgcgcctaaaagcattcaatattcagctgtcaaagtgcaaaatccaataaaacttgctcacctaaaacttcttaaggattctctatccaggccttgacttcatatagctggt

SEQ ID NO: 2350 - DNA, 1389 bp, unidentified
  source 1..1389: mol_type = unassigned DNA; note = element_34f85a2
  misc_feature 1..2: note = core
  misc_feature 3..94: note = LE
  misc_feature 95..1126: note = CDS
  misc_feature 1127..1389: note = RE
  misc_feature 1159..1377: note = bridgeRNA
tgatgctgtggacggctcctccaccggcctcgcgtgccatcgaactgggcgctcatgctaagggcgcatgattcgcaggagccagggaacacaaatggaagcggtcaaggtcatcggtttcgacattgcaaagtcggtttttcaggtccacggcctcaacgccgaggggaaggtaatcatacgccgccaactcaagcgtcgccatgtcctgccattcttccagaagctgccgccgtgccttgtcggcattgaggcctgcgcgtcgtcgcattactggtcacgcgaactccaagcgcttggacacacagtgcgcctgatgccggcagcctatgtgaagccgtacgtcaagcgacataagaacgatgctactgacgccgaggctatctccgaagcggtcaccaggccgaacatgcggttcgttgcgaccaagacacctgagcagcagagctgcctgacgctgcaccgcgcgcgccatctgttcatccgccagcagaccgcagtgatcaatgcgatccgcggacatcttgctgagttcgggattgttgcgcccgtcgggcgcaaaggggtcgaggacctgctccgcgtcgttgccgacccgaaagacgaacgggtgcctaaggtcgcacgcgcgtgcgtcgtcgcgctcggcgctcagttgcgcatgctcaaggcgcagatcctggagttcgaccgtatgatcaacgcctggcaccgttccaacaagacaagcaaggagctcgatgagattccgggtgttggccccgcgttggccaccgccctggtcggtggcgtcgctgatccaaaggctttccggtcgggccgagatttctcagcttggatcgggctggtgcccaagcaacactcgagcggtggcaaggaaaagctgggcagtatcagcaagcgaggtgatcgctatctgcgcggccttttcacatcgggcgcgctggccgtgatccgctatgccaagatccatggtaccaagcaccgaccttggctaaccaggttgttggcccggcggccaacgaaggtcgccgcggtcgcgcttgccaacaagatcgcaagaatggcgtgggccatgatggccaagggcgagcgttacaaggaacccgtcgcactcgcggcgtgaacgagatcgtgccggcatcatccggcacgatgtgaaggttggagggcgaacagcacgtaatgcagagccggtcgatccggcgatcaggacaacccacttgtgccagcgcattgtcgaatgcgggtttctgaccgggacctgatccgcggagggcattatggccagcggtcatgtgaaccgcatccgataggccgaacacatggctgcaccgaccagcggcgctacgtggagattctccttgacaacccagagccgtccacaca

SEQ ID NO: 2351 - DNA, 1483 bp, unidentified
  source 1..1483: mol_type = unassigned DNA; note = element_34f8980
  misc_feature 1..2: note = core
  misc_feature 3..211: note = LE
  misc_feature 212..1222: note = CDS
  misc_feature 1223..1483: note = RE
  misc_feature 13..193: note = bridgeRNA
cttgtatgtaataagcatgtggtggttagctaccatcacatgaagtggagtgagcttgtcctcgcccttaatggtgaaaatcttgattagcagctaaggccctccacttcacctttcacgccagcattaacattgaacggttgccaagagcgatgactctgcatgtacaagggtaataggcgtgatggttcagtgaaaggagaaaacgtctatgtttcagctaggtattgatgtcggcaagaaaaccctggatttatgcctgcttagagaaggtgtaaaaggcagagttaaaacccgcaagcttaaaaatgatttcaatgcggccaatgcagtgattaattggctctacaaacagcattgtgaacctgctgatgtgcatatcatcatggaggccacaggggtttatcatgaatcgcttgcatacggtctctacaaggccggtgccagggtatcgcttgccaacccctatcgcagcagagaatttgctcgtggtatggatattctgacgaagaatgaccaggttgatgcttatatgcttgcctgctacggtgcacttaaagcaccggaaccatggatccctccgcctgagagcgtccgttatctcagcgcccttttgcgtcgccgtgatgcgcttgtcacggacagtagccgcgaaaaaaacaggctggaaaaatgccgggcaacggacgtgcctcctgttgttgctgaatccatcgaaaatgtgcttcttaacctgagtgctgagcttgaacatctggaagctctgatcctgactcacctcgaccagcatcctgaattaaaaaaggattatgatcttctgacatcgataaaatccgtgggagttcagttaggtctgaatatgctggttatcctgcggagtcatcgtttcgaaactgcagagcaggcagccgcctttctgggggttgttccggttgaaaaatcttccggtacgtcggttagagggcggagtcgattgtcaaaaattgggccaccggaaatcagggcaaaactgtatctggcatcgttgtgcggtctgagatttaacccagtgatgaaggcgatgtataagcgtttatgccagcgtggcaaggccaaaatgtgtgccattggtgcactaatgcgcaagcttgttcactggtgctatggcgtcttgaaaacacagaagccgttcgatgcagaatacctgtctttagatgcgcgtagcgcatgtaaggcggcatgatgttgttttatatggctctgtagtcaaaccgccgaagcccggcgtaagccggtggaggatcattaaagatccttatacccctcccgccctggagagccatgcagactaacagcgatgaaaatgctgatttaagtccttttaaccccgttagcgcggcatagccgcgatgtatcggggacttagtgctggcagcttgctgacagcgcttagggggctgtatgtctaaattagaagccactttgtcttgacagaacacggtag

SEQ ID NO: 2352 - DNA, 1170 bp, unidentified
  source 1..1170: mol_type = unassigned DNA; note = element_34f9729
  misc_feature 1..2: note = core
  misc_feature 3..204: note = LE
  misc_feature 205..1167: note = CDS
  misc_feature 1168..1170: note = RE
  misc_feature 3..180: note = bridgeRNA
cttgtatgtttagacttgaaggggtgggcgggactaaaagcccgattccgactctagccagtacggaccgtgggagacttctcgtcccgccccttctacccaaagcgccgataaggaatgcatcggtaaaaaccgacgatagaggcaagccagcgctccggtagaccccgacaagcatataaaccctagcttcgaggattcgttatgacaatccttaactcgccaacggtcgtaggtatcgatgtggctaaggccgaaatcgtcgcttaccgtgaagacttggaaaccattcaaatcgtcgctaacgaccgaggaactcttggtcgctggctcaaaacgctgcctgcgcaaagctcaattgccctggaagccaccagcatttatcacttggacaccgtcgagctggcccatgaaatagggcatcgcgtttacgttgtcgatgcttatcggcttagccactaccgcgaaagtgttggccagcgtgcgaaaaccgacccttgtgatgcccgcctgctggcccgttacttatccagtgagcaagcgagactgcgtctctggagcccacctccgcacgcctacaaggtgttgaaaagcttgctgcatcgacgcgcagaacttattcgctggcgtgtgagcctgacgctgagctggtcgagcgagccgctgttgaaggatgagctggccaagcagttgaagtcgttcaaacaagccgagcaggcgattcaaaagctattgcacaaagtcagcaaagaggccggaatcgtcgaaaacatcaagcgctgcaaagccattgagggcgtcggcgatcttaccgctaccggcttggcgaccgcgttcatgcggggtgaattcgccaatggtgatgcgttcattgcctttttgggaatggacttgaggtcaaaagactcagggaaaaagaacggtactcgtcgcttgagcaaaaagggcgattcagagttacggcgcctggctcacaacgcggcaatggctgcttgccggtcggctacctggaaaccattttatgagtcgtacctagcgcgaggcctggcaaaaacccaggccctggtgatcctcgctcgcaagctgtgtcgagtggcattcgctctgatgaaaaaccagagcgaataccagccagatttaaggtcgcagggttgtcctgcaacatagaat

SEQ ID NO: 2353 - DNA, 1466 bp, unidentified
  source 1..1466: mol_type = unassigned DNA; note = element_350d4d6
  misc_feature 1..2: note = core
  misc_feature 3..243: note = LE
  misc_feature 244..1419: note = CDS
  misc_feature 1420..1466: note = RE
  misc_feature 3..225: note = bridgeRNA
ctcgtataataaaagtagtagtttttagagttcctctccaagaactatggtataatattgtttagatgctgtggattggtttgatcttcctaccgtatgacggtttacgaaaggctccgaccgcagtctctatgcaatttgttgatcagttagataccgcccgacggtttatttagaacgaggttacattagcgtagagtctctgtggatctaaacagcatcaataattttggaggtatcattatgatcgttgttggtattgatgtggcaaaggacaagcatgactgctttattgttgattctgaaggtacagtactctttgatgtgttcactatcccaaacactcttgacggctttaatatcctgcttgataacatcaagtccgttaccgaaaattttgacataataaaagtaggactcgaggctacgggacattacagctacaatctgttgggatttctgttgaacaacggcctgccaacctacgttctgaaccctttgcacactaatctttaccgaaaaagccttacacttcgtaaaacgaagacagacaaggcagatgcgcgcgtgattgcttctatgctaatgtcttgcgtagacctaaagccctacacaaatacattatatcagagcgaagagctaaagtcaatgaccagatacagatttgacaaggtttccgagcgtgcaaagctcaagacctccgtatcaaggcttgtgactattctctttcccgaacttgaagcgctcgtgccttcgctgcacatgaagtctgtctatactcttttgagcgagtttccttcagcgcagcatatcgcaaatgctcaccttacaaggcttgccaatctgctttcagagacttccaaaggtcactacggcaaggacaaagctattcagatcagaggtgccgcaagacgctctgtcggctctgtaatgcctgcaaagtcgctggaactcaggcacaccataaagctcattgctgacctgaccgagcagatagatgagatagaaaccgagataaagaagctggtcgatgcaaccgacactacacttctgaccgttcccggtctcagctattcaactgtcgctatgatcctcgcagaggtcggtgacttttcaaacttcgcaacacccgacaaagtacttgcatttgcgggaatgtcgccctctacataccaatcgggacagctgacgaattgttatgccaagatggaaaagcgcggctcaaagtatcttcgctatgctctctacaacgctgccaaattcgtctgcacctgggacaagacattcaaagattatctcgccaagaagcgagccgagggcaagcattacaatgttgcattatctcacgctgtcaagaaactcgtcagactcatttttgctcttgaaaagtctcattcgccatatcagcctgttgtttgaaatttttgttaatcttcatttttaggggttgacttttgatagttagt

SEQ ID NO: 2354 - DNA, 1155 bp, unidentified
  source 1..1155: mol_type = unassigned DNA; note = element_3515782
  misc_feature 1..2: note = core
  misc_feature 3..204: note = LE
  misc_feature 205..1143: note = CDS
  misc_feature 1144..1155: note = RE
  misc_feature 36..210: note = bridgeRNA
cttgtcttatgactatctgcgcttcttgtgagaaaaagaagcgccggagaggagggccatcctcttccggcgatggaggatggatcgagaaatgcctggccgttttggggccgagctagagtgtgatcgcctccatcttttccaatcgtcctgaacggatacccgagctttgggctcggatgacaagcatgggagacggaaaagatgagtgagattaccatcggggccgatatctcgaaagaccatatcgatctccatcggttgccagatggtgacaggatgcgcgtcaccaacgaccgcaagggatttgccgcgatccttggctggatcggcgacacgcctgtcgcgcgtgtggtctatgagccgaccggtgcctaccacaagcctttcgaacgcttcatgctcacccgtggcctgccactttccaaggtcaatccgcgtcaggcgcgacggtttgccgaggcaactgggaagctggccaagacggatcgcgcggatgccgcgatgctggcccaattcggcatggtactgaacccgcgtctcttatccccgtatgccgtttctttcgctgaactcaaggaattgcatgctgcacgtctggcgttggtgaaggacagaacggctgcgaagaaccgggccaagaatatcactcagccgctcctcaaaaggcagaacctcgcccggctgaagcagatcgaagcgcaactcgtccaggtcgagcaggtcatgaccgaccacatcgcaacggacgaaagcctcaaggtgcgcttcgatatccttgtttccatacctggcctgtcgaggatcacagcctttacacttctcatcgaaatgcccgagctgggcgaaatcgatgaaaaggcagccggcaagctatcgggtcttgccccaaacgacaggcagtccggagggtggaccggacgcgccttcatcgctggtggaagagccatcgtcaggcaagccctttacatgccggctcttgtcgctatccgtttcaacccggatcttaaggccaaatacgacgcactcaggacagcaggaaagccgcccaaagtcgcaatcaccgctatcatgcgaaagctggtcgtccttgcaaacgcactcctgcgcaaacagcaaatatggacaccaaaaccggcttgatcaaaacggata

SEQ ID NO: 2355 - DNA, 1545 bp, unidentified
  source 1..1545: mol_type = unassigned DNA; note = element_3517d15
  misc_feature 1..2: note = core
  misc_feature 3..249: note = LE
  misc_feature 250..1422: note = CDS
  misc_feature 1423..1545: note = RE
  misc_feature 3..218: note = bridgeRNA
cttgtatactaaatctatcttagtatactctccttcctattttaaattccgttacgctataatttaaatactaacattgtggagtattcatttttcctacagcttgactgttttatggagggtataaccacaactagtattgataacagtgattagctggttaacccattgaggttttatgacaaggtaatgactttactagatcagtggtttttaaccacatgttaactaagattaaggaggtctgttatgatttacgtcggcattgatgctgcttccaagaagcacgactttacaatcatgaaccaagagggcaatatcgttgttcaaccgacaacgatcaaaaatgattctgaaggatttaaaaagctccatacagaaatttcttcccatacagagcttgctcacgaagtatgtataggaattgaggaaactgggatctacgccaagaacctcgtctcttttctgcatgctagcggatttatagtcttcaacctgaatcctttgctaacgtctttcaaccaaaaagccgtttcactacgcatgtctaaaactgataaaatcgatgctcttgccatatgtagatacattaggcaaaaccattcgattctcaatccctatacacctacagtatacagatttagcgagcttaagtcattatctagactacgatatgaaaaacttaaagtcttatcaaagtccaaaatggagttaacacgtctattaatgattatttttcctgaatttattgagcattacgatcaacacgctaaatgggcaactgtattatttacaaaatatccattacctgcacaaatcgcgcgaatgcacactgatacactcgttaatataatgcgtatcaaaggtgatcggattaaagcagctgaacatataaaactcattgctaaacaaactattggtgcagtttctcttactggtcaaatacttttatcttctactcttgacgatatcaaacacttcaaatcacagcttgatgttatcgacaatgctattgctgaaatcatggggaattttgattttataaaatctatcccaggtgttggtaatactgtcggtgcaatgattcttggcgaaatcggcaacatcaatcgctttaaatcatcatctagtttacttgcttacgccggtcttgatccgtcagtatatgagtccggtgaattcaaaagtaaaaactctagaatttctaaacgcggatcaaaatatcttcgtactgctatttttactgccaccagagtggcttgtgtcgggaaaggcaaagataataaatttcgtcataagtacttgaaaaaaagactggaaaataaacaccattattctgctgtttgcgctgtcagtaaaaacatgatcaacactattttcaaaatgctacaaactggagaatatttttcatatagtcattaaactaatacatgttttttcctcattaatggctacccctttattaagtgcgcctacttttgtgaaaaatatcattactagctttctaaataaatttgctattcaccttgactttttaatagctgg

SEQ ID NO: 2356 - DNA, 1579 bp, unidentified
  source 1..1579: mol_type = unassigned DNA; note = element_3517d25
  misc_feature 1: note = core
  misc_feature 2..244: note = LE
  misc_feature 245..1450: note = CDS
  misc_feature 1451..1579: note = RE
  misc_feature 6..223: note = bridgeRNA
tcgtattatgaggtcaccagatctttctggtggacctcatttttgtgtggtcgtaagatagcggtagccggggatcgaacgtttctgcccgtgggagttggatcccgagagctatacagttcatcccccctacttgttaaaccatgattaggctggttgggacccagatcccgaatcacatacgataatgtggacgacaagaaggttaggggttgccggcgaatataatatcgggagtgattgaatgaaccctgtcattggattagatgtatctaaaggagaaagtcatgcacaagctttttcagatcgaggatcgccctacggaaagacctttcgatttgagcacaatcttgagggattagcgtccttcctccgttttactcaaaacctggagtcttttactgggcagcgtccggccattgtgttagaagcaacggggcattatcatagtccagttatacagtttctagatgagcatcaatatctgtatatcattatcaatccgttaatttcacaccaggcgaaaaagatgaatttacgtaaggtgaaaacggatgttgctgacgcttaccagctgggggaattgttctacaaagaagagctggagccttacaaaaaacggggtcagtatctgatgaatctgcgatacctgactcggcaacatgagtcactgacagaaatgtatgtccagacaaagttgcagtttcaagcggtactggatcaagtctttccagagtatcacggcgtgtttggtgacctttattctaaggtgtcgcttcgtttcctggctcagtatccaacgtctcaatccgtgctagcgatgaccgtggaaaacgttacggcgaacatacaacgccttgttggacatgtcgcctcgaaccggtggtcgctggaacgggcacagaaactaatggctgcagcacagctaaatccctttagggagaccgcatttccgagtcatttaatctcattagagctgttcattaatttacttcttcagtaccaggagcatctaacgaaacttgataaatcgatagaggccctggctgaagaattactggagtatgatttaatccaatcgatacccggcattggcactaaaattgctgcaacaattttagctgagatcggagaaatcgatcggttcgatcacgcaaagaagctggttgcttttgccggtattgatccaagtgtcttttcttctggtaaatttacagcaacccgaaataaaatcaccaaacgcggctccagaagactccggacagccttatatcaagctgtgcgatgtggtttgcgaagctcacgtaataagaaaatcagagcttattacgataaaaagcgagtagaaggtaaactatttaaagtagccgtgattgcatgtgcaaataaactaatccaatggatttatgcaattttgaccaagaaagaaccttaccgcttgactgaataagaaacgtttagatattgaggaaaaccttcccaaattctatggggcggttatttgtcgtgcatttttaccagtatagcacccttcgtttacttcattaataattaaatattgacaggctattagctggta

SEQ ID NO: 2357 - DNA, 1637 bp, unidentified
  source 1..1637: mol_type = unassigned DNA; note = element_351cb6d
  misc_feature 1..2: note = core
  misc_feature 3..99: note = LE
  misc_feature 100..1128: note = CDS
  misc_feature 1129..1637: note = RE
  misc_feature 1349..1581: note = bridgeRNA
agacatgatgttttgacctgcccatcaccaacgatcgtgggttatcgttggtgatgggtaaacaccccttgaacagagccacattgaggagggcaggtcatgaccaagtttaacactgaatccgtttcaattcacaccgttggcgctcccgttgaaccggaacaaccgacgatccatagcgcttatgtcggcctggatgtgcacaaagagacgattgcgatcgccgttgctgagcctgggcggcaggagccggtttacgaaggtgagattgccaatacgcccaagcgggtcgagcgcaagattcaacagctcagcgagctttatggcgggggcctgctgcaatttgtctatgaggccggcccctgtgggtatggcctgtaccgccaactgctggccagcggccacgacgtccatgtagtggcacagtcgcggattccgaaggcgcccggtgaacggatcaagacggatcggcgtgatgccctcaagctggcccgacaggcacgcagtggcgatctgacgccggtctgggttccggataccgaacaggaggccatgcgcgacctgacacgggcgcgtgactgcatgaaggctcaagagcgcaaggcgtgccagcaactgaacgcctttgtgctgcgtcacggtcaccactggccgaagggacgtacccgctggacccagacccatttcaactggctggagtccttgcggttcgagcacgactggcagcaggtggtgttgcaggagtataccgacgcagtcaaggcggcgacccgacgggtggctgacatcactgcccagatggaggaggccttgccacaatggactctggcacctgtggtggaggcgttggtcgccttgcgcggcatcgataagctggcggccatggtattgatggccgagttgggcgacatcagccgtttcgactccccgcgggaattgatggcctttctggggctagttcccagtgagcacagtagcggctcgcgccgacgccagggggcgatcacgctcaccggtaacagtcatgcccggcgaatgctggtggaatcggcctggagctatcgcttcccggcgcgccagacgatgcatctaaagcgcaaggcggctgatgcgcccgaggaaggctagagccattgcctggaaggctcagaaacgcctgtgcgggcgttaccgggacctgacccaggcgggaaagaacaccaagctggtgtgcgacgctgtggcgcgggagctgacgggttttatctgggatattgtctgccgggtgatgcccggggcgcacgtggtttgaggtaccgtcgccattaaaggaatcgaattcaggtcatcgaaaagcaagttcatggaggtgacaggcactttgagtcagggcaggatcgggccggtgtagagaacccttgatcgggctaaaccggcatccgttcgggataatccctaagggcgttcccggcggatgatccctgctttttagaaaaaggcaagctccgcgacgcagtgaagtcaggtggtacccaatccacgtatatcagcatgatccaccgtcgcagtctgccggatcctgtcctggcccaaggtgcctgcaatcgggaggtgcaacatgtgaagtccgtgcaagccttgacaggtcaaaacatatc

SEQ ID NO: 2358 - DNA, 1370 bp, unidentified
  source 1..1370: mol_type = unassigned DNA; note = element_3529a1a
  misc_feature 1: note = core
  misc_feature 2..169: note = LE
  misc_feature 170..1291: note = CDS
  misc_feature 1292..1370: note = RE
  misc_feature 46..191: note = bridgeRNA
cgttactatcttcgtgccccaataatcggggctttggccagccaggcccggcatgattgctgcccccagtcgcccatgatccggggggtgttgtcaccgggcctggtgggtggctggtgatcgctgataggggcttggccagggttttctgaggccgtccgtaacgtggatgccgagacttgccaccgatgttgccggccaatgtgtttcattgcgtctgaccttcatgcaagaaccgcttcagcacaattccattgatgtctttgtcggcgtcgatgtcggcaagggccagcatcacgccgtcgcgctcgatcgcagcggcaagcgtctgtacaacaaggcgctgcccaatgacgaagccaaactacgtgccttgatcaatgaactcaaggcgtacggtcagcttctgttcgtcgtcgaccaacccgccaccatcggtgcgctgccaatggctgtcgctcgcgacgagggtgtcctggttgcctatctgccagggctggccatgcgccgcatcgccgatctgcacgcaggcgaagccaagaccgacgctcgcgacgctgcgatcattgccgaagctgcccgctcgatgccgcacaccttgcgctcgctgcggctggccgatgagccgctggctgaactcaccatgctgtgcggcttcgacgacgatctggccgcccaagtcacccaaaccagcaaccgcattcgtggcctgctcacccagatccatcctgccctcgaacgggttctggggccacgcctggaccatcccgccgtgctcgatctgcttgagcgctatccgtcacccgccgctctcgccgaaaccagcgagaagacgctcgccaaccgcctgaccaaactcgctccgcgtatgggcaagcgccttgccgccgagatcgttcaagcacttggcgaacagaccgtcgtcgtgcccggcacccaggccgcaaccgtcgtcatgccgcgccttgccaagcaactcgccgccttgctccagcagcgcgacgaggtcgccagtgaagtcgaacgcctggtgcatgcgcaccctctttactcggtcctgaccagcatgcccggagtcggcgtcaggaccgctgccagactcctgaccgaagtcgcgcacaaaaccttcgcttcggccgcgcacctggccgcctatgccggtctcgcgccggtcacccggcgctcaggttcgtccatccgtggcgagcatccgtccagacgcggcaacaaggtgctcaaacgaaaagcgccacaaccaagcactcatcgcgctggcacggcgacgctgtgacgtcatgttcgccatgctgcgcgacggcaccttttaccaaccacaaaccgcccctaacgcttgacgaaacacatagggg

SEQ ID NO: 2359 - DNA, 1377 bp, unidentified
  source 1..1377: mol_type = unassigned DNA; note = element_353c23f
  misc_feature 1..2: note = core
  misc_feature 3..90: note = LE
  misc_feature 91..1107: note = CDS
  misc_feature 1108..1377: note = RE
  misc_feature 1147..1376: note = bridgeRNA
ataatggaatggacccacccctttcaaccggcctcgcaatgggccacgatgtagctgctaaaactcatcacaaaagagggcgggtccactatgaagattactacaattggtttagatatcgcaaagtctgtttttcattttgttgcagtaaatcaggctggtaagctcgttaaaaagaaaatgctcaagcgaaaagatgttattcacttcgttgccaagattgagccttgcctaattgtcatggaagcctgcggtagcgcaaactactgggctagagagtttcagcagttcggccaccaagtgaagttaatcgcgccacaattcgtcatcccctaccgacaagggaataagaatgattataacgatgcccttgcaatagctgaggctgcccaaaggccgaacatgcgcttcgtacagccaaagcctgtcgagcagcaggatgtacagatgcttcaccgaatgagggagcgtttaaacaagcagtctactgccttagtcaatcaggttagaggcatgctggcggagtacggcattgtaatagcaagaagcaaagcagcatttaggaaagagtttcctgagattttatctgatgagagcaatgaactgacagtgaaaggtcgatacatatttaaccagttacatgaagaatttactgatatcgaaatacgtctaaaaagctgtgataagcaaataatagaagagagaaatacaaacccagtttgccagcgtgtagagacatctcctggtataggccctatcacttcaaccgctttttacgcagcggtaggagaaggaaaagatttcaccaatggcaggcacttttcagcctggtgtggcttagtgccaaagcaacatagcagtggcggtattgataacctgctagggataagtaagagaggcaatgcctacttacgaacgttatttatacatggagcaagagcagtcttgcagcactgtggcggcaagcaagatagactgagccgttgggcgtacgctttggccgaaagaaaggggttcaacaaagcttgtgttgcagtagcgaacaagcttgcaagaatgacctgggctatcgctgctagagaagatgaatataggacatttgcgtagcagttagtcctaaagtaagacgaaccgagttagtgtaaacacaccagcaagttgctacgacacttgatttgatgatgagacagtcagactgctctacttaaaaccttacgaaaacataggctctaaagaagccgcaaggatgataaggaaagtagaggcaaatatccatcagggccagaggttaacctcataaacaggccgaatatatgggtgcaatgaactcttctcaaaattgacatcaaatgtcttgcaaacggggtgggtccatat

SEQ ID NO: 2360 - DNA, 1374 bp, unidentified
  source 1..1374: mol_type = unassigned DNA; note = element_35479a1
  misc_feature 1..2: note = core
  misc_feature 3..221: note = LE
  misc_feature 222..1217: note = CDS
  misc_feature 1218..1374: note = RE
  misc_feature 6..203: note = bridgeRNA
catttacatttgcagtattaatattctaatagaataaaagtgtatattaaaaaagaagagttgcagtgaactagctttgacactagtcttaaatgactatagggtgaattagactgcaactctcttaattggagaacctagccagttagaattgtaggttcacgacctaataaatgtattagctgcttctcctatatgtttaatactgtaaatacaaagttatgaattattctcattttgtaggtcttgatgtagggaaaaacacttttgatgcgtcattaatgtccgctgaggaaaaagaattgtctcacaagtcttttgataacactccggaaggaatacagtccatgttggcttggattgacaattatcagctttctttatctgaagtcttgttttgtgccgaaaatatgggtagttacgtcacggaattatctgtttctagtgttaccatgggattctctttaactttagtttgtccgttaaccataaagaaatcaataggtctacaacgaggtaaaaatgaccgtatagatgccaaaagaatagcgaattatgcggtactgcactatcgaaaactgaaattatacaaattgccagacaaagacctggtgagattaagagggtggattattatacgtgataacttggttaagcaaaaagtatcaggtacaaagttattggaaacattctcccaaatggctaagttagctgatgtaacagaatccatttcttttttagaagagcaacttgattcagtaaaagaaaaaatcctgaaggttgaagaagctatggagcaattaatagctgctaataattctctttacacaaactatctattattaagaagtataaaaggaataggtataatcaatgctattgtattactgtgtgtaactgataattttcaaagatttgacaatcctaggaaattagcctgctattgtggagttgccccatttgaacatacttcagggatttccattcgaggaaaaacacagacatctccattggccagcaaagaaataaaagtatatcttaccagagctgctatcactgccatctcttgggatccacaaatgaaagcattttatcaaagaaaaatagcggaaggaaaacataaagcacctgtcatcaatgccgtacgagctaaaatcatagctagagcttttgccgtgatacgaaggcagaccccatttgtaacattggttgcataataaaaattggaataacctcgataaattcttagatttagggaaccgttaggatttctaatgaattgtcatgtacatatacaaacttacccaagaatacgttaaggtacgtaaacttgggcaagattttaaagattttatttggagaggacttagaatt

SEQ ID NO: 2361 - DNA, 1369 bp, unidentified
  source 1..1369: mol_type = unassigned DNA; note = element_354af47
  misc_feature 1: note = core
  misc_feature 2..66: note = LE
  misc_feature 67..1089: note = CDS
  misc_feature 1090..1369: note = RE
  misc_feature 1128..1364: note = bridgeRNA
caatggtatggaccccgccgacctcgggcggtgtatcttggaaaggcaaacaggagggtgcatgccatggaaatcaaaaggatcggccttgatctggccaagtacgtttttgaagttcacgccgtcgacaacgacgaaaatgttgtgcttcgaaagactctgagacgcgaagccgttgcgcagttcttcgctgagcttgagccttgcgttgtcgggatggaggcttgttgcggatcgcactattgggcgcgtgttctgactgatctggggcacgaggtccggttgatctcgcctcagttcgtgaagccgtatgtcaagtcgaacaagaatgaccgcaatgacgctgaagctatttgcgaggcggttggcaggccgtcgatgcggtttgtaccgccgaagtcgccggagcagctggaaatccaagcggtccaccgtatccgccaacgtgtggttgcaaatcgtacccggcttgtgaaccaggtccgaggtttgcttggggagcacggtgtcgtggtgccgcgagatatcaaccgcattcggcgcacccttagtgaaattgcggacggtcagtcgggaggctttggtgggctctttgtcgagatgctgcgcgacatccgggaggagctggccgaactggatgcgcgcctcgcgggctacaatcagcggattaaaagcctctaccgctccaatgaaatgtgtcagcgtatcagccaaatcgaggggattggtccgattaccgcaacggcgctcgtcgccgcggtcggcgataaatcctgcttcagaaatggccgccagtttgctgcttggttgggcctggtgccaaagcagcattcaagcggcggaaaagcgcggctgttcggcataagcaaacggggcgacaggtacttgcggacgatgttgatccacggtgcgcgcgcggtactgggccgctcggccggaaaaaccgacacgcgaagccagtggatcaaccggatgcgggaaaggcgtcatccgaatgtcgtcgcggtcgccttggcaaacaagaacgcacggatcgtttggtcgcttctgtcaaacgatcaggaatacaggcggggacacaccgtctgagccagactacgagcgaccaagtcaaggaggactgaaaggaatattgcaacatctgccaggagatggagaagggtcacgcccgttgcttcttgaacctgatgtgtggatcggcaaggtcagcaccaatgccttaggggcgatgagggagaagcaagcggaaatccatcggggctcgcggcgatgatctatcaggccgccctaagaagccggatatacatcagcaatcgcgactttcgatccagagccaaacagaccgttgcaattaggcggggtccatata

SEQ ID NO: 2362 - DNA, 1581 bp, unidentified
  source 1..1581: mol_type = unassigned DNA; note = element_3551122
  misc_feature 1: note = core
  misc_feature 2..546: note = LE
  misc_feature 547..1446: note = CDS
  misc_feature 1447..1581: note = RE
  misc_feature 6..223: note = bridgeRNA
tcgtattatatggttaaccaatcatttctggttgacctattttttataggttttatgcttaaggtagccgggggaggacgtctgcgcccgtgggccactgatcccgtccgtaatactgtccaccccctccttgtagaaacatgtttgaggctggttgggacagcgatcccgtataaaaagcgaagctatgaaactacaagagatgaaggggcgtaccggcaaatctattaaaggagttgtatttaatatggatcctgttattggtctggatatcgcaaaaggcgaaagccaggtccaagcattcctgcaaaggaaaaagacttataagcaaagctttaaatttgctcacgatctacaaggacttaacgttttttatcagttttatcaagaggtagaacaggtttctggtcagcctcctgctgtgatttttgaatctacggggcattatcacatgcctgtacttcaatttctagagaatcaggatataacgtactacttgattaatccagtgatttcttatgagccagaaaaacgagcctgcgcaaggtgaaaaccgataaagcagatgcgtttcatttaggcgagctatactacaaggaagatcttgatagctatcaaaagaagacagaaaaagcattgaatttgcgtctcttaacaagacagcatagtgcgttaacagaaagctatgttgacattaagcttcaatttcaggcagctttagaccaggtcttccctgaattccaaagcgtttttagtgatctttatggcacactttcgttgaacactttagcgcattatccaaccgctttggatattcaaagggccatgccacaagagctagctgatggaatgcggcagttcggagccagacgctctaaagcatggtttttggataaagcatctcaactaaaagaagcagcaaaacgcaatccttttcaatctccagtttgtcatgggcagcttgttagcctgaacatgtacattcagatgctttttcaattccagcagcatctatccaaactaaaaaaagagatagacgcattagcgaaaacctttgaagactatgaattgctaaaatcaattcccggaatcggaaataagattgcggcaacaatcatttccgaaattggggatatcaacctgtttcaacatcccaaaaagttggtagcttttgcgggattggatccaagtgtctttgaatcaggtaaattcaaggcttccattagccacatcaccaaaaggggctcatcaagattgcggcaagcgctttattcggctgtacagtgtggtctggctaaaaatcgaaacaaaaagcttattgcctattatcaacgcaagcgcaatgaaggtaagccacacaaagttgccgtcattgcttgcgctaataagctcgttcattggattcatgccatattaaaaaacaaaaaagtatttgtagatctgtaataatgaactaacaattatctcaatattcagaaccatattgttacaatcaatatggttatttggtatgcccaatttcagtgtaacatgttttttgccacttttttagacctagatgttgacagctattagctggta

SEQ ID NO: 2363 - DNA, 1486 bp, unidentified
  source 1..1486: mol_type = unassigned DNA; note = element_3553076
  misc_feature 1..2: note = core
  misc_feature 3..242: note = LE
  misc_feature 243..1466: note = CDS
  misc_feature 1467..1486: note = RE
  misc_feature 6..238: note = bridgeRNA
ctaatgggacgtaccgggtcgctctagggcaggctcggtgccggtagccgctggcaggtgagcactcagcgcttctggaccgaagtcgagtcctaaggtcagaccgtgcccctgccggtggtcgggagagctgactgctgatgggatgtcgtggccgtcgagctggcgtgaccacttgaccattagggcgtggtggatctcccgtggctgccggaaatgctgccggtgcggaggaggcctgagtgctgttcgtcggggacgactgggcggaggaccaccatgatgtggaggtgcaggacgacgccggccggcggctgacgaaggccagggtgccggagggcgcggcgggcatcgcccggctgcacgccatggtcggacagcatctgcccgaggacgccgaccctgggcaggttgtggtcgggatcgagacggaccgtggtccgtgggtatccgcgctggtcgccgccggctaccgagtgatcgcggtgaacccgctgcaggccgctcgttaccgggagcggtactcgacgtccggggccaaaagcgacgccggtgacgcgcacgccctggcggacatggtccgtaccgaccgccaccagctgcgccaggtcgccggggacagcgacctggccgacgcggtgaagctcgtcgcccgggctcatcagagcctggtctgggaccggacccggcaggtccagcggttgcgttccgcgctgctggagtcgttcccggctgccctcgtcgcgttcgacgacctcgacgcccccgacacgctggaacttctcgcgaaggcgccctctgcggccgaggccgcccggctgaccgtcgcgcagatcagcgccgtgttgaagcgggcccgccggcggaagatccccgagagagcggccgcgatccgggccgcgctgcgggccgagcagctgcccgtaggcccggcctcgacgctggcctacgccgtggtcgtgcgcgcccaggctgggctgctgaccgcgctcaacgctgaggtcgcccgcctcgaggagcaggtcgaagcccattttggcgagcacccggacgctgaggtcctgctgtcccagcccggcctgggcacggtcctcgctgcccgggtgctcgccgagttcggggacgacccgaagcgctacaccgacgccaaggcccgccgcgactacgccggcaccagcccgatcacccgcgcctcaggccgcaagaccgtggtcatggcccgctacgcccgcaacaaccggcttgccgatgccctgcaccagcaggccttctgcgccctgaacgcctcgcccggcgcccgcgcctactacgacgccatccgcggccgcggcaagtcccaccacgccgccctccgccagctcggtaaccgcctggtcggcatcctgcatggctgcctcaagacccgcaccccctacgacgaggcaaccgcctggccgcggaacgtcacactcacacccgccgcttgacatccaaaagcatgggatgt

SEQ ID NO: 2364 - DNA, 1369 bp, unidentified
  source 1..1369: mol_type = unassigned DNA; note = element_35554f0
  misc_feature 1: note = core
  misc_feature 2..72: note = LE
  misc_feature 73..1125: note = CDS
  misc_feature 1126..1369: note = RE
  misc_feature 1138..1363: note = bridgeRNA
taatgggatggtccgccccgtctcccagcctcatcttgatggggcagagttcgatggcaaagggagaagccaatgaccatccgcaacaagcctcgcgatgctgccgtgttcggcatcgatctgggtaagaacctcttccatgtctgcggtctcgacgcggccggcgcaccgatccagcgggcgacatttcgacgggacacgctgttgcaattcttcgagcgcgcgacgccgacgattgtcggcatggaggcgtgcccgggctcgcaatggctggcgcgcaagctccagacgatgggtcacacggttcggatcgtgccggcaaagttcgtgaagccctatgtgaagagcaacaagaacgatctgatcgatgcggaagccatcgccgaggcggtgtcccggccaacgatgcgcttcgtcgaagtgaggtcacccgagcaggtcgacctgcaagccttgcaccgggtgcgagatcgccttgtcgcccagcggacccgggtcatctgccagatgcgggctttctgcctcgagtacgggatcgcgatgcatcagggcgccggcaggttcaaagccgaccttccacgtgtccttgctgacgaagagaacgatctgacgcctgctatgcgacgcctgctgacgcgcctctccgaggacgtgcgagctctggaagcgcgcatcgctgaggtgacagcagagatcgaggatatcgccgctgccgatgacacgacgcggcgcctgatgacgatcccgggcatcgggcctctggccgcgacaggtctcctcgctgctgccgggaaggcaacgcagttccgcaaggcacggcacatggcggcatggcttgggctcacgccgcgtgagcactcgacgggcggcaagacaaccttgctcggcatcagcaagcgcggcagctcgtatctgcgacgtctcttcatacacggcgcgcgatcctgtcttctccacctcgaccgatcacgcgatcggctcggagggtggctcgatgggctgccgaagcggatgcacaacaacaaggccgtcgtggcgctcgccgccaagatggtccgtgtcgcctgggtggtgatcaccaagccgggcgcaatctacgagcggcgagtgcaggcgccagcctgacagaactgctcgaccaactgcgaggttcgggagagtgatgacgagacagtcgatcggcgcaccgtaagctctgggcaaaaaagcgggcctcacagcccgagccagttattcgagaacggtcgcgtgcggatctcatcatggcctggccgcaacagcggtccactcgcgagaggccggatacatttatgcagactgggaccgtcagaacgaaactgatccttgcaccgacggggcggaccataca

SEQ ID NO: 2365 - DNA, 1566 bp, unidentified
  source 1..1566: mol_type = unassigned DNA; note = element_355f97e
  misc_feature 1..3: note = core
  misc_feature 4..262: note = LE
  misc_feature 263..1234: note = CDS
  misc_feature 1235..1566: note = RE
  misc_feature 79..261: note = bridgeRNA
aaacaattatgactttacagtcacacccccacatgaaaaggggtgtgactattttttttataaaccttccatactggttacatagatggatgatgtttagtacgtactgttttacggtgggcgaaccccgtaaaggaaactgtaagaaataattcggtgcacatccctttgttgacagaaatgttctgatcacggacagaaaaatgttgaatttccaattatttctttcatccatctcacatctaattaggaggtttctattttggaaacattacattctcactgtgctggactggatattcatcaaaaagaaattgttgtttgtacttacattggttcatctgatgaagaacttatcaaagaaatccgtactttttctacaatgacgaagaacttatatgaaatgcttcaatggctcgaagagctaaacatcacccatcttgcgatggaaagcaccgggatctattggaaaccggttttcaacattctagaagattatttcgagattaccctcgcaaatgcacaacgaattaaaaatgttcctggacggaaaaccgatgtagccgacgcagaatggattgcaaaacttcttcgatatggactcattgaaaaaagttttgttcctccagttgatattcgagaactccgtgatttaacgcgcctacgtaaaaaaatgattggaaatatgacggctgaaaaaaatcgtattcaaaaaacattagagtgttcaaatattaagctaggttctgttatttcagatatattcggcgtatccggacgaaaattactcacccgtctcgttgaacaaggctatgtaaatccaaatgaagtggaagagcatattcacgttagaatgatgcctaaggcatctcaaattacagaatctctatttggtacaatcaatccacaccaaatttttctgattcgtcaatcctggaatcatattttatttctagaatcatcgattcaacagcttgaagataaaattgatgaaattcttttaccttatcaagaacaagtagaacttcttttaaccattccaggtgtcaaaaaacactctgtagcatgtattattgctgaaatcggtgtagaaatgaatcagtttccttctgctcatcatcttgcttcttgggcaggactatctcctggaaatcatgaaagtgcgggtaaaaaaagcacccgaacaaccaaaggaaacccacacatccaatcaacgctttgtgaagtagcctaggctatttcgagaacacggcatacatggttatcaggaaagtattggtcccttgcggcacgaagaggtaaaaagaaagcactcgttgccattgcacataaaacaattaaaatcatttatcatatactaaatcaacgatctggatttattgagtattcaaaagttctcgcttaaagattggctcaattttatatttatttcgctactgtcaaaaaaatttttgaacacgtggcttattttcttatgtttttttacagtcatgacatgtacataaaaagtatttagaatcatgccacatctgaaaatgagttctttacctcaagtcttttcacgga

SEQ ID NO: 2366 - DNA, 1436 bp, unidentified
  source 1..1436: mol_type = unassigned DNA; note = element_3571ec8
  misc_feature 1..2: note = core
  misc_feature 3..232: note = LE
  misc_feature 233..1408: note = CDS
  misc_feature 1409..1436: note = RE
  misc_feature 29..197: note = bridgeRNA
cttgtatgttgagtcagcgagcgttcctggcgtagatactgctcgacgggatccgggagagggtcgccgcaggctgcttgaggcttcgtcctcggttttgagatcggcgccctcgcccggtgtccaaagctcggacggtatcccgaggcgtcgccgacggcctcgcatggacaagcacgagcatggacgccggtcccgagggctcccggcttgcccgtcggaaagggcgggtatgcgcttcgtcgggatcgatatcggggcggaacgtcacatggtggcgagcatcgatgagcagagcacggtcctccagcgaccgacggccttccgcgaggacgccgagggctatcagcaactgatcggccttctcggcccgccggccggcacgctcatcgtcatggaggcgaccgggcattactggcagaatctgttcgcgatgctcgccgcggagggctttgtgattgccctcattaatcctctgcgtactcggcgctttgccgaggaggacttggtccggaccaagacggacgcgatcgatgctctcgggctggcacgtttcggtcaacagaagcggcctccggccacgctgctcccggatgtcgcaacgcgggatctgcgcgagctcgtccgtctgcgggcccgcttcctccaggactttggcgaccgcacgcggcagctccatcgggtggtcgatctgagctttccggagttcacgcgctatgtggtgcaactggatagtccgcgcgccaccgcgctgctgcaggccttccccaccgccgccgcggtccgcacggcctccgaacgccagatcgcgagcatccgagggggccagcgccccgtggggcgcgagctcgcccgcgctctgaaaagcgcggcacgcacctccgtcgggcaccatgacaccgaggtgtacgcccgccaagtacgcttcttctgtgaagacctggacctgcttcgtcgtcgcctcgggaacctcgagcgtgacatcgaacatctcctggctgcgcaccaagtcgggcagttgttgacgacgatcgaggggattggccctcagaccgcggccaagctggtggcggagctcggcgaccctgccgccttccgcagcgccggcgcgctcgccgcctacgtgggagcgatccccggcttgcggcagtctggtaaccagacgtgggatcgcgccggcctcacccgcgtggggcacgccaagctccgcgcggcgctctggatgcccacgctggtggccgttcggcgcaatccctggctgcgggcctactaccaacgcctgcgcgcccggggcaagctgccgaaggtcgcgctcatggcggccatgcgcaaactgctcatcgccatctacacggtggcgaagcaccgccgccccttcatccccatcatcacgatgaccacaccatgaaaaaatcacttgaccgagcagacggtat

SEQ ID NO: 2367 - DNA, 1410 bp, unidentified
  source 1..1410: mol_type = unassigned DNA; note = element_3576c6d
  misc_feature 1: note = core
  misc_feature 2..89: note = LE
  misc_feature 90..1160: note = CDS
  misc_feature 1161..1410: note = RE
  misc_feature 1173..1402: note = bridgeRNA
caatgggatggactccccctcacccaatcggcatcgaagtgccagactggaagtgtcatccaccagtcgctgggagaggaggagtcaacatgaagcttattcgggttggggtcgatttggcaaagaaggtgttccaggtgcatggtgtggaccgcgacgaaaagccggtgtggcgccggcggttgacgcgtggcaactggctgcaggtactgctggaggcggtggagccaagctgccagattggcatggaggcatgcggcggtgcgcattactgggcgcgcaagctccaggagcggggattcacggtgaagttgattgcgccgcagttcgtgaaaccctacgtacagagcaacaagaacgacgccgacgatgcggaggcgattggcgaggccatgagccggccgaagatgcggtttgtggcggtcgagacggtcgagcaacaagaccttcaggcgatgcaccgcatcggctccggactgatcgagcaacgcacggccaaaggcaatcagatccgcggcctggtttcggagtacgggctggtcgccccgcgcgagctcgcgcagctgcggcgggcgcttcccgtgtggctggaggatgcaggcaatggcttgagcgagcggtttcgggggctgttgaatgcgctgtggtgcgaccttcgggtgctcgataagcgggtggctgaactggatcgcgagattgcgttgatcgcgcagagcgatcctgccgctcgacggctgcaacagctgcgcggcgtcgggccgatcattgccaccgcgctagtggcggcgctgggcgatggcgggcagtttgccaacggccgacagatggcggcggcactggggctcacgcccaaacagcatagctccggtggcaaagacaagcagctcgggatcagcaagcgaggcgacgcctacctgaggagcatcctgattcacggcgcgcgctctgcaatccgcacggccaagggtaagaccgatcggctgagcctatggctgatggctttggcggggcgtcgccatcccaacgttgtggccacagcgctcgcgaacaagaccacgcgtattgcctgggcgatgctaaggcatggcacggattaccagcccgattctgatcgcggccgatggctggaccagatcaggcacccgagcacagtaagttgatgtaggagcccttcaactcgcgattgcaaagcaagccgaacgatggcaaccaggtcgaaccggcgccggtaaaacccgctaacgtccagatgcgagaagcacgactaagcgattgggaactggcgcgcgaatagcccatcatggccgtgcatcgattgctcgatgctgcagtacgaggccggatatacgtgagcagtcgtacctaaccgccaaagaacggaatgcttgcaaacgagggggagtccatata

SEQ ID NO: 2368 - DNA, 1296 bp, unidentified
  source 1..1296: mol_type = unassigned DNA; note = element_35812cb
  misc_feature 1: note = core
  misc_feature 2..241: note = LE
  misc_feature 242..1258: note = CDS
  misc_feature 1259..1296: note = RE
  misc_feature 40..252: note = bridgeRNA
cctttggaccttcaaagaaacatttaaaaaaaaaatattgtttttgaaatggggttctaggggcgttgataacttcttaagttgttaataaatttgaaattaaacagcagggtgaacttggcacccttctagtctttaaaggactttaagtcgtattagaccctgctgttaatttcaatgctctaggtccaactagaattattctttgtctcaccaaaggttttagacaagagcatttattatgaactatttaacaatacaaaggtatgaaaaatggaattacacaattggcattgacgtatcaaaaaacactttggacattcattgcgctgaaatcaatcaacacattcaaattaaaaatggaacggagggatttagagtattccttaaatggtgcaatactcataaaataattctaaatcaaagctttatgataatggaatataccggcggctatgaatataagctgatacagttttgtgaatctaagcaaattcaatattccagaattccgggattggaaataaagcgctccatgggcatcaccagaggaaaaacggaccaggtagatgctggtcgaatcgctcaatatggtgaagaaaaacacaaacaattgactccagatcgacccttaaacaaaggtatcataaagctaaaagagcttcttggattcaggaaaagaattgtacgggaactgggaggatacaaagcttctctaaaagaacgcaaagcaatgtatcccgatttgaaaaaagatttaatttgtaaaactctagaatcaaaaataaaagaaaacgaaaaagttgttgccaaatttgataaagaattaatggacgaaattcacaaggatgaggcaatgaaaaccaattatgaattgattagaagtatcaaagggatcggaatggtaaatgcgctaatgacaattgcttatacagaaaactttgtcggcttcactaatccccgcagttacgcagtgtatgtaggggtagttccttttgattatagttcaggtacaagtatcaaaggacgaaaaagggtaagttcaattgctaacaaagaacttaaacaagaacttacacaagccgcaaggagtgctattcaatgggatccagaattgaaaagttatgcaactagaaaaatggctaataaaagctatggtgtcgtcttaaacaatgtaaaattcaaactcatcttacgcatatttgctgtagtgaaaaggcaagaaatgtatgttgataactacaaaaatgcagcttaaatgataaataaatttgctaatttggatatcctagaata

SEQ ID NO: 2369 - DNA, 1411 bp, unidentified
  source 1..1411: mol_type = unassigned DNA; note = element_3586756
  misc_feature 1: note = core
  misc_feature 2..75: note = LE
  misc_feature 76..1104: note = CDS
  misc_feature 1105..1411: note = RE
  misc_feature 1188..1405: note = bridgeRNA
taatgagatggtccgccgctttcatcctctgctgagcagaggatgtgagtaggagttcagaggaggatcatcgacatgcagattcattcggtaggcatcgatctgggcaagaccacctttcaccttgtcgcgctgggagctgccggcaaggttctcgttcggaagaagtttacacagaagcagctgctggcattcacagcgaacttgcagacctcgttgattggccttgaggcgtgctcgggagcgcacttcctcggcagggcgctgcgggatcagggccatgacgtgcggctgatcgcagcccagttcgtgaagccctttgtgaagtccaacaagaacgatttcgtggacgccgaggccatcgccgaagccgtcgaacgcaagaacatgcgctttgtaccgatcaagaccgatgaccagctagacctgcaagcgatccatcgcgttcgagatcgattggtctctcggcgtacagcggtcatcaaccagatacgggcttttctgctggagcgaggcatggtgttcgcgcagaagccagccaagctcaaggccgcgatggcggacatcctggagaacgccgaagccaacctgacgccgacgatgcgtaacctgatcaacatgctatggggcgagtggaagactgtcgagcagcagatcgaagagctgaccgacaagctcgaacagatctctgccagtgacgctggctgtacccgcattcgcaagatcccgggcatcgggccgatcgtagccacagcgatcgtcgcggccatcggcaacggagcggctttccgcaagggccgggacttcgccgcatggctcggtttggtgccacgacagtactcgactggaggcaaggccaagctgctgggcatcagcaagcgtggcaacatctacctccgcaaggttctgattcacggagcacgcgccgcagccatgcgcatcaagcgcgaccgagctcctatcggagcgtggatggacgcactcgaagcacgcgcaccttgcaacgtgctcgtggtcgccatggccaataagctcgcacgcatcgcctgggctgttctctctagcggcggcgagtacagaccactggccagcacacccgcataggagagagcggaaaagacgccggcttggaagcgctccacgctcccactttaccgctctacgacgacggctttcattttccccaccgaggtctgcataggaacagcaaggacgaaagaacagtcacaacggcgtgtctgcaacctgatcctgataatggtctccaacgaccgaccgacttgtaaggacagacacgcagcggaactcatcctagccaggagcacgcgtctccatcaaaaggccgaatacattgccgcagacttgtcttctcgcccaaactaacccttgcagtcgcgcggcggaccataca

SEQ ID NO: 2370 - DNA, 1385 bp, unidentified
  source 1..1385: mol_type = unassigned DNA; note = element_35929f7
  misc_feature 1: note = core
  misc_feature 2..77: note = LE
  misc_feature 78..1109: note = CDS
  misc_feature 1110..1385: note = RE
  misc_feature 1163..1379: note = bridgeRNA
taatgagatggtccgccgcttgattacttccacgggataacgatctttggcaggctagtctcaggaggattacggacatgcagattcgctcggtaggcattgatcttggcaagacgacctttcacctcgtcgcacttggcgataacggcaaggtacttgtcaggaagaagttcaaccagaagcagctcatcacgttcacggctaacctgcagacttctttgatcgggatggaagcatgctccggagcacactttcttggccgagcgttgcgccggcagggccacgacgtgaagctgatcccggctcaattcgtaaagccattcgtgaagtcgaacaagaatgactttctggatgcggaagccattgccgaagcggttgaacggaagaacatgcgctttgttccgatcaagacagacgatcaactggacttacaggccttgcatcgcgttcgagaccggctcattgcacggcgaacgtccgtgatcaaccagttgcgggctttcttgcttgagcgcggcatgacgtttgccaagatgcctaccaagctcaagttcgcgatgcccgagattctcgaaaacgtcgattcgaatctgaccccgcgcatgcgcaacctcgttgggctcctgtggagtgagtggaaggaactcgatcaacagatcatagcgatgaacacagaagtagagcagatcgcttcctcagaccccgcatgccagagattgcgacagattcccggcatcggacccctgattgccaccgccgtcgtcgcctcaatcggcaacggagccgctttccgaaaaggtcgagatttcgcatcctggctcggtcttgtgccgcggcagtactctaccggcggcaaggccaagctgctcgggatcagtaaacgcggcaactcttacctgcgcaagatattgatccacggggcgagagctgctgtcgtgcgcgtgaagagagaacggtcgccattcggttcatggctggatgctctccagacaagagcacccctcaacgtcgtcgtaaccgcgactgcgaataagctggcgcgtatcgtctgggcggttctgtcgaccggagaggaattcaggcctggaggtcgcctgctcgcctcctaaaacgcttgtcagcgttggccgcccatcgagcccatcactcaaccactcttccacgaggtctgcatcggacagcaaagacgaaagaacagtcacaacggcgtgcttcaaacctgatcactgaaatggccttgaaggccgtcccgtttataaggcaagcacgcggcgcagctcatcatggctaggagaatttacctctccatcaaaagccgaatacatttgcgcagacctgtctctcgtccaacgcttttcccttgcagtcgcgcggcggaccataca

SEQ ID NO: 2371 - DNA, 1690 bp, unidentified
  source 1..1690: mol_type = unassigned DNA; note = element_3595881
  misc_feature 1..3: note = core
  misc_feature 4..239: note = LE
  misc_feature 240..1445: note = CDS
  misc_feature 1446..1690: note = RE
  misc_feature 54..229: note = bridgeRNA
cttatacattaaactaaaaccaagccctcttgagggagggtcttagcagggttatacttgctagatgaggacaaccagggaaaggctacctcctcctcacggctcgaccgattcaaaaagatcgctcttccctggcatgttcctggaccagattgaccatgagagggtcgtgcttcgagcaccgaggtataaggacacaagggtccaggatatccttcgtttgagaaaggagtaatagtatgtggtatgccggactggactgggctgactctcatcatgacatcatcgtgatcgataatgcgggtcgccaagtcgcgtcgcgtcgcgtggcccatagcgcggaagggctggccgaactgatcgcgtttttgcgtcagatcgccccacttgaccagattgcttgcatcgtcgaaaccaatcaaggtcttctcatttcgacgttgctggaagcaggatgcacgctctatcccgtcaatcccaagacgatcgatcgccgccgcaccgcttctggagccaagaccgacttgattgatgcctacctgttggcaaaaacaggacgcagcgatctggctgatctgagaaagttgacccctgatagtgcaattatccaagaactcaaagcgctgagccgtgatcaagacagcctggtgcagagtcagacacgcgtggtcaatcagcttactgcttgtctgaaagcgtactacccagtcgccttgcagctctttagcaaattgcagcaacgatgcaccctgctctttttgcagacctatccgacgcttgatgctgcgatgggagcttcggtcgaggaaatcaccagggtcctcaaaaaggctgggcatcccagcccaagcaaagttgctccaaagattcgtgagacgctgcatcagccacagttgcgggctgatgcgattacgacgcgcaccaagtcgcgactgatgctggctctggttgcccaactcttgccgctcatcgagcagatcgcggcctacgacaaggagatttccgacctttttttgacgcagactgacaacgagatctttcgcagtcttccaggggctggaaagcggattgcgcctcgtctgttggctgaatggggagatgaccgtgctcgctacatgggaagtacgagtgtgcaagctctggctggaacggctcctgtcgcgttccaaagtggcaactatgccaaggcccataagcgctacgcttgcgtgaagccgttgcgcaacgtgctgcatcaatttgcctggcaatcgaccaaacaagaagactgggcactgacgtattaccaacgcaagcgagctgagggcaagagtcacagtatggctgtacgctcgttggcaaatgcatgggtgcggattatctacgcaatgtggcaggagcatacgtgctatgagacggccacctttgaagctgcccagcaccaccatgcttccagagctgcctagaagtctttgaccatgtcgcatccgttcaaggcgaacaagaaacccttctgtttttttgttttcgattgggcatgtccatttcagaccacgcaagcgagaggcggtctcggaaagcgaagcggcttgatagcagcgagcggcgtggtacactttctcatgcctcattgaagacatttctccccctctcttttccggttttttctcttgctacaaattggtcatcttagggcttgacaatagagggt

SEQ ID NO: 2372 - DNA, 1542 bp, unidentified
  source 1..1542: mol_type = unassigned DNA; note = element_3597f6b
  misc_feature 1..3: note = core
  misc_feature 4..240: note = LE
  misc_feature 241..1434: note = CDS
  misc_feature 1435..1542: note = RE
attcttaatatatgagtagagacttttctggtctctgctctttatttatgatgaaggcgattggtctaacgtaatctccgattgggacgccacgcccgacgacaaatttgttaaccagccttcatcgttctacattcgattcagcaagttgggaaagatacttctcccgtttaactaaagaatatgagtgaaccttgaagagccggatccaatcacaacaacttatgaaaggagtatcacatgattgctgttggaatcgatgtttccaaatccaaaagcacagttgccatccttaatggagacggcagcatacgagcaaagccctttgatgttcaccacacagctgatgaattaaaatccctgatcagttatatcaaaggaacctcagaggttcctacgatcctcatggaaccgaccagtcattaccattatcccatcctgaaagcctttcaggatgccgctcttccggtttgtctagtcaacccgtatcaactgaaaaaatatggggatacggcactccgaaaggcaaaaacagataagaaggatgctgttaagattgctcaatatgctctcgaaaagtcctacaccctgacgtcctacacaccacaggatcaaaagtacgatgatctgcgtttcctgtcaaggcagtacaatcagcggatgtccactcttaccgcaaataaagtccaattgattcgtcttcttgatgaaacaatgcctggtatcacaactattttgcctctgaaaagcagagatcccgaaaactgcgttctgctaaaattaatcaagcgatttaagtcttttgactctgtaaagaagatggggaaaaaccgtttcctggatagttaccaagtcctcgtaaacaagacaaaggatcgctatgctgcctccaaagggttagccatctatgaaatggctttgaacagtgtcacaacgcgcggagataattctctgacatttatgacccaaaaccaatgtgttgatcttatttctgcgtctcaaaatgctgtagacgatatcaatctccagatgcgcactattgcagaaacaattccggaatatagggtgctgcgttctatggctggtgttggtgatcgccttggacctatcatccttgctgaaatcggtgatattcgtcgtttccatagcggcaaggcattaaatgcttacgctggaaacgatgctccaccttatcagtccggacaatttgagagccggaatcgtcacatctcaaaacgtggcaacccggctctcagaaaagcttgttttgaggttatgcaggctctcaaactgactaaacctcaagatgaccctgtttacctttttctactcaaaaaagaacaggaaggaaaaccctataacgtagccaagatggctgctgttaataagttcctgcggatttactacgctcgcgctatggaagtgtataagtaaatcgctgatttcattatatctgttattatcaggcctgcaatggtaggctttgttgaggttgctcttttttaacttgatcaaaaaactgcttgacaaaacattagcaag

SEQ ID NO: 2373 - DNA, 1517 bp, unidentified
  source 1..1517: mol_type = unassigned DNA; note = element_35a934e
  misc_feature 1..4: note = core
  misc_feature 5..250: note = LE
  misc_feature 251..1492: note = CDS
  misc_feature 1493..1517: note = RE
ctcactggtctaccttccaggtgtcggctggttcagatgaccggcggatgcacccctggtccccgccgggccaccgccatcttcgctcgaccttcgaggtccagcatgagttctgcggggtccggtggcccaggacgcccagaccggctacagggctgtgcgccggagagcgccgatcaatgagcgaccggctgcggggtcccgggaccaccgggtggtttccaactgctccaacagtcaggaaccaatcatgagtctgccctctacccctggcccggcgcgagtctgcgcaggcctcgactgggctaaagacgatcacgccgtctgcatcatcgatcccgacgggcaggtcttggaccggttcgtgatcgagcacaccgcgaccggcctgaagcagctgatcggccgcctgctcaaggccagtgtggtcgagatcggcatcgaacgcggcgatggcccggtggtcgaggcgctgctggccgccgagctcgtggtgctggtcatcagcccgaaccaggtcaagaacctgcgctcgcgctacggctcggccggcaacaaggacgaccggttcgacgcctacgtgctggccgacgtagtccgcaccgaccgacgccgcctcacccccttgaccaggtccaccccgaccacccgggcgctgcgcaccaccgtgcgagcccgtcgtgatctcgtccaacaccgggtcgcggccaagaaccagctccgcgcccacctgcagatcgttttgcccggtgtggtcgggctgttcgccgccctggactcggccatcagcctggcgttcctggagcggttcaccacccagacccaggccgactggctcacccctgcccggttcggtgcctggctgagcaaacagggctactccgacaaggtcgatccccaggtgctgcaccagcgtctgctcgctgccccccgcggcaccaccgaggccgacgcccccacccacgccgcagtgacgttggcgttcgtagccacactgcgcgccctcaacgctcagatcaccgtcctggccgactcgatcaccgaccagctcaacatccaccccgacgcccacatcgtgacctcgctgccccgctcgggaaccctgcgcgccgcccggctgctcgccgagatcggcgacgcccgcggccgcttccccaccgccgactccctggcctgcctggccggcgtcgccccctccaccagacagtccggcaaggtcaaagccgtcaccttccgctggtccgccgaccaccaactgcgcgacgcgttgtgtgacttcgccgacggctctcgccacgccaacccctgggccgccgacctctacacccgagcccgcacccgcggacacgaccacccccacgccgtccgcatcctcggccgagcctgggcagacatcatctggcgctgctggcaagaccacaccccctacgacaccgaccgccacaaagccctccaacgcatcctcaacgagcacaccccacacgccgcctaaaccggcggaggttgacacagggcaa

SEQ ID NO: 2374 - DNA, 1366 bp, unidentified
  source 1..1366: mol_type = unassigned DNA; note = element_35abd0a
  misc_feature 1..2: note = core
  misc_feature 3..84: note = LE
  misc_feature 85..873: note = CDS
  misc_feature 874..1366: note = RE
  misc_feature 1081..1353: note = bridgeRNA
tgatggggtggatgcccccgcccgacggcatcgcgatgtttcaagatggtgatgctgaagtcaacctaagaagaggaggcatccatgaatgagattagcatcgccggcgtcgacctggcaaagcaggtcttccagcttcatggcgctacgtcggacgggcgcgcggttttccgcaagaagctgtcccggccgcagttcgcgaagttcatggcagccctgccgccatgcatcgtggccatggaggcttgcgggaccgcgcattactggggccgggaactcgcccggctcggccatgacatccgcctcatcccgcccatctatgtcaaaccctttgtgaagcggcaaaagaacgatagcgcggatgcggaagcgattgccgaggcggcccagcggccgaccatgcggacggtggtggtgaagagtgccgcgcagcaagcccgcgcgatgctcttccgcacccgcgatctgctcgttggtcagcgcacccagctggtcaacgcactgcgcggccatctcgccgaacacggcatcgtcctgggcaagggcatcggcaacgtcgagcgcctcgcccttcgcatggaagaggataacctgcctgacctggtccggcacctggggcgcctctatctcgatcagatcgcgcgactgggagccgagatcgaaaagctggacaaccgcatcgttgccgccgcgaaagaaaacggggtggcccgaaggcttcagaccatgcccgggatcggcccgatctgcgcgatggcgattaccgccttcgcgccggatatgcgtgagtttcgaagggggcgtgacttcgctgcctggcttggccttgtgccgcgacagcattcgagtggcggcaagcagaagctgggctgaacctcgaagatgggtcagcgcgacatccgacgcctgctgatcgttggggcgatgtcgatcgtccattggcgaggccgtgacggtgggcggccgggatcatggctcgcgcgcatgctgaaccgaaagccgcgcatgcttgtggccatcgcgctggccaacaagatggcacgcatggtctgggccatgctcgtgcgacaagaggattaccgagatccaaccggcgcggtctgctgaccgcggcgtgcggaacgtcggcgatgtgaggagagcaatgacccgtatgggcaaatgatcgaacagatccgggtcgggaaaaccagtggcatgcaacgagcccagagctcgcaattttgatctggttcccgatccgcgcatcaccataccggcccgcggcatgttttggccgcacctgagaggcctgaaacatgaccgcactcgatcacacgctcaaaaggtcaaagaaaacccttgcatcgaagggggcatccaaaca

SEQ ID NO: 2375 - DNA, 1266 bp, unidentified
  source 1..1266: mol_type = unassigned DNA; note = element_35b0d9a
  misc_feature 1..2: note = core
  misc_feature 3..119: note = LE
  misc_feature 120..1256: note = CDS
  misc_feature 1257..1266: note = RE
ctgacttgtttagatgacggcaagccgtgagggtctgcagccctagcgtgctgagggtgccgaccgcgtggctcgcatagcttcttgtccctccgggtgactcgctgatagcccgcccgatgcggtcggcactcgcgcgatgtggctcaacagaggcgtgtgcccacctgaagtcaggttgcccgtcgcggcttccccactccggcgacgaaaggcgtgctgtgatcacgatcgggatcgatccccacaagacgagcgtcaccgcggcggcactcgatccagtcggcgagacggttggtcaccgacgcgtggcctgcaccgccaagacggccgaccagttgatcgggtgggcggacgcctggccggaccggaggtgggcggttgagggcgcatccggtctcggccgcggcgtcgcgcagcagctgatcgcggcaggcgagcaggtgatcgacgtgccggcgaagctggcggcgcgagcacgactgctgggctcgggcagcagccgcaagagcgacctcgtcgatgccgtttcggtcggctccgtcgcgctttacaacagcaagctgcgaacggtcgagcgcgaggacgaggccgtcgtgctgcgtctgctttcggaccgacgcgacgacctcgtcagcgagcggacgcgcaccgtcaatcgcctgcacgtgctgctgcgtgacctcgtacccggcggcgcccgccgcgatctctcgactctccaggccggccgtttcctgagcgggatccggccgctcacgaccgtcgacatcgagcgcaagcgaatcgcccgagcgctgctcgaggatctgcgccgcgccgaccgccagctcagggcgatcagcacgacgatcgaaacagctgtcgccgccagcaacagcagcttgaccgaggtcttcggcatcggccccgtgctggccgccaagatcgccggccacaccggagacatcacccgcttcgcctccaaagcgcacttcgccagctacagcggcacagccccaatcgaagcctccagtggcgacctccgccgccaccggctcaaccggcgcggcaaccgccaactcaacaccgcgctacacaccgcagcggtctgccagatccgctcgccaggccccggccaggaccactaccgccgcaaactggccgagctcaagacgaccaaagaggcccaacgcagcctcaagcgccagctctccaacgtcgtctatcgacacctcgtcgacgaccacagacgacgtcaactcaccttcgattgacacagaggcg

SEQ ID NO: 2376 - DNA, 1435 bp, unidentified
  source 1..1435: mol_type = unassigned DNA; note = element_35b3ec5
  misc_feature 1..2: note = core
  misc_feature 3..202: note = LE
  misc_feature 203..1420: note = CDS
  misc_feature 1421..1435: note = RE
  misc_feature 12..223: note = bridgeRNA
gtcctaccttcttagttgtgggtctgagctggtcattcgtaggatcggcggcccaggggtcctgggtatggctggcatggtgccgccgttggatggctcaaggaacttggccgcccggggccccgcgacgactcgaccgctaattgggagacgcgacgcgatcgctatgtaggacaacgtcggcgaggtcgtctgctgggttgtgtacgacgagctgacggaggtggccgtgcccgagatctgggccggagtggacatcggcaaggagcatcaccactgcgtggtgatcgacgcccagggcacgcggctgttgtcgcgtcgggtgctgaacgacgagaccgagctgcttcagctcctggccgacgtgctggcgttgtcgcggaacgtgctgtgggcggtggatatcaaccacggtggggccgcgctcctgctcggcctgcttgtcagtcacgaccagcacgtcacctacatcaccggtctggccgtccaccgtgcttcggcgggctaccggggccaggccaagaccgacgcgaaagacgccttcgtcatcgctgaccaggcccgtatgcgcaccgacctcggcgttctgcgacccggcgacgagatagcggtcgatctgcgcaccttggtaacccgccgcaccgatctggtctgcgaccggacccggcagatcaaccgactgcgtgcccaactcctggagatcttccctgcgctggaacgctcgctggacctgacgaagaagggcccggtcctgctgctgaccggctaccagaccccggccgcgatccgccgcgcaggagctgcccgcatcacgacgtggctgaagaaccgcaaggtccgcagcagcgaggccctggcccggagcgtcgtggaggcggccgaggcacagttcagcgcactgccaggcgaaaagctcgcggccacgatggtggcccggctcgcgaagggggtgatggccctcgatgaggagatcgccgagctcgacgctctcatcgagggccggtttcgcgagcatccgcgcgccgaggtgatccagagcctgcccggcatgggcaccctgctgagcgcggagttcctcgccgcgaccggcggtgacatggtcgccttcggcaccgccgaccgcttggccggctacgccggcctcgcccccgtcccccgcgactccggacgcgtcagcggcaacctccaccgcccgcgccgctaccaccgcggcctgctccgcgccttctacctctccgccttcgccagtctccggagctgccccgcctcgaaacgcttctacgaacgcaagcgggccgagggcaaggggcacaagcaggcgctgctggcgctcgcccgacgccgggccaacgtcctgtgggccatgatccgcgacggagcgtgctaccaagccacaccaccagtcacggcagctgcttgacaacgtcattgggaa

SEQ ID NO: 2377 - DNA, 1612 bp, unidentified
  source 1..1612: mol_type = unassigned DNA; note = element_35b4ea0
  misc_feature 1..2: note = core
  misc_feature 3..279: note = LE
  misc_feature 280..1491: note = CDS
  misc_feature 1492..1612: note = RE
  misc_feature 14..299: note = bridgeRNA
ctactacaatatatttgtggttaataatccttaccgccagtaaggaattatccatcttgttgcttaaactgtataatgatggagcaatcggtacatcgtctacctttcttggacctcgcgtccgttaaaaagactgataaccagctcctcattcgcagcgttcgttttatgcaggttgaatcgccacaggtgcattcgtgtcacaccacagtagattgaataggcaatgagtaaaactggtacttatccattgcaataatcttaaggagtgacaaaattatgagcgcagtaggtatcgatgtttctaaaggtaaaagcatggttgcaatcatgagaccatttggtgaaattgtttctacaccttttgaaatcaagcacacaaccagtgatatcaactcacttattgatctgatcaattctattgaaggtgaatctcggattgtaatggagcatacagggcgttactatgaagtccttgcacatcagttctccaaggccaatctcttcgtcagcgccgtcaatcccaaactgatcaaggattttgataacgactccctgcgtaaagtaaaatccgataaggcggatgccgttaagattgcacgctatgcgcttgacaagtggcaaaatctgaaacagtatagtgttatggatgaattacgcaatcagcttaaaatcatgaatcgtcagtttggcttctacatgaagcacaggacggctatgaagaataatctcatcggcatccttgatcagacctatcctggcgttaatacttactttgacagccccgcgcgtagtgacggcagccagaaatgggttgattttgcatccacttactggcatgttgactgtgttcgtaagatgtctcttaatgcctttattgaccactaccagaagtggtgcaaaagaaagaagtacaacttcagtcaggcaaaaactgaggaaatctacggaaaagcgaaggagcttgttcctgtacttccaaaggatgaaataacaaaacttatcatcaggcaggcgattgaccaactcaacaacgcctctgcaaccgtcgagaaacttcgcacgctcatgaatgatactgcatctaagctcccggaataccctgtcgtcatggatatgaaaggtgttgggccagcgcccggtccacaactcatggctgaaatcggtgatgtcacacgtttcactcacaagggagctatcactgcatttgccggcgtaaatcccggcgtaaatgaatcaggttcctatgcacaaaagagcgttcctgcctcaaagcgtggatctgcagctctacgaagaaccctgtttcaaataatggatgctcttatcaagaatatgccgcaagatgatccggtatatcagttcctggataagaaacgagctcagggtaaaccctactatgtctacatgacagcaggtgccaacaagtttctacgaatctactatggacgagtgaaagaatatcttttatctcttccggactcagaatagcttcataaacatcctttcagaccaacacgagtatggtggtggtcttgttttgatacctaattttcaacctgtataaaattatcaatgttcttcattttcgccttgactttttatttgcagg

SEQ ID NO: 2378 - DNA, 1365 bp, unidentified
  source 1..1365: mol_type = unassigned DNA; note = element_35bf270
  misc_feature 1: note = core
  misc_feature 2..65: note = LE
  misc_feature 66..1133: note = CDS
  misc_feature 1134..1365: note = RE
  misc_feature 1135..1356: note = bridgeRNA
taatgggatggtccgcccccgttctcaccacgatgtggtgatgatcaacggacaggaggattcctatgcagatttcaacgatcggcattgacatcggcaagaacagcgttcatttcgtcggctttgatgcgcgcggtgggattgtcgttcggcgacggtgctcccgcacgcaactgattcgagcgccagcgaatgtgccgccctgtctcgtgggaatggaggcgtgctgtggcgcgcaccacctcgggcacattctagtggcgcagggacacgacgtacggctgattccgccgccatacgtgaagccgttcgtcaagtcgcacaagaatgatctgctagacgccgaagcgattggcgaggccgtccagcggccgaccatgcggttcgtgccactcaagaccatggagcaactggatctacaagcgatccaccggctccgcacgcgtctggtcgcgcggcgcactgcggtgatcaaccaaatgcgggggtttctactcgagcgcggtgtcacgtttcctctcgggcgagaggcgctcgtcaagcggttccccgaggtgctcgacaatcccgcgttgggcctctcggtccgcttctgtcggctgctgcagcaactccgcgacgagtggcggctcatggacgacgacattgaaaacgtcgatcaagaaatcctcagcctcgcgcgtgacgacgaggcctgcgatcggctcatgcaagtgcctggcatcggcccgctcacggcgacggccctcgtcgccgccgtcggcaacggcgcggcgtttgcgaaggggcgcgatctcgcggcgtggctcgggttggtgccgcggcaacattccacgggcggcaagaccgtgcttcggggcactagtaaacgtggcaatgcctacctccggtgcctcttcattcatggcgcacgatccgtctgccgtcatcatcaccagaagctgcaccgcctgggacgatggctcacgagtctcgaggccagggcccatccgaacgtggtcgcgtcgcgctcgcgaacaaattggtgcgaacggcctgggctgtcttgcagcgaaacgcccactacgacgggaggctcctcgcgaatgcgtgacgcgtggtcgcttcgggcggccgcgcactggcgaccgtgatgcacaccgacgtctgcgagccacatcaccgatgatcgaacagtccaccggcgggtccgaaacctggtccgcacaacggtcgatcgtacgaccggcgatctaatgaggacggacccgcgcggctttccatcgtggcccgaagcgatcaccgcttcactcagaggccgaatacattagcgcggacggttcctcaccggtgatggcagcttgcggatcaggggcggaccataca

SEQ ID NO: 2379 - DNA, 1387 bp, unidentified
  source 1..1387: mol_type = unassigned DNA; note = element_35c0be4
  misc_feature 1..2: note = core
  misc_feature 3..88: note = LE
  misc_feature 89..1108: note = CDS
  misc_feature 1109..1387: note = RE
  misc_feature 1160..1380: note = bridgeRNA
ataatgagatggacgctccagattttacggtatcagtgtaccagactggatcgttgtataacgtcctgacaaatgaggagcgtccatcatgcaagtatcaactctcggtattgacctggcaaaaagtgttttccagcttcacggcgttgatcacaacgggaataccgttttgcgtaagcgtctgtcacgtgcccggtttgttcagtttgttatcaacctgccgccctgccttatcgggatggaggcgtgttcatccagccatcacttcgggcggctgttcagggagcacggtcatcaggtgaaactgattccacctcagtatgtaaaaccctacgtcaaaacgaacaagacagatgcggcagatgcagaagccatctgcgaggctgtcacccggccaaacatgcgtttcgttgaaataaaaacggtagagcagcaggcggtactgacactgcatatcgaacggagtctgcttatccgggagcgaaccgccgtgattaacagcctgcgggcgatgctggctgaatttgggtttgtcattccgggggggcgtcggcaggttcatcagtgcgcgtccgatatcctgggtgatgatgaaaacgggctttcacctctggtccggtccagcgccgcccgccagctggcgcatatccgggagctggacaaccagctgtcgcaggtggaaaaagagctcacggcatggttcagaagccgcccggattgtcagcgtgtggcgcaggtgccgggcgtgggtctgctgacagccacttatgttgtggcctctgtcggaaacgtacagcagttcggctcggcaaaacagtttgccgcctgcgtggggctgactccccgggagcattccagcggaggtcaccagaaatggggcacatcagcaaacggggggacagctattttcgcttccttctggttcacggggcgagagcggtggcagcctggattcagcgaaccggtcagggaacccccatggctgctggcgctgatgcagcgcaaacctcacaacgtggcagtcaccgcacaggccaataaaaccacccggatactgtgggcgatgctgaggcgcggaacagaataccaccccgcaacgccagcctgatacaggctcaggctgacgctacgggttacagtaaacagagtcacacgttaccggaagtgcgggtgtaatcagtaagatggcaaaacaggtaagaccgcaggtgagagaagccgtgacggcacaggggcggaaaagcccgtagtggatgtctggtactcacctggcggctactcatcatggtcaggggaaaatccctggaataaagaccgaatatatggctgcagctaccactttgtcatttttactgaaaaaacatttgcgatccgggagcgtccatat

SEQ ID NO: 2380 - DNA, 1343 bp, unidentified
  source 1..1343: mol_type = unassigned DNA; note = element_35d3ff5
  misc_feature 1..2: note = core
  misc_feature 3..81: note = LE
  misc_feature 82..1107: note = CDS
  misc_feature 1108..1343: note = RE
  misc_feature 1114..1329: note = bridgeRNA
gatggtgtggatggctcctacacctcggcgtttgatgcgccatagtgcagttgtcacgactgccagtataggagccacgatatgcagattaccacgattgggattgatttagcgaagacggtttttcaggtgcatggtgtttacgaggacggatcggtggcgttcaacaagccgctgcgccggtctcagatgctcgactttttcgcaaggcttgatccttgcctgatcggcattgaagcgtgcggatcgagccactactgggcgcgcgagttgacggcacttggccatgaagtgaagctgatgccggccaactacgtcaaagcctacgtgaagcgcggcaagtctgatgctgccgatgcagcggcgatctgcgaggcggtcacgcggccaaccatgcggttcgtcgccatcaagtccgaagatcagcaggccattttgagcctgcaccgggtgcgtcaatccttgatcaaccagcgcacacaattggcgaacatgatccgtggtcttcttgcagagttcggcattgttcttccaagaggcgttaatcatctacgtcgcttcgcgtttgaggtgcaggctggtgaagtgctggatatgcctgagacagccgaggatgttattgctctgctttgcgaccaattgattgatctggaccggcgtatctccagcctggacaagaggattgctactgaggctagaaaggacgagcgcattgaactcttgcaaactattccaggcattggacccattacggcttctgccatcgttgcaacaattgacaccggacgacaattccgcagcgcccgcgactttgctgcctggatcggtttgacgcctttaaacaagtcaagtggcggcaaggaagtgctgggacgcatcagccgcatgggggatcgatacatcagacgccttcttgtcaatggcatggcaagccgtgttcgctatgcaaagcaaaagccgcatcgtgcggacccttggctgctcaatctgcttgagcgcaaaccggcaaagctcgctgccgttgccatggcgaacaagaccgcgcgcatcgtctgggcggtactgacgaatggcgagccgtacagggaggttgatgctgcccgataagaaacaaccaatttgcaaggacgcatgatgtgatgaggatccgggccagccggagagccaggacacaccgggaatgtctgaggacacaaatagtccgctaagcggaatgggaccgggctcgcggaaaccatcaaggccagcagcaaaatctgcgcacaaaggccggacacaggactgtatctgacctcggaaattcatcacaaaaagcacttgcaatcacggagccatccacacag

SEQ ID NO: 2381 - DNA, 1541 bp, unidentified
  source 1..1541: mol_type = unassigned DNA; note = element_35d4384
  misc_feature 1..2: note = core
  misc_feature 3..240: note = LE
  misc_feature 241..1422: note = CDS
  misc_feature 1423..1541: note = RE
  misc_feature 11..216: note = bridgeRNA
cttgtattatagagtagtagtttttatagcccctctccaagggctgtgctacactgcaagggatgttgtggattggtttaccctcctaccgcaaagacggttcatgaaaggctccaaccacagccctttgcagtattgttaatcagttagataccgccagacggtttatgtggaacaaggttacaaggcaaagtgttctgtggataacagcatcaccatttttcctctggaggtatcatcatgatctgtgttggaatcgacgtagcaaaggacaagcacgattgcttcatcctcagttcggaaggcgaggtgctggcggatgtgttcacgatccccaataaccgtgacggcttcgagaccctgttgcagcggatccgctcctgtaccaggcccacagacaaaattaaagtagggcttgaggctaccggacattacagctacaacatcctcgggtttcttcttgacagcggcctggcaacctacgtcattaaccctctgcacaccaatctctaccggaaaagcctcagcctgcgaaagaccaagaccgaccgcattgatgcgcagactattgcggctatgctcatgtctgatgtggacctcaagtcctacacagacacagcataccacaacgaggaactaaagtcactcacaagataccgctttgataaggttcggcagagagccaagctcaagcagtccgtttcccgattggtaaatattctgttccccgagctggaaacgctcgttcctacacttcacatggcgtctgtctatgcgctcctctgcgagcttcccggtgctcagcagattgccgtcgctcacctgacccatctcaaaaccttgctggatagcgcatccaaaggacgttatgacagagataaagcgatggaaattcgcgatgccgcacgccgttccattggttcgaagatgcctgccaagtcgctggagctgcggcataccattcagctcatctgggagttggacaaggagattcacgagatagaagcggctattgaggacatcatgatctccattcaatcacccattaccacgattcccggcattggctaccgtatgggggcaatgatcctggccgaggtcggcgacttcgccaacttcgattcgccggataagatacttgcctatgctggcctgtctccgtctacttacgaatccgggaaactcaaagcgacaggagtctatgcccacatggagaagcgcggctcgcgctatcttcgctacgccatctttaacgccaccaagtacgtctgtcactgggacccgacctttgcggcatatctggccaagaagagggccgagggtaagcattacaacgttgccgtctctcacgctgccaagaagctcgtaagggtaatttacgctttacagaagttcgggcaaccctaccgaacggcagcctaatccgtttcctttccatacgactatgagcgccgctcgacgctctggcttgtcatgccgtctttgcctcgcttcccaatcctcaattccctcaatccggggcttgacttttaatagttagt

SEQ ID NO: 2382 - DNA, 1214 bp, unidentified
  source 1..1214: mol_type = unassigned DNA; note = element_35d48d0
  misc_feature 1: note = core
  misc_feature 2..211: note = LE
  misc_feature 212..1183: note = CDS
  misc_feature 1184..1214: note = RE
  misc_feature 34..198: note = bridgeRNA
tcttaagtttacaatctcttatatttaataaataatagaaagaacaaaagagaggaataagattaagatatacgtggaagcatagacttcgtcaacattgataatcccctctcttttctacctacatttcgaacagttctgtgagacctagatctcgattttaagttgtagaaagtaccgtagattttgtttcttcataaaacattttcttatgaataaagatactaattattatggaatagacatttcaacagatgtctttgatgtgatggatcaaaaaggggttcattatcaatttaaaaactctcaaaaaggatttgcagaactccttaaaattcttactaaaaagagtcattgtgtaatggaagctacgggctattatcattaccaattagcctattttttattagaaaatcatatatgtgtttcgttagaaaatccactgtctgtaaaacgatttatacagatgaagctttcaaaaataaaaaccgataagagtgatgcaaaaatgatttgtgagtatgctcaaaatgtagaattaaaactttggaaaggcaattcaaaagaccaactagaatgtcttcaaattatccgtatgctgagtgtttatagcaaacagagtacagctcttaaaaacaaaatacacggagagaagactttaggaaacactaaaacatgtgttgttaaatctataaataggagcctaaaatcaattaaaaaagaggttgatttattagaaaaaaaattacaagaaatcgtaaaaaaaacaaatcaagatttgctaactcgtctagagagtattcctggattgggaagaaaaacttctttaatgttaatagtcttgacagatggttttgagcgttttgagactgcgaatgctttgtgttcttattcgggtttaactccaacaattaggcaatctggaagtagtataaagggcagacccagaattagtaaaatgggaaacccaaaattgagaaatttattatttatgtgcagctttaccgcttgtaaatacagcaaggcttgtaaagctatatacgacagaattgtggcaaaaggaaaaagtaaaaaactagcattaattgcagtatgtaataaacttttaaaacaggcctttgctattgctaaatcaggattaatttatgatgaaacttatagaagtactttagtgagaaattaatgaaaaatcatttgttttttagcacagttct

SEQ ID NO: 2383 - DNA, 1301 bp, unidentified
  source 1..1301: mol_type = unassigned DNA; note = element_35dc75e
  misc_feature 1: note = core
  misc_feature 2..270: note = LE
  misc_feature 271..1263: note = CDS
  misc_feature 1264..1301: note = RE
  misc_feature 69..255: note = bridgeRNA
cctttggactttcaaaggagatattcttaaatatattactactattaataatggggggtgcaggggggagtgaataacatcctttttgtgaataactttaaaaagcagcagggtgaactatcggcatgactagttcatttgcgtgaactttagtttgtattagtccctgctactttttaggttgctgaggtccatctagaatgatcgcctttgttgcatcaaaggtctttgactaagcaaccattttttaaaaaaccttaaaataaaagtatggaaaaatttgcgttttacattggagtggatgtatcaaggaacaccctcgatgtccattgtgcagaattaaacaagcacattactatacccaacagaaccgaggggttccgtatgttccattgcttgtgcagggaaaatggtattgacctgaaaaatgcttttgtagcattggaatacaccggaggctatgaatacaggttcattcaacatttacacgacaagcaaatatcttttgcgcgtatcccgggtatagccattaagcactccctgggtattaccaggggtaaaagtgataagatagacgctaagcgcattgccacttatgcagaggaaaagcgcaggcagctttcccctgaaaagcccgtggataaaaccattatagcgattaaggagctactgggattgcgtaaaaggctggtaagagaaagtgcagggtataaggcaaccattaaagaacgcaaacacatgtatggtgtaggcaataaagattttatagttgctgtactactcaaaaaagaagccggtaacaagaggctcattgaaaaaactgaacaacaaattactttgcttgtaaaggagaacccggctatccatcatagctttaaactactgaccagcattaagggcataggcaaagtaaatgcctggatgaccattacatacactgaaaattttaccagttttcctaatgcccgcagctacgcggtttatgtgggagttattccatttgattatagtagtggaaccagtataaagggaagaaaaagggtaagccatttagctaataaagagctcaaacaggagttgagccaggcagcaagatcagctatccagtgggatacggaaatgcggctttatgcggagaaaaaattagaaaataagcattatggtatcgtagtcaacaatataagatttaagctcattttacggatgttcgctgttatcaaacgtggggaaaaatatgtggacaagtatgcaaatgttgcctgatttgaaaataaatttggtcgtttatatatcctagaata

SEQ ID NO: 2384 - DNA, 1482 bp, unidentified
  source 1..1482: mol_type = unassigned DNA; note = element_35eb678
  misc_feature 1..2: note = core
  misc_feature 3..96: note = LE
  misc_feature 97..1179: note = CDS
  misc_feature 1180..1482: note = RE
  misc_feature 1188..1454: note = bridgeRNA
agacggtatgggggctggggcctcactcacatgtgaacgtgggttgcggtcgggaattgggtcctggccgtagagccacagatgtgggaggccccagtgaaggttcagcgtacgagcgtcgggttggatgtgcacgcacgatcggtggttgcgtgtgggctcgatggggataccgggaaggtgttcgagcgccggttgatccccgaccgggacgagatcttggattgggttcgctcgctgccgggtccggtggcagtgacctatgaggcggggccgacgggattctggttggctcgattcttgctggcggcgggggtcgtttgtgttgtggcggcgccgtcgaagctaatccgtccagccggagaccgggtcaaaaccgatgcccgcgatgccgcgcatctggcgcggttgttgcatctgggccaggttgtggcggtggcgatcccgacggtcgaacaggaggccgcgcgggatctggtgcgggcccgtgaggatgtccgtggggatttgatgacggctcggcaccggctgtcgaaactgctgttgcgccagggaatcgtgtactgcggtgggcgagcctggatacgcgaacatgagcggtggctgcgtcggcagcgcttcgacaacgccgccctgcagctggcctacgacaccgctttcgacaccatgctggccaccgtcgaccgccgagagcgccttgatgcggcgatcgccgagatggccactgattcgcaattcactccggtggtgacacggctgggatgtctgcgcggggtgtccacgctgaccgcgttcgggcttgccgtcgagatcggcgactggtctcggctgaccggccgcagcatcggcgcttacctcgggctggtgcccagcgagtactcctcgggggcgacgcgaacccagggcggagttaccaaaactggcaatggtcacgcccgccggctgctggtcgaagccgcctggcaccaccgagccccttatcggcccggcgctgagatgcggcggcgctgggatgccgcatccccagccgcccgagcccgcggccaggccggtaaccggcgcctacatgaacgctggatgcattttgaccagcgcaagaaacgctccgtggtcgccaacgccgcaatcgcacgtgagctggccggatggtgctggtcgctggccgtcctcgacgactgagcactctacaaacgcccagatgagtcaccgggtgtcggcaagcgtcttggagtgacccgcgatgccgctatgagtaatcgcgttgtcgcacaaccgatcacgctcgatttctagacaagcggaccgctccgactcgaaagtcccgtcctgcggtagccaacccgcgtatatcagactgacacgcgtcgatacgacacgctcgacacccacaaatggcctatctggtcaaacgaagcggcggccacaacaacgggttgcggccgccgcttccccctgcccacttgacaagacgcctcccatatc

SEQ ID NO: 2385 - DNA, 1220 bp, unidentified
  source 1..1220: mol_type = unassigned DNA; note = element_35ebc83
  misc_feature 1..3: note = core
  misc_feature 4..222: note = LE
  misc_feature 223..1185: note = CDS
  misc_feature 1186..1220: note = RE
  misc_feature 38..199: note = bridgeRNA
gttgtatatttaaattatttttattatctttgcactcgatttgacatctaagtatggaacaaggccgatttgtttgtggtgattgtacgccgtgagaaacgttccgcccccatacttatacatctaaaaactggatagttcattgggctttagaccccgcattcgcaacgatagtgttcagatgtaccgatgtttaatctaagcaataaatcaaataacattatgacctacattggcattgacgttagcaaggattcgttcgtagcagcttatcctgcaaagagtggttacaccaccaagaccttcccaaacaccactagtggtgtgcgccgtttcattcaaacgctcccggttgagagccattgtgtgatggaagctaccggcaattacagcatgcttctgctctatctgcttcaggaaactaacatccccgttagcatggagaacccgcagaagattaaaaacttctctcgtgctatgctcagcgtcactaagacggatgagattgatgccaaactgattgccatgtatggcgagaaaatggagcctgcgccttacaagattccttcggagagtatcattatgctaaagcagaaacgcactgtcctaaggcaactaaagaagcaattaacaatgatgatcaatctgcagcactccttgtctgttctccccaaacaagatccgacagccaaagtcgttaccgagcaaactatcaaacatctgcgcaagcaaatctccaagatggaagaggagattaccaacctctccaataaagagtttaaacgccagatggacttgctcacatccattaaaggcattggtgagaacatcgcttctgcactcataatggctaccggcggctttacgtactttaacagcgctaaacaaatctctcgcttcttgggactctgtcctacctaccagcaatcaggtacgtcagtccatgtcaaaggtcacattaatcgtaatggtgatacacatttgcgcagtcaactatatgttattgcatttgcttctataagattcaattctgcatgcagagaaacctacgaacgcttgcgtgctagaggcaaatccggcaaggtcgccattgttgcggttgccaacaaacttattcggcaagcatttgctgttgttaccaacaatcgaccttatatagatggatatgtatcaacattaccgtaaaaaatcatttttttgtcacttttttaatatagttc

SEQ ID NO: 2386 - DNA, 1382 bp, unidentified
  source 1..1382: mol_type = unassigned DNA; note = element_35ffb6b
  misc_feature 1: note = core
  misc_feature 2..88: note = LE
  misc_feature 89..1111: note = CDS
  misc_feature 1112..1382: note = RE
  misc_feature 1152..1374: note = bridgeRNA
caatgggatggacgcccccacccgtagacggcatcgaagtgccacagtggatgtgtcaacaaccactcgatcggaaggagcgtccgccatggagattacgacgatcggccttgatctggccaagaacgttttccaggttcacggggtcaacgaacgcgggaaggccgtgctgcgcaagcagctgaagcgcgaccaggttgcgcccttctttgcgaacctgccgccctgcctcgtcggcatcgaggcctgcgccagctctcatcactgggcgcgcaagttgcaggcgttgggccacacggtccggctgatggcaccccaattcgtaaagccgtacgtcaagagcaacaagaacgatgccgccgacgcagaggcgatctgcgaagcggtcagccggccgtcaatgcgcttcgtgccgatcaagaatgtcgagcagcagtcggtgctctcgctacaccgcgtccgccagggtttcgtgagggcacgcacggcgcaagccaaccaaattcgcggcctccttggcgagtacggcctggtggtgccacagggcatcgcctacatcgcccagcgcgtaccaccgctcatcgaagatgccgagagcgagctgcctggcaccttccgtctgctcatccagcgcttgctcgaccacctcaaggtgctgcaggagcaagttgaccagattgaagtgcagatcaaggcatggcaccgtgccagcgaggccagccagcgtcttgagaaggtgccgggcatcggaccgctgactgccagcgccctggtcgccagcattggcgacgcgaagaacttcgacaacggccgtcagttcgctgcatggctgggcgtcgtcccgcgacagcactccagtggcggcaagccgacgctgctggggatgagcaagcgcggagatgcgtacctgcgcacgatgctgattcacggtgctcgctcagtcatctacagagcgacccagaaggccgatccggacagctggttggtcaagctcacgacgcgccgaaacaagaacgttgcagcggtcgcgatggcgaacaagaccgcgaggaccgtctgggcgctgttggcgcacgggcgagagttcaaggctggctacgccgcggcgtagccagccatctacgacatctacaggaacaggagaacccaccgccgattgctcaggcaaccagcaagttgatggcacgacaggtcagaccgtggttggcacagcccgcgccggacgaggcacttcgagtgcgtgtatgcgattgggcgccgaccggcagaacccatcagggacagcgagctcgtctcgcattgaaagtccgaatgtacgggtgcaatctcttcctcagtgcggcagtgagctggaggcttggcaaaccgggggcgtccatgta

SEQ ID NO: 2387 - DNA, 1329 bp, unidentified
  source 1..1329: mol_type = unassigned DNA; note = element_3600832
  misc_feature 1..3: note = core
  misc_feature 4..69: note = LE
  misc_feature 70..1104: note = CDS
  misc_feature 1105..1329: note = RE
  misc_feature 1082..1314: note = bridgeRNA
agatgtatggactccctctcctcggagagctacgtttacgttgaccaaaatctaaccagagtccatacaatgaataaatataatattatcgccattgatctggcaaaaaatgtcttccaagtttgcaaagttagcccacaaggaaaggttttatataatcgggagaaaagtcgggcaaagctaaaacagcttttaaccaaagaaaagctttctttagtgtccatggaggcgtgctccagtgcccactattgggcgagatatgcaaaagaagcgggtcaccaggtcaaagtcattaatgctaggtcggtgaaagggtttcaaacaagacaaaaaaccgacagaaacgatgctcttgcgattactactgcttcatctctcgatcatatccatagcatacgaattcaatcagtagatgaacaagctatgcaatccatggaacgggccagaaatttagcgctaactaatcagattgcccaaagtaatcagatccgtggattgttacttgagtttggaattattcttccacaagggctagcggtactaagaaaagaaattccgtatgttcttgaggacgctgaaaatggtttacctgataaattccgagcggcgcttttgcgtttatgggagcatttactcattcagattgaccatgttgatgatcttacaaaacaattagaaaaagcgattaaagctaatccgctatgtcagaagctaatgaagcttgaaggtgttgggcctataggggcattgggattggccttacgactaggtaaaggtgagaatttttcaaacggaagaaatgcttcggcaagtattcggctaacaccaaagcagcactcctctggcggtaaagagcgaatcgggcatatttcaaaacgtagtgcagacaagcgactccgctcaactctatttcaaggagcgctttcagttattacccaagtagtaaatcgtctaccaagaaccaacaaagatcaatggctgctggcattgatagagagacgtgggaagaaaatagctgcaatagcattagcgaataaaacggtacgaacagcctatgcaatcttaaaaaatgacttggtgtatcagccagaaaaactggcttgatacactcagcataatcaacagagagcgataataaacaggtaagaccgaccaatagaagctagttgggttcttgggcacaaaatgatgatgccgatcctaagacttcgcctattggtgcgactacattttagggcgaggtagctcctcaataaagcccgtatataagcgcgcatctcaactgctttatttaaaattttttgttgattacaactgggagtccatata

SEQ ID NO: 2388 - DNA, 1275 bp, unidentified
  source 1..1275: mol_type = unassigned DNA; note = element_3609a58
  misc_feature 1..2: note = core
  misc_feature 3..233: note = LE
  misc_feature 234..1265: note = CDS
  misc_feature 1266..1275: note = RE
  misc_feature 25..245: note = bridgeRNA
ctgacttgtttagatgcgcacagcacccggaccgcgcgggccgtagggtgcgaggtcggtgaccggttggctcccacgctccttgcccacccgccgggtgtggctctctcatagcgtgccggccggtcaccgaccgccgccggcgtggctcgatagaggcgtgagacgttccccgaaactcaggttgcccgccgcggtgctccattcgtccgcgcagcttgaggagacacggggtgatcacgatcggcatcgatcttcacaaggcctcgcatacggccgtggcgctcgacccgcaaggactcgtcctgggcgagttgcgcgctgccgcgactcgaacgaccacagagcggctgctgcgctgggcggagcggtggccggaccggatctgggccgtcgagggcgccagcggtctcggacgcctcctcgcccaggggctaactgcacgcgaccagaccgtgctcgacgtgccggcgacgcttgctgcccgcgcccgcctgctcgatcgcggtcacgggcgcaagaccgatgccatcgacgccgccagcgtcgccagagtggcccagagccaatcggacctgcgccgcgttggccccgaggaccacaccgccgtgctgcggctcctgtctgaccgccgcgacgagctgaccggggagcggcgtcgagtggtcaaccggctccaccgtctgctgcgtgacctgcgtcccggtggtgcgccgacggagctctcaaccgtggcggccgcgagactcctgggcggagtccggcccgccaccgcagtcgacctcgagcgcaaggccatggcgcgtgccctcgtcgctgacctgcggcggatcgaccgggccctcgtggagaaccgggctcgcgcgggtgccgtcgccgcgaacggcacgacgcttaggtcgatctttgggatcagcgaggtgctcgccgcgaagatcctcggccacgtcggcgacgtcggtcgcttcgcctctgcggattgcttcgccagctactccggcacggcgccgatcgaggtgtccagcggcgaggtcacccggcaccgcctgtctcggaatggcaatcggtcgctcaacaacgcgctccacctcgcggcgcgggtccagaccatgcatccggggcccggcagagaccactacgagcgcaaactcgccgagcacaagtcgtcgcgcgaggctctccggagtctcaagcgccaactggcgaaggtcgtctattgccgtctcgtagccgatcaggcccatcgcctggccctcgcctcttgacatagaggcg

SEQ ID NO: 2389 - DNA, 1300 bp, unidentified
  source 1..1300: mol_type = unassigned DNA; note = element_361bf55
  misc_feature 1: note = core
  misc_feature 2..269: note = LE
  misc_feature 270..1262: note = CDS
  misc_feature 1263..1300: note = RE
  misc_feature 55..255: note = bridgeRNA
cctttggacctgtattaagatatttataaataaatatactattattacaatggggggtctggggggtgttaataactccaaaaatgtgcataactttgaaagtaacagcagggtgaacttacccggcatctagtttaaccatgacctattggcgtattagtccctgctgctactttcgatgctcaaggtccaactagaattatcctttgaaccaccaaaggtttttgactagagcatctttttgtttaacttctaaacaaagtaaaggtatgaaaaaatggaagtacaccattggcattgatgtatcaaaagatacattggacttgcattgctcagagatcaatgagcacattcaaattgtaaatggttcgcaggggtttaaaaacttcatgaaatggtgtaaaatacaccaaattgaactcgctgaaagctttctggtaatggaatttacaggaggatacgagtacaagtttattcaattttgcgaaaccaaaaaattgccatatgccaggatatcaggcttagccataaaaaggtcaatgggcattacgcggggaaaatcagaccaggtagatgctgcacgaattgcccaatacggagaggaaaagcataaagtcattcagcctgcaaagcctttaaatatgggcatcatacacctgaaagagttacttgcgttccggaaaaggatagtgcgcgaacagtctggatataaaaccactttaaatgagcgcatgcatatgtaccctgaattgaaaaaggatattatttgcaaaacactggaaaccaaaataaaggaaaatgaaaaggtaatttccaaattggatgctacattattggaattggcaagtaaagatgaaactataaaagcaaactatacccttctgaccagcataaggggaattggcatggtaaacgcacttatgaccattgcttacacagagaatttcataagtttttcgaatccacgaagctatgcagtatatgtaggtgttgttccatttgaacacagttccggcacaagcataaaaggtagaaaaaaggtaagctccatttcgaacaaagagcttaaacaggagctaaaccaagctgccaggagtgccatacaatgggaccctgaaatgcgcagctatgcagaaagaaaaatgcctgccaagtgttataacattgttttgaataacgtaaaattcaagctaattcttcgtatgttcgctgtagtgaaacgacaggagaaatatgtggataattataaaaaagcagcataaatttaaaataaatttggtggtttggatatcctagaata

SEQ ID NO: 2390 - DNA, 1568 bp, unidentified
  source 1..1568: mol_type = unassigned DNA; note = element_3621146
  misc_feature 1..2: note = core
  misc_feature 3..248: note = LE
  misc_feature 249..1424: note = CDS
  misc_feature 1425..1568: note = RE
  misc_feature 3..227: note = bridgeRNA
ctcgtattataaagtagtagttatttatgtccctctccaaggacatttgctatactattttaagatactgtggattagtttaatcattctaccacttgatggttatagaaaggctctaaccacagtctctttgtaaatttgttaatcagttagataccgcatgacggtttatttagaacgaggttacaatcacagagagaacccgtggttctaaaacagtatcaaatatatttaaaggagtattacttatgatatacgtgggaattgatgttgccaaggataaccatgactactttattactaactcagatggaaaagtactattcgaagtatttactattccaaacaataaagaaggatttgacaatctttatcaaagaattgaatctgtcacagatgacttaactaaagtgaaagtagggctcgaagctactggacactacagctataatattctgggatttctcctcgataaaggtctgctcacctttgttatcaatccgttacatactaatctttacagaaaaagtctaagccttagaaagacgaaaacggataaagttgatgcccacaccattgctatgatgttaatgtctgatgtaaaccttaagtcctactcaaacgcctcttatcacaatgaagaattgaagttactaacccgttatcgttttgacaaagttaaagagcgtgcaaaacttaaaacctctatttcacgtctggtaaatatacttttcccagaactcgaaaaacttttaccttcacttcatatggtttctgtttataacctcttaattcaatatccgggagcttatctgatcgctaatgttcatttgaccaaacttactaatctgctagagaaatcttccaaaggtagatatagtaagaatactgctgtatcttttcgagaagctgcaaaaaactctattggttctattatgcctgctaaatctctagaattaaaacatactattaaattaattcatgaacttaattctgaaattgatgaaatagaatctcaaattaaaaccatcatggacaaaattaactcaccaatcctaagtattcctggcatcaactatcgtatgggtgctatgattattgctgaaatcggtgatttcagcagatttaattcttctgataaaatacttgcttatgctggattctcgccttctatatatcaatcaggacaattagattcttcacattcccacatggaaaaacgaggttctaaatacctacggtatgcactttataatgctacaaaatatgtctgccactgggattctgttttcgctatttatcttgaaaagaaacgctcagaaggcaaacattataatgttgccatatcacatgctgtaaaaaaacttgtaagggtaatctatcacttagaaaagactaagcagctctatatcaaaacagcttaatactttactctaaatactcattttttgagcacctgtatagatgctctacttgccatgcagttttcaatgtactgatttacttaaaatgcatttttgcattttattcaaaaatatcaatttaacacttgacttttaatagttagt

SEQ ID NO: 2391 - DNA, 1203 bp, unidentified
  source 1..1203: mol_type = unassigned DNA; note = element_3625240
  misc_feature 1..2: note = core
  misc_feature 3..222: note = LE
  misc_feature 223..1200: note = CDS
  misc_feature 1201..1203: note = RE
  misc_feature 40..197: note = bridgeRNA
tcctttagatttgttttttgaaatttgattagatttatgattgagaaaggaagcaaaagtaaactattcgttcgtccgagtttgtggctcatatttcgattaagactttggcttccttttcatcaaaagactcgaatagaaatttgggttagagacccgttattaaggagttgagctaatgatgaattctcaaatcaatttttgaatcgtaaaagcaaagttatgaaaaacattattattggcattgacattagcagtaagactttagacatctgtattaaagaggagatgaaattaaaatatcttacaatagaaaacaagacaacgtttatcaaacgcttttttaaaagttataatacatataatgtaattgttgctatggagaataccggcaggtataattggaatttgtttgaagttcttgaaaaattaagctttaaagtttatgtaatatcgcctttacatcttaaaaaaagcattggtcttacaagaggaaaaaacgataaaatagatgctctgcgtatctgcagttttattgaaaaaaatcatcaggaaatgccaatgtggaaaccatgttctgaatcaataaaaaaaataaaaatattacttactgaaagggcttcaaggataaaaattaaaaaacaattaaaagctcagcagcatgattacaaactaatgaagagtgtaggtttagataagcaattattaagcttaaacatgaaaatgattaatagtattgaaaatcaaattaagattattgaaggcaatatagaagatattatatccagcgatcagaaacttaagcagcagcataaattaatgaaatctgtccctggagtaggtaaagttctatcatggaccttattatcaaaaacagaaggttttacaactataactgaccctagaaaaatggcatgttacagcggagttgccccatttgattttcaatcaggtacatctgtaaaaagaagacctgctgtatcaatgctagccgacaaaggtataaaagctattttgcatctggccgcaatgagtgccattagattagataatgatttaagaaaatattacatgagaaaagttgaagaaggaaagaataaaatgagtgttttaaacgctgtgagaaacaaaataatccatcgggtttttgcagtaataaaaaaccaaaccctttatcaaaaagatttggttttatcatagaaa

SEQ ID NO: 2392 - DNA, 1381 bp, unidentified
  source 1..1381: mol_type = unassigned DNA; note = element_362e136
  misc_feature 1..2: note = core
  misc_feature 3..78: note = LE
  misc_feature 79..1119: note = CDS
  misc_feature 1120..1381: note = RE
  misc_feature 1090..1368: note = bridgeRNA
tgatggagtggatgcccctccccgcagctccaatctgctacggttggccatcacagaaattctatatcggaggtcactatgaataacgtcacaattatcggggtcgatctggccaaattggtatttcaggtacatggggctggatccgacggttcagttatctatcgcaagaaattgtctcggctacagttttcaaagttcatggcagatcaacccgcttgcgttgtggcaatggaggcatgtggtagcgcgtattattgggcgcgaatgatggaagattttggccatgaagttaggctggttccgcccatctatgtcaaacctttcgtgaagcgtcagaagaacgacgcggccgacgccgaagccatcgcagaggcggcaacacgttccaatatgcgatttgtgccgatcaagaccgttcaacaacagtctcgaagtattatgttccgcacacgagagatgatgatcgggcaacgaacacagaccgttaacgctttgagatcacatttggctgagtttggtgttgtcgttccgaaaggcgttcacaatctcaagcgcctcgctgcacatattgacgatgctaacgacggtctccctgcggaggttgtgcagatcggatcggtttacctcgaacagattgcgcagcacacaaaccggataaagacgttggagaaatcaatcaaagagctgggtgaaaccagcgagatatcgcgtcggttacgaactgtcccaggtgtcggaccgatcacagcaatggcgattgaggcctttgctcctgaaatggagcgatttgaaaagggccgaaacttctcggcttggctgggcctggtcccccgccagcattcgaccggaggcaaacaggttctcggcagaacatcaaaaatgggtcagaaggacatccgcaaattgctgatcgtcggagcgatgtcggtgatcaagtcagagctctacaaagctaaagatgaggatagtcgtccatcatggcttgggcaacttttggagagaaagccccgaatggttgttgccattgcgcttgcaaacaagatggcgcgggccatctgggcaatgctgacgaagggcgaagattataggaatccggcggctatgacagttgcataacaacgcatattcgtcggttgttgggagtgtgaggaggttttgaacagaatgggcaaatgatcgttagatcgggaacaggaaaaccagttcaccacaaagcgcttagagcgcgcttccttgatttggacctgatccgcgtacttaccatcccggcctgcggccatgtgaaattgccgcacaattgaggcctgacacatgaccgcacccgatcacatgctcaagacgttgaaaatttacttgcacaaaacggggcatccacaca

SEQ ID NO: 2393 - DNA, 1314 bp, unidentified
  source 1..1314: mol_type = unassigned DNA; note = element_363212a
  misc_feature 1: note = core
  misc_feature 2..68: note = LE
  misc_feature 69..1085: note = CDS
  misc_feature 1086..1314: note = RE
  misc_feature 1087..1308: note = bridgeRNA
taattagatggtacgccccacacctacgctaaaatttgcaatgtcgatcaacatttagaggtgccatcatgtcagctattaaagttattggtatagatctcgggaagtctgttttccatctaattggccacgactattctggccacgaagtttgccgacacaagttgacccgagttaagctcattcaatttatctcactacaagaatctacaaccatagcaatggaagcatgttgtggagcgcattggttagctcgaaagtgccaagaatatggtcataaggttaagttgatacctgcacagtatgtaaagccatacgttaagagccacaagaatgatttcattgatgctgacgccattgctgaagctgccactagacctaagatgaggtttgtttctccaaaaagcgaacaagcccaaatcagtacggtgattaggaaaatcagaacaggatatattcgagaaagaacctcctgtatgaatagagttgggtcaatcttgctagaatttggcattagctttcctcgtgggcatgccaatatgaaaaagttgttccagtggctggcagataaagaggctatagtcccaccacagctcattcttgagcttcgtgacctattggactactacaaccaattaaatgaaaaggttgctgctcaagaccaaaaactaatcgaactcaataaagaaaatgagctatatgctttgcttcaaacaataccaggcatagggccaatgacagcttcgtgttgcttgtcttctgtcggtgatccaaaagactttgccaatggacgaaactttgcagcatggatagggttagtgccatttcaatatacgacgggagggaaacctcggctgttgggtatatcgaagcggggaaacaaagagctaagagagttatttgttcatgctgctagagcggtgatgtggagagatgcttcagcggaacgttacttcggttcgtggcttattgatttgaagtgccgtaaaccgttcaacgttgctgttgtcgcattagcaaataaattggctcgtatagcatggtcagtaatgaacgctcgcaaagcattcgaagtcaaagcataaccaagaattgcatatgataaatcaagatgacaaaacggttagaccaccagattgaagacctgaggggcagaacagcattgaaagtgctttctcgtttatgaggacaatctggcgcggatctcatcgtagagctgggactaatgaaagtctcaaaaagactctgaatacattagcgcaaaccaactccgtttttttgacttttcacttgcaaaacggggcgtaccataca

SEQ ID NO: 2394 - DNA, 1343 bp, unidentified
  source 1..1343: mol_type = unassigned DNA; note = element_3632cc2
  misc_feature 1..2: note = core
  misc_feature 3..249: note = LE
  misc_feature 250..1074: note = CDS
  misc_feature 1075..1343: note = RE
  misc_feature 1111..1341: note = bridgeRNA
ttaatgagatggtcacccacaccctgtgagcggtacgctggcagggtgttttattttgaggaaaccatcatgcaaaacgttacgcttattggcatcgatctcggtaaacattccttccatgtccactgtcaggacaaacatggcaacgccctgttgcgtaaaaagttttcccgcactcagctgattcattttctcggttcctgtcaggcggcgaccgtggtgatggaggcctgcggcggtgagtaatttatggctcgccagattgctgatttgggccatgagccgaagttgatttctccgcagttcgtccgcccttttgttaagagtaacaagaacgattttgtcgatgcggaagctatctgcgaggccgcttcccggccctctatgcgttttgtaaaaccccgcacgcaagacccgcaggcaatggctgccctgcatcgggtcagggacgcgttgatacggcaacgcgtcaaaaccaccaaccagatgcacgcttttttgctggagttcggcgtcagcctgccgcgcggtattgccgtgatacggcgtctgagcgctgtgctggaagaaaacgacttcccgccttatcttgcaagggttctgagcaggcttcaccgccattatgtttacctctgcggggaaattgatgaggtcgataaggaactgaaaacccaccttgcagaggatgaaaactcacagcgcctgttgaccattcccggcgtcgggccggtaacggcgagtctgttagccacgcggctgggtgacggaaaaaactatgccagcagccgtgactttgcggcgtcgacaggcctggttcctcgccagtacagcacaggtggaaaaacaacgctgatgggcatcagcaagcgaggtgataaaaatctgcggcgacttctggtacagtgtgcacgggtctttatacagcggctggagcacaatccagggcgtctggcagagtgggttagaaagcagcttgccaaccatcattcaaacgtggtggcgtgcgcactggcaaacaaactggcccgcatagcctgggcagtgacggcatatcaggcggcgttcagtcaataaaagagccaacgaaaaactcgtcagctcagttaattaacacgttactttctggttttgcgacgacagataattgatgacatgaacggcatatcggcctgctgatgaatctgacataaaaaatggctctctgaagccgggcggctttttaaggttcgacaggcgcggaactcatcgtggcgcggacattaatgctcaccagacgccgaatagatttacgcaagcccatcataaatcaaaatctgcgttgcaaaaacgggggtgaccataga

SEQ ID NO: 2395 - DNA, 1361 bp, unidentified
  source 1..1361: mol_type = unassigned DNA; note = element_3636a1f
  misc_feature 1: note = core
  misc_feature 2..70: note = LE
  misc_feature 71..1108: note = CDS
  misc_feature 1109..1361: note = RE
  misc_feature 1137..1355: note = bridgeRNA
taatgggatggtccgccgctttcactgagccagcagcctgtgtatgagaggcttgcggaggaggcgtcccatggaactacacaccatcggtattgatcttggtaaaacagtttttcatctggtcgggctagacttgcgcggcgaggtcgtggtgcgcaagaagttctcgcgcacgcagctgctgcgcttcaccgccaacgtacgcgtcgagttgattggcatggaagcctgcggaggtgcgcattttcttggccgagcactgcgggaacagaaacacgaggtgcgactgattccggcgcagtatgtaaagccgtacgtgaaaacgaacaagagcgactacatcgatgccgaggcgatcgctgaggctgtcgcacggccgacgatgcgtttcgtgccgatcaagactgatgagcagctggatatgcagtccctgcaccgggtgcgcgagcgctgggtaatgcgtcgcacggcagtcatcaaccagattcgtagcttgctactggaacgtggcattactctgcggaagggacgacgctatgtggatgttggtttaccactgatcctggaaaacgccgacgcgaaactatccggcgcgttgcgcatgctgctggcccaactgaagctggatcttgatcagttggctatacggattgacgaggccgatgcggtgatccagaagaccgctcatgaaaacgaagcctgccgacggctggtggccatccctggcatcggaccagtcacggccaccgccctgatcgcggcgatcggcaacggaggggccttccgcaaggggcgagagttcgcagcctggttgggaatcgttccgcgtgaacactccaccggcggccagcagaagctgctcggtatcagcaaacgtggtaactcctacttgcgaagactattcgtgcaaggcgcacgggcggtgatgcaacagcacaccaagcagtcatccggtctgagtgcgtggctggcacagctcatctcgcgcacgcatcgcaacgttgccgccgtggcgttagcgaataagctcgcccgcatggcctgggccgtgctcgcgaagaatgaacactatcggcctcccgtgttggccgatacagcggcagcgtagcgacggctgcggaaaacatgatttcctgccaggtctgctggcgaatgaggagatggcacaacggtcgaacccggcgctctccaaacccggactcggaagaagtctctcaagactgaataactaatggggaagagagcgcagcgcattccatcctggccaggagtgattcactccaacaaaggccgaatacatttgcgcagaccaacctgtgacattctcacttttcgcttgcggcgacgcggcggaccataca

SEQ ID NO: 2396 - DNA, 1168 bp, unidentified
  source 1..1168: mol_type = unassigned DNA; note = element_363b4ee
  misc_feature 1..2: note = core
  misc_feature 3..208: note = LE
  misc_feature 209..1162: note = CDS
  misc_feature 1163..1168: note = RE
  misc_feature 20..214: note = bridgeRNA
cttgtaatagcgcaatcagatattgtcggcgtgttccgtgaggaatggcctgccgcggctgcaacccgcggcaggccgctggcgatcggatcgcgcccaccctgagcagtttgtggctgccccgtagcaggatcgcgccagcaccttcatcggacccggatggttgccggaacaatcaggttcgcttcacaaggcagggtcgacgaagatggcacagactagcacgacgacagcgggaatcgatacgtccaaggcgaagctcgacattgtagttcatggtcgagacgagggttgggaggtcgccaacgaccttcccggttggcggaagctggtgcagctgctgaccaaagctggcgtcaagcgagtcgggatcgaagcgaccggcggttacgagcgtggggtagtggagcatttgcgtgcggccggcgtcatcgtgctggtgctgcagccgatccaggtcaaggcgttcggccgctcccgattgcgtcgcgccaagaacgatacgctggatgccgcgctgattgctgcctgcgcggcatcgctcgaagaggtgaggagtgcgccggatccgcgcttggcggagctcgccgagcagctcaccttcctcgagcagatcgaggacgacatcaagcgcttcaagacccggctcgagcatctcgagaagcctgggctacgccgcatcgtgctggatgacattgcccggttgaaggcaaggcggctctcccaaatccgtcacctcgccaagcaactacgtgctcaccacgatctcgctgtccgccttgacctggtgatgagcattcccgggatcggtgagcgcacggcactggccctcctggtccgcatgcctgaactcggccgtgtcagccgggaggaagtcgcagcccttgccgggctggctcccttcgacaacgatagcgggcagtacaagggccaacgccgtatcgccggcggccgcgctcgcctgcgtcgctctctgtttgcggcagccctgcctgcggccttccgctggaacaaggccgtcatggccctctatgcccgcctgactgcggccggaaaggctcacaatgccgctctcatcgcatgcgcgcgcaagctgctcatctatgccaacaccgtcgtgcaacgcggaacgccgtggactgaaaaactcctcggcgtttaatggttg

SEQ ID NO: 2397 - DNA, 1394 bp, unidentified
  source 1..1394: mol_type = unassigned DNA; note = element_363f02d
  misc_feature 1..2: note = core
  misc_feature 3..123: note = LE
  misc_feature 124..987: note = CDS
  misc_feature 988..1394: note = RE
  misc_feature 1156..1390: note = bridgeRNA
agatggtatggacgcctccctttctgacaatcgaggaggcacaagcaagcagggcctcacgatccaacggcatcaatgtgccacagtggaagtgtgatccccacggatagacggaggccccaaatgaagcttacgacatatggtgtagatattgccaaacgcgtgttccaaatacattgggtcgcccccgaaaccggcgagatacaacgcaaaaagctgaaacgagctgacgtcatgacgttctttcgtctgcaagcctccggacgggtcgtcatggaagcctgcggcgcggctcaatactgggcgcgacagttgcagtcactgggccataccgtccagctgatccatccgaagtttgtgcgtccgtttgtcctgaccaacaagaacgacactgcggatgcgcaagcgatttggaccgccgcccaacaacccggcatgcgttttgtcccgatcaagagcgaagccgcccaagccgtcctggcgctgcatcgcatccgcagccaactggtgaagtttcgtaccatgcagatgaaccagctacgcggtctgctgggtgagttcggcatcgagctccccggcgggcgcgaagctgggctggcggcgttgcgcgacatcgattgggaacacgtacctgcgttgctgcacgcagccttgcaaatgcaggtgcagcggctgcgggaactggatgagcagatggcgcaaattgagcgccagcttgcgcaatggctgcgctcggatgaaacctgcaagcgggtggcggagatccctggcgtgggtttgctgacggcaactgccatgattgcggcaatgggcgaggcgcaccattatcgttccgggcgagcctttgccgccagtttggggctcgtcccaaggcattcaggcacttggtggacgtgtccagctgggtggtatcagcaaacgaggggatcgctatttgcgtaccttgctgatgcatggcgcccgttcggtcattttgcaccagggtaaggctaaggcctcgtcctggttacacgatttgctggcacgcagaccattcaatgtggtggtcgcggcattagccaacaagatggcacgcaccatttgggcgctggtggcgcatcagcgtcgttatgagtcgggctacagcatcaaggtttgagaattgtgtagaacgttgtttctctggttgcgtaaggagcagctgcatgtgatggcatacaggttggaccgcgggaggccaagtctgataagaccgcaggatctagaatccgcttgttagctgagaccgtcttccggcgaattccatcaaggcccgcagccctatgggtctgcaacaaggccggatataagcgagcaaccaaccgccgcatgtcatcttgtgaaactgcccttggcaaacgggaggcgtccatata

SEQ ID NO: 2398 - DNA, 1480 bp, unidentified
  source 1..1480: mol_type = unassigned DNA; note = element_36411b1
  misc_feature 1: note = core
  misc_feature 2..135: note = LE
  misc_feature 136..1185: note = CDS
  misc_feature 1186..1480: note = RE
  misc_feature 1205..1480: note = bridgeRNA
atggtatggacgcctccccctcgctgatcgaccgcgaacggtggagacacaggtgatgaagggggcctcgcagtcgacggcatcgagtgccaaagtggaagttcgaactacccacttacagacggaggccccgagatgaatcgtacgacgtatggcttggacattgcaaagaacgtgatgcaacttcattgggttgatggcgagacgggtgagatcgggcgcaggaagctgcctcgatccaggctgagcgaattcttcgcacagcggcagccggcgcgcgtggcgatggaggcgtgcggcagtgcgcaccactgggcgcgcgtactgggtggtctcggacatcaggtggagttgctgccggcgcgacaggtgcgtgcgtttgtgcgcagcaacaaggacgacgcggccgatgcgcgagcgatctggctggcggcgcagcaatcggacattcgtcgggcaccggtcaagacaatcgagcagcaagcggtgatgtcgctgcaccgggcacggtcgcactgggtgagcgtgcgcaccgccacgatcaacatgctgcgcagcttgttgtatgagttcggtgtcgtgctcccgggcggcaagaaggccggactgaagacgatgggggtcaagcgcgccgagatcgacgatcaactgtcgccgctgatgcgccggctagctgacctgcagctcgaaacgctcaaggaggtcgagcgcagcatcgatcggcttgaagttgagattgccgagcagcaacgccggatcgaccaggcgcgcacgctgcgcgaagtgcccggcatcggcgtgctcggtgcgacagcgctggccgccacgctgggcgatgcgagcggctggcgctcggggcgcgagttcgcagccagcctggggctggttcctgcgcacagtggcacgggcggcaagacgcgcgtgggccacctgagcaagcgaggcgacccctacctgcggacattgctcatccacggcgctcgttcggtgatcacgcacgcgaaggccaagcccgcgtggcttgaagaattgctgcgacgccggccgctgaacgtggcggtggtggcgttggccaacaagatggctcgcacggcctgggcgctcctggcgcacgggcgggcgtaccgatcggagtggaagagcactccgcccagtggctgcggcgcgcaagcgcaggcggcttagatcaacaacctgagacaacaacctataggagtggatgccgcaaagagtgcgtgagtcgagttgatgaagtgatggtgaagcggtcggaccgcgggtcgggtaaagctgaatttttgtccgggcaagccttgtgcgaagcccgtaccggagatgagcaccgaccttgcgcatgaccatcaaggccagtgggcgggcttcggtccgatctgcacaaacaggccggatataagaccgcagtcattaccgccagccggaacttcaagaactcgcttgccacacgggaggcgtccatata

SEQ ID NO: 2399 - DNA, 1424 bp, unidentified
  source 1..1424: mol_type = unassigned DNA; note = element_364de3e
  misc_feature 1..2: note = core
  misc_feature 3..123: note = LE
  misc_feature 124..1158: note = CDS
  misc_feature 1159..1424: note = RE
  misc_feature 1177..1371: note = bridgeRNA
agatggggtattcggcttgcgccccacttccagcctcggtctccggtaggtgctgcgtctcgagctgatgataatacgtggtctgtgtgaagcagccacaagcatcaaggaaggagacgcagcatgaaacattatgccggattggatgtctcagtaaaagaaaccgccatttgtgttgtcgacgacgacggccaagtctgctcagaaatgaagattgcgagccaccccgaggagctctctctagccttgagcggtatcggggtccatttcgaacggattgggttggaagccggtccgctgtcgcaatggttgttcgaagggctggcgcgcgcggggcttccggtgatttgtatcgagacacgccacgcgaaggccttcctcaaggcgcaggtgaacaagaccgaccgcaatgatgcgcgtgggatcgcgcagatgatgcgggtcaacctataccgtccggtgcatgtgaagacccgggaaagccagcagcgccgagctctgctgcgagcccggaagctcctgcaagagaaggcgattgctgtcgagaatgatattcgcggcttgctgcgcaacttcgggctcaaggtcggcatcgttggcagagggaagttcgaagcccgcgccttggaactcatcgcggaactgccggaactggagaaggtgatcagcgtcttgctcgcggcaaggcgcaagctccgtgagggcttcgccaaactgcaccgcgaggttgtggaaatcgcgacgggagacgccgtttgcatgcgtctgatgacagtcccaggtgttggcgcggtgacttctcttgccttcgtcagcaccattgatatcccggcgcgctttcgaagatctcgagcggttgggccggtcttagggctgacaccggtcctaaaacagtccggagaaagtcaacgcgtcggccgggtatccttgtgtggcgacggaatgatgcgagccttgctgtacgaggccgcgcaatccatgctgaccagggtgaagaaatggtcatggctaaaagcttgggccgtgggcgtcgcgaagcgtagtggcttcaagaaggccgtcgtggctttggcgcggcgcctttcggtgatcatgcacaggatgtgggtcgatggcagcgagttccgttggtcgcgggagggagccatcgcaatgtgatcgacccggaaaggatttagagttccaccgcaggtgggaagacgtccttcgcgggacgatgggtgaggtgagttcgcaatgcgtccagttccggcagcatcatggctgccaggccgcgagtcagattggaccgcttcactcttctaatcccatgatgggagggccagcgtgccgatcccgaagagaagcgagggcccgcgaaagacctgaagacccgccgttgacaactgctcgaaggcgcttgaccaaagaacgccgaatagaga

SEQ ID NO: 2400 - DNA, 1519 bp, unidentified
  source 1..1519: mol_type = unassigned DNA; note = element_3655b24
  misc_feature 1..2: note = core
  misc_feature 3..260: note = LE
  misc_feature 261..1310: note = CDS
  misc_feature 1311..1519: note = RE
  misc_feature 40..237: note = bridgeRNA
ctcctatgtttgcaaagttataaattcccaaaaagagattgttaaatttgtgatcttaaagtaagaagaatgagagtacaccgatggctaaataactcaagaagtatattgtccgatagaaaccacctcattcttttttatcttttagagtctgaacagaatgtaaggaattatgcgagtcgtaatatccagaatatccaaccaggagaaaagacgaaggaagattctttactttataaaaacaactttaaagtttaggaatggaagtattaaaacaagtattgggaattgatgtagctcagaaagaattggtagttactttaggtagaatggttgaagatttatcaattgatttgtatgcctataaagtttttagaaataatgagaaaggttttttggcacttttagaatgggtaaaaaagttaacaaaagacaaaacaaaggttcgatatgtgatggaagccacaggtgtttatcatcagaaattcgcttattttctagatgaaaaagattatgaagtttgcgttgttttacccaataaaatcagtaattatatgcggactttagataataaaacaattactgacaagacctgctctgaagcaattgcgcaatttgggttagaaagaaaattagacctatggcatcgtccaaagagtatctacaggaatctgcaacagcttactcgtgaacgcgatcagatagtgtttgagagagcaatggtaaagaatcaccttcatgcagaacagtcagaagctgagcctaatgagagtagtgtattgcgaattagtgcccgaatcaaattcttgagtggacaggagaaagaaataaaaaaagagattgaaaattgggtaaataaggacgttgtcttaaaaaaggaaatagagaatatttgtacaatacctggaattggagagttgactgctgtgattattttggcggagactaatggttttgaactcatacgaagtaagagacaattgacaagttatgcaggacttgatgttaaagaaaaacaatctggaacatcaataaaaggaaagcctcggatatcaaaaagtggaaatagacacttgcgaaaagcgatgcatttaccagcactggctgccataagatgggatgataattttagagatttatacgcaaggatagtatcgaaacaaggaatcaaaatgaaagctttggtagcagttcagagaaagctcttggaaatggtttatactatattcaagaataagtgcccttatgacaaagaatatgaaaccaagagaatggagcaaaaaaatagcgtgcatgcacaaacggcataaacacgctatacaggctggttcttgaccgcctttgtagggcaaaattaagaaagaaaagtgacttaagtgtaatgaacccaaaataaaagacattgggttataacaataaatgaaacaataaaaacaataatcttaaagattacccgaagtccttttttaaaaaaaataaaaataaaaattaatattttaattgtaaatcaacacagaat

SEQ ID NO: 2401 - DNA, 1506 bp, unidentified
  source 1..1506: mol_type = unassigned DNA; note = element_365981c
  misc_feature 1..2: note = core
  misc_feature 3..247: note = LE
  misc_feature 248..1486: note = CDS
  misc_feature 1487..1506: note = RE
  misc_feature 7..243: note = bridgeRNA
ctaatgggttccagccgagcttctggcaggctcggtcctgtagcggctggcgggtcagcactctcctcttctgatcgctgtttgaggtcttgcggcagaccgtgcgcccgctggtcgtggggaggcagatcgctgctgggatgtcgtgcccccgagtcgtgctgtccgggtgagcactcgctccattagatcgctgggagtcctcctccacgctgcggaacgggagtcattcgaaggagggtttctggtgttgttcgtgggtgatgactgggccgaggagcatcacgacatcgaggtccaggacgagacggggaaggtgctcgccaagaagcggctgcccgagggcctggcggggatggtcgcgcttcacgagctgctcggccggcatgtgccggccggctgggcggacctggacccggctgaggcggccgggaaggtggtggtcgggatcgagaccgatcgcgggccgtgggtcgccgccctggtagcggccggctaccgggtgtacgcgatcaacccgacctcggcggcccggtatcggcagcggcactcgatgtcgggcgccaaggccgacaccaccgatgcgcacctgctcgccgagatcgtccgagtcgaccgcgctcatcaccggcctgtcgccggggacagcccggacgcgcaggcggtcaaggtagtcgcccggatgcaccagaccttgatctgggaccgcacccggcacctgctcaggctgcgttcggcgttgcgggagtacttccccgctgcgatcagggccttcgacgagctcgcggcccccgacagccttgagctgttggctgttgcgccggatcctgatgcggcggcgaagctcaccaagacgcgcatcgtggcggcgttgaagcgggcgcaccgccgcaacgtcgacgagcgggcgaccgtgatgatggaggtcctccgggcccccgaactccgcctgccgccggtagtgcagcaggcctacgccgccgggatcgtgagcctggtcgcggtcctcggcgtgttgaaccagcagatcgaccagttgagtgtggtggtgggcgaccattttggccgtcaccgggacgctgagatctacaccagcctccctgggttgggagtggtcctcggcgcccgggtcctgggcgagttcggcgacgaccccacccggtacgccgacgcgaaggcccgcaaggcctacggcggcaccgcgcccatcaccagggcctctggcaagaagaaggtcgtgctggcccgctacgcgcgcaacgaccgcctcgccgacgcgctccagcaatgggcgttcggatcgatgcgcggctcacccggtgcgaaggcctactacaaggctctcaaggaccgcaagatcggccaccaggccgccctccgccagctcgggaaccggtgggtgggcatcctccacggctgcctcaaaaccggccagctctacgacgaaaacaaggcctggagccaccaatccagcgctgccgcttgacaaaacaaaacctgggatgt

SEQ ID NO: 2402 - DNA, 1381 bp, unidentified
  source 1..1381: mol_type = unassigned DNA; note = element_3661928
  misc_feature 1: note = core
  misc_feature 2..69: note = LE
  misc_feature 70..1125: note = CDS
  misc_feature 1126..1381: note = RE
  misc_feature 1153..1372: note = bridgeRNA
taatgggatggaccggccgtgctcctgcccgcagattgcgggcgcaaccaaacccgaggagcacgcgccatggaccgcaaagccaccgacagcattgtgactgcgattggcatcgatatcggtaaaaacacgttccacctggtcggcctagacaagcgtggggcgatcgcgctgcgtcagaagctatcacgaggtcaggtcgcggcccggctcgcgaacatgccaccgtgcctggtcggtatggaggcttgcgttggcgcccatcatctgagccgtcagctcctcgctcttggccacgacgtgaagctggtgccggcgcaattcgtgaagccctttctcaagggccagaagaatgacttccgcgatgctgaagccgtggccgaggccatccagcgtcccaccatgcgcttcgtgcccaccaagagtgtcgaccagctcgacttgcaggcgttgcatcgggtgcgtgcgcgtctagtcggccagcgcaccgccaccgtcaaccagatccgagccttcctgctcgagcgcggcattgccgtacggcagggcctgcgcttcctgcgtcaggtgctcccggacatcctcgccaaccgcaccgatgtgctgacgccgcgaatggtgaacatgattgagggtctcgccgcggacttgcatcacctcgaccagcgcatcgatgacgtgaccggcgagatcgagaccgtggccggcgatgatgaagcttgccaacggctgatgacgatacccggcatcggcccgatcatcgccagcgccatggtggcgacgatcggtgacggatcagccttccgtcgcgggcgcgacttcggtgcctggctcggcctcgtgccgcgacagatctcgaccggcgatcgcaccatcctcggccgcatctctaagcgcgggaacaactatcttcgcatgctgttcgtgcaggcggctcgggtcgtgctgttacggccggccaactggcccaagcacagcttcggccggtggctgcaggccgccgccaagcgcatgcatcacaacgtcgtggcgaccgctctcgccaacaagctcacccgcattgcttggagtgtgctgtaccacggtcgcggatacgagcctcggatgagtgctgagctcacatgagtacctgacgattaacattgtagagagtcccgccgaggtctgcgagaggaacaggagatgggcaacggtcttaccggcgcatccgtgatctggtgacccaaatggccgcttaaggcctatccgctaatgagatcggaagcgcgcggatatccatcatggcccggagccgaggctccacacaaaggccggatacattagcgcaagaccaacctcaccatcgccgaaagcctcttgcaacacacggccggtccataca

SEQ ID NO: 2403 - DNA, 1490 bp, unidentified
  source 1..1490: mol_type = unassigned DNA; note = element_366d007
  misc_feature 1..4: note = core
  misc_feature 5..253: note = LE
  misc_feature 254..1468: note = CDS
  misc_feature 1469..1490: note = RE
  misc_feature 53..228: note = bridgeRNA
ctcactggtgtacctcttgcggtcgggaggctttggtgtagaagacctgagtgctctctcttccgtgcgcttgccacgactgccatcgtcgctggccgctcgacggcccgcatgagacctgcggcgtggcaggtgccgggaggtctttacgggctacaggaagttgcgccaagggtcttggcccggagcgccggtcagtgagcaacccgcaggacctcccgacacggacattgtgaacccgtggaggtgtgtcatgaaccaattcttcgccggactcgactggggcagcacggcacacgcggcatgcgtcgtcgacgcgcagggcggcgtcgtggtccgcctggaagtcggccacgacgccgcggggctgcgccgcctgcgcgaagcgctgggacgcgtcgctccgactcctgatctgccgatcgccatcgagcggccctccggtctgatcgtcgatacgctgctggaagccggccatccggtcgtgccgatccatcccaacgtcgtcaaggcctgccgtccgcgctaccgcgccgccggcggcaagcatgatctcggcgacgcctacctgctcgccgacgttctgcgcaccgacggccaccggttccggccgctggtgccgcagtccgacgcgatcaaggcactgcgcgccctggtgcgtacccgcgacgatctcgtcgccgagcggatcgccctggccaatcagctgcgcgcgctgctcgacaccttctggcccggggccgcggccatcttcgccgacatcgactcgccgatcgcgttggccttcgtcagccgctatcccacccccacccgcgccgcacgcctgggggaaaaacgcctcgccagcttcctcgccggcgaacagtattgcggccgccgccgccccgccgagctgctggcgcgcctgcgcgccagccccaaaggccaggccgccccggccgaggaagacgccaaaggcgagctggtgcgcactctggcgcgcatcctcagccccttggtcgccgagatcgccaagctcacctcgcgcatcgaacacgaggtcgcccagatcgccgagggccgcctgatcatggccctgccccgcaccggccgtctcaacgccgcccagatcctcgctgaactcggcgacgtgcgcgaacgcttcgccacccctgaccagctcgccgccgaggccggcgtcgcccccgtgacctaccagagcggcaaatcccgctgcgtcgccttccgctgggcctgcaaccatcgcctgcgccgcgccatcaccacctgggccaacaactcccgccacgcctccccctgggccaaacacgtctatgcccaggcacgcgcgcgcggctgcgatcatccccacgccatccgcatcctcgcccgcgcatgggttcgcatcctctggaaaacctggactaccggcatcccctacgaaccccacaaacacaccagcgccgccacgttcctcaaggctgcataacgcaggggttgacacaggaagt

SEQ ID NO: 2404 - DNA, 1489 bp, unidentified
  source 1..1489: mol_type = unassigned DNA; note = element_366d4b4
  misc_feature 1: note = core
  misc_feature 2..461: note = LE
  misc_feature 462..1475: note = CDS
  misc_feature 1476..1489: note = RE
  misc_feature 12..241: note = bridgeRNA
ctactagccgattcccgtagggccggtgtctggccagactcggcttaggtgctcggcgggttcgctctctattgggctgcccacctgtgcgcgggtgtggctcgcaaccggtctgcagtccgccgggcaccgctgacgaggcgtggctcaagaagggactgccctgctcgtagtagcaatgcccacctcgccgtccacgtcggtacgagcacaggcgggagcagccatggagcaggtcatcatcggggtcgatcctcacaagctgtcagcgactatcgaggtcgtcgaccaccacgaaccgttgctgggttctggtcggttcgccaccgatcgggccggctaccgagctatgcggacctacgcgaagtcatggccgaaccgggtttgggcggtcgagggcgccaacggtgtcggacgcccgttggcccagcggctgctcgaggctcgtgagcaggtcgtcgatgttccagccaagctcgcggcccgcatccggcgcccgccacgcgggccgcagcgccaggcgctccttgctcttcgacaccgggcacaaccgcaagaccgacgcccgagacgcccactcgatcgcgatcgtcgctgtccgcaccaagactctgcggctgctgcaggtcgacggcgagctcgaggccctgcggatgctcaccgaccgccgcgaggcgctgactcggcgtcgggtccagaccgtcgatcggctgcaggcgctcttggccgaactcctgcccggacaagccaaacgcgacatcaccaccggccaggccaaggccatgctcgcctctgtccgtccgcgggacatcgccgggaggacccgtcgccgcatcgccgccgacgagctggccgaactgatcgcggtcgaggcgaagatcaagaaggccaccgccgagctcaaggccatcgtgctggcccggggctcgaggctgatggacatccacggcgtcggtcctgtggttgccgcacggatcctggctgacgtcggcgacgtcgcgcgcttcgccgaccgcaaccggttcgcttcctggaccggcactgcaccgctcgacgcatcctccggcgagcacgaccgtcaccggctgtcgcgagccgggaaccgccggatgaaccacatgatccacatcgccgcggtcactcagttgcgcatcgacaccgacggtcggacctactaccgacacaagcgagccgagggcaagaagcccctcgaggcgcttcgctgcctcaagcgcaggctctccgacgtcatctaccggcagctcgtcgctgacgccgaactcgccgccggcacgaactccgaggcgggtccgggagggcactgcggggcgtctcaagaatcctgcgcggccgacctgcccccgcacatcgacacttcggatcagccacttcccggacccgcacaaccgacgctacgcgcggcatcgacctcccggaagtcccgacgaaacagagtcctcaccgcagccggttgacaacagaagggagc

SEQ ID NO: 2405 - DNA, 1590 bp, unidentified
  source 1..1590: mol_type = unassigned DNA; note = element_3671cb6
  misc_feature 1..2: note = core
  misc_feature 3..248: note = LE
  misc_feature 249..1424: note = CDS
  misc_feature 1425..1590: note = RE
  misc_feature 3..228: note = bridgeRNA
ctcgtattatatagtagtagtgtttatagaccctctccaaggtctgtatgctatactttttggagatactgtggattggtgaatcactcctaccacttgatggtttcagaaaggctccaaccacaggctctttgtatatttgttaatcagttagataccgcatgacggtttatttagaacgaggttacaatcgcagggagtacccgtgggttccaaacagtattaaatttattcaaaggagaattgctatgatttacgccggaattgatgttgccaaagataagcatgattgctttatcactaactcagatggtgaggtgctatttagagcatttaccattcaaaacaaccgtgatggttttgatgatctttttcagaagattttctcagttgcaaaagatttaacgaaagtaaaagtagggcttgaagccactggacactatagttacaatcttctcggttatctcgttgataaaggccttgccacctatgttatcaatccattacataccaatctgtacagaaaaagtctaagccttagacagacgaaaacggataaagtagatgcccgaacaattgcttctatgattatgtctgatgtgaacttaaagtcctactcagacacatcttatcacaatgaagaattaaagtcattaacacgttaccgttttgataaagtaaaagaacgtgctaagcttaaaacttctatttccagacttgttacaatccttttccctgaattagaaaagcttgttcctacgcttcacatggtttctatttatactttactttcagaatttccaagtgccaatgctgttgcatcagctcatctcacaaagcttgcaaacctacttgaaacagcatcaaaagggcactattccaaagataccgctattcttttcagagaagctgcccgaacttctatcggttcaaatatgcctgctaaatcgcttgaactgaagcacacaattaaacttattcaggaacttgattccgagatagatgaaatagaatctgaaatcaaaatcattatggatgaaataaattccccaatacttagtattcctggaataagctatcgtatgggtgcaatgattatcgctgaaatcggcgattttgaacgatttgatactcctgataagatacttgcttatgccggtctgtcaccatcgacttaccaatcgggtcaacttgatggtgcctattcccatatggaaaaacgaggttccaaatatcttcgttacgcattatttaatgcgactaaatttgtttgtaactgggatccaacatttgcagcttaccttgcaaagaaacgtgccgaaggtaagcactacaatgtagcaatatctcatgctacgaagaagcttgtaagagtcatttatcaactggaatgttctgggcaaacatacattaaattagcttaggttttataaataaatatctcctttttgagcacctacaaagatgctctgtttgtcatgcagttttcaatgtcctatgaactaattttcagttctcaatctatctgaaatgcatttctgcaattcattcaaaaaaataacattttagacttgacttttaatagttagt

SEQ ID NO: 2406 - DNA, 1340 bp, unidentified
  source 1..1340: mol_type = unassigned DNA; note = element_367246b
  misc_feature 1: note = core
  misc_feature 2..253: note = LE
  misc_feature 254..1324: note = CDS
  misc_feature 1325..1340: note = RE
  misc_feature 22..244: note = bridgeRNA
cagtgaagatggggcggtccccgatgatggggatggtcctgccgggtgggtctgaccctgaaccgccctgaccgtggtgtcatcccgggagctgtcggcctggccggcggggccgcgtgaaggtgcacgcgaccggacgggcttgtgacctgatacgagcttgtgcgctcaagccccatcactggtgtgtccgcccgcccggccggtgcgtgcctgtcctggctcgtggctcgagcggaaaggcggtaccagcatgccgaagcgcaccagcaatcgcacccgggtggtcatcggcggcgtggacacccacggccgcacccaccacgccgccgtcatcgaccagcagggacggctgctcggcgaccgggagttccccgctgaccgtggtggctaccagcagctgctgggctggctgggccgtcacgggcagctggaggcggtcggggtggaaggcagcggcagctacggcgctggcctgacccggttgctgctggaccgtggggtcaaggtggtggaggtcgaccggccggaccggcgtactcgccggcagcgtggcaagtcggatccgatcgacgctgaggccgccgcccgggctgtccttgccggtgtggccaccgcgccggccaagcgacgcgacggcatcgtggaggccatccgggcgctgcgggcggcgcgcagcggtgccatcaaggcccggactgcggcgatcaaccagctcaaaggcctgctggtcaccgcgccggcatcggtgcgggaagggctggacgccctgcccagggccgcgctggttgctgcctgcgctcggctgcgaccggacgaggccaccctggatgatccggtccagggcgtcaaggcggcgctgcgggcggtcgcctgccgcatccaccagctcgacgaggagctcagcctggctgatcagcggctggccacactcgtccgccgggccgcgcccaggctgctgaagctgcacgcgatcggggtcgaccacgccgggcagctgctgaccaccgccgggcagcgccccgagcggctgcgtggagaggccgccttcgctcacctgtgcggggtcgcccccatccccgccagttcgggcgccacccaccggcaccggctgcatcgtggcggtgaccgcgacgccaaccgggcgttgcaccttgccgtggtggtccggatgcgctggtgtccacgcacccgcggctacgccgagcggcgcaccactgaaggcctgagcaagccggagatcctgcgctgtgtcaagcgctacctggcccgcgaggtctaccacgccctggtcgccgacttcgaggccctccacgccacttgaccatctatacgagcat

SEQ ID NO: 2407 - DNA, 1384 bp, unidentified
  source 1..1384: mol_type = unassigned DNA; note = element_36758cb
  misc_feature 1: note = core
  misc_feature 2..321: note = LE
  misc_feature 322..1122: note = CDS
  misc_feature 1123..1384: note = RE
  misc_feature 1160..1375: note = bridgeRNA
taatgggatggaccggccgtgcttaccggcgcacccttcaggaggggcgcccagcacgaggatctgagccatgcctaatgctccgcttcaacctgttgccacccttggcatcgacatcggcaagaacagcttccacctgatcggcctggatgcccgcggcgccattgtcctgcgccagaagctctcgcgtggccaagtcgagcagcgcctcgtcaacatgcccacctgtctgatcgggatggaggcgtgtgtgggagcccaccatctcagccgccagttgctggccctcggccacgacgtgaagctgatcccgctcagttcgtgaagcccttccgcaaaagccacaagaacgacttccgcgacgccgaggccactgccgaggcagtgctccgccccaccatgcgtttcgtgcccaccaagacggttgagcagctcgacctgcaagccctgcaccgcgtgcgttcacggctggtgagccagcgcacagcagtggtcaaccagatccgcacctttctgctcgagcgtggcatcgctgtccgacaggggctgcgatccctgcggcaggcgctgcccgacatcctggccaaacgcaccgatgttctcaccctgcggatggtacacttgatcgaaggcctggtgcaggactggcatcatctcgacggccggattgaggcagtcaccgaggagatcgaagctctcgtggcggctgacgaggcctgccagcgtctgatgagtgtgccaggggtagggccgatcatcgccagtgccatggtggccgctatcggcaacggcgcggccttccagcgtggacgcgatttcggcgcctggctcgggttggtgccgcgccagatctccactggggatagaaccgtgctgggccgcctgtcgaagcgcggcaacagctacctgcgatccctgctgatccaggccgctcgcgtgctgctgctctggccggcaaaatggcgccagcacagtttcggggcatggctcaccgctgcctcaatgcgcctgcaccacaatgtcttggcggcagctctggccaacaagctggctcgcatcgcctggagtgtgctgagccagaaccgcgtctatgaaccacgagcagcggctatggcaggctgaggctgaaagcctctgtccgcatcagtcgtcactttgagctcgccgaggtctgcgagaggatgaggagatggagaacggtcgcgccgtcacattggggctctggtgacccaaagggccataaagggccgatcagctaatgagaaccaatgtgcgcggatatccatgatggccaggagcactgctccgtaagggtcggatacattagcgcaagaccaatctcaccatttccaaagcctcttgcgacgcacggccggtccataca

SEQ ID NO: 2408 - DNA, 1443 bp, unidentified
  source 1..1443: mol_type = unassigned DNA; note = element_368056f
  misc_feature 1..2: note = core
  misc_feature 3..84: note = LE
  misc_feature 85..1188: note = CDS
  misc_feature 1189..1443: note = RE
  misc_feature 1258..1379: note = bridgeRNA
taattagatggactcgcccaagccgaggcgtcagtagcgccacggtggcattcttaagaagccaacgacagcgagggcgagcccatgaaaaagcatacgaccaaaagtaactccctgtctccagccgacgtgtcggcttgctcgacagtagcggtggatcttgcaaagaatgtgttccaggttgcgggagaaaactcccttggccaagtcatgtacgaggaacgaatcaagtcacgcgaagccttcctgatattcctgcgcaagctgccggcgggcatgacggtgctgatggaaaccggcccaggcgcacaggcctgggcgcggctgttgcagacgcagggcaatccggttcgcattctcccggcgcaacatgtggccaatcatcgcagcggcgccaagaatgaccgcaacgatgtgctggcgatattgcgcgccggtcgagacatcaacatcgcggcagtgccgatcaaaagcaccgcacaattgagcatgcaggccctgcatcgggcccggcaagggtacgtaaaacggcgcacctcaatgggtaatcagatgcgtggtttgttgctggagcagggcattgccatcgcgcagggtgcgctgatcctcagccagaatgtcccgcggatactggaggacgctacccagccgttaccggatatgttgcgcgaactgatcgccgaaatgctgggcgaatggagccatctgggcgagcgcatcgacgtgctaacgagacgcctggaagcggctgcgcgtgaggacgagacagccaggcgcctgatgacggtgcgcggcatcggtccgatcatcgccacggcattggtggccaaacagactgagcctgagcgcttcgccaatgcgcgcatgtttgccgcttacttcggcacggtgccggagcagagcagcagtggacaaaaggttcgcctgggcaaaatgtgcaaacgcggtgatggctaccttcgcagcctggcgattcaaggggcacatgcggtgttgaggcaggtacggcctgattcccagcatccggatgatcatcgactgcggcgctggctcagtcgccatggtcaaaaaggagccgccgtcaggttggccaaccgtaacctgcgcatcgtgtgggtgctgctgcaaaacgaccagacctatcgtcgccagccagcgggttgccaggaggcgacgatgaaccattaatcgacagagttctgccaccggggtgctgagccacctcaaccgctgctgaagaacattgaccccaggtcagaccgtcgtggatagatgcctgcggtcctactggccctttgaggccttatcgtaatcggcataccgcgagctcacccaatgttggccagaagcaaaggatgcttcctcgaacaggccttatacatagatgcaaccgggtagtagtgttcaaaagcaataggttgaaagtgggggcgagtccataca

SEQ ID NO: 2409 - DNA, 1307 bp, unidentified
  source 1..1307: mol_type = unassigned DNA; note = element_368e8d5
  misc_feature 1..2: note = core
  misc_feature 3..257: note = LE
  misc_feature 258..1268: note = CDS
  misc_feature 1269..1307: note = RE
  misc_feature 44..213: note = bridgeRNA
cttgtatattaaatgtatctcttaaacacagaattatttaacattaaaacagtttatagtgataaccgattttctggggaagccgtcacgcccttaagccctgagcttgtttgtagattggctccccacccttgtcatccatgccgtggagtatcttaggcctgtaagctagcttctgagcctgtattcacaaggacggtaggtgaagtgtcagggttgggaaaccagacatcatcataacaaaactaaagtaagagatgaatatgaattgtattggaattgatgttagccataaagaacttgttgttgtagtgagtgtaaaaggtaagactcgcaaagctaaaacctttcaaaacacacctgcaggatttaaatctattattcagattgcatctaaactaaaaggaaatgtgaaagtttgtcttgaagcaacaggtgtttatcattttgatttaacaattgccttgagttatgccgagggagttgaggttatggttatcaacccaaaaatttcaagtaactttgccaaggtattgatgtcaagaagcaaaacggatgctattgatgctgaaatattagccatatatgcagaaagaatgccttttgaagcctgggaaagaccagcagatgagtatattacactaagagtattttcccgaagaatagcctctttgaataagctaaagacgcagactaaaaatcagctgcatgcgcttgtaagtacagctgaaactccacaattagtggttgatcaagttgaagaactgatcaaagtactcgaaaaacaaatagaaaaccagcgccttgctgctattgcactcataaaacaacattcagctttattgaatgcgtttgttcttgttaccagcattaaagggattgctgatgcgagtgctattcagatacttgcagagcttatgattttgcctaaagaaatgagtgctaaacaatgggtggctcatgcagggcttgatccaagaatatttcaatccggctccagtgtagagaaaaagccacgtattagcaaagcgggaaataaatatatccgacaggctatttatatgccagcgttggtttcaacacgctttgaaccacatgttaagggttattatagtcacatgataaacgataatggattgaaaaaaatgcaagctatctgcgcagtaatgcgtaaacttttacacgctatccatggcatgttaaaagcaaacaaacgctttgatggagaacgtttttacaagttccctgctgaagtaattcattcctagattttttaggattattagacttgcgttttaagagagtat

SEQ ID NO: 2410 - DNA, 1325 bp, unidentified
  source 1..1325: mol_type = unassigned DNA; note = element_3697fa2
  misc_feature 1: note = core
  misc_feature 2..69: note = LE
  misc_feature 70..1110: note = CDS
  misc_feature 1111..1325: note = RE
  misc_feature 1109..1313: note = bridgeRNA
ctatgtatggactcctccaacctaatttcttaggttggaagtcgaccaaaaccctaagggagtccatacatgacacattcaacaacagttggggtcgacttagcaaagaacgtcatccagatctcggtcgtatccggccgcggcaaagaactttccaaccgctcactcacgcgccacaagttcgcggagtttctgggtaaacagaaaccagcgcttgtcgcattcgaggcgtgtgcaacatctcattattgggcgcgagcggcacaacgtcacggacacgaagcacgcatcattccggcgaagttcgttgcgccgtttcggcaaggccacaagaccgacagcaacgatgcacttgccgttgccgaagctgctcgccgaccgagcatcaaggaagcgccgatgaagacagtcgagcagcaggggctgcaggcgattcatcgctcacgccagcttctgatccaggagagtacagcattgtcgaaccatctacgcggtctgctcatggagttcggtgttgtcattccgcaaggctttgcatcgctgcttcgtgcggtgccggaggttttggaagatggcgagaacgagctgccggacctgtaccggccaaccttgcatcgcatgcacacgcgcctgctcgagctgcgagagcatatcgaagcgatgaccagggaagtcgaggtgttggtgaagcagcatccgatctgcagccgcctcacggcgctggaaggcatcggcccgatcggcgccttgttgctgtacgccacattgggttctggtaacgtgtttagtagcagtcgtgagttcgcggcctaccttggcttggcgccacggcagtacagcagcggcggcaagacgaatatcgtcggcttgagcaagaagatcggcaacagccgattacgttcgatactgatcctgggtgctcgcgcctacacgtaccgactcaaagaaccgaagagctcaaaggatcgctggctaaaggatgtcatcgatcgcaacggacacagtcgagcagcgatcgcgctcgccaacaaaaatgtaagaacggcctgggccatggtgacccagggcacagcgtatcaacgtcgaggccaactgaaggtggctgcctaaacgtcctgcaaacaaagaccttagatcagattaagaaatctgctccggcgaaacctacaccgctttgaggccctagagcccattgacccttagaggaaccggagtgcgtacacatagtgggcccggagatagcgtctccaatcaaaggccagatatacattcgcgtctgaaccctgatcaaagatattgtttgctagactggaggagtccatata

SEQ ID NO: 2411 - DNA, 1569 bp, unidentified
  source 1..1569: mol_type = unassigned DNA; note = element_36985b4
  misc_feature 1..2: note = core
  misc_feature 3..448: note = LE
  misc_feature 449..1444: note = CDS
  misc_feature 1445..1569: note = RE
cttgtatgatgtatttaagtctaaatacatcaatacactcctttctctttaatttctgcttgactttttatttgcagacttaaattttgatataatcaatacaatactgtggactttttatttctttctatagctttgactattttaaggagtgtattgccacagttttatctgcaatatttatagttggataagtctttgaactttcatctctggcaagtttatgaggataaaacttagtggactaacacagtgattttttaacaaggagttgattttatgatttatgtcggcattgatattgccaaacttactcactatgctgctattatgaattctgatggtgaagtcttagttgaacccttttgctttttcaaatgatctctcaggctttcaaaaactgcttgactgcctaaaggatttctcactggacgaacttctcatcggcatggaatctaccgcccattatgcagaaaacctcacttttttcctttttacaagaggtttcaagctctgcattattaatcccattcaaaccgcttctctcagaaaatccagtattcgtaagaccaagactgattccattgacacctttctgataattaaagctttatcccttaatcatttcaggctttttactcaacatgactttgattctatgcaattaaaaagcctttgccgcttccgccaaaaactgatgaaggtaaggacaaaggtcaaaattcaactggtttcttacgtggatttgcttttctctgaactccagtttttcttcaaatccggaattcatatcaaagcctgttatgctcttctcaaagaagaacctaatcccgacaagattgcgtcgatgcatctcacgcggttatcaaacctgctgaaaaagacctctaagggccactttggtaagcaacatgccattgccctaaaagagcttgctgcgcaatctgtcggtattaaaaatgataccttatctttacagattttgcaatccataaatcaaattgagcttttttcttctcaattagacgaagtcgaaaagttaatcaaccaaattatggataatatggactctgtgattaaaaccatccccggtatcggcaaccttaatggcgccatgattatcggtgaaatcggcgacatcactaggtttgaaaaaccttgccagcttcttgcctatgccggtcttgatccttctgttttccaatcaggaaaatttacggcttccagaaccagaatgtctaagcgtggctctaaaatacttcgttacgctttaatcaatgccgcttggcaaacaaccttagtaaaccaaacctttagagattactacaacctgaaaatttctcagggccgcggacattacagtgcccttggccacgttgctcacaagcttgttcgtgtcattcataaaatgatgacagacaatgtagaattcaatttagattagtcctaccctatcaactatattaaattgtagaaagcaccttacttgatgctttatttgtcatacacttttttagtcaaatttttttagaaaaagtttgagatttttattgactattcatagttggt

SEQ ID NO: 2412 - DNA, 1437 bp, unidentified
  source 1..1437: mol_type = unassigned DNA; note = element_369a6dd
  misc_feature 1..2: note = core
  misc_feature 3..215: note = LE
  misc_feature 216..1421: note = CDS
  misc_feature 1422..1437: note = RE
  misc_feature 1..220: note = bridgeRNA
caaacatgatggtaggagtctcgtggagtcgtgaccctgcctctgactggtgccctgctgggctaccgacaaactgatcagtccggctccacgaggcccaggggcgacgaccgcccggccatgacctaatacgagcctgatcgcgagtccggtgtatgtcctgtctggtcgaagcggccgccgcctgacccactcaccgagtccaggagcaggccatgaccatcatcccagagccccaccaccacgtcgcaggaatcgactcccacaccgagaccatccacatcgcggtcatcaccgccaccgggctcgaggtcgacgaccacgagttcaccaccactaccggctaccgcaaggcagtggcctggctggtcgagcacggacctattgcagctgtcggcatcgagggcacctccagctacggcatcggcatcacagcagcactacgagccgcgggcatcaccgtcatcgaggtcaaccgcacccgccccgccgaacgccgcaagcacggcaagaccgaccgcctcgacgcctaccgcgccgcccgctgcgtgatctctggagaagcggccacccatcccaaacacgactccatcgagccccttcgagccctgctggtcactcgacgcagcgccaacaaggccctccaagcctgctggcgccaaatccgcagcctcttggtcaacgcacccgccacgctccgagacaaataccgccaaaccagccgcgacaagctcatccgtcatctcgctgccagccgccccgaccagatccatgacgccgcccaggccctcaccatgcgagccctgcgatccctggcccgacgccaccagttcctgcacgacgaactggtcgacctggaagcccagctcgacgaactcaccacaaccaagaaccccgggctgcgcgccatgcacggagtcgggccggtcactgccgctgtcctgctggtcacggccggcgacaatcccgcccgcctgaccacccctgccgggttcgcggcgctctgcggtaccagcccgatccccgtgtcctcgggcaagacccaacgccaccgcctctcacgcggcggcgacaggcaggccaactgggcgctccaccaaatcgtgaaggtccgcatggtccacgaccaacgcacccgcgactatcgcgacaagcacctcgacgcgggctggaccctcgcagcggtctaccgggcactgaaacgcgccgtcgccagagaagtgttccgcgcactcaccggcaactgcgagatcccgaactacacagacctgcgaccagcccgccaggccaagaaactcaccctcacccacgccgcccagcacttcaacgtctggcccgcccacatctccgagatcgaactcggcaaacgccgagacgacaccctggcccagaactaccgagaatggctccaagccgcttgacgggagataggagcat

SEQ ID NO: 2413 - DNA, 1398 bp, unidentified
  source 1..1398: mol_type = unassigned DNA; note = element_369fb51
  misc_feature 1: note = core
  misc_feature 2..277: note = LE
  misc_feature 278..1387: note = CDS
  misc_feature 1388..1398: note = RE
  misc_feature 17..242: note = bridgeRNA
ctacttgtttagaaacacctcctagagctcattggcaggccagccttgagttcaggtgtccgacgggtggttcgccaaccggctgcccactgcctgcggtgtggctcgcaaatggagagcttccgtcgggcaccgacctgcggggagtggctcgagaggggaatgccaagctcgaagtagcgctgccctcctcgctgtcgcatccgagccgagcgaggaggaccgtgatggggaaggtggtgatcggcgtcgacccgcataagcggatcaacgcggtgtgcgtcgtggacgctcgcgggcgtgttgtcgcgagcgaacagttcgacaacagcgccgcggggttccgggagctgaaagtgttctggcggggttggcggcagcggagctgggccgtcgagggcgcgccaatggggtcggcaagtacttggcgcagcggctcgttgccgcgggcgagactgtcgtcgatgtctcaacccggcgtgctgcgttggcgcgggtccacgccggtgggaacggccgcaagaccgacgacaccgacgctgagtcgatcgcgatggtcgggctgcgcaccccgggcctggcggaagtccgcccggacgcgttgacggtcgagctcaagctgctggcgaaccgccgcgacgagctggtcgcgatgcggatccaagccgtctgccggatccaccgcgatctggtggttcttctccctggcggagtctccaagcggctcaccgcccgctacgccaaacaggttctcgccagggtccggcctcgcgacgagctcgggcggctccgccgtcagcttctcgccgagcagatcaccgacctcgaggcgatcgacggcaagatcttggcgatcaacaagcagatcaaggccaggatcaaggtcgccaagacaacactgaccgaggtgttcgggttcgggccgatcaacaccgcccgcattctgggcgacgccggcgacgtgtctcggttcaagtcccgtcatcatttcgctagctacaacgggacggcgccgaccgtgtggggcagcggcggccccagccagccggccgtcaacccgaaaggcaaccgcaagctcaatcacgccatccacattgcggcggtcacccaggtccgctcgaagacctcagcagggcacgcctactacgcacgcaagatcgccgagggcaagtcccacaacgaagccatgcgcgccctcaaacggaggatctccgacacggtctaccggcacctcgtcgccgacgcggcagctggcgcgaagcggggtccgggagggcagttgggggcgactcaaacagccagcgcgaccggctcaaccccgacaaccggctcttcggcaaggccacagcccggaccccgcacgaaggctacgccgcccgccgcttgacagaggggggc

SEQ ID NO: 2414 - DNA, 1255 bp, unidentified
  source 1..1255: mol_type = unassigned DNA; note = element_369fbce
  misc_feature 1: note = core
  misc_feature 2..206: note = LE
  misc_feature 207..1244: note = CDS
  misc_feature 1245..1255: note = RE
  misc_feature 2..206: note = bridgeRNA
ctgagtgtcactctcctctacgtctcacggcttggctcctaggctgattgcccgcccgcggggtgtggcctgcatccgttgtgccggccgtgagacacgtcggaccggccggcgtgacttgataggagcgtggcgacgcccccactcaggtgtgtccgccgaccggtcctcggtcgtcaacctcggctgaggaggagacggtggacatggtcatcctcggagcggatctgcacaagcggacgcacacagtggtcgcggtcgacgatcgcggccggaagctgggcgaacggaccgtggccgcgacgtccgatggacatctcgagctgcggcggtgggcccgccagtggcccgagcgccgctgggcgctggaggactgtcggcatctgagtcggcggctcgaagtcgacctcctccggtcgggcgagtcggtctgccgggtaccgcccaagctgatggcgggagcccgtcgttcggtccgagagccaggcaagagcgacccgatcgacgcgctcgcggtcgcccaggcggcgctccgtgagccggacctcccggttgccacgctcgacggcccagaccgggtgctccggctgttgggcgatcatcgcgacgaccttgtggccgagcgcacccgccacgagcagcggcttcgctggcatctcgtcgagctcggcgtggacgagccccgtccgcgctccctggatcgagtcgcggtccagacgtcgctccgaacaatcctcgctgaccgctccgagcccgtcgcccggttcgcgcgggaactgctcggccggatcgtcgacctgtcggtcacgatccgcgccctggagcacgagatcgagcagctcgtccgatccctcgcggggaccttgctggcgctgcctggctgcggccccctgacggccgcgaagatcgttggcgagactgccggcatgagccgttttcgatccaaggaagcgttcgcccgacacaacgggagcgccccggtcccggtctggtcgggtagcaccgtccgccaccgcctgaatcgcggcggcaacaggcagctcaacctcgccctccatcgaatcgcgatcacccagatgcggatcgatgcccgcggccgcgcatacctcgaccatcgtcgagccgccggcgacaccaagaccgaggcgatccgggccctccgacggcggatcagcgacgatgtcttccgtcgtctccggctcgacgaggcagtcagatcgacggctctggctgccgcggcttgacataggagcaa

SEQ ID NO: 2415 - DNA, 1356 bp, unidentified
  source 1..1356: mol_type = unassigned DNA; note = element_36a5830
  misc_feature 1: note = core
  misc_feature 2..64: note = LE
  misc_feature 65..1117: note = CDS
  misc_feature 1118..1356: note = RE
  misc_feature 1129..1350: note = bridgeRNA
taatgggatgacccgccccgtcctctcgctcagaatggggcatcgtcagcaagaggaggagcagatgacgatacgcaacaagccgcgaccggccgcagtattcggaatcgatatcggcaaaaacctttttcatgtggttgggctcgacccgaccggagcgccaatccagaaggtcaccttccggcgtgagacacttcttcagttttttgagcgcgcttcaccaactctggtggggatggaggcgtgcccaggatcccagtggctggcgcggaagatttctgcattggggcacaccgttcggatcattcccgcgcagttcgtgaagccttatgtgaagtcgaacaagagtgacattatcgacgcagcggcgatcgctgaagccgccacgcgaccgacaatgcgctttgtcgagatcaaaaccactgagcaggtcgatctgcaggcgctgcacaggattcgtgatcgcatgatcgcccatcgcacccgactgataaaccagatgcgtgccttctgcctcgaatacggcatcgccagccatcagggcgcaggcaagttcaaggtcgatcttcccaagatcctcgccgatgagggcaacgacctgacaccagccatgcggcgcattctagccatgagctttgacgagctcgccgaactcgagggtcgcattgatggcctcaatcgtgagattgaagggatcgcagcgcgtagcgatacggctcgccgtttgatgtcgatccccggcatagggccgttgggcgcgacagcacttctcgcatcggccggttctgcaaagcaatttaagaaggcgcgggatatggcagcttggttgggcctggtgcccagagaatattcgaccggcggcaagaccacactgcttggcatcagcaagcgcggaaacaaatatctgcgtcgcatgctcattcacggcgcacgatcctgcgtcaatcatctcgatcgaaccagagatcgcttgggcaattggctcgatggccttcagtctcgtatgcacaaaaacaaagtcaccgtggctctggccgccaagatcgcccgtatcgcctgggtgatcatgacccggtcgggctcaacctacgatcggcaggacccggccttcagctaggaactgccgtcgcggactgcgaggttcgtggggatgataacgagacagttgatcgacgcaccgtaagcccggggcaaaaaagcgggcgccatgcccgaaccatttatctgggaacgatgcgtgcggatctcatcatggcctggccacaacagtggtccactcgcgagaggccggatacatttacgcaggctgaaccgtcaccgtcgaaacgaccttgcacggacagggcgggtcataca

SEQ ID NO: 2416 - DNA, 1298 bp, unidentified
  source 1..1298: mol_type = unassigned DNA; note = element_36a751d
  misc_feature 1..2: note = core
  misc_feature 3..263: note = LE
  misc_feature 264..1112: note = CDS
  misc_feature 1113..1298: note = RE
  misc_feature 46..211: note = bridgeRNA
cttgtatattaaaagatatcttcaaacacaagataatttaaacccaaaagtttatagtgattgtcgatttctggggaagccgttgcaccctgaagccttgagcttgtgcgtagattggctccccaccctcgtcatccatgccgcggagtatctgaaacctgtaagcgaagcttctgagtctgcattcacaaggacggcagatgaagtgtcagggttgggaaaccagcaatcatgataacaaataaatcttaggaagataaaacatgaactatgtcggtattgatgtcagccaaaaagaattagtcgtcgtgaacacccaaggtaaagtgggtccagccaaaagctttgaaaatacaacaaccggacaccaggagattattaggctattggccaaattgaaaggcgaaacgcagatttgcttggaagcaacgggcgtttatcattttgatttagccgtcgcattgagtcgggccaatgacctcgaagtcatggtcatcaatcccaaagccgcgcataacttcgctcaggctttgatgaaacggagcaagaccgacaccattgatgcggccactttggcggcttattgcgaaagaatgccgtttgaagcatggcagcgtccggccgatgaagtcatcgccttaagggccatgggccgacgcatcgcggcgttaaataaattgaaaacacaaaccaagaatcaacgccacgccttaaaagcaacactggacacgccagatatcgtgatcgagcaaaccgaagaattagtcaacgtgctggaaaaacaggttcaggcgcatcgagatagcgctttggaactgatccgacaacacgaatcactgctgtgcgcctttaccttaattatcggtattaaagggattgccgaggccagcgcgatacagctcttggctgaattactggtcttgcctcaagacatgagcgcaaaacaatgggtggcttatgcggggctggatcctcgacactacgaatccggcagcagtgtcgccaaaaagccgcgcattagcaaggcgggtaataaatatcttcgccaagctctatacatgcccgctttagtggcaacgcgctatgaaccaaaattaccaccacttaattgaaaacaacgggctgaagaagctacaagccctttgtgctgtgatgcgaaaactgttgcatgccatccatggtatgttgaaaaccaataaggaattcgatggctctcgtttttatacgatacctgccgattcctctagctgaagattttaagtctttagccgaataggccttgtgttttaagagagtat

SEQ ID NO: 2417 - DNA, 1559 bp, unidentified
  source 1..1559: mol_type = unassigned DNA; note = element_36af25f
  misc_feature 1..2: note = core
  misc_feature 3..174: note = LE
  misc_feature 175..1380: note = CDS
  misc_feature 1381..1559: note = RE
ctcgtataatatttatataataatttactaattactaatctattttaaattttatgtaatatactattattagatactgtggattagtttatcactcctaccattttaatggttttattaaggctctaaccacaggctctttattcatttgttaattagttagataccactttgatggtttatttagaacgaggttacaatcttaaagagttaccgtggtctaaaacagtatcaaattcttttttattcaaggaggcttgtatgattttagttggagttgatgtcgcaaaagataagcatgattgctatattatgacttctgaaggagaagtattattcaaatcatttactattgctaataacatggaaggctttaatcagctttatgagaagatattatctgttatagataatttcgataatgtaaaaataggacttgaagccacaggacactattcttacaatatcttgggttatcttcttgataaaggtctgactccctatgttatcaatccgttacattcaaatctttatagaaaaagtctaagccttagaaagacgaaaacggataaagttgactcccgcatcattgcaagtatgttaatgtctgatgtgagcttaaagccctattcaaatacattataccacaatgaagagttaaaatcactaactcgttatcgttttactaaagttcaagaaagagcaaaactcaaaatttctatatcaagacttgttacaattcttttccctgaacttgaaaaattggtaccaaccttacaaatgaactctatttatgcacttttatatgagtttcctagtgctcatgcgataagtaaagcccatttaactagactaacaaatttacttaatacaacctctaaaggtcattatacaaaagataaagctgtcttgattcgtgaagccgcaaagaactccataggttcgaatatgcctgcaaaatccttagaacttaaacatacgattaagctaattaaagaattaacttctgaaatcaatgaaattgaagaagagataaaaattattatgaataaaatcaattctccaatattgacaattccaggaataggtttatcaacaggagctcaaatattggcagaaataggagattttaaaaatttttcttctcctgataagttactagctttcgcaggattatctccatcaacctatcaatcaggtaatatgtattcttccaatgcgaagatggaaaaacgaggctcaaaatacctaaggtttgctttgtttaatgcagccatctatgtaagctattgggaaccaacattttctcaatatttgaaaaagaaacgagtagaaggcaaacattattatgtagcaatatctcatgtagtaaaaaattagttagagttatttttcacttagaaaaaacaaatgaaagatacagtacagtaatctaattgttcataaattttaatactgtcaaaaggttctaactaaaccttcattttgtgatgtaaatttctaaattaacaaatttaaattaaatttttttatttttgatttgacatttaatagttagt

SEQ ID NO: 2418 - DNA, 1414 bp, unidentified
  source 1..1414: mol_type = unassigned DNA; note = element_36b01a6
  misc_feature 1: note = core
  misc_feature 2..127: note = LE
  misc_feature 128..1147: note = CDS
  misc_feature 1148..1414: note = RE
  misc_feature 1179..1414: note = bridgeRNA
atggaatgaacgcccccacctacccggcgggagacgctgaaaggaggcggaccctcgcaggccgacggcatcaaagtgcccagatggaagatcattgaggtcttcacaggcaaactggagggtccaaatgaagtatacgaccgtaggcgtggacatcgcgaagaacgtcttccagcttcactgggtggacgctggcacgggcgagatcgtgagcaagcagctgaaacgggccgtgttcctcgagcattttgcgaatcgcgagccctgcctgatcggcatggaggcctgtggaggttcccagcattgggctaggcgactgacggaaatgggccatcaggtcaagctgatgccagcgaagttcgtcaaggcattcaatatcggcaacaagagcgatcccgctgacgctcgtgcgatctggatggccacgcagatgcccagcaaacctgtcgctgttaagacggaagcccagcaggccgtgctggcactgcaccggttgcggcaacagcgaatcaagtttcgcaccatgcagatgaataccctgcgaggcttgctcgcagaatacggcgaggtgatggcgaagagccgcgctgcgctggacaaggcgattccaggtgtgctggcgaggctcgcggagagattgccggcgatgttgatcgattcactgcgtgagctatggagcgatcttgaccggctcgaccgacagatcgccgacatcgaacggcgcctgcaagcctggatgaaggaagacagggcctgcaaggcgatcgccgcgatccccggtgtggggctgctgacagcaacggctaccgttgccacgatgggtgacgcgaaggcgttcaggtcagggcgggagttcgccgcctggctcggcttggtccccaaacagattggcaccggcggcaagatccagctattgggtatcagccgacgtggcgacacgtacgtgcgcacgctgctgatccacggcgcacgcagcgtgctctaccataggaagcacgcgggagcgtgggccgagcaattgcagaagcgacgaccgtcaaacgtggtcgctgtcgcgctggcgaacaagatggcccgaacaatctgggcgatcctcgcgcacgacagaccgtacgatcctggacatttgactccaaacgcggcttgatgggtcgaacggaagagtgaagcttgcagggatggcgtcgaaaggttgcgttggcaatcgagcatgatgacaagacaggtcggaccgtggctcgccaaacctgaaaagtagttcgagcgttcagctcgcgcgtcaaatgaggggcgagtcagcggatttcatcggggcctgcagcgaagcggctgcaagaaggccggatataaagctgcaacccatcctgtcgaatcaacacgcgagaaaaactggcgcatcgggggcgttcatata

SEQ ID NO: 2419 - DNA, 1438 bp, unidentified
  source 1..1438: mol_type = unassigned DNA; note = element_36b16c8
  misc_feature 1..2: note = core
  misc_feature 3..202: note = LE
  misc_feature 203..1423: note = CDS
  misc_feature 1424..1438: note = RE
  misc_feature 15..223: note = bridgeRNA
gtcctaccttccaagcgtggttctgtgccggtcattcgtaagatcggcggacccagggttccgggtatggctgtgagcttgtcgccgttggatggctcaaagaacttggccgcccggagccccgcgacgactcgaccgctaattgggatacgcgacttgatcgctgtgtaggacaacgtcggcgaggtcgtctacgggatcgatgtgtgacgacgagctggcggaggtgaccgtgccccagatctgggccggagtggacatcggcaaggaacatcaccactgtgtggtgatcgacgagcggggcgaacgtctgctctcccgccgggtcctcaacgatgaaccggccctgctggagctgatcaaggacgtactcacgctctccgaagacgccttgtgggcggtggacatcaaccacggcggtgccgcgttgctgatcgggctcctgctcggacacgaccagccgatggtctacatcaccggccttgctgttcatcaggcgtcgaccgcctaccgaggtcagggcaagacggatgagaaggacgcgttcgtcatcgccgaccaggcgcgcatgcgccaagaccttggcctactacgacccggcgacgagatagccgtcgacctgcgcactctgaccgcccgccgcactgacctggtcaacgatcggacccgccagaccaaccggctgcgagctcaacttcttgagttcttcccggcgttggaacgggcactgaacctgagtaagaagggcccggtcgtcctgctgaccggctatcagacgccggccgcgttccgccgcagcgggatcaaccggatcggaacctggctgaggaaccgcagagtgaagaacgccgccacgctggccgagaccgccgtcggggcggccaagtcacagcacactgcgctgcctggggaaaagctcgctgccgcgatggtcgcccgcatcgccaagggggtcctggctctcgacgaggagatctccgaactcgacgcactcatcgaggcccggtttcacgagcatcggcacgctgcggtgatccgcagtctgcctggcatgggcgccctcctcggcgccgagttcatcgccgccaccggaggcgacatggacccgttcggcacggccgaccgcttggcctccttcgccggcctgtcacccgttcctcgtgactcaggccgcgtcagcggcaacatgcgaaggccccggcgctaccaccgcggcctgctccgagccttttatctctcctccatggccagcctgagaacgtgcaccgcttcccaggcctactacgcgcgcaagcggaacgaagggaaaggacacaaacaggcgttgctctctttggcccgccgacgagccaacgttttgtgggccatgatccgcgacggagcgtgttacatagccctaccgaaagtcacggcggcggcttgacatcggcattgggaa

SEQ ID NO: 2420 - DNA, 1502 bp, unidentified
  source 1..1502: mol_type = unassigned DNA; note = element_36b3583
  misc_feature 1..4: note = core
  misc_feature 5..268: note = LE
  misc_feature 269..1477: note = CDS
  misc_feature 1478..1502: note = RE
ctcactggactaccctcccgcgaaagtccgcggtcctggcgcggtcgagaggagacagtgaggcgagatgatcaacgttcggggagagccacgcgcgctcgccgctcgacggccagtatgagacccgctcccccgaaccaaacgaagagaggcccagaccggccacaggatgacgcgccaagtgccccagcaggccagagcgccaatcagtgagcgaccggcaggacctctcaccgcgcagtgtctcgccgtccacggaggcgacgcaatgagattcttggtcggcatcgactgggccagcctggcccacgccgtctgcatcctggacgaaaccggccgcattcactggcagggctccgtcccacataccgccgagggcctcgcccagctcctcggccacctgcgtcgctttcgccggcgcgggctcgtccgcgtcgccctcgaacggccctcgggcgtgctcgtcgacaccctcctcgaggccgggttcgaggtagtgccggtccacccgaacgcgctcaaggcgagtcggccccggtactctgccgccggcggtaagaccgacctgggcgacgccttcatcctcgccgacctgctccggaccgatggccaccggctccggcccctgcgcccgccctccgacgacacgcgcgcgctccgagccctcgtgcgcggccgagacgacctcgtcgcccagcgcctcgccctcgccaatcagctccgcgctctgctcgagcggttctggcccggggccgccggcctcttcgccgacgtcgattccccgatcgccctcgcgttcctcacccgctaccccacaccgcagagcgccgcgcgcctcggggagaagcgcctcgcccagttcgtccggcaacacgcctactgcggccggcgccccgtcgtcgatctgatcgcacgcctgcgccgcgccccgaccagccaggtcggcgaggccgaagccgaagccagcggggaagtcgtccgcgcgctcgtcgccgtcctcatccccctcgtcgcgcacatccagcaactgtccgccgccatcgccgccgcgttgccccagcatcccgacggccccctcgtgcagagtctcccccggagcggcgccgtcaacgccgcccagatcctcgccgagctcggtgacgatcgcgcccgcttccccagcgacgggcaactggcggccgagagcggcctcgccccggtcacgcacgcctccggcaaacaccacgccgtcgtcttccgctgggcgtgcaacaagcgactgcgccgcgccctcaccacattcgcggacaattcccgccacgcctcgcggtgggcggccctcgtctaccagcgcgcccgcgcgcgtggctgtcgccatcagcacgccatccgcatcctcgcccgagcgtgggtccgtatcctctggcgctgctggcaggaccgtgccgtgtacgacgtcacccgccatcacgccgcgcaggcgctcactgccgcgtgacgccgtgagggttgacacaggatgt

SEQ ID NO: 2421 - DNA, 1724 bp, unidentified
  source 1..1724: mol_type = unassigned DNA; note = element_36b9cde
  misc_feature 1..2: note = core
  misc_feature 3..358: note = LE
  misc_feature 359..1585: note = CDS
  misc_feature 1586..1724: note = RE
  misc_feature 51..331: note = bridgeRNA
ctcgtataatatcttttagatacaataaatgtaccttgataacttaattaaatttgttcaataggcttagtaaagcccatgatataattgttccttagtgtcaatcaggtaataattctgttttcccctgtcggatcagagaatgatcacttcataaatagtctgttcccctgacattgaagttagcttcagaccagctggctgtttgcttaagttcatggactgcctcttagcagtggggttcgcattagtccatcttaagctggattcttatatgcgagggtgtcgatgctccatgatcatgggttttaccaagccgattgaacactcaaatccaacatataaagaaggtgaaaaaatgaacccactttacgtcggtattgatgttagtagtaaatccaatgtcgtttacctgatgcttcctgatggtaagaaacatagtaacttctctgttccaaactctcaggatggatcaactcagatgataaagagaattctttctgtacttacatctcattcctttgacactgtcatcatcgggcttgaagccacttcagtgtatggtgacaatctggtctatttcttaagggaagatgccattctggcaccttataacagaaagattcatgttctcaatcccaagcaggtaaagaagtttaaggactcctacaatgacctgcccaagaatgattatattgattccttcatcatcgctgattgcctgcgctttggtagaatcaacaatgaggtttatgtttctgattatcgctataaagctcttcagaacctcacaagggcacgtttttacgctgtccaaaacctcaccaaggaaaagcggcgttttataaacgtcctattcaagaagtattctactatgacgcaggagaaggtattctctaataccttcagcactactgcctttgctgtctatcaggaaatcgaatctgcagaagcattggcaaatatggacttacaagagcttacggactttattatagaaaaaggaaagaaccgctttcctgatcctgatgccgtagccaaagccattcagaaagctgccagaagttcctaccgcttacccaagacggtgaatgactccgttaatcaggtgctttctatatccataacctctatgaaggcattggaatctcaaatcaaggagtttgataaagctattgaagctgaaatgcaactcctacccaatgtattgacatccattcacggtattggtccggtaatctcagctggaataatagctgaaataggtgatatcaatcgtttccctaaccaagcaaaactcggcaaatatgcaggtcttgcttggaagcaacatcagtctggaaattttgattctgaacatacccgactcatccagtcaggtaacagatttctaaaatactatctgtacaaaggtgccttttctcttgtgaggtgcgacacagagtattccaacttctatcactccaaatataaggaagtgaacagattccagcacaaacgtgcactcgcattaactgcccgtaaatttacgcggttagtctttcgactgctgaaagacaatcgtttatatcgtgcagcagaatagataattctttctgctgattcataccctgctttaaaaaagcagaaatagcagggtttattaaggtcacccaattttcgacaaatgatatgcaaatgtattcaaaaatgtattaattcatacttgacatatcaccgctgga

SEQ ID NO: 2422 - DNA, 1203 bp, unidentified
  source 1..1203: mol_type = unassigned DNA; note = element_36ba787
  misc_feature 1: note = core
  misc_feature 2..211: note = LE
  misc_feature 212..1177: note = CDS
  misc_feature 1178..1203: note = RE
  misc_feature 34..202: note = bridgeRNA
tcttaagtttgtattttataaatttatagtataaatcagaaagcacaaaagagagaattaaggttagtatacacggtgaagctttagacttcgacaacattgataatcctctctctttttctactaaaatttcgttcagttctgtgagacctagatctcgtttttaagttgttgaaatcctagtagtatgtactttcataattgtgttcttatggataaagataaaaaaatttatggtattgatattagtaaaaaggtatttgatgtgtacactcaagaaacgggtcatcatcagtttaaaaatgatgaaaagggatttgttttatttgctaaaagattaaagaaagggagtgttgttgttatggaagctacaggctattatcactatcgtcttgcccaatatttgtataaaaaagggatcttggtttcagtagtaaatcctttatcgattaaacgttttattcaaatgaaattggccaaagtaaaaacagataagagtgatgctaaggctatctgtgaatatggtcaatccaatgagcttagtatgtacacagcacttactgacgtacagagtgaatgcttgcagttatttagattattggatacttatttaaaaaagcgtacagccacaaagaacaaaattcatggagaaaaagtattaggcgaaccttccaaatatgtttttaattctttaaagcgagatttaaagcatttaaataaagaagtcaaagggatcgaagatagactattaaagttggtaaaaaaggagcaacaagatcaattgactttattgaaaagcattccaggaatgggcatgaaaactgctttatttttgattgtggtgacggacggatttaagaagttcgacaatgcatcacagttatgtagttatgtgggaataacacccacaatcaggcaatctggaagcagtgtgaagggtcggagtagaataagtaaagtgggaaataaaaaattgcgaaatctattatttttatgtgcattttcggcatgtaaatataataaggcttgcagagaaatttatgaacgaatagtaaacaaaggaaaaagtaagaaattagccttaatagcagtggccaataaattgctgaaacaagcatttgccatagcgaaatcagggaatccttatgatgaaaaatatgtatcgaaattgagttaaaaaaaattggtttttaactcagttct

SEQ ID NO: 2423 - DNA, 1404 bp, unidentified
  source 1..1404: mol_type = unassigned DNA; note = element_36cdac0
  misc_feature 1: note = core
  misc_feature 2..226: note = LE
  misc_feature 227..1390: note = CDS
  misc_feature 1391..1404: note = RE
  misc_feature 12..238: note = bridgeRNA
ctacttaacactggtgtcagggcctaatcccggccaggatcgggtccaggtgcccggtgagatgctctctaatcggctgcccaccgtcggtatcggtgtggctctctcatggcttgcctctcaccgggcatcgtgccgggaatggctgaagcggggtctgcccagctcgaagtagcggtgccttcccgcgcgacaccattgacgtcgaatcgggaaggatgtgctggtgacggtcatcatcgggatggatccgcacaaacgctcggccacgatcgagatcatcgaccccgctgggacggtgctgtcgaccggtcgttatggcaccgacgctgtcggttatgccgaaatgcttaccgccgcacagcggttcggtgatcggatctgggcgatcgagggctgcaacggtgtcggccgacacctggcgcaccgcctcgtccatgacggtgaaaccgtggtcgacgtcccggcgaaactgtccgcgcaggtgcgagtgttcgcgaccggcaacggccgcaagaccgatccggtcgacgcgcactcggtcgcgttggcggcgctgcggtcaccgaatctgtgccgggtgcaggtcgattcggagctgatcgcactgggcatgctcgccgatcgccgcgaggaactcggccgggcccgcaccgacacagtcaaccggctccatcgcctgctgctggaattgctgcccggcggggcgaagaagttcttgtcggccacccaggcccggaaactggtcgcgagtgtgaaaccacgggatccggcgggcaaggtccggcgccgcctgaccgtcgagttgatggaggacctggaacggatcgaccgcaagatcaaagccgcggacaaagaactgcgcgaactggtcggcgagcgcggcccgattctgatcgggctcaacggtatcggcccggctggcgcggcgcggttgctggccgatgtcggtgatattcaccggttctcggatcggggtcggttcgcgtcctggaacggcaccgccccgctggacgcctcctccggtgagcagaaacgccatcggctctcccgcgccgggaaccgcaagatcaaccgagtgctgcacaccatggctattgtccaactacgcaatcccagtgcgggacgggtgtattacgacggcaagaaagccgcgggcaagacgtcgatggaagcaatgcgggcgttgaaacgacgcctgtcgaacgtggtctacaccgccatgctcaccgatcaacgcaatcgtgaaacggcaagcccgggagggcaatcgggggcgactactgactccagcgcgaccggcttggccccggacaccggtccttcggacaagccacaacccggacttaccaacacccaccatagccccgacctgcacaccacaccttgacaagagaggggagc

SEQ ID NO: 2424 - DNA, 1262 bp, unidentified
  source 1..1262: mol_type = unassigned DNA; note = element_36d1cfe
  misc_feature 1: note = core
  misc_feature 2..74: note = LE
  misc_feature 75..995: note = CDS
  misc_feature 996..1262: note = RE
  misc_feature 1026..1259: note = bridgeRNA
taatgagatggtcgcccccacaccctgcgagggctaagctttagcagggtgctttattttcggagggcatcatcatgagcgagtcagcgctgataggtattgatctcggtaaacatacgttccatctgcacggccaggataagtcaggccgggaggtgtttcgcaaaaaatgttcacgggcacacatgatgcaattttttgccagctcgcagagctgtgtcgtggcaatggaggcctgtgcgggatcgcactgtgttgctcgtcagttggcggcaattggacacacgcccaagctgatttccccgcagttcgtcaagcccttcgtcaagggcaacaaaaacgactttgtcgacgctgaggcgatttgcgaagccgcttctcgtcgttcgatgcagatgcacggttttctattggaatttggcgtcagcctgcccagaggtttggccatcatgaagcgtctggcggttgttttggctgagcatgaacttcccgttcgtctgacggtgctgctgcagcgtttgcacaatcacctcatctatctggataagcaaatcaaggcaatggataaagagctggcatgccaagtggccgatgatgatctgggtagccgtttgctgagcattccatgtgtaggcccgatcaccgccagcctgctagctgtggagatgggcgatggtgagcagtatcgatgcagccgggactttgccgcatcagtgggattggtacccaagcaatacagcaccggcggcaaggccaacttactggggatcagtaaacgcggcgacaagcaccttcgacagttgctcgtgcaatgttccagggtctacatgcagagactcgatcaccagaaaggagccttggccgactgggttcgttcattgctgagtcgacgccactccaatgttgtggcctgtgccttggctaacaagctggcgcgaatcgcttgggcgatagccgcgcaccatacgcagtacgaagcagggccaggcgcctgagcgcctgattcggcagttgttgctgtaccacgatttacctttcaggttttgcgatagctgaatagtggatgacgtaaacggcctatcagcctgacgaagaacctgttttaaaaattggctcagcaagaagccgttagccttttcaggatcgttaggcgcgactctcatcatggcgcgggtgaatcatccaatagacgccggatagatttaagcaagccaactacttcgcccatgaatcagcattgcaaaaaaaggggtgaccataga

SEQ ID NO: 2425 - DNA, 1651 bp, unidentified
  source 1..1651: mol_type = unassigned DNA; note = element_36d567f
  misc_feature 1: note = core
  misc_feature 2..264: note = LE
  misc_feature 265..1305: note = CDS
  misc_feature 1306..1651: note = RE
  misc_feature 90..244: note = bridgeRNA
agtaaagccaagcctttgtcttgattgaaatcagagtggaacacagaacgtttccgccgcctatggcggcagaaacgtttttagttacctttgctgtaggcataagaagcaagccgtttttttcttgggttttcaatcccacaaaagagtatggctccttgtcctgcgaatcgaagattggtcgtcagaggccgtatagaagaatgctcatcgacaggacatggcttatgccatttatccatcaacaagagtaacgatattaccatggcaaagaaagcaaaaaaagtcaagaccgccaaaggtgcggaacttcggatagttaatcccgatgcggcggggatagacatcgcggacggtatcatgcaagtttgcgtccctgccgaccgatccaaggacaacaaccgcgcgttcggagcatatacatccgacctgcatgccatctcggcatggctcagggagtgcggcataaagacagtcgcaatggaatccaccggggtttactggataccgctgttctgccgccttcaggaagacggactggatgtcgtattgaccaacgcaagggacgtgaagaacataacggagaggaaaaccgacgagtcggatgccgaatggctgatgttgctgcaccagtacgggttgctcaaggcaagtttccaaccgcacaacgacgccaaacggatgaggacactcacccgtcaccgtgacaccctctcgcgtgaggcctcaagcatagtcctgcgtatgcagaaagccatgcagcagatgaacataaaacttacgcttgtcctgtctgacattacgggaaaatccggcatacgtatcatcgaggccattcttgcaggtgaacgtgaccccaagagacttgcggacctggctgacatccagtgcaagactccgaaagaggaaatagccaaggcacttgagggcaactgggaagaagacctcatgtttgtcctcaggcaaaactatgatactttcaaacattattgtacccaacttggcgagtgcgatgcagaactggagaaactcatggaaaactaccgtgcggaggttgccaaagtggaagatacttcatatagcccggcaaaaaaacgccgcgattataaaaagaccaggcataccgtgggcttcgacgtggaaaggaaagcatacgaaatgtggggagtgaacgtttttgagataccgggcataagccacctgaccgcacttgaactgatgagtgaactggggcacgactttacccggaagttcccgtcttccaaacagttctgctgttggtgcaacatctcaccgaacacctagatatcaggaggaaaaagaatatcaagccacgtgccacaccgtcggaacaatgtcgggttgatttttagaagtatcgcttcttcgctcgccaatgcgaagaaccaattggggaacttctaccgcagaatacgttcacgggccggaggtaaagccgcagtcattgccactgcccacaaggtagccgagatattctttgccatggttgcaaaccaaacaacttataatccggaaagagtaggtatagacgagaaagtattactcgaaaaacggattacaagatacaaacgtgaattagaacgaattacagggacacatatagaaattggcaatgcatgtgttccataga

SEQ ID NO: 2426 - DNA, 1469 bp, unidentified
  source 1..1469: mol_type = unassigned DNA; note = element_36e58c8
  misc_feature 1: note = core
  misc_feature 2..110: note = LE
  misc_feature 111..1127: note = CDS
  misc_feature 1128..1469: note = RE
  misc_feature 1163..1389: note = bridgeRNA
gaatgaaagggacttccccgtcccggtcttgccgcattgcggcccttggcacgcgagtgccacgatgggaagtgcgaaatctcatcaatctgtccgagaggggaaagtccatgagcattctgaccgttgggatcgatctcgccaagagtgtattcgctgtgcatggcgtggatgaggctggccgcgccgaattggtgcgcccggcggtgccgcgcgagaagctgcatgaactcatcgcaacgctgccgccatgcgtgatcggcatggaagcatgctcgggcgcgcatcattgggcccggctatttcaggcagcagggcatacggtgcgcctgatcgcaccgaagttcgtcacgccttaccggatgagcgggcggcgcagcaagaacgacgcggccgatgccgcagcgatctgcgaggccgtgcaacgaccgcacatgcgctttgtgccaatcaaaacgctcgaccagcaatctcagctgatggtgcaccgtgcccgccaggggttcgtcgagcagcgcacggccaccataaaccgcatccgcggcctgctggccgagttgggtatcgtgctgccgctcaaggcggccaccgtccgtcgacgtgccggccagtgcctggaagatctgcccggctgggccaacatggtcatcggggatctactcggtgaagtcgatcggctcgatgaacgtatcgcgcagtacgaccgccatatccgccagatcgcccgccaggacatccgggcgcagcgcctgacccggctgagcggcgtgggcgagaccaccgccacctgcctggtcgccttgatcggcaacggtcacgacttcgagtgcggccgccagttcgccgcttggctcggcctggtccccggtcagtacagctctggcggcaaggcccgcctcgggcgcatcaccaaggcgggcgacgcctacctgcgcagcctgctcgtcatgggcgcccgagccgtgctggccgcagcccgcaacaagacggacggcttgagccgctgggccctggccgtagagcagcgacgcggctactggaaagcggtggtcgccattgccgcgaagaacgcgcgcatggcgtgggcggtattgcgacgaggcgaagcctttgcactgccgacttgaaccctcccggcagcccatcgaccagaacgaaccgatttgaccgccgcgtgacggcaagcgttgatgacaacaggtctggacctgcgcggggagtgaccgattaattcaagggcagccatacgagtgccggctaacgaatgggtcccccgcgtgcgtccttcatcagggtccgcagccaaacgacggctgcaacgatgaccgtttgtagtttagccagtccgcaccttgttgtttctgcgcactttgctgcttgcccggtgctgtcgtatcgaaagacgaggatcaatgcccgctacgtgggcaggggggcgctattgcttgactaatggggaagcccttgta

SEQ ID NO: 2427 - DNA, 1365 bp, unidentified
  source 1..1365: mol_type = unassigned DNA; note = element_36f1a89
  misc_feature 1..4: note = core
  misc_feature 5..277: note = LE
  misc_feature 278..1111: note = CDS
  misc_feature 1112..1365: note = RE
  misc_feature 1084..1354: note = bridgeRNA
atgatggggtggacgccccccgacggcatcgatgtgccagagtggaggtgttgaacaccacttgagggagggcgtccatggcagaggttaccacgatcgggctggatatcgccaagcaagttttcacgcgcatggagcagatgcgagcgggcgagcggtattcagccgtcgactcacgcgcggcaagctgctcgacttcttcgcggcccatccgcggtgtctggtggcgctggaagcatgcggcggcgcgcatcactgggcgcgcgagctgcgggcgatgggccacgaggttcggctgatcccaccggcatacgtgaagccgtacgtaaagcggcacaagaacgatgcggtggatgccgaggcaatctgcgaagcggcacagcggccgagcatgcggttcgtggcggtgaagaccgagcagcagcaggcggccgcgctggtgttccgcacgcgcgaccttgccgtgaagcagcgcacccaactcggcaatgcgatccgcgggcacctggccgagtatggctgggtcgcgcccaagggcacagctcacctcgcgatgctggctgatctgctcgagggtggcgagatcggggaaacgctgcccgaggcggcacggccgatgttcgcgatgatggtcgacatgctggccgggctcgacgagcggatcgcggcgctggacaaggagatcgcgcgtcgcgcccgcgaggacgaggtggcgcgccggctgatgacgatccccggcatcggtccgatcaccgcgaccgctattgcggcgatagcgcctccggccgagacgttcgccaagggtcgcgactttgccgcctggctggggctcgtgccgaaacaggcatccactggcggcaagcagaagcttggtgcgatctccaaaatgggagagcgcacgctgcggcggctgctcatcatcggcagcagcgcagtcgtgctccaggcgagcaagcgcggcgcgccggctggctcatggctggaaggcatgctggcgaggaagccacgcatgctggtgacggtcgcgctcgccaacaagatggcgcgcaccgcgtgggcattgcgggtgaggcaagaggattacagagctccggtcgcagtcgcggcgtaagccaaggcgggccagaggcgtcggagggcgcagtcggtcgaaggagggtatggcacaacagtcggcgagacggggccggaagaaccagatagacccatcgtgtccaagaacacgcgattgtgaagtggttccggtccgcgaactcccatacgggccagcagcttcatcgctgcattacaggccggacagatggcagcatccgactctgtgtcagaactcccgaataccgcttgcaaccgaaggggcgtccacag

SEQ ID NO: 2428 - DNA, 1102 bp, unidentified
  source 1..1102: mol_type = unassigned DNA; note = element_36f2fa0
  misc_feature 1..2: note = core
  misc_feature 3..163: note = LE
  misc_feature 164..1090: note = CDS
  misc_feature 1091..1102: note = RE
  misc_feature 1..158: note = bridgeRNA
cctgtctgatgcgacggtggtatgaaggtgttgcggaagggagcccgtcccccccgagggtctggagcccgatagggagcaagggtcccttccgcgttggtcacaaccctgaacagttgcttgggactgctgatcccgcacgacatggacaggagcctataccatgccacaagccgtcatcggctgcgacctttcgcgtgccgtcatcgacatttgcgagctgccatcaggccggatcgggcagatcgccaatacacccgaggccatcgccgtctggctcgacacgctcgaccgcgacatccgcctcgtcttcgaggcgaccagcggctgcgacggcgacctgatcgctgcgctggcgacacgcggccatcccttctcgcgcgtcaatccgcgtcaggcgcgcgagttcgccagagccaccgggacgctggccaagaccgaccgcgtcgatgcccgcgtgctcgcgcagatgggcgcggcgctggacctgcccgctaccatcccgctcagcccagcccgttcgcgcctggccgatttcctgcgtcgtcgcagacagttggtcgacatgcgcaaagccgaaaagctgcatcgccacagcgcaggtcagcccgaaatcgtacaagccatcgaggccatgatcgacctgctcagccagcagattgcccagctcgaccaccagatcgcaggcttcatcgcccaggatcaggccctgtccgaacaggcccggctgctgacggctgttcccggcatcgggcccaccgtcctcgccaccctgctcggcgaacttcccgaactcagcacgctgtgccgtcgcaagatcgcctcgctcgcaggcctggccccgcacgcccgcgaaagtggcacatggcgcggcgccaggcgcatctggggtggacggcgaaaggtccgcgaagccctctacatcgccgccctcaatgcctcacggcgcattcccgtcctcaccgccatgcgcgacaggatgcgcgccaaagccaaggccccaaagaccatccttatcgccgtcgcacggcaactcctcgtcatcctcaacgccatgatccgtaagcgacagcctatcgccctcgggtgaacatcacagttg

SEQ ID NO: 2429 - DNA, 1380 bp, unidentified
  source 1..1380: mol_type = unassigned DNA; note = element_36f5bad
  misc_feature 1..2: note = core
  misc_feature 3..48: note = LE
  misc_feature 49..1107: note = CDS
  misc_feature 1108..1380: note = RE
  misc_feature 1087..1367: note = bridgeRNA
agatgggatggttgccgccctccccagacggcatcgcaatgtgccagcatggtggtctatgagccacgaagcggagaggacggcgagatgaaggatatgatgattggggtggatctggcaaagcgagttttccaagtccacggagcgttgtcgaacggtgaggtgcagtttcgcaagaagctgacacgccaacagtttcgcgacttcatggagaaacaggcgccaagccttgtgattttcgaagcctgcggcagcgcgagttactgggctcgtgagatcgaaagtcttggccacgaggtcaaactgatcgcgccgcagtacgttcgaccgttcgtcaagcgccagaagaatgacgcagccgatgccgaggcgattgtcatcgctgctcgtcagcccgagatgcgcttcgtcatgcccaaaaccgtcgagcagcaggcccgggccgctctgttcagggggcgtgatcggatcgtccgacaacgcaccgaagatgtgaatgccttgcgcgctgtcctctatgagcacggacacgtctttcctgcggggttggtccacctgaagcgcatcgaggcgctggtcgaagatgatacctgcgatctacccacaatgatccgcgaggaatgccgggatcttctggcacaaattgcagagaagacggggaggatcgcggcaagggacaagcagctgaaggacctggcaacccaaacggatacggcccggcgcttgcagaccatgccgggtgtgggcccattgactgccctcgccgtcgaggcattcagccccgacatggcgcagttcaagcgcgggcgcgacttcgcggcctggctggggcttgtcccgcgacagcactcatccggtggaaaggagcgccttgggcgaatctcgaaagcgggacagaccgatatccggcggcttctgatcaccggtgcgatgacgcggctgttgggccgtgcacgtcgcaagatattggctgagagctggatcgagcgcatgttggcacggaagccgaagatgctggtcgtaatcgcactggccaacaagatggctcggcagatctgggcgatactgacgaagaacgaggtctacaaggatccggcgttggcatgagcttcagatcatgagcctcatagtcggcgccgaggggagtgtgagaagtcgatgatctgaatgggtgtaatgatcgaacagatctgggttaggaaaaccagcgtctggctgcgtgcctccgagcacgaccgatagatttggacctgatccgctgatctccataccggcccgcggcttctgatggcgccgcacattaaggcctgaaagaagaccgcactcgatcacacgccaataggatcaaaaacttcttgcatcacgggcggcaaccaaaga

SEQ ID NO: 2430 - DNA, 1581 bp, unidentified
  source 1..1581: mol_type = unassigned DNA; note = element_371465c
  misc_feature 1..3: note = core
  misc_feature 4..281: note = LE
  misc_feature 282..1457: note = CDS
  misc_feature 1458..1581: note = RE
  misc_feature 26..257: note = bridgeRNA
cacgtataatccaattatcagtagatgattggattttttcctttctcccagctatcgctgggtttataactcaatctctgatatattttgaaaaggcactgtggatctgtttctatatttatacagctttgactggttggaggtgtctcagaccacagcttttcgtctgttactgttaatcagtttgttaacgctttgacgtttatattcacgtgtatacacagccgaactctctgtggaagacaacagtgctcaaaatatttaccaggaggtatttgcctatgtccttatactttattggaatagatatttccaagtacaaacatgattgctgcatcatttctgcagctgatcaaaaagtagtatcaaagtttacaatcaagaacaacaaagatggctttgaaaaactacttacttctattaactctctttcaagtcctgaagacataaaaatagggtttgaatctactgcccattatgccctcaatcttgaactcttccttgaaaagtctctccttaccttcatggaagttaatcccgtcctcatttcggaatacaaaaagtccacaacattaagacgcacaaaaacggatcctattgactgcgaatcaatcgcccgttggttaatgaccgtagagtacaaaccccattcaaaaggattctaccacgcttattctcttaagtcactaactcgtttacgcgataagcttatccgtcagcgctctttttatcttgttaggattacgaatgtattagatcatacatttcctgagtttaagcctttcttcagggaacatttatctaaaaccgcattttttttgctagaaaactatggttctgcagaaaagatgtctcgtatgaactcaaactcttatgaaaaactacgctctatttcaaaaggtaaattttcaccacagcaattcattgagttgaaacaactggcatctaatactgtcggagtaaacaattctatttttgatgttgaactgaacagcttgctcactctatataaatctctgtcaaaagagattgaatctatcgaaaaggaaatcattactcttattgaagaggttcatccacactatatgtcaattcctggaataggtcctctatcagcggcagtaatctattctgaatatggcgacatatcaaacttcagcaaaccaagtcagatgttagcctttgccggaatagaacctagtgttaatgattccggaaccgaatcacatggaggaaggatggtaaagcgtggatcatcacaactccgatacactctaattaattgttgcttacctctcattcgtttcgatatgacttttgcagaatactatgcaaagaaacgagcacagggcaaacctcatagagtagctattacacatgtggccaaaaagcttataagagtcatctacgcattggagagacaagatgtcgattataatgctcatctagttcgctaacatctacatttctcagaacactattcatccatctgaaatacagatgttcagatggtttattaaggttacccatttttatcaagcaaatattatttcaaaaacctattgactatttatagtttga

SEQ ID NO: 2431 - DNA, 1440 bp, unidentified
  source 1..1440: mol_type = unassigned DNA; note = element_3715d2f
  misc_feature 1..2: note = core
  misc_feature 3..150: note = LE
  misc_feature 151..1170: note = CDS
  misc_feature 1171..1440: note = RE
  misc_feature 1207..1440: note = bridgeRNA
aaatgtaatgaacgcatcccacttcttaagtacagagcagaatggtgattgaaaaaagtgacgctggcaggagtggagcctcgcagatttacggcatcattgtgcccaatacgggatgcattaagctccctcagactggagactccgcgcatgaaatatacaccggttggcgttgatatcgcaaagcatctgattcaggttcacttcattaatgagaacacgggtgaagtcgtggataagcagcttcgtagcaaagattttctgattttcttcagcaaccgggagccctgcttgattggtatggaggcttgtggaggctctcagcactgggcacgcgagttggaaaaacagggtcataaagtcaggttaatgcaggggcgattcgttaaggcatttgtcatgggtaacaagaatgacgtgatggatgcccgtgctatatggatggcagttcagcagccaggtaaagcaatagcagtgaaaacggaagaacagcagtcggtactggttctgcaccgctcgcgcagacaactggtgaaattccgaaccgcgcagattaacgccctgcacgggacgctgctggagttcggcgaaaccatccataaaggccggtcagcaatggacaaagagttaccggcagcactggagcggatgaggattaagttaccaccgtatctcatcgcggtactggagaaccaatacaacaggctgaatgagctggattcactgatagataaccttgaaaaacaacttattagtgtggcgcgacaaaatgaaacctgtaagcgcttgatggaaattccaggagtaggaccattaaccgctacggcagcagttgccaccatgggggaagccgcagcattcaaatccggaagggagtttgcagcttatatcggtctggtaccaaaacaaaccggctctggcggaaaggttcgtcttctggggatgagcaaacgtggtgacacttatctgaggacactatttatccacggggcaagggcagcgtcgttagttgctaaagagcctggcccatggataactgaactgaaaaaacggcgcccgaccggcgtggcaatagtggcgatggcaaacaaacttgcacggacagtatgggcgatagccgctcatgaccgtaagtacgacaaaaatcatgtcagtatcaggccgtattaatcgctgataccgataaacattaactcttaaaaagggtgaatgctgaaaggttgctatggcggccagcgtgatgacaaaggcaggtaagaccgtggctcaccaaacctgaagaggatcttgggcttaaagcccgccgtgaaaataaggcgtgagtcagcgaattacataggggctcgcagcttatggctgcaaaaaaagccggatataaagctgcaacctacccgtcaatgtcagaataatggatgccttgcaaacgggatgcgttcatat

SEQ ID NO: 2432 - DNA, 1551 bp, unidentified
  source 1..1551: mol_type = unassigned DNA; note = element_3717739
  misc_feature 1..3: note = core
  misc_feature 4..279: note = LE
  misc_feature 280..1446: note = CDS
  misc_feature 1447..1551: note = RE
  misc_feature 13..259: note = bridgeRNA
cttatataatttatttaggttgataaaggtaacctataacccttattgactgtatgattatacaggatattcctgtataataactgtattagatagagtgtcatcgtcgtctccttgaggctatgacttcgtactcgaaagactgatgcctctgtctgataaacagtttacgaatgagttagatgtcggctcttttagagtacctcgtatttcgcataaggtggtaacgtttatcagtacagtggattctatctaaaataatttatcgtggtgatatttatgttcttcttaggtattgatattggtaaaaatacccatgtcgcttctttgctcgatgaaaaagctaaagtcatattcaaagcctattcgttcgctaatacactagatgctgctgaagcacttttagttaaactagaaccatacaaagattctcttgaaataggaatggaggctactgggcattattggctttccctttactcttttcttgctgagcacaacttcatcgttcatgttatcaatcctattcaaaccgacggctggcgtaaaggtatcgaaatccgtaagcgtaaaactgatgtcattgattctgttcttatcgctgacttaataagatacggagattttcttgaaacatctttagccgatgaagatatcctttctttacgaaatcttacacgtttcagagcttatttggtgaactctgtatctgaccttaaaagaaaagctattgctgtattagaccaaatattccctgaatatgcttctgtgttttctaatgtgtttgggcaaacatctaaagaacttttgaaatccttatcccttccgtctgattacgaaaatctttctgctacaaaaatagaagaagtgttgtccaatataacccacaagaaaaaagcttctgaaaccatttcaacactttctgacaaagctagtcgttcttttggcatatctttctgcaaggatagctttgcattccagttaaaattaattattgagcaaatttgtttcattgaagaacaaatcgcttctgtagagctggaaatagaacagcttatgtctaagctaggtacaaatattaaaactatccctgagataggaaatgttattggagcagtaatcttaggcgagattggtgatattgagcgttttgacaatccgtctaaacttgtcgcttatgctggtttagacgcttcaatatctcaatccggtgaatatgaagcttcttccggtaaacttagcaagcgcggttctccatatttgagaaaagcactatatatggctgctcagcgagctgaattttgcgatcctgttttccacgcttattatgagaaaaaacgcaatgaagggaaacaccatcttgtcgcaacaaatgctgttgccaggaagctttgccacactatttatgctattctaaagaaagatataccttacgaaatacagtagaagatttcacttaaaacctacttaggtaggtttatttgtgttgcataaaataccactacatatacggattttttcttaccaacctcttgactttttatagttagt

SEQ ID NO: 2433 - DNA, 1455 bp, unidentified
  source 1..1455: mol_type = unassigned DNA; note = element_3719ddf
  misc_feature 1: note = core
  misc_feature 2..144: note = LE
  misc_feature 145..1191: note = CDS
  misc_feature 1192..1455: note = RE
  misc_feature 1209..1453: note = bridgeRNA
atgtcatggacgcctccctctctcagagtgccgcggggcggttgaggtggtgcgcggtgagagcggcccccttgggtcccggcggcatcaagtgtgccaaagtggaagtgagtgtcatccacttgaggagcaagggggcctgtcatgaagcgtacgacgatcggattggatttggcaaagcgggtgtttcaggtgcattcggtggatacggatacgggggagatcgcgcgtgcgagtctcaagcgcagccaggtgctgaagcattttgcgaaccttgagcccagcgtggtggcgatggaggcgtgcgggtcagggcattactgggcccgagagttggtgaagctcggtcatgaagtgagactgattgcggcgcagtttgtgcgcccgttcgtgaagagcaataagaccgatgcggcggacgcggaggcgatttgggaagcggcgcagcgccctgggatgcggtacgtggcgctcaagagcgaagagcagcaggcagtgctaggactacaccggctgcgcgagcggcgggtgaagatgcgcagcatgctggttaaccagctgcacgggctgatggcggagtttggcgtagcgttgcccaagggctggggtgtgatgttgaagcaggcgggcgagctgttggccgatggtgagagcggtccgataccagggctgctacgcgatgcactgctggatcagattcaacagattcgtaccttgagcgagcagatcaaggcactcgagcggcagatcggcgcctggcaacgtcgcgccgaggcgtgtcagcggatcgcagcaatccctggcgtaggtctcctcaccgcgaccgcggcggtggcgacgatgggggatgcaaaatcctttcattcggggcgtgaatttgcggcgttcttagggctcgtgccgcgccagtcaggcactggcgggcgggtcaagctgctagggatcagtaagcgcggggaccggtatttgcgcaccctgctgatacacggggcgcgtacggtcctgagctggcaacgccggccgggacgagaactggatccgtggctcaaggggctgctcgcacggcgtgcgcagaacgtggtggtggtcgcgctcgctaacaagatggcgcgcacgatctgggcactgctggcccatggtcgaacgtatcaaaggggctacggtgcggcgatagcgcccaccgcggcatagtcaacacattaacgaagaggtggatcgccttaggttgcgcgggtaaatatccatgtgatggcggaacaggttggaccgtgagggaatgagcctgaatagagtctcggacttcgagtccttttaggagatgaggcttctctcagcggatttcatcggggccagcggaagtcagatccgcaacaaaggccgaatgtaagactgcagccgtacctcaacgcccatcacacggagctttatctcgcaaaatcgggaggcgtccatgta

SEQ ID NO: 2434 - DNA, 1213 bp, unidentified
  source 1..1213: mol_type = unassigned DNA; note = element_371c27f
  misc_feature 1..2: note = core
  misc_feature 3..223: note = LE
  misc_feature 224..1198: note = CDS
  misc_feature 1199..1213: note = RE
  misc_feature 6..201: note = bridgeRNA
cttgtatctcgactacagcctttcagtgaggctatggttcccgactgatcatcgggggaggagctgcaagccgtgtccacccttaagccttgagcttgcaacgtagattgcgctgcgcccctccacactcatccgctaagtccgaacggtatccagagcttcgagctcgcatcagcaaggttggacggatgcagtgacgatcagcaacccaaaggaggagatgatgagtactgttgttggcatcgacgtcgccaagcacaccttcgatatcgccacgcttcaggccaatggcaaacaccgcaccaaagccaagctggccaacgacccaaaggggtttgaagtgctgctgcaatggctgaacaaacacgctgaggcgcaggcctggatcgtgatggaagcgaccggcatttaccatgaggccttggctgaatggttgtatgagcgcggttatcaggtctgcgtgctgaacccggctcagatcgcgttttacgcccgcagtcagctgcagagagtaaagaccgacaaggtcgacgccaagctaattgccgattatggccatcggcatcagaaagaactgcgcgcctggaaaccggaacagccttcgatcaaacgcctcaaagcgctgacacatcgcctcaaggatctgcaggaactggagcagatggaacagaatcgtctggacgtgacgagcgatgccaaggtagccgcgtcgatccagtcggtactggggcatattcgtcagcagattgctgacacactcaaggcgatcaagcagcacttcgatgacaacgatgatctgagagggcaacgcgatctgctcaagagtatcgatggcattgccgacagaacagcggcgttactgctggcggagctgggtgatatacggcgcttcgacgacagccgagccgtcaccgcatttgccggtttgaatccaaggctgcaggagtcgggcaagcacaaagggcatgtgcgtatatcgcggatggggtctgcattactgcgcggcggactttacctgccggcggttacctccctgacttacaattcagcgatccgggcaatggccgagcgactgcgagcaaaaggcaagaccggcaaacagatcgtctgcgcggccatgcgcaagctgctatgtatcgcttacggggtgctcaaatccggccaaccctttaacccgcaactcgctattgcgaggtgagggttaagacggtat

SEQ ID NO: 2435 - DNA, 1426 bp, unidentified
  source 1..1426: mol_type = unassigned DNA; note = element_371c8e7
  misc_feature 1..2: note = core
  misc_feature 3..157: note = LE
  misc_feature 158..1165: note = CDS
  misc_feature 1166..1426: note = RE
  misc_feature 1187..1421: note = bridgeRNA
agatggggtaacgggccggcttggaagcccaggctgcttgagattgggtggtcgtccctcaaactgatggtgtcatcaactgcggcgtcaggatttgggcctgcgccaagcatcgtcgagagacgaccatgaagcagtagccgggatcgacgtgtctttggagatctccagcgtttgcgttgtcgacgcggaggggcggattgtacgggaagcgagggttccgagcgagccgaaggcgttgatcgcttggttcgctgcgcacggtgcaccgttggcgcggatcgggctggaagctggcccgccgtcgcactggctgcatgcggcgatgacggaggccggctcggcgatggagctattggagacccggcatgtccgtgccgccttcaagaccatgccggtcaagaccgacaagaagggtgcccgtgggatcgcgcaactaatgcgcatgggctgggtccgatcggtgcattgcaagtcgccggcggctcaggaggtgcgtgctatgctgacggcgtgcaagcttctgcagggcaagcttcacgatgtggagatgagtctccgggggatcttgcgcggttttggcttgaaggtgggtccgacgacgctaagaacctatgcggcgcgcgtgagggccttggtggaaggccattccacgctcgaagcgatcgctgcggcgctgctgaaggcgcgcgacgttctggccgatgaattgcgtggctttgaacgtcgcgtccgcaagatggcgcgcgacaacgagcaggcccgcagactgatgaccacgcccggcgtgggcgcgatcgtatccctgacctatgtctcggcgattgacgaagccaaccggttccgatcctcccgaatggtcggtgcccatttcggcgtgacgccgaaaaaatatcaattggcgagacggaccataccggccggatctccaagatcggcgacgccggtgtcagggccgcgctctatgagcgcggcccacgtcatcctgacgccgccggtcaagggctcggatttgaagacctgggcactcggcgtggccaagcacgccggcctgcgcaaggccgccgtcaccctggcccgcaagctcgccgtcgtgctgcatcggatgctgcgtgatcaaaccgacttcgccgcccaccaggccaagccgatgatggctgcctaaaccgtaaaggagacgagacgctcttcgggcggccaccaccatcggcccccggagcccagtcccttcgccgggacgagggatcaggttaggccgccatagtgcaagcagctcgcaagatgactgcgctatacatgagattggccagccgatcctcatccgaccccataaagcagcggcctcgcaccgactgcgtacagaagcaagaccccggcgatgggatgaagctcaaaaagggattgacaccggaaggcccgttacaga

SEQ ID NO: 2436 - DNA, 1663 bp, unidentified
  source 1..1663: mol_type = unassigned DNA; note = element_372dc4b
  misc_feature 1..2: note = core
  misc_feature 3..288: note = LE
  misc_feature 289..1566: note = CDS
  misc_feature 1567..1663: note = RE
aatctccattccgcaggcaagccgcagcacaaatagtaatgaaagtgttttacatctcaactctgtgatttaaaatatataacaagaagctatactacaaagcacgggaggtaaagttgtaaaaactttctctgttttagacagcataaaaatcagtgtaagttctgtcttttcaagcacaaataagtggtatcatgaatccgtacactaagaattgttaaagctctttgttttattgtgtggcagttcagtcaatggcttcttatcttttacgaaaggagttacactatgaaagttacttatcaaacctgttgtggtgtcgatgttcacaaatcttttcttgttgccacaatcatcaaaactaccgccggtattgcaccttcttatcaaaagaagcgattctctaccttcaacaattctattttagactttaaatcgtggcttcttgaaaatgaatgccatgatgtctgtatggaatccacaggtaaatactgggttcctgtctttaatcttctcgaagatcaaatcaacgttaccattgctaatcccaaatgggttaaagctgttaagggtaacaaggacgataccaaagattctaaatggattggagacttattccgactgggacttgtgaaaagcagctacattccttgtaggttgatccgtattcttagagaatacacaagatatcgttacaagcttgtttcttgccgttcaagtgaaaagaatagatatcagaatgctcttactgtttgtaatatcgcattagattctgttgtatccgatatctttgggaagtcatcctcatccattatcgattatcagcttgaacaatcaggtactacgattaaccatgaagaaatcgcttcaaaacttcttaagagcctcaaatccaaagaagacgctgtgattgaatctatcgaaggatatcagatgactgatgcccagaaatatcgtatgcgcctaattcgcacacatatggattatatcacagctgaaatcaatgatatagataaacagattgaatctttgatttcttccgatcctgattatgacaaagctatccggttactaactaccattccgggtgtcaaacatgatagtgcaattactatcatctccgaaattggtattgacatgtctcagttttgtaattctaaacgcttatgttgttgggcaggtcttacccctggcaacaatgaatctgccggtaagaagaaatctgtccgtattacatgtgccggtgtctacctcaaacctgcattagtacagtgtgctcatgcagccgtgaaatctgacaagtctccttactacaaaacgaaatatgaatccttgttaaacgccgtggcaagaaaaagagctgttattgccattgcccgtatgattcttacagccatctaccggatgctgtctaccgagaggtatggaatccaagcgatctttacaaaaatcgatatgcctgcacctttagctgaaaaaaacagaaggctaaggctatcaagcaagccaaaaaaacttttacaaaaggaaggactgcttcctcctgatgaacctttagcttcttgatcaatctactaaatctatatcctcaaataagttgcctacttaagacagcttatttaagtgcaccgatttacgccttacctctactttctttcacact

SEQ ID NO: 2437 - DNA, 1354 bp, unidentified
  source 1..1354: mol_type = unassigned DNA; note = element_3734a8a
  misc_feature 1: note = core
  misc_feature 2..69: note = LE
  misc_feature 70..891: note = CDS
  misc_feature 892..1354: note = RE
  misc_feature 1120..1352: note = bridgeRNA
taatgagatggtcaccacaccctaacagtagtacgctgttaaggtgaatcccttaacggagagaccatcatgcagaacatcacacttattggtatcgatctcggaaagtattcctttcacattcattgtcaagacaagtctggtaaggctcttctgcgtaaaaaatttacccgcactaagctgatgcagtttctggcgacatgtcctccctctgttgttgtaatggaagcctgtgcgggtgctcactttatggctcgccgtatctctgattttgggcatgaaactaagctgatttctccacagttcgttcgcccgtttgtcaaaagtaataagaatgattttgtcgatgctgaagcaatatgtgaggccgcatcgcgaccatcaatgcgtttcgtccagcccaaaacagaggttcagcaggcaatgcgagcgctgcatcgggtcagagaatcacttatcagagataaggtgaaaacgaccaaccaaatccacggttttctgctggagttcggaataagcctaccaatcggcgaggcggtaattaagcgactgtctctgatactagctgaacacggaatccccgaatacctgagtcgtctgctgatgaaattacattcccattatctttaccttgttgagcaaataacaacgttggagtcagaattaaaccagtcaatcaaagctgatgatactgcacagcgaattatgacaattccaggcgtcgggccaattactgccagtttactttcatcacagctcggcgatggaaaacaattttcatgcagcagggattttgcggcttccacaggacttgttccccgacaatacagcactagtggcaaatccacgctgctgggtatcagcaaacgaggcgacaaaaacctgcgctgattacttgttcagtgtgcccgctcgttcatgatgcggctggagctccagcagggaaaactcgctgaatgggttagaaagcaactcgacaacaagcattcaaatactgtcgcctgcgctctggcaaataaactggcccgaatagctggggcaatcactgctctgcaaaaaaatatcaggcctgatatagatactgacaaaactcaattagcttattttaaacaataagatacaagttacctgtctggttttgcgaagactgattattgatgacatgaacggcaaatagacctgattaaaaacctgacagaaaaaatggctcactgaagccgaggggctttttaggattatcaggtgcggaactcatcgaggcgcgggcctccttgcccacagagatgccggatagatttaagcaagcccaccattaatcaaaaatcagtgtcgcaaaaatgggggggaccataga

SEQ ID NO: 2438 - DNA, 1121 bp, unidentified
  source 1..1121: mol_type = unassigned DNA; note = element_3736c00
  misc_feature 1..2: note = core
  misc_feature 3..378: note = LE
  misc_feature 379..1110: note = CDS
  misc_feature 1111..1121: note = RE
  misc_feature 12..192: note = bridgeRNA
cttatctcttgccaatctggcaccttgggtgccgagagcctggcgtgggcgaccgtgtggatccaggtcttgcgaccgagaagtagcttgggtccccacgccggattctccctgaaccgcccgaacagttggttgagttggcgctcgaactgataagactgggcaagcggggagagctctcgaccctgtcagcctagcggagttctgccatgtttgggatcgggatcgatgtgagcaaagccacgctggatgtggccgtccatggagagcagtttcgccaattcagcaacgacaagcgcggctttgtgcgcttgattcggtggctgaagacgtggccgatcaagcaggtcgttcttgaggcaagcgggggttacgagcgtgctgctctggatgtattgcacgccgctggccatcaatccggcgcgtgcacggcgatttgcccaaggcacgggccgtgccgccaagaccgatcggctcgatgcgacagtgctggcacagatggcccatttgttgccgctgacccgctacgtaccgcctgctccttggcagcagcgtctggctgaatttgcgcaatgccgcaggcaactggtgcagatgcgggtcagtgagatgcagcgcttgcggcgattggtcgatccggatctgattgcgatgaagcaacgccatatagctcagctatctgacgacctgaagcagttggataaagctattgccgagcagcttgaggggcagcctggctggaagaatatcggcgcgctcaaaggcgtcggccccatcctgatcagcacactggcctgcgagttgcccgaactgggcagcttgggaagcaaagccatagcatcgctggtggggttggccccgatgaaccgcgaaagtggcacctggcagggccaacggcggatcagtggtgggcgcgcggtggtacgcgaagccctttacatggcggccctgacggccatccggtacgagccaaggctgcgcgcgttttacgctggcctgaaggccaagggcaaagcgagcaaggtggcgctcgtggcggtcatgcgcaaaatgctggtgatcctcaacgcccgtaagcgagacgccgaggtggccctcggctgcccctgacaagacagttg

SEQ ID NO: 2439 - DNA, 1405 bp, unidentified
  source 1..1405: mol_type = unassigned DNA; note = element_3741bca
  misc_feature 1..2: note = core
  misc_feature 3..118: note = LE
  misc_feature 119..1150: note = CDS
  misc_feature 1151..1405: note = RE
  misc_feature 1165..1400: note = bridgeRNA
agatgccgtaatgggccggcatctcaagagtagccatgctgggtggctgttcctcagaatgatggtgttggaaacgaggtccgagcgatcggcctcaagcatcatgagaggaacagccatggagcattatgcagggatcgacgtctctctgaaagagagcagcgtgtgcgtcgtcgatgcgaagggcaaggtcgtccgagaggtcaaggtcgccagcgagccggaggccctggtcgagtgcttcgatgagctggaactgctggtggtccgcatcggcctcgaggccggtccgctctcgcagtggctgcatgcggctcttgtcgcggcgggtcatgaggtcgttttactggagacacgtcacgtgaaggcggccctttcggcgatgacggtgaagaccgaccggaaggacgcgcgcgggatcgcgcagctgctgcggatgggctggtatcgcccggtccatgcaaaatcggcagcgtcccaggacagccgtgccctgctggttggacgcaagctcctgcagagcaagcttcttgatgtcgagctcagcatccgcggcattttacggggctatggactgaaggtcggtgaggtcagccgcggacggtttgaggcgcgcattcgcgagctgatcgccgggcatgtgacattatcgatggtgatcggcgggatgctggcggcgcgagcgacgctgtggagcgagtttacgaagcttcatcgggagatgctcaagatcgcgaggggcgacaagatctgccgacggttgatgtcgacgcccggcgtcggtgcgctggttgccctgacctatcgctccgccgtggatgatcccgcacgatttgggaaatccagcaccgtcggcgcctacttcggactcacaccgaagaaatatcaatccggcgaaaccgaccgggacggaggcgtcaccaaagtcggcgacgcgatggtacgaaccgcgctgttcgaggcggcgcatatcatgctgacgcgggcgacccgcttctcaagcctgaagcgctgggcgctcgacgtggcgcagtgccgcggcatgaagcgcgccaaggtcgctctcgcccgcaaactgggcgtggtgctccatcgcatgtgggtcgacgcgaccgacttccgctggggggctgtgccgatggccgcgtgaggacaaaatatgtgattgaggcggcggaccaaaagaagaaccgcctctattgaggtcccgtcgctggggcgagggcttggcaaggtcgggtgtagtgctgtgattgcctcggcaaaccacgcttcctagattgacctgccggctcgagcatttgatggcatggtgtggtagccctcgtgctgaccacgacagaagcatgatcccggcgacgagatatcattcagagggacttgacgatcaaaggcccattacaga

SEQ ID NO: 2440 - DNA, 1261 bp, unidentified
  source 1..1261: mol_type = unassigned DNA; note = element_3742100
  misc_feature 1..3: note = core
  misc_feature 4..220: note = LE
  misc_feature 221..1237: note = CDS
  misc_feature 1238..1261: note = RE
  misc_feature 25..196: note = bridgeRNA
catataaaggaactgcccttcggagcttttgaagggtatgctggagtgaggagaagagaccaagttgtcaaaagccgttgagcttctcgagatgccaaggtcacttctcgctccagcgattcccgagcttctttgaacaggtatcgttatcgcctttaacgaatatgataaagccagtgaatcgccctccagccaccaactacaagggtaaaagaaactcatgagaaatgcaccatccatcaacgtgtttcaagactgcttgagtatcggtattgatgtgtccaaggacgagctggcgattgtcggggtcagcgcggatgaaccgtatctcaagtgtatccgcaatgagatgaaaaccatcaaggcttttatgcgcaagctgcagcagagcggctaccgcggcaagctcatctgtgaatcgaccggccattaccatctcaagctggcgctggtttgccatgagctcggcctggagctgatcgtgctcaatccattgcaatcgagcaaacacagcaaggcccggatccgcaaaaccaaaaccgatccgcaggatgcgctgacgctggcgacgatggcgctcaccgagccgaagctgccgcagccgctgcagctgacgcgcgccaaggcgttgattcgattgaagatggggcagctggcttcggtggagaaacagctgcagcagttcaaccagagccgcgcacaatatgaagagacctatgccgagctggggctggcgttaagcccaagccagttggccttgcgcgagcacagcaagaccctgacacggttacgcaagcagctcgagaaggaacttgagggcttattgtcgcaggcgttggctgacgatgagtgcctggcgtatttgcgttcgatgccgggcttttccgacgtcgtcgctggcttagtgggcaacctggatcgcacggtcaaaggagctgattcctggacggcatttgtcggcctggatgtgagtgtacgccagagtggtaaatggaaaggatacggcaaactgaccaagcgcgggaatggctatatgcgcaagcgactgttccaggcgtcctggggggcctgtttgaattacgactatgttagggcttactacgaccacctcaaagcagacggtcgaaagcatgctgaagcggtgtgtataattgccagaaaactgttacgcattgcctaccatgtggtaacgaagaagattccatttgatccgaaaacggcatttgcgcaaaactgagtattgacaaatcgctttaacagg

SEQ ID NO: 2441 - DNA, 1385 bp, unidentified
  source 1..1385: mol_type = unassigned DNA; note = element_3742edd
  misc_feature 1: note = core
  misc_feature 2..89: note = LE
  misc_feature 90..1121: note = CDS
  misc_feature 1122..1385: note = RE
  misc_feature 1154..1380: note = bridgeRNA
caatgggatggactccccctccccgaaagggcaccgaagtgtcaaactggagtttccacaaaaccagttattgagagaaggagttcatcatgagaattgtacgagttggcgtagatttagcaaaggatgtttttcagcttcatggagttgaccgagatggcaaaacggtttggcagcgtaagcttaatcgtaatgaatggattaaggtgcttttggacaagatagagccaggatgcgtgattggcatggaagcttgtggtggtgcacatcattgggctaggctgcttcaatccaagggatttgtcgttaaattaattgcaccacagtttgttaagccgtatgtaaaaagtaataagaatgatgtgaatgatgcagaggcgatttgcgaagcaatgagccgaccacatatgcgctttgtgaatatcaaatcggttgaacaacaagatattcaggccacgcatcgtattcgtgctgcattgatggatcaaagtaaagctaaatccaaccaaattcgtggcttgctttcagaatatggcttagtagcaccaagagaaatatgtcatctacgcaaggctatcccttactggttagaagagatggataatggcttaactgatcgcttacgtcgtttattacatggtgtatggcaagacttattaattctggatcaacgcatcaaagcgcttgaccaagaaattgaactgcttgcagcaaatgaccctgtcgcaaagcgcttgcaacaactacgcggcgtaggaccgatgattgcgacagcattattagctacggtgggtgatgcatcccaatttgataatggtcgccaaatggctgcttcactgggtttaacaccaagacaaatgagttcaggtggaaagagcaaactccttggtatcagtaaacgcggtgattcatacttgagaagtttgttagttcatggtgcgcgttcaatgattcaaatcgctaagggtaaagatgatcatttgagtctatgggtcatgcggattgttaataatcgacatccaaatattgctgctgtagcgatggcgaataaaactgtcaggattgcttgggcaatgattaccaaaggattagattacaaagcagagttagcctcagcttaatgaagtaaagtttaaagagaggtgttcaatatgaggattgcaaaacaaaccgcttgatggcaaaacaggtcgaaccggcactggcaaaacccgagaaggtccgtggcattaaagcccgtcaaagcaatggggagcccgtgcgcgaatagcccatcagggtcgtgcatttcaaatgaaatgcggtattaagagaccggatatacgtgagcagtcgtaccaaaagccaaaacacggaatgtttgcaaaagaggaggagtccatata

SEQ ID NO: 2442 - DNA, 1413 bp, unidentified
  source 1..1413: mol_type = unassigned DNA; note = element_374544f
  misc_feature 1: note = core
  misc_feature 2..95: note = LE
  misc_feature 96..1136: note = CDS
  misc_feature 1137..1413: note = RE
  misc_feature 1179..1405: note = bridgeRNA
caatgggatggagtcctccccaccctatatcggcgtcgttgcgccacactggtgggcgagaacaccaaccagcctgagggtgaggagaactcgtcatgaacattacccgtgtcggcgtcgatatcgcaaagtctgtttttcatgtccacggcgtcgatcgccatgatcaggtgcagtggcaaggtaagtacacccgcgaaaaatggctgaatgcggtcagcaagcgggtgccggcgggagccgagatcggcatggaagcctgtgcctcgtctcacttctgggcgcgggccctgcaggcgcggggctatcgcgtcaagttgatcgccgcacagttcgtgacgccctacgtgaagagcaacaagaatgaccgggtcgacgccgaagcgatctgtgaagccatggggcggcccagtatgcgcttcgtggccgtcaagagcgtcgctcagcaggatacccaggcggcacaccgcattcgtgaagagctggtacggcagcgcacggccaaggccaaccagatacgcgggctggtgggggagtatggcctggtcgctccggtgggtatcggtcagttgcgtgccgccctgcctcgctggctggaagcggcagacaacgggctgacggatgcctttcgtgtcctgcttgccggccttgccgaggatctgcgccacctggatgagcgcatcgcgacggtcacggcgagcctcgagcgacaggccaagaccgaccccgtggccaagcggctgatgacgctgcagggtatcggtccactgaccgccaccgcgctggccggcgccctcggcgatggcaagagctttcggcgcgggcgagattttgccgcctcgctcggcttgacgccgcgacagcacagcaccggggggcgagaccgcctgctgggcatcagcaaacgcggcgacagttacctgcgcaagctactggtgcatggcgcgcgctcggtgctccggcatgtgggcaccaaggacgacggcctgagccagtgggtcaggcacctggccgagcacaagcatgccaatgtggcggtcgtcgcactggccaacaagacggcacggatcgcctgggcggtaacccgccatgagacggcctatgatgcgtcgctggcgtcgcggctgtcggcatgaaaaacgattggatttagcacgttagtgtaatattgagcatcgtccaccacgattgctgagcatgctgcaggatggcgaacaggtcgaaccgacgtcagacaaccccttctggacgctgagccttttgagctcgaggtagcgattgggagctgacgtgcggatagcccatcaaggtccgatgctcatcagagcatcattaacgagaccggatatacgtgtgcagtcgtacctaccgaccatcgtgcctcgtgcttgcaaacggggaggactccatata

SEQ ID NO: 2443 - DNA, 1167 bp, unidentified
  source 1..1167: mol_type = unassigned DNA; note = element_37461e9
  misc_feature 1..2: note = core
  misc_feature 3..402: note = LE
  misc_feature 403..1161: note = CDS
  misc_feature 1162..1167: note = RE
  misc_feature 20..214: note = bridgeRNA
cttgtaatagcgcaatcagatattgtcggcgtgttccgtgaggaatggcctgccgcggctgcaacccgcggcaggccgctggcgatcggatcgcgcccaccctgagcagtttgtggctgccccgtagcaggatcgcgccagcaccttcatcggacccggatggttgccggaacaatcaggttcgcttcacaaggcagggtcgacgaagatggcacagactagcacgacgacagcgggaatcgatacgtccaaggcgaagctcgacattgtagttcatggtcgagacgagggttgggaggtcgccaacgaccttcccggttggcggaagctggtgcaactgctgaccaaagctggcgtcaagcgagtcgggatcgaagcgaccggcggttacgagcgtgggtagtggagcatttgcgtgcggccggcgtcatcgtgctggtgctgcagccgatccaggtcaaggcgttcggccgctcccgattgcgtcgcgccaagaacgatacgctggatgccgcgctgattgctgcctgcgcggcatcgctcgaagaggtgaggagtgcgccggatccgcgcttggcggagctcgccgagcagctcaccttcctcgagcagatcgaggacgacatcaagcgcttcaagacccggctcgagcatctcgataagcctgggctacgccgcatcgtgctggatgacattgcccggttgaaggcaaggcggctctcccaaatccgtcacatcgccaagcaactacgcgctcaccacgatctcgctgtccgccttgacctcgtgatgagcattcccgggatcggtgagcgcacggcactggccctcctggtccgcatgcctgaactcggccgtgtcagccgggaggaagtcgcagcccttgccgggctggctcccttcgacaacgatagcgggcagtacaagggccaacgccgtatcgccggcggccgcgctcgcctgcgtcgctctctgtttgcggcagccctgcctgcggccttccgctggaataaggccgtcatggccctctatgcccgcctgactgcggccggaaaggctcacaatgccgctctcatcgcatgcgcgcgcaagctgctcatctatgccaacaccgtcgtgcaacgcggaacgccgtggactgaaaaactcctcggcgtttaatggttg

SEQ ID NO: 2444 - DNA, 1476 bp, unidentified
  source 1..1476: mol_type = unassigned DNA; note = element_37463b1
  misc_feature 1: note = core
  misc_feature 2..221: note = LE
  misc_feature 222..1241: note = CDS
  misc_feature 1242..1476: note = RE
  misc_feature 17..233: note = bridgeRNA
ctgatggaggatgtgaagcaaggcgttgcggtttccgtagcgtcgggggtctggccgggtgtgtctcgagagtgccctgtcaccgtgttggttgacttctgagcgaagcgatcacccggccggatcccgtcgcggtgtggctcgtaagaggaccggcattcaccccacatcaggtctgtccaccgtggcgaagttcattcatcaccacgggaaggcacaccatgttcatgatcggaatcgaccctcacaaggggtcccacaccgctgccgcggtcgaccggagtgaggcggtgatcgcgacggttcgtgttgaagccgaccgtgatcaacgcgcgcatctgctcgactgggcggcgtcgttcacgccgcgcacctgggcggtcgaaggagcgaccgggatgggtgcgttgctcgcccagcagctcgtcgccgccggggaacgcgtgctcgatgtgccaccgaagttgtcggcgcgggtgcggctgttggacaacggtcggatcgataagaccgaccccaacgacgcccgctcagccgcgatcgtcgcctggcgcacaccgacgttgaacgaggtgttcggtgtcgacgagcaccgggtggtgctgcgtctgctcgccgaccgcgaccaccagatcacggcgcaacggacccgcacgatctgttgggttcacgcgctgttgtgtctgctgatcgagggcggcgcgacgcgctcgttgaaggtcgaccgggccgagaagatgctggccacagtggtcgccgagaatccggtgacccgcgccaggatcgtcgccgccggcgaattcctcgacgagatcaccgcgctcgacaccgcccgcaccgatgcgcgccggcgcaccatcgccgcggtcaaggcctcagcatcgaccgtgaccgacgtgtacgggatcgggccgatgatggcagcgatcatcatcggccacaccggcgacgtgcgccgcttcccgaccgccggtcacttcgcccgccacaacggcaccgcgccgatcgaggcgtcgtcggggccgaacaagcggcaccggttgaaccctcgcggtgaccgccaactgaaccacgcgatgcacatggccgcggtcacccaggtcggccatgacacacccggccgcgtctacttcttgcgcaagcgcgccgagggcaagagccgcaaagaagcgatgcgcgcactcaagcgacagatcagcgacgccgtctacaaccgtctcctcgccgacaccaaccgctgaccgcagctaccccgctcaagctccacgcgatcgacacggtgggcccgggaggacaacgtgaggacgactcgaatccagcgtgaccggcatcgcacctcacatcagccggctcttcggaacagtcactcccgaacccgacgatcacgctaaccccgcgccgtcacaccaccatccgaccactgcttcaacgcgccccgaacaccccgccgacgacgcgcttgacacaaagaggatt

SEQ ID NO: 2445 - DNA, 1359 bp, unidentified
  source 1..1359: mol_type = unassigned DNA; note = element_3749a19
  misc_feature 1: note = core
  misc_feature 2..69: note = LE
  misc_feature 70..1101: note = CDS
  misc_feature 1102..1359: note = RE
  misc_feature 1130..1350: note = bridgeRNA
tactgagatggtccgccgcttgatctccgcgtggagatcttgtaggcaggttcaaggaggatcatcgacatgcagattcgttcggttggtattgaccttggcaagacgacctttcacctggtggcgctcggcgataacggcaaggtgctgctgaagaagaagttcacccagaagcagctaatcactttcacagccaacatgcagacctccctgattgggatggaggcgtgtggcggcgcacacttccttggtcgtgctctgcgcgaacagggccatgacgtgaagctgattccggcccagtttgtgaagccgttcgtgaagtcgaacaagaacgacttcattgatgcggaagcgatcgctgaggcagtggatcgccagaacatgcgatttgttccgatcaagacagatgaccagctcgatctccaggcgctgcatcgtgtgcgcgaccgcttgatgacgagaagaacgtcggtgatcaaccagctccgtgccttccttctggagcgtggcctggtcttcgcgaagagcccggccaggctgcgcgagcgtatgcctgagatattggaaaacgccgatgaagatctcactccgcgcatgcggaacctgctggccctgctgtggaacgagtggaaggatctggagcttcagatcgtagagatgaacgatgaagtggaacagatcgcaacgagtgatccggcatgcacgcggctcaggcagatccccggcatcggacccttggtcgcgaccgcgatcgttgcctcgatcggcaacggggcagcgttccacaagggtcgagagttcgcagcgtggctggggctggtgcccaagcagtactcgaccggcggcaaggcgaagctctacgggatcagcaagcgcgggaacaactacctgcgcaagatcctgattcacggggcacgcgccgtcgtgttgcgatccaagcgagagcgaatcgcgatgggtgcatggatgacctcgcttgagaccagagcaccgcgaaacgtcttgatcgtcgcgacggccaacaaactggcacggatcgcatgggcggtgctatcgagcggcgaagactaccgggcagtgcaagagctggtcgctgcctagcttaagcgtaaccatcaagatcaagttctcccaccgaggtctgcaccggataagcgaagatgaaagaacagtcaaaacggcgcacctgaaacctgtttactcaaatggccttgacacggccgaggggtttcgaaggacaggtacgcggcgtatctcatcatggccaggagactcatctccacaaacaggccggatacattgacgcagactttcttcatccaccaacttttcccttgcagtcagacggcggaccataca

SEQ ID NO: 2446 - DNA, 1417 bp, unidentified
  source 1..1417: mol_type = unassigned DNA; note = element_374a0ab
  misc_feature 1..2: note = core
  misc_feature 3..292: note = LE
  misc_feature 293..1402: note = CDS
  misc_feature 1403..1417: note = RE
  misc_feature 1..293: note = bridgeRNA
cagtgagactgcttgtgctggtgttctcaggggtcctgaccctcacagcgatggacgcgcaaggatgctggtgccgggtgttctcaggggttcctgaccctcacgccgatcgacaactgctgtctttccacggatctgtcggtcccctgagaacacccggtgaggcgtcacgcctcgccgccggagtgacctaaggagagcctgcgccaacaggtgctcatcactgtcttgtccgccggtctggtggagcgcggtgccgttccccgcccatgcgaacagatcggagcacgacatgaccatcatccccgacgccggcaagcagcctcaatcgcgaacgttggtgttcgccggcgtcgacactcacaaggagatccacgtcgccgcggtcgtcgacgagaccgggacggttctcgggacgcatagcttctccacgactcgcgcgggctaccgggctcttctggcatgggtgcgcagtcacggcgtgttggtgcggattgggatcgagggcaccggctcttacggcgcaggcctcactcggtatctcgccaagaacgacgtgacggtcctcgaggtcgaccggccggatcgatcagaccgccgccgaaaaggcaaggatgatgatctggacgcgatcaacgctgcccgcgccgcgcttcacgaacggcgcaccacgatcccgaagtcccaagacggtgcggtcgaggccctgagaatcctgcgtgtcgcgcgcgctcaggctgtccgtgaacgacgcaacacgctgcaactgctgcggatgtcgatcgtcgccgcacccgacgaagtccgcgaccagatccgtaacctcacccgcatgcaactgatccgtcacctcgccgcatggcgtcccgacgtctcgaatgcgaccgatcccgttgtcgcctaccgggttgcgttgaagtcgttcggccgccgatacctcgagctcactgacgagatcgtcgatctggacgacctgatcactcccatcgtccaagccctcgccccccagctcctcgaacgcgtcgggatcggcatcgaggtcgccgggcagctgctggtcaccgccggcgacaaccccgagcgcatgaagtccgaagccgcgttcgcgatgctctgcggcgtctcccctctgcccgcctcatccgggatgacgcaacgacaccgactcaaccggggcggcgaccggcaagccaaccgcgcactccacctcgccgtgatcagtcgcctcaggctcgacccgaggacaaaggcctacgcaacgaagaagaccgccgaggggcattccaagatggagatcatccgctgcctcaagcgctacctcgcccgcgaggcctacttcctcctaaaccccggcatcgaacacatcaccccgaacacgaaaccgaggaaaatcgccgcttgactcttaggagagcat

SEQ ID NO: 2447 - DNA, 1232 bp, unidentified
  source 1..1232: mol_type = unassigned DNA; note = element_374b7d1
  misc_feature 1: note = core
  misc_feature 2..224: note = LE
  misc_feature 225..1205: note = CDS
  misc_feature 1206..1232: note = RE
  misc_feature 46..213: note = bridgeRNA
tcttaagttagctttattaaatattagttataaattaagaatcaaatcagaaagaacaaaaagagaggattaaggttattttgtgtattgagactacgatctcgtttttcatgacaatcccctctctttcctactattatttcgaacagttctgtgagactttagatctcgtttttaagatgcagaaaagctagtagatcacttctttcgttaaattaatatatatgagtgaaaatacaaattattttggaatagacataagtaaagatgtctttgatgtgagtggagcagatggcaagcattatcagtttaaaaatgatctttctggctttaaaaaattattgaatttaaccaatgagttttctcattgtgttatggaatctacgggtgtctatcacttgcgcttatcctattatttagaagaaaaaggagttgctgtaagtgttgaaaatcctttgtctattaaacgctttattcaaatgcgattaacaaaaataaaaacagacaaaaaagattcgcaaatgatttatgagtatgctgtaaactctggggttgaacttcgtttatggaaaggccagagtaaaacacaaatagcttgttctcaaataataagcctaaccaacttgtatactaaacaaacgacagcacttaaaaataagttgcaaacagaggaggctatgggatctccttgtactttagtgatacaatccttaaaaagaagtttaaaacacttgaaaaaagaaatagataagctagaagatacattgctagagttggtaaaattggataatcaagatttgcttactagggtagagagtattcctggtataggacgcaagtcaagtatgttattgatcgtcttaacggggggatttgagcgttttaataatgcatcagagctttgctcttttgctggtttaacccctatgataagacagtctggaagcagcataagatccagatcaagaataagtaaaatggggaatagacgattaaggaaaacgttgtttatgtgcagtctctcagctaagaaacataataaagcgtgtagagaaatcttcgatagaattgtagcaaaaggaaagagcaaaaaattagcattaatagctgtctgtaataagctgttaaaacaggcttttgccttggcaaaatcagggttgatatatgatgagaactataaaagtgttttaatgaatttaaattaataattacttgttttttaacacagttct

SEQ ID NO: 2448 - DNA, 1317 bp, unidentified
  source 1..1317: mol_type = unassigned DNA; note = element_3750d57
  misc_feature 1: note = core
  misc_feature 2..71: note = LE
  misc_feature 72..1088: note = CDS
  misc_feature 1089..1317: note = RE
  misc_feature 1090..1310: note = bridgeRNA
taatgagatggtacgtccctccctgcatacagttaaactgcaactgatgtagcctttaaaggaagtgccaaatgaatactccacacattattggaatcgacttaggtaaaaactcttttcatttagttggccatgaccaatctggtcaacggttatttaagaaaaagcttactcgccaaaagctactcgaatttttggcatttcatgagccggtgatcatagctatggaatcgtgcggcggctctcactggctcgcgagaaaatgttctgagtttggacatactgctaagttaatccctccccaatatgtaaagccatacgttaaaactaataaaaatgatttcattgatgccgatgctattgctgaagccgcttctcgaccaactatgaggttctcgtctccaaaaacagaatcagctcaagttatctcgaccattcaaaaaattcgtaatgggtatattagagagcgaaccgcatgcatgaacagaataggctcaattcttcttgaattcgggataagtttgccaaaaggacactctattatgaaaggtctgtttcaatggctagctgataagaatcaacatcttccacccctaattgtttttgagttaacagagttacatgaacactatctgaaccttaatgagcgtatagcatcacaagcgaataaagttgagagaattcttgctgataatgagcaagttaaacaattacaaagtatcccaggcataggtcctgttgtcgcaagcgcttgtgtatcatctgttagtgaaccaagcgacttcaaaaatggacgaaatttcgcagcatggattgggcttgttcccctccagcactctacaggtggaaaaaccatattacttggaatatcaaaacgtggaaataaagagctgagaacactattcatccatggtgcgaggtctattttgtggcgagataaatctgcagagaaatactttggttcatggcttatcaaccttaaaaaacgaaagccttttaacgttgctgtagttgcattagccaacaaaatagcccgtatagcctgggcagttttagtcaataaaaagtcttttgaaatcagaatatagtcaaaatttgcagtgagagtaaaagatgacacaacggttagaccaccagactgatgacctgttgccccaaacagcaatgtaaaatgcttttcgctttgtgaggacagtctggcgcatacctcatcatagagctgagactaatgaaggtctcaaaaagactctgaatatattagcgcaaatcagctcgttatttttaactctagttgcaataacgggacgtaccatatat

SEQ ID NO: 2449 - DNA, 1191 bp, unidentified
  source 1..1191: mol_type = unassigned DNA; note = element_37544b2
  misc_feature 1..2: note = core
  misc_feature 3..219: note = LE
  misc_feature 220..1176: note = CDS
  misc_feature 1177..1191: note = RE
  misc_feature 24..198: note = bridgeRNA
cttgtatggtgtggatgcgtctttcgaagaagaaaggcgctggggtaagggacgtcctcaaccatcagccggttgcacccggactgccactacgagagcatcccaccccgcctcacgcgtcgataaggaatctagcggccgagaccgccgattgatcgcaaggtaacgcccgaggcgtggctaccccagcggacttaacgtatcgcagggagagctgtcatgcaaacttcaatcatttttattggggtcgatgtcggcaagtttgagttgcaagtatccggggccaacggtgagatcgtggcaggcgtcttgcacaacaatcgctccagcatcgtgggctggttaaagcgtctgccggacactagtgtgatcgccatggaggcgacaggaggctatcaagagctcctggctcgtacggcgcatgagcgcggatttgaggtttatgtccttaatccgacccacgtccatcattacgccatctcgttggggaaccgcggcaagactgatcgattggatgccgccgtcatcgcgcaatacatcgcgcagcatcacaaaaaactgcatcgttacgaaccaatatctccacaattgcaggaagtcagagcacttcatgcgctgagatctacggtggtccgtgtgggcacatccttgcgattgtcggcacagcgacatggttgcgtaagcagccatcagaagaaggcactcgcaagtttgacagcctggtcagagcagctcgaaaaggaaatgatcgccaagattaaggcccacagtgactgggccaagacatatggtctgctgaccggaatctgcggcataggaccgataaccggggttgccctgacgaacttgttcagccggatcgactttgccaccagcgatgcggcggtagccttctgtggcctagatccgagaccgaacgaatccggaagaaaagtcggccggcgccggctaagcaagcagggcgataaagcggcgaggacattgctctacaacgcggctagctcagcggcgcgcacggcacaattcaaggattactacgccatgctcagggctcgagggctggcctcgactgcggccttggtcataatcgcccgcaaactcttgcggatagcgtacggggtatggcgaacaggccaaccctttgatccagagaaattgcgaccggcaattgcttgaccaagaccatagaat

SEQ ID NO: 2450 - DNA, 1610 bp, unidentified
  source 1..1610: mol_type = unassigned DNA; note = element_3756e29
  misc_feature 1..2: note = core
  misc_feature 3..275: note = LE
  misc_feature 276..1484: note = CDS
  misc_feature 1485..1610: note = RE
  misc_feature 12..295: note = bridgeRNA
ctattacaataaatttggacaggaaagccgggcagccagtccggctttccctccatctcgtgcctaagctacaatgagaggagcaactggctgacctatccctccttgggcttctatgtccgttggaaagactgttagccatcctcttgttgtagcgttcgatttaagcaggttgagccaccggatgccggagagttcgcgtcacccaatagattgaatcggcagcgagaaaagatggactccggttgcagattctttgtattggaggaatatggatgaactgcgttggcatcgatgtttccaaagggaaaagcatgatcaccgtcatgcggcctttcggagaagtggtggtttcaccttttgaagtacgtcataccgccaatgaactgagcgagctggcagggctactcaaaagcttggacggcgagacccgtgtggtgatggaatccacgggtaattaccacgcgccggtggcttggctgctccacgacgcggggctttatgtttccgtagtcaatgcaatgttggtacacgactatgggaacaacagtttaagacgggccaagaccgacaagaaggacgctataaagctggccaactacggccttgaccactggctcacgctgccgagatatgtcccggaagaggacactcgtctcatgttgaaggcttgctaccggcaataccagcagtattcaaaagtacagaccatgctgaagaataacctgatctccctgctggacactacttttccagatgcaaaccgcctgttcaccagtccgcctcgcgacgatggccgcgagaagtggatagactttgtagctactttttggcatcgcgagtgcgtttgtgacctgtctgagaaggcctttgccgccaaataccagaagtggtgcaagaagtacggctacaatttcagtgaaggcaaggcgctggacatttatgccgccgcccgtgggcacttcggtgtcatgcccaaaacggatacggcaaaacttttggtggaacaggctatttcccaactccgggcaacctcctccgcattagctgctctcaaacaggagatgcagtccctggcggcttctctgccggagtatcctgtggtgatggagatgtttggtgttggccctactctcggccctcaactcatggctgaaattggcgatgtgcgccgttttcattccaagaaagcgctggtggcctttgcgggcattgacgccccaccctaccaatccggccaaatggatgtccgtagccgcagcatttccaaacgcggatccgcttcgctgcgcagaacgctctttctggtgatgagtgtcatcctacagcatgctccaatgaatgagccggtctaccagttcatgaacaagaaacgctccgaaggcaagccctaccgtgtctacatgatggcctccgcaaataagttcctgcgtatctactacgcttctgtgaaatcctacttggattccctggaacacgactgattttcttgtgctataccatctggctggccgccgttttaattttgagatgctcagcggcttgattttgtgttgcctttttgcctccctaaaaaatctgaaatttctacttgacttttattagcaggt

SEQ ID NO: 2451 - DNA, 1314 bp, unidentified
  source 1..1314: mol_type = unassigned DNA; note = element_375a1db
  misc_feature 1..2: note = core
  misc_feature 3..191: note = LE
  misc_feature 192..1157: note = CDS
  misc_feature 1158..1314: note = RE
  misc_feature 30..201: note = bridgeRNA
cttgtgtccggagaatcaattacaggctctgctggcgggcggttgtcacaagcaaccgcccgccgtggaggtgagaccgaatttcccccaaggtcgcgagaccgtgggtgagcatggtccccttcgcgtcttcctagacccgaacagttgaatgggcttcgagcccgaacgagcaaggaagggattggaggatggcatactttcgcgacgttgtcggcatcgatgtctccaagcagaacctcgacctttacgtcttgtccggtcagcagcgccgaacggtggccaacactgcggctggatatggcgatttggtgagctggctcaaatcgctcggtgtccggatggccgtcatggaggcttccggcggttatgagcgagacgttgccaaggcgttgcggcaagcgggattcgacgtgcgaatcgtcgatcccaagcgggtccgtcacttcgccaaagcggccgggcggttggccaagaatgatcgtatcgacgccgagatgattgccgagtttggcgccgtgttcgcggccgcgcagcgatgcgagattcccctcgatgccaagcgcgagcatttggcgggcctcgtcgcggcccggcaggccctgatgggtcatcagacttcgctgcagaaccagatctccgcctgcccgaaaggtccggcgcggcaggccttggcggcggctttgaagccgatcccggcttcgatcaaacagctcgatcgcttgatcgccaaggccattgcggcgcacccgcagttcgccgcgctggccgcccggctcgataccgtgccgggcgtgggcccggtgacgattgccgccctcattgcctggctgcccgagctcggccggctcgaccgccgcgcgctggcggccttggtgggggtagctccgttcgatgacgacagcggcaagcgcaccggccagcgatacatcaaaggtgggcgaggcaagttgcgcaatatcgcctacatggccgtgatgggggcggcgaccaaacacaatcccgtcctcaaggcttattacgattcgctgctcaaccgcggcaaattgaaaaaagttgctctgatcgcttgcctgcgcaagctgctgaccatcctcaacacgatggtggccaagcaacaggactggaaccctgcttcgatggccatcgccgcatgacccagccgtcccattctggtcggcgcacttggcgccgaccacttgccaagccgatcgaactggcgagccggccgggtcaaggccgaagccggcggagccgggcgcgcgtaagcgcgagccttgacgcggccggagcgccagttcaccaagacagttg

SEQ ID NO: 2452 - DNA, 1604 bp, unidentified
  source 1..1604: mol_type = unassigned DNA; note = element_37614dd
  misc_feature 1..3: note = core
  misc_feature 4..237: note = LE
  misc_feature 238..1440: note = CDS
  misc_feature 1441..1604: note = RE
  misc_feature 49..221: note = bridgeRNA
cttatctgttaaactcaacttagacagcaggaatacctgcctaagttggcaaaaatatttaaaaggtttctgggaaaaggacttcaccacctagcagctcgactgcttttgaaagagccacctttcccggatcatatttgcagactgcggttcatagaagggttgtgcttcgagcaccgtgttagataaggcccactgccagtctgccagcaaaattcttgtatggaggttttgatcatgtactttgtagggatcgactgggctgacttgcatcatgacgtagccgtgctcgatgaaaaaggacgtgagctaaaatacttcaccattccccatagcagggaaggcatggagcagttgaaacaaaaacttttaagcatcaacccctctccggaaagcttcgcctgcctgctggaaaccaagaacggccttttggtgcaattcctgctggaagctgggtttctggtttaccccttaaacccgaaggttgtagattaccggcgaaagccctcaggggcgaaaagcgaccccatcgatgcccgccttttggccaacatcggccgctctgatctgggacagcttaaaaggcttaagccggatacggaactgatcagcgagttaaaaatgctgacccgagaccaagacagccttatccaggaatccacccggctgaccaacaagctcattgcctgcctgaaagagtattaccctatggctttggagttcttctccaagccaactctgccggtagctttgaagtttttgaagcattaccctctcccggatctggttagggaaactaccgttccagagctcgccgcctttttaaaagcctgtaaacatcctcagcccaaccaaacagccatctccatctggcagaaggcgcaggagccgcagcttcgggccagcgctcccaccgtgcgggcaaagtgccgcttgatgctcgccctggtagctcagttggagacagtcaaagagcagatagccgcttatgatgaggagattaaccgcctttttcagttgcactccgacagcaggatcttcgctagcctgcccggagcggccgggagactggcgccaagactgctggcggagtggggcgacgaccgggagcgttacgaagatgcggctgttgttcaggctttggcgggcacttctcccgtgctctttcaaagcggtaaataccgctttgccaggcaacgtaggtcctgtataaaacctttccgacgagtaatgcacctgtttgccttccagagcatcaggcaggtttgttgggcccgagagtattacagcaccaaaagaagccagggtaaaacccaccatgaagccttgcgggctctggcaaatatttgggtccgcattatctttgccatgtggaaaaacggcacttgctacaacgaagctacatttgttgctgcccgcgccaggcaccgtgcagcataagctttggatatttggttatcaatgttctcagccgccgtctctggctggttcttaacctccaacttaaagacagagggaggaaacggtaaagcgcgctttttaaaggatacgaacatttgtgctgtctttcaaaaattttggtttaccctattgacatagaaggt

SEQ ID NO: 2453 - DNA, 1639 bp, unidentified
  source 1..1639: mol_type = unassigned DNA; note = element_3766a2a
  misc_feature 1..3: note = core
  misc_feature 4..81: note = LE
  misc_feature 82..1164: note = CDS
  misc_feature 1165..1639: note = RE
  misc_feature 1367..1625: note = bridgeRNA
tgatggggtggacggcgccccgacggcatcaagcgtgccaagatggtgttgtcgcaacaccatctcaaaggagagccgtccatggcgaagtctatcgagaatttggcggaagtcacgcgcgttgggctcgatctggcgaagaacgtctttcaggttcacggcgtcgatgcgcagggcgaggtcgtgatcgttcgcaagctcaggcgcgcggcggtgctgccgttcttcggccggcttaagccatgcgtcgtggcgatggaggcgtgcgggagcgcgcatcattggggccgggagatcacggcgctcgggcacgaggtgaaactgatcccgccggcgcatgtgaagccctacatccggcgcaacaagacggatgcggccgacgcggcggcgatttgcgaagcagcgcttaggccgcagcagcggttcgtgccgctgcgaacggtcgagaaccaggcggagctgatgcgccatcgcgttcgcgagcagctcgtcggccagcgcaccgcgctcctcaacgcgctgcgcggccacttgagcgaaatcggagtcatcgcgccgcaaggggcgcaacacgcttatcgcctcaagcgcctcgccgcgggcgaggccgatgacaacggcgagatcgtcgggtgcaaggcggttcgcgcggcgctcacgccgctcctcaagcaggtcgacgcgctcgacgaagcgattgcggcgatcgacaacgagctcgcggcgcaggcgaagggcgacgagaaggccaggaggctgatgacgattccggggatcggcccggtcacggcgacggcggtcgcagcgacgatgcgcgacatcgaggcgttcgccggcgcgcgcgagttcgcggccttcctcgggctgaccccgcgccaggcctcgaccggcggcaaggaacgctcgggcggggtcagcaagatgggcgaccgctatttgcgcaagcttttggtcgtcggcgcgaccgccgtgcttaatcacgccgccggccactccgacgcgctgagacgatgggccaaggagatgctcaagcgcaaggcggcgcacaaatacgctttcaaactgacggccgtcgcgctcgccaacaagctcgcccgcatcgcctacgcaatcctgcgttccggcgggacctacgacgaccggccggtcgcggcgcgcgcctgaaggaggccgctcatgattcttttgatccgccggcgaggccatgtcggggcgacgccgtcaagcgccgaaggcgctccttcgcttcgctacggccgcttcgcggtgactgcgccgccccgacatggcgttttggcgggcgtgagttcgacgccgcaaaccggcgcctgggcgccgagtttgcgttgccgaactcacgcccgacgcggccgagcgcaacaaccggttcgctgaaaggcgttggaaattcgagggtgaccgaaggggtgatgtgagccaacggacaggttctgaagcccgagggtgtgtcggcgccggtatgagcgcgatacggtgattggggcgaggaacccaagcggaccgatcatcagggccagcggggcgatctttcccgcgtcaacaggccggagacatgaccgcacccgagacgttcgcaaagccctcaagaaaacccttgactaggggcgccgtccagaca

SEQ ID NO: 2454 - DNA, 1414 bp, unidentified
  source 1..1414: mol_type = unassigned DNA; note = element_376b2c9
  misc_feature 1..3: note = core
  misc_feature 4..197: note = LE
  misc_feature 198..1400: note = CDS
  misc_feature 1401..1414: note = RE
  misc_feature 1..192: note = bridgeRNA
ctccgtaagttgttggatggtccggaagtgctgggtgtggctgatggtgtcctgccttatgtggctcgaaacgagtggccgcccagcgcttcgggacgccctggctgctgattgaaaaatgtgcttcgagtgctgtttacggagatgacggtggggtgttcctcgggcctgatatgagtaggcgacatggaggagcgatgagagaaactcacacccacgcatgggttggaatcgacgccggcaagggccatcattgggcggcagtggtcgacgaagcagggttgatcgtgtggtcgcacaagatcatcaacgacgagaccgcgatattgcacgcgctgagcgaaattctggccttggccgacgaactccattgggcggtagatatttccggtacctcctcgacgttgttgcttgctcttctcgccgcgcacggacagagtgcggtttacgtccctggtcgcaccgtcaacaggatgtccggcgcgtatcgaggggaggcgaaaaccgatgcccgcgatgcctatgtgatcgcggaaactgctcgacaccgacgcgatctgtctgtgttgattccaccggcccagctggccgcggaactcgcgcttttgacctcgcatcggaccgatctcgtcgctgaccgagtccggctgatcaaccgtctgcgtgacactctcaccggtgtctttcctgcgctcgagcgggctttcgacttcgggcgtcacaagggcgcgttggtgttgttgaccggtttccagacgccgcgcggcattcggcgacgcggacgcgttcgtttgagcttgtggctcggtaaacgtggggtacgcggggcggacggtgtcgccgagattgcgtgggaagcggcgtccgcgcagaatgtggtcctgcctggtgaggctgttgcggcgcagttggtggccgatatcgccgacagagtcctcgcagtggacgtccagcttgctcgtctcgacgcgcagatcggtgagaccttccgccgccatccacaggctgcggtcatcgaatccatgcccggtatcggtccgatcctcggcgcggaattcgttgtcgctgccggtgatatgtcggcgtactccgatgccggtcacctcgcctcggcagcggggttggttccggtcccccgcgattccggccgccgaaccggcaacatgcaccgacccaaacgctacagccggcgactgcggcgcgtcttctacctctccgctcaaacctccatcatcaaagatggaccgaaccgcgagttctacctcaagaaacgaagtgaaggaatgagacacgttcaagcggtgatcgccttggcccgtcgacgagtgagcgtgatctgggcattgttgcgcgacgaccgactgttcgtcgttgatgcacccgccgtccgaactgcttgatttcctcattgaaa

SEQ ID NO: 2455 - DNA, 1223 bp, unidentified
  source 1..1223: mol_type = unassigned DNA; note = element_376c3a8
  misc_feature 1..2: note = core
  misc_feature 3..182: note = LE
  misc_feature 183..1199: note = CDS
  misc_feature 1200..1223: note = RE
  misc_feature 11..191: note = bridgeRNA
cttgtatcttgctcatgtcgtgattagctatcacgacatgaaacagagtgagcttcgaaggagagccagggctataaaccttgtggttgagtttaagccctctgtttcacctttcacgccagcattaacattgaacggttacccagagcactgactctgaatgtacaagcggaacgggcgtgatggcttcagtgaaaggggacatcattatgtattacgttggtattgatatcagtaagcgttttgtcgatgtgtgtttgttagctgatggcatgaaaggtaaacggaagacgaaaacgttacccaatggccccaacgccgttcaggctttggctgaatggctaacgcgacaaaaatgtgacccgggtcaggcccatatcatcatggaagccacgggggtttatcacgaacacctcgcttatggtcttcatcagtcagggattgccgtatccgtgataaaccctcatcggttgcgtgaattcgccaggggaatggggatactcacgaagacggataaagtggatgcctatgtgctggcctgttatggcggtttgcgccaaccggagggctggagcccgccttcgccagaaataaggaaactcaaggcattactccagcacagggatagtttgctgagtgataaacaacgcatagaaaatcggctgagcacgttagcatccacacaggccccggaagaggttgtggcgtcgctggactcgatggtgcggcatgtaaagagtgaactggaacgtattgagcgactgatagaagaccacatagacaagcatcctggactaaaaaacgacctgaagctcctgaaatcgattgatggtgttggcgaccaaatcggctggaatatgttagccaccatccggagcggtcacttcaggagcgcggagcaggtggcggcgtatctgggggttatcccggtagagcgtcgctcaggcacctcggtacgaggcagagccaggttgtcgaaaatagggccgcccgcgatgcgggcaaagctgtatatgggagccatagccgccatcagtcacaatcgtcatgtaaaagcgcaatacgagcgacttttgctgaaaggcaaggcgaagatgttggcggtaggcgcggcgatgaggaaactggtccatctgtgttatggcgtgctgcatacgcagcagcgctatgacaagaattatggggtggtagccagttgaaatacttgactggcaacacggtta

SEQ ID NO: 2456 - DNA, 1712 bp, unidentified
  source 1..1712: mol_type = unassigned DNA; note = element_3773e74
  misc_feature 1..2: note = core
  misc_feature 3..339: note = LE
  misc_feature 340..1566: note = CDS
  misc_feature 1567..1712: note = RE
  misc_feature 36..312: note = bridgeRNA
ctcgtataatatctttatagatatatttttatattcaaaatatcaatcggtttggtaaacctatgatataattgacttggtgtcaatcaggtaatagttctttgtccccctgttgaaccattgcggttgcttcataataagtctgttcccctgatatggaagttaacttcaaaccggctggctgttttcttaagcttcggtacaaccatttagcagtgtggtttcgcatctgtccttcttaagttagattcttatatgcgagggtgttgatgctccataatcatgggttttaccaaaccgattgaacacttaaacttttaacgaaagaaggtgatttttatgaacccactttacgtcggtattgatgtaagcagcaaatccaatgtcgtttatttcatgcttcctgacggaagtaaacatagtaacttttctgttgccaactcacataccggttcttcacagttggtaaaaagaattctttctgctatgacatcttgctccttagatactgttttaataggtcttgaagcaacctctgtgtatggtgataaccttgtttattttctaagggaagatgctgcattagctcgttttaattcaaagattcatgtcctcaatcctaagcaagtcagtaaattcaaagaggcttacaatgacttgcctaagaatgatctcattgattcttttgttattgctgattgcctgcgtttcggtagaatcaacaaagaggtatacatcggtgactatcgttacaaagcacttcagaaccttacacgagcacgttatttcgcggttttcaacctcatcaaagaaaagcaacgttttatgaacatactctttaagaagtattctactatgacacaggagaaggtatttagcgataccttcagcactaccgctcttgcagtctacgatgagtttgaatccgcagaagcattggcagatatggacttacatgagcttactgcttttattatggaaaaggggaaaaaccgttttccaaatcccaatgcagtagccaaagccattcagaaagcagcccgaagttcttaccgtttaccaaagacggtaaatgattctgttaatcaggtgctttctatatccataacctccataaaggcattggaagctcaaattaaggagtttgataaagctatcgctactcaaatggaactccttcctaatgtattgatatctattccgggtatcggaccggttttttctgccggaatcatggcagaaatcggagatatcaaccgtttccacaatcaagctcagcttgcaaaatacgcaggtcttgcatggaaacaacatcaatccggagatttcgaagctcaaacaacaaggcttattaactccggtaatcgatttttaaagtattatctgtgtgaagccgcattttctcttgtaagatgcgacaaggaatacagcgacttctatcatctcaaatacaaagaggtaaacagatatcaacacaaacgtgcactcgcattaactgctcgtaaatttgtgcggttagtctttcgactgctgaaagacaatcgtttatatacctcggcagaatagcaaagcttttctgctgaaatcaggtcgccctgctcatttttaaaaatttgatagacagggcttaggcaggtgttttgtacctttcggaatttggtgaaaaatatttgctttttcacttattttcctcttgacatttcaccgctgga

SEQ ID NO: 2457 - DNA, 1406 bp, unidentified
  source 1..1406: mol_type = unassigned DNA; note = element_3782587
  misc_feature 1..2: note = core
  misc_feature 3..138: note = LE
  misc_feature 139..1158: note = CDS
  misc_feature 1159..1406: note = RE
  misc_feature 1171..1370: note = bridgeRNA
acatggggtaatcgcgggagcgagtcgcgtctctgccggtgtgttgattggcaggcgacaacaggtggttgctccccgataagatgaaaagcgggctcacgattggcaccgggcccaggcatggaacggagagcaaccatgggcgagtttatcgggcttgatgtatctttgaaagagaccgccatatccatccgacgcgcggggaaaagagtgtggcgggggaagtgtccgtctgacccggcccttttggccgaattgatccgcaagcgagctgtgaacgtcgagcgtgtcgtcttcgagacgggacctctgtcggtctggttctaccacgaactgacccgccgtgatttgccagcaatctgcatcgatgcgcggcacgctaaagcagcgctcgacatggcgacgaataaaacggacgcgaacgacgccgatggcttggcccatttggcggaggtcggtttcttccgggaagtgcgggtcaagggctacgacagcatgctgatccgtacattggtcggtgcgcgaacgaagctcgtgcgccttaccaccgatctatcaaatcaaatccgcggtctgatgaaaacgttcggtctggtcgtaccgcaaggccgcggcggtgcattcgaaaagcacgtctatcggctactcgagggtgaggacgcgctcgcccgtatcatcctgccagttctcgaagcgtggcgcgctatgcgggtgagatccgccgaacttgggcgccaactttccgctgcggctcggcagagccaagcttgccaaatcctgatgactatccccggcgtcggtgtagtcacggcgaccgccttcaccacggcgatcgaagatccggcgaattttgccagatcgagatcagtgggcgcctgggtcggtttgaccacacggcgctatcaatctggcgaagtcgactatgatgggcatatctccaggcgtggcgatgccaaccttcgggcattgctatatgaagcagctacggtgatcctgacacgaacccacgccgaaagcgacttacgaacatggggcctcaagcttcgcgagaagctgggcttcaagcgggctgcagttgccgttgcccgcaagctggcggtgatcatgcatgccatgctgaaatccggagagctgttcaaccggccggtcgcggggtaactttttaaatactcggtcgcgcctcaccaagcgcaccgggacgtccctgccggacgttagccggcccattccgtgagatggcgttgcaccgtcaaccgactttggcgcgtgcgttttgcacattggaagggctgctcagcgaagacccatcatgcagcgaccccgtatcgactgcgaagacgaccgtgtccctggcaaatgacgtccccaaccaaaaaaggccttgcgttatgtagtgcgattagacg

SEQ ID NO: 2458 - DNA, 1566 bp, unidentified
  source 1..1566: mol_type = unassigned DNA; note = element_3784958
  misc_feature 1..3: note = core
  misc_feature 4..248: note = LE
  misc_feature 249..1424: note = CDS
  misc_feature 1425..1566: note = RE
  misc_feature 4..227: note = bridgeRNA
tctcgtattatatagtagtagtgtttatagtccctctccaaggactgtatgctatactaatggagatactgtggattggtgctcaccttctaccacttgatggttacagaaagactccaaccacaatctctttgtatatttgttaatcagttagataccgcatgacggtttatttagaacgagaatacaatcgcaaggagtatccgtggttccaaacagtatcaaatacatttcaaaggagaattgctatgatatacgcaggaattgatattgcaaaggataagcatgattgctttatcactaactcagatggtgaagtgctctttaaagcatttacctttccaaacaaccgagatggttttgatgaactctatcagaaaatcatatccgttacagatgatttaaccgaagtaaaagtaggacttgaagccacaggacactacagttataacatcttgggatatcttcttgataaaggtctgaccacctttgttatcaacccgttacataccaacctttacagaaaaagtctaagccttagaaagacgaaaacggataaagttgatgcccatacgattgctacaatgcttatgtctgatgtgaacttaaagtcctactcagacacatcttaccataatgaagaattgaagtcactaactcgctatcgttttgataaagttaaggaacgtgccaagttaaaaacctccatttcccgtcttgttacaattctttttccagaactggagaaacatgtgccaacactccatatggcatctgtttatgctttattatctgagtttccaagtgcatctgatatttcatcagctcatttgactaggctgacaaatctactttctgtttcttctaaaggtcactatggaaaagatactgctaatcttttcagagaagcagcaaggacatccattggttctcatatgcctgccaaatctctggaactaaagcataccatcagactgattaaggaactaaattctgaaatcaatgaaattgaatcccaaatcaaatctatcatggacaatatcaattcaccaattctaagcattccaggtatcaactaccgtatgggttccatgattattgctgaaatcggtgatttttcttattttgattctcctgataagatactcgcttatgcaggtttatcaccatctacttatcaatccggtcaactagattcttcctatgcacgcatggaaaaacggggttccaaatatctacgatacgctctatttaacgcaactatatttgtgtgtcattgggatccaaccttttcagcttaccttgccaaaaaacgctctgaaggtaagcattattatgttgcaatatcacatgctgctaaaaaactcgtcagagtaatttaccggttagaaaaatccggacaatcctacatcaaagcagcttaagtttttaataaaaatgtctccttattgagcacctgttaagatgctctatttgtcatgcagttttcaatgttcaaatatatgaaatgcatatccgcaattcattcaaaaaaatatcattttagacttgacttttaatagttag

SEQ ID NO: 2459 - DNA, 1361 bp, unidentified
  source 1..1361: mol_type = unassigned DNA; note = element_3785833
  misc_feature 1..2: note = core
  misc_feature 3..62: note = LE
  misc_feature 63..1112: note = CDS
  misc_feature 1113..1361: note = RE
  misc_feature 1144..1354: note = bridgeRNA
ttatggatggcccacccctcatcatcggcgcaagatcgcgtcgggcagaagaggagttgaccatgaccaagacgagcatttccaagacgccgattgccgtgctggggatcgacctcggcaagaacagctgcagcctggcagggctggataccacaggcgcggtggtgctgcggcggcggatgacgcgggaggtcttgatcgccttcgtcgccaagctgccgacctgcgtagtggcgatggaggcctgctgtggcgcgcatttcctcggtcggacattcgaggaccagggtcacgaagtccggttgatggcgccggagtatgtccagccctacgtcaaggcgcaaaagaccgacgaccgggatgccgaagcaatcgccgaggcggcgacgcgtccaaccatgcgcctagtcacgctgaagagcgaagcgcagctcgaccttcagatactgcatcgggctcggcagcggctcgtgacggcgcgcacccggttgacgaaccagttgcgcgcggtgcttctcgaacgcggcatcatcctgcccaagcgccggaccacgctgcgccagcggctcgacgacctgatgagcggggagatgccgatcagcgcgcgtgccatccgactgctcgaagatctgcgcgacgagtgggcgaaccttgatcggcggatccgagcctatgacgacgaactggcggcattgacccgcgacaatgacagggcccgcgcccttgcgaccattccgggcatcggcgtcatcaatgctactgcgctgctcgcggcggtgggcgatgcatcgagcttcgccagagggcgcgatctcgctgcatggctgggcctgacaccgcggcagcactcgacgggcggcaagaccaggctgctcggtatcagcaagcgcggcaaccgatacttgcgggtccaactgatccacggcgctcgcgcagccatgacacacttcgtcaaacaggatacggcgacgggcgagtggttgcgccgactgcttgcaagagcgcatcccaacgttgcgatcgtcgcgctcgccgccaagctggcgcgcatcgcatgggccgtgctgaagcacggacggactttcgagcgtcaggtcgccgtggcggcctgaccggaaacagcggccggcacagcgccgatgccgctcacgatgtctgtggaggtgaaggacagatggcgtaacggttgaccccgcgtcgcgagagcctggtcaaaaatgtggtgctcgacaccgccgtctttatgaggcccgaggcgcgcgtgatccatcttggccagggccagagccctgagaccggatacgttgatgcagaccagcacgtcgtccaacattacccttgcagacggggtgggccatacg

SEQ ID NO: 2460 - DNA, 1352 bp, unidentified
  source 1..1352: mol_type = unassigned DNA; note = element_378b404
  misc_feature 1..2: note = core
  misc_feature 3..77: note = LE
  misc_feature 78..1106: note = CDS
  misc_feature 1107..1352: note = RE
  misc_feature 1124..1349: note = bridgeRNA
atgaaatggctacccccccgctgccccctgtgatcgcccactaagctttcacagagggctcatcggagatcattgccatgaacaacgtagctattgccgccatcgacctcggaaaacattcctttcatcttcatgctcaagatgatcgcggccacgaggttcaccgcagaaagtttacgcgcgcagcactcacccaatatctggcgaaactggaaccctgcaccgtcgtgatggaagcctgtggcggcgcccatttcatggcgcaggaagtcgccaagctggggcatacgcccaagcttattgcgccacatctggtacgcccttacgtgaagagcaacaaaaacgacttcgctgatgccgaagcgatctgcgaggcggcgacccggcccacaatgcgcttcgtgcaccccaaaacccaggctcagcaggcgctggcgatgctcaattcggttcgtgagtcgttcatcaaagaccgtaccgccaccgtcaatcggattcacgcagccctgctggaggtgggtatcagcctggctcccggcttcaaatccatcaaagagcttccagcattgcttgagatgagttcattttccggctccatcaaaaaaattctgatggggttgcatgagcacttcaactatctggatgggaaggtcaaagcgctggacaaggaggtggaatgccaagcagctgaagatgatctggcggctcgtttgatgaccatgccgtgtgtcggcccgatcacctccagcgccttggctgccgagttgggcgatggcaaacagttcaaatgcggccgaggctatgcggcgtcgatcgggctggtacccaaacagcacggtacgggcgataaaaccgtgttgctcggcatcagtaaacgcggcgatcgaaatcagaggcgcctgctcatccagtgcgcccgtgtgtacttgatacaactggaacgacagaaaggcgccttggcggactgggtccgccaactattagcttcccgccatcactccaatctcgtggtctgcgcactggccaacaagctggcaagaatcgcctgggcgatagccgcacaccacactgaattcgatgcggggccagccgcgatgaacgcctgaccccgctgtcacccgagcaccacccacctggttttgcgatgctggataactgatgacgtgaacggccaaccggcctgacgacaaccctgggctcctacacggctgtaaggccgttcaactaattagggtcgttgggcatcgattctcatcgaggcgcggggcgacacccccactcagacgccggatagatgaaagcaagccaaacacgcatcaaatacagtattgcagaaaagggggtaaccatag

SEQ ID NO: 2461 - DNA, 1172 bp, unidentified
  source 1..1172: mol_type = unassigned DNA; note = element_3791536
  misc_feature 1..2: note = core
  misc_feature 3..206: note = LE
  misc_feature 207..1160: note = CDS
  misc_feature 1161..1172: note = RE
  misc_feature 3..182: note = bridgeRNA
cttgtatggttagacttgaaggggtggtgggactaaatgcccgattctgactgttacgagcagtacagaccgtgggagacatcgccccaccccttccaccaaagcgccgataaagaatgcatcgtttgcaagcgacgatagaagcaagccagcgcctcttggtgaaagcccctcaagccgaaaaaccataacgtggagagccgccgatggcaatgcaggtagtgaagtcgatcatcggagcggacgttgcaaaagctgaattggtgatccatcacgaggagcgtgatgagatcatcaagctgaaaaactctaaatctgaaatcaataagtggctcaggcagcagccactgaacacggctatcgccgttgaagcgaccaacatctatcacttggatctggtcgagctagcccatggcatgggcttcgatgtttatgtcattgatggatttcaactgagtaactatcgcaagagtgttggcggccgagtcaaaactgacccgtccgatgcgcggttactgtcccgttttctgaaaaacgagggtgaggatcttcgcccttggaccccgcctcccgccgtctacggcaagctgcagagccttctgcggcgcagggctgcgctggtatcggcacgtactgcaatgacgcagagctgggctaacgagggcctgttgaaagcggccttcgaaaccttcgtcaagtcgatagaacggctggacttgctgatacaaaagaagatcaaagaagtattgcgagaggcagggctgcttgaacaggttattcgctgccaagccgtggaaggtattggttttctcacagcgtcagcactggtaatggcatttatcagaggcgaattcaaaagcagtgacgcttacatcgccttcttggggatggatctgcgagtgaatgactccgggcaaaagaatggacgccgccgccttacaaagcgaggctgttcggagatccgtcgtttgttgcataacgcagcgatgtcggccagtaggtcagctacctggaaagacgtgtatgagcagtatcggagcaacggtaaagcaacgactcaggcactagtgatcttggctcgcaagctcgctcgcgtcgcattcgccctgatgcgagatcagggcgaatacgtcaccaaaagccgcaaattggcttgctgaaaaccatagaat

SEQ ID NO: 2462 - DNA, 1577 bp, unidentified
  source 1..1577: mol_type = unassigned DNA; note = element_3796b43
  misc_feature 1..2: note = core
  misc_feature 3..270: note = LE
  misc_feature 271..1449: note = CDS
  misc_feature 1450..1577: note = RE
  misc_feature 30..245: note = bridgeRNA
ctggtaaaataaagtagaattgtaccatgaatgttgcatagtttgctttccttgtttgttacatttgtgatatgattttccgtgtgaatagaggtcgcagctatcctgcttaagactttagatcttcccgcgaagagttgcgcctctttctctacgtgattgtgcgaataagctggatgatacttgttatcctttttcctaaccagtctgtacctgcgtagattaagcggatatcctttattcatttcattttaccttggaggtacctacatgttttacattggcattgacattgccaaacgttctcaccaagcggcagttacggatgtttcaggcaatatcattgttaagcctttcaacttcaaaaatactgccgcaggatttacacaattcctttcagtgcttgaaaccaattctgtatcaaaagacaattgtgtcataggtctggaagcaacaggtcattattggtacccgctctatttcttcctcgtcgaacagaaattctccgtcaaagttttcaaccccattcaaacagccgcattcagagaaataaccatccgcaaggtaaagaacgataatctggacagtatcatgattgcagattttacccgcttcgggcgctattcagaaacatatataccttcggaaaatatgcttgcgctcaagaacctttcaagattccgtctgtctgtatgcgatatatgcggcagtctgaaaaagcgtaccattgtgcttttagaccttgttttccctgaatattccactattttttgcgatatattcggcactacaagcaagcaactattggaaaagtactctacaccggatgagttttccgaaatttccaccaccaaactcgccaattttattctgaaagccagccgcggcagaaatggcagggaaaaagcggaacttattaagactgctgctcaaaattccataggcatttcctatgccatcgatacgttttcctttgaaatcaaacagctcatagagcagattgaatttatggaaaatcaactttcggagatagatgcagaaatggcaaagttgctcgcagagtccgaatattccgtcattaccaccataagcggcgtcggtccaacgttggggagtattattgtcagcgaaatcggagacatagagcgttttgaaacttcctccaagctcgtcgcttatgcaggcttggacgcatccgtaaaacaatccggtgaattcaactcatcccggaacaagatttccaaacgcggctccccgtatcttcgcagggcgctctggatggctgcttttatgtcattgcaatgcgatccggctctctacgattattactcacgtcttcgcgcgagaggtaaatcacaccgccttgctacaaccgccgttgccagaaaactttgtatcattgtttgggctatcatgaaatccaaacagccttattcaccacacatttaacatcttattaatagtttctttcagccgtccgaacacgaacggcttttttgcattacagtttacatatttctacccccccaaaaaaaactatcttcctaccatttttcgcttgactttcaatagctggt

SEQ ID NO: 2463 - DNA, 1204 bp, unidentified; identical to SEQ ID NO: 105
  source 1..1204: mol_type = unassigned DNA; note = element_379be3e
  misc_feature 1..2: note = core
  misc_feature 3..211: note = LE
  misc_feature 212..1189: note = CDS
  misc_feature 1190..1204: note = RE
  misc_feature 6..225: note = bridgeRNA

SEQ ID NO: 2464 - DNA, 1381 bp, unidentified
  source 1..1381: mol_type = unassigned DNA; note = element_37a960a
  misc_feature 1..2: note = core
  misc_feature 3..87: note = LE
  misc_feature 88..1119: note = CDS
  misc_feature 1120..1381: note = RE
  misc_feature 1150..1369: note = bridgeRNA
tgatgctgtggacggctccttcaacggcggttagtcgccgccatgaggggccgccattggggtggccctcaattgagggagccaatcatggacacagttatgacaatcggtgtggacatcgccaaatcggttttccaggtgcatggggtggatgcgagcggtgaagtggtcattcgccgtcagttgaagcggcgctatgtttcatcgttttttcagaaacttccgccttgtatggtggggatcgaggcttgcgccacggcccatcattggtcgcgcgaattgagcgcactgggccatgaggtgaggctaatgccgccggcctatgtgaagccttatgtgaagcgccataagaacgatgccgccgatgccgaggccatctgtgaggcggtcacgcgcaagaatatgcgctttgtcgcgaccaaaactatggagcagcaaagctgcctgatgctccatcgcacgcgccatttgttcattcgccagcagacttccaccatcaatgcgatacgagcccatttggccgagttcgggatcgtcgcgccggttggccgcaagggtgtgatggcattgctcgaaattgtcgctgattcaaacgatacaagattacctgagttggcccggagctgtgttgccgctctcggtgtcgagctgcggatgttgaagacacagattttagagttcgaccgcaagatcatggcttggcaccgttccaatgaggcaagcaaacgccttgatgaaattccgggagtgggacctgcacttgccacggctttggttggaagcatcgccgatccgagcgccttcaaatcggcccgggactttgcggcttggataggacttgttccgaagcagaactcgagcggtggtaaggagcgtttggggagtatcagtaaacgcggcgatcgctacttacgcagcctgcttacggcaggtgctctcgcggtcatccgctatgccaagatccatggctcggagcatcggccttggctcacggcattgctggcccgcaggccgacgaaaattgcggctatcgcattggcaaacaagatcgcgaggatggcctgggcgatgatgaccaagggcgagcgttacagggaacccggcgcgcttgcgaggtaaagggattcgcgccggctcatcggcgtgatgtgaaagttgggagggcgaacagcacgtaatgcagagccggtcgatccggtgatcgggacaacccatttgtgccacagcatcttagaatgcgtgcttttgaccgggacccgatccgcgaagggcattatggccagcggtcatgtgaaccgcatcaacaggccgaacacatggctgctccgaccaacctctgcatcgtgaaaataaaccttgccaacgcggagccgtccacaca

SEQ ID NO: 2465 - DNA, 1183 bp, unidentified
  source 1..1183: mol_type = unassigned DNA; note = element_37b89e7
  misc_feature 1..2: note = core
  misc_feature 3..205: note = LE
  misc_feature 206..1168: note = CDS
  misc_feature 1169..1183: note = RE
  misc_feature 6..210: note = bridgeRNA
cttgtatctttagaccagaccagcgcggtagagtctgatcgctgttgaggcggccagaccggcccgtgcagtttggtagccgctggggtgatcgagcccgtgactgagtacagaacgcacggccgccgcgctggtcttcctgaagcccgaacggttacgcgcgccgatctcgagcgcgcatgcacaagcaagggatctgaagatcatgtctgtttcctcagtaacggcaggcatcgacgtggccaaggcgcacgtggatgtttgtgtgctgtgctccaagagcgatgcccagcgatttgccaacgatgctgaaggccattcggctctggcagcgtttttgcagccccttgatgtggggctggtggtgatggagtccaccggcggctacgaggcggcgctggcctgcgcattgcaagcggcaggcttgcctgtggcggtggtcaacccgcgccaggcgcgcgactttgccaagtccatggggcggctggccaagaccgacgcggtggacgcgcgcgtgctggccgaactgggttcggtgctggtgcgccgtgaagacctcgctcgcttcgtgcggcctgtggccgacgagcgtcaacaatggctggctgcgttggtcacgcgcaggcgccaattgctgacgatgctgcattcggagcgccagcgcctgcagatcacgcccgccaagctgcacgcgagcattgaggccatcgtggcttccatcaaggcccagctcgacgacctggaggtgcagatggtcggccatgtccggcagcactttggcgacctggaccggctgctgcagtcggcggcgggcatcggcccggtggccagcgccacgatgattgccgagttgcccgagctcggacggctgaaccgacgcgagattgcagccttggtcggtgtagcgcccatggccaacgactcgggcagcagcaagggacgccgacgagtgcagggcggacgctttgaaatccgccgcgtgctgtacatggccacgctgacggccacacgctacaacccggccatcaaggccttctacgagcgtctgaaggctgcaggcaagctgcccaaggtcgccctggtggcctgcatgcgaaagctgctgaccacgctgaacgccatggtcagaaccggcaaaccttgggataaatcgcttcacagcgcttgactcggaagacggtta

SEQ ID NO: 2466 - DNA, 1713 bp, unidentified
  source 1..1713: mol_type = unassigned DNA; note = element_37b90c3
  misc_feature 1..2: note = core
  misc_feature 3..331: note = LE
  misc_feature 332..1558: note = CDS
  misc_feature 1559..1713: note = RE
  misc_feature 30..306: note = bridgeRNA
ctcgtataataagttataaagtaaatatttcaggtatcagccggttttgacatacccgtgatacaatagctgtaggacagcagggacaagttctccacctcctggttgagccgaaaggctgcttcttagtaagtccgttcccctgagccggaagttagctgcatactcattagctgtttgccgggatgttaggccgccctcttagcagtgggggatgtcgcattggtctgccccggaatgattctgatacgcgaggtagcggatgctccggttatcatgggtatctcaaagcctgctgacctgaaaatcaccacacggggaggtgaaatcaatgaatccactttttgttggcatcgatgtgagcagcaagaacaatgttgtctgcctcatgaaaccggacggaaccaaattcagtacattctctgtacaaaacaacctgggcggtgctaaaatgctctcagagagaatcgtgtcggcgctggacaagctccagctcagcgaagtgaccatcggtatggaggcaacctccatctacggtgacagcctggtttacgctctccgggaggatggctccttgggccgttaccagcgtcatatccatgtcctcaatcccaagcaggttcgcaaattcaaggatgcttatccggatctgcccaagaatgactatgtggatgccttcgtcattgccgaccatctcagattcggcagaattgcttcggaggtctacatggatgactaccgttaccgttccctgcaaaccctgaccagagccagatttgacgccgttcagaacctgaccagagagaaacagcgctttgccaattacctatttctcaaatgctccggtattgcgcaagataaagacatacccaacaccagcgccaccactctggcaattctggagcactttgaaacagtggacgagctggcgggctgtgatcttgaaaccctgactgcttttgtttctgcggcagggcgtggtcggtttgctgacccagaggctaccgcaaaggctgtacaagccgctgccagaggttcttaccggctgcccaagactgtcaatgactccattaaccaggccatgtctgtctctattgcctccatgcgggcgctggagagccagatcaaggtgctggagaaagccattgaacagcagcttgaaatcatccccaacaccctgacttctatcccaggtatcgggaaggtctactctgccggtatcatcgccgagatcggcgacattcgccgctttgaatctcaggcttctgttgccaagtacgccggtcttgtctggacacagcaccagtccggggacttcgaggcacagaataccagaatgataaagtccggcaaccgttaccttcgttattacctgctggaagccgccaactccgtgagaagatgcgactccgagtttcggcgctactatgacctcaagttccacgaggtcaataagttccagcataaacgcgcactcgctctaactgccagaaaactggttcgtgttgtctttcgactgctgaaggacaaccgcctgtatatcgtgccggagagctgattccagcagctgctcccggtggctacaggccctgtcgaaaaaaatactacaggcagggctttggttggtgtacgcttttttgccggtactggccgctttggatgaaaaaataatcttttttctctctatctctctattgacatcacaccattaga

SEQ ID NO: 2467 - DNA, 1558 bp, unidentified
  source 1..1558: mol_type = unassigned DNA; note = element_37bc599
  misc_feature 1..2: note = core
  misc_feature 3..269: note = LE
  misc_feature 270..1472: note = CDS
  misc_feature 1473..1558: note = RE
  misc_feature 1..228: note = bridgeRNA
ccattaccatgttaagtaggttccaaaactggaatctggtcgccgatcatggtatggctcttgttccctgtcgttgatgatccggggggtgttgccgccatgggagggacgcccgcttaccgctgatagggacacgaccggcgcggaagtcggcatgggtgaagcgttgggtctcatcgtaatgtgggtgacgggatcgggtgtccgggccggtatcgcgccagtcgacatggcgaccctgacgagtcgggagacaaggaggcctcgccatgggaaacgacgacatcgacgtatggctgggactggacgtgggcaagcaatcccatcacgcgtgcgcgctcgaccggcacggaaagcgcatcgtcgacaagccgctggggcaggacgaggcgcagatccgcgaactgctcgcatgtctgggcgggcatggcaacgtgctgctggtcgtggaccagcccaacacgatcggctcgctgccgctggcggtggcgcgcgacatgggcgtggcggtgggctacctgccggggtcggcgatgcgcaaggccgcccagctgctgcccggcgacgcgaagacggacgcgcgcgacgcgtacgtgatcgcgttcaccgcgctgcatatgcccgacacgctgcgcgacgccggcagcgacgacgagaccatggcccggctcaaggtcctggccggattcgacgacgacctggcattcgaatgcaaccggcagatcaaccggctgcgtagcctgctgctgcagatccaccccgcgttcgaacgcgccctcaagggcgaccgcatcacgcgcgacaccacgttggcgctgctcgaacattacggagggccgaccggcatgaggcgctccggccgtacacgcgtgggcaaatgggccaagagcgcagggctcagacgctgtgacggcatcatcgacgacctgttcgacgccattggccagcaaaacgtgaccgtggccggcacccaggccgtcgaggagatcgtccccgtgctcgcctcccgcatccgccagctgcgcgaacaacgcgaacagctcgccgccaaggtcgagacccttctggaggaccaccctcttctcacggtcctgaccagtatgcccggaatcgcggtcaggaccgcaagccagatcctgctggccatctccggcgacatcacccggttcaacagcgccgcccacctggccgcctacgcgggcatcgcgcccgtcaccaggagaagcggcaccagcatacgtggcgagcaccccgcacggggaggcaacaaacgcctcaagaacgccctatggcagacctccttcatcgccgcgttccacgatcccgaaagccacgcctactaccaacgcaaacgcaacgaaggcaaacgccacaacgcagccatcatctgcttggctcgccgacgctgcaacgtcatctacagcatgctcaagaacgcaaccctctaccagcccatgcacctcacggcctgaaccgccagccgccaccggcagggcgaaacatgccctaaaaacgacacacaatcaagctgatacgacttgacaaaccgatagggaca

SEQ ID NO: 2468 - DNA, 1546 bp, unidentified
  source 1..1546: mol_type = unassigned DNA; note = element_37c2aa5
  misc_feature 1: note = core
  misc_feature 2..248: note = LE
  misc_feature 249..1424: note = CDS
  misc_feature 1425..1546: note = RE
  misc_feature 2..224: note = bridgeRNA
tcgtataatagagtagtagtgatttacatccctctccaaggatggaatactataatatccaagacgctgtggattagttttctcgtcctaccacttgatggtttctgaaaggctctaaccacagccctttatccgattgttaatgagttagataccgcttgacggtttatgtagaacgaggttacattcgataaagtgccctgtggccccaagcagtgtcaaatttcttatttgcgaggtgttcttttatgattttagttgggattgatgtcgccaaggataaacatgattgctatatcatgaattcaaatggtgaagttttgttttcagcctttaccattaaaaatgatctggatggctttgataacctttatgggaagattctgtcgctttcacccgaatcagacaatataaaagtaggactggaagctaccggacactactcttacaacctgcttgggtatctgctcgacaaaggtctacccaccttcgtcatcaatccgctacacacaaatctctatcggaaaagcctgtctttgcgtaaaacgaagacagatgtgattgatgcccgcactattgcaaggatgttactgtctgatataagcttaaagccctactcaattgtagcataccacaacgacgagctaaagtcactgacccgttatcgttttgataaggttaaacaacgtgccaaactcaaaagttccatttcccggttggttaacatcctcttccctgaattggagaaacaggtgtcatctttgcatctcaaggcggtttacgcccttctggaaacttatccttccgcaaaagctatcgcttctgcccatctgaccactttgagccatttactttataaggcttccaaaggccgttttgataaggtgaaaaccttgcgtattcggaatgccgccagacgttcaattggttcttccatgccagcaaagtccatggagcttaagcataccatccatctcatcctggaactgtctgctgagattgatgagattgaaacagccattcaatccatcatggacaatctagcttccccgattttgacgattcccggtatcagttaccatcttggggccatgatcgtcgctgaaatcggtgatatcacctgtttcagctctcccgataaactcctggcctatgcaggcatgtctccgacaacctatcagtccggccaacttacttcttccagggcaaagatggaaaaacgcggttccaagtatctcaggtatgcgcttttcaacgccacccaatacgtatgccattgggaccccgctttcagcgcttatctttctaaaaagcgcaaggaaggcaaacactattatgttgcgatttcccatgctgctaaaaaacttgtccgggtgatttttcatttgatgaaatgcggtgaggtttattcccccatttactaaaaccatttccaaattttggcatctcatgatgctctttttgtcatgcctattttttgttttttactttattttcattttcctgtttttttcctcattttcatttgacttataatagttagtct

SEQ ID NO: 2469 - DNA, 1746 bp, unidentified
  source 1..1746: mol_type = unassigned DNA; note = element_37c8212
  misc_feature 1..2: note = core
  misc_feature 3..373: note = LE
  misc_feature 374..1606: note = CDS
  misc_feature 1607..1746: note = RE
  misc_feature 69..348: note = bridgeRNA
ctcgtataataagtttatagttaatagttaatagttacctagctctttgataactgaataaataagaaacaagatcaatcggtttggttatacccatgatataattgatccctgtgtcaatcaggtaatagttcttcattccccctgttggacctttgtggtcacttcattggaaagtctgttcccctgacatggatgttaacttcaaaccagctggctgtttgccggagtccatgggtgtcccttttgcagtggggatcgtatccgcccatctccggctgaattctgatattgcgagggtgttgatgctccatgatcgtgggtattaccaagccgattggccgctaatccacttacgaaagaaggtgatcctatgaacccgctttacgtcggtattgatgtgagcagcaaatccaatgtggcatatctgatgaagcccgatggctccaaacatagcaacttctcagttcccaacacccgggatggttcccgacagcttgtgaagcgtatcctttcagctatcacttccgaatcccttacagacgttgtcatcggtctggagtcaacctccgtttatggcgacaatctcgtctgtttcttaagggaagacggctctcttacgccgtacaacaagaagatccatgtcctcaatcccaagcaggtcaataagttcaaactttcttacaacgacctgcctaagaatgactatgtggactcctttgtcattgctgactgtctgcgcttcggtagaatcaacaaagaggtctatctggacgactaccgctatgctgcccttaagaacctcacaagagccaggttcttcgctgtccagaatctcaccagagaaaaacagcgtttcatgaaccatctgtttaagaagtattctacgatggcgcaggagaaggtattttccgataccttcagcactactgccttagccgtctatgaatcctttgagtcggctgaggcgttagcaaacatggacttacatcagctcacggaattcatcatcgagaaagggaaaaaacgtttccctgacccggattccgtggcgaaagccatccagaaagccgcccggagctcctaccgtctcccaaaaacggtaaacgactccgtcaatcaggtgctttctatatccataagctctatgagagctatggaatcacagataaaagcctttgataaggcgattgctgaacagatggctctaatccccaatactctgacatctgtcaagggaatcgatcctgtctattcagccggtatcattgcggaaatcggtgatatcaaccgtttccccactcaggcctcattggccaaatacgctggccttgtgtggtcacagcatcagtccggagactttgaggcgcaaaacacacgcatgatccattccggcaaccgatacttaaagtactacctgtgtgaagctgccctgtctcttgtgagatgcgacgcagagtaccgcagcttctatcaccgcaaatataaagaggtgaacaagtaccagcacaaacgtgccctcgcattaactgcccgtaaattggttcggctggtctttcgactgctgaaagacaactgcctgtatagagcaccggaatccaaataggtttggattctaacggtgaagccatgcccggctaaaaattagaaaatagtggggcttgggaaagtgcgtccatttttaggtgaagccagcaaaaatctattgatttttattcattttcctcttgacatatcaccgctgga

SEQ ID NO: 2470 - DNA, 1199 bp, unidentified
  source 1..1199: mol_type = unassigned DNA; note = element_37c8627
  misc_feature 1..2: note = core
  misc_feature 3..232: note = LE
  misc_feature 233..1177: note = CDS
  misc_feature 1178..1199: note = RE
  misc_feature 26..207: note = bridgeRNA
cttgtatggttacccggcaagtcttagaaagaagagacttgtcggggtggagggaccaggcaagcttctgaccctagggtacagactgtgggagatacggccccaccccgcaccttcaaacgccgataaggaatccatcggctgagcacgcactcagaccgacgatactctgcaagccagcgttacggtgcgccccgacaagcccatttaacctagctgagaggggcaccccatggcaatgccggcaaactgcctggagatcgggattgatgtggccaaggacgatctggtcatctatctgctgaacgggaaccaaaccctgaccatcgacaacaccccccaggccattcgccaatggttggccacgctccccaagggctgcgatatcgccattgaggcgaccagtacctatcacatggacctcaccgagcgcgcgcacgccaaaggccatagggtctatgtggtggacggttaccgcctcagtaactaccgcaagggcgttggaggacgggccaagacggatctggccgatgcccagttgctggcgcgccatctgcacaaggagaaagacgagttacgcccgtggagcccgcccccaaagacgtaccgggtgctgcagagcctgctgcgtcgccgggccgccttggtcaaggcccgcaccgcgttgcgccagagcctgagcggagagccggagctcaaggccccgctgcaggccctgatcgccgagatggatcgagtcgacactgtgattcagaaacggctcaagggcgcggtgagcaccgccggcttacaggctcaggtccagcgatgcgacgcgatcaacggggtcggtgagatcaccgccatcgccttggtcatggccttcctgagaggggacttcaagaatagcgatgccttcgtggccttcctggggctggatgtccgggttcgtgactccggcacgctcagaggcaaacgcaagctgaccaagcaaggggatacggaggtccggcgactgctgcactgtgccgccatgagtgcctctcgacatcccgtctggcgtgccttctaccagcgctatcgggaccggggactgcacaccacgcaagccttggtcatcctggcccgaaagatcgcccgcaccgccttcgccctgatgaagcaacaacaagaatattgccccgcaaagctcttttaagcattgcagggcaccatagaat

SEQ ID NO: 2471 - DNA, 1580 bp, unidentified
  source 1..1580: mol_type = unassigned DNA; note = element_37cb857
  misc_feature 1: note = core
  misc_feature 2..283: note = LE
  misc_feature 284..1459: note = CDS
  misc_feature 1460..1580: note = RE
tcacgtataatccaattatcgggtgatgattggattatttctcctttctcccaaattctattgggtatattcaatcattatctgatatactatcaaaggcgctgtggatctgtacctatttttatacagctttgactggtagggagtgactcagaccacagcttttcgtctattactgttaatcagtttgttaacgctccgacgtttcgatttacgtgattacacagccgaattccctgtggaagacagcagcgccaaatcttaaatctaaggaggtaccactatgtccacgtactttgtcggaatcgacatctcaaagtacaagcacgattgctgtattatctatgctgcagatcagagcattgtttccaagtttaccattcataacgatatggatggttttgagcaattgctcaccgctctccaagccttatcaactcccaaggacataagaatagggtttgaatccacatcccattatgccctcaaccttgaactcttccttgagaaagcccaccacagctttatggaagttaatccagttctcataagtgagtataagaaatctacttctttgaggcggacaaagacggattccattgattgcgaattcattgcccgttggttaatgactgtagagtacaaaccccattcaataggattttaccacagttattctctaaagtcactaactcgtttgagggatcgcttagttcgtcagcgttctttctatctggtaaagctcacaaacgtcctggatcacacatttccagagtttaagccatttttcaaggaaagattcagtaagacagcaatctatcttcttgaaacctatggttctgctgaaaaaatagctcgcatgaactcagcatcatacgaaaatctgcggagtatttctcggggtaagttctcaccgcagcagtttattgagctaaaagagctcgccgcaaacaccgtgggtgtaaacaactccatcttcgacacggagttgaactgtctactatcgctctatcgggatgttgccaagcaagtatcaatccttgaagaacagataatcacgcttattgaggacatacacccacattttatgtcaatcccgggcataggcccattatctgctgcggtcatctacgccgaatacggtgatatctcaaacttttcatcaccgtctcaaatgcttgcattcgctggattagaaccgggaatcaacgactccggaaccgaatcgcacaaaggacgtatggtgaaacgcggttcctcccaacttcgttatacgcttctcaactgcatccttccgttgattcgattcgatgtaacatttgcaacgtattacgcaaagaaacgagccgagggaaaacctcaccgtgtagccgtgtctcatgtggccaagaaacttgtcagggtcatttttgcattggagaggcaaaacactgactttgtttcgcaggctcttcgataagacgaaaataatcttctctttatacgctgtctgaaatacggtgtattcagacagcttgtttgccatgcgattctttaggatttaaacttttttcaaaaactacttgacttttaatagtttg

SEQ ID NO: 2472 - DNA, 1390 bp, unidentified
  source 1..1390: mol_type = unassigned DNA; note = element_37cb893
  misc_feature 1..2: note = core
  misc_feature 3..88: note = LE
  misc_feature 89..1120: note = CDS
  misc_feature 1121..1390: note = RE
  misc_feature 1091..1377: note = bridgeRNA
agatggggtggttgccgccctcccttgacggcatcgcaatgtgccaaattagtggtgttacagccactgagacgaaaggacggcaaccatgacaaaagatacgatgatcggggtcgacttggcaaagagcgtcttccagattcatggagcatccatggatggtaccgtgaagttccggaaaaagctcagtcggcctcagttcctgaacttcatgtccaagcaagccccttctgtcgttacaatggaggcgtgcggcagtgctaatttttgggcgcgtgagttaactcgccttggacatgatgtgaaattgatctcgccgcgatacgtcaagccattcgtgaaacggcagaagaatgatgccgctgatgctgaagcgattgtggaggcggcacagcgtccggaaatgcgttttgtcgagcccaagacagaagatcagcaagctcgggcaatgttgtacagaattcgggagagactggtctgtcagcggacagaacttgtgaacgcgctcaggtcttatctgtacgagttcgggcatgcgttcccacagggcattgcgcatctgaatcggattgcagcacttgtcgatgagccagactccaagctacctgcgctcgtgtgcgatgagtgtcgcgatctcctcatccaaatatctgagatatcggaacgcatcgacatcaaaacgcggcgtattcaggacctggcagccgagaccgacaccgcccggcgattgcaaacaatgcccggggtcggcccaattacagcgctggcggtagaggcatttgcaccatgcatgacgagcttcaaacgaggaagagactttgcagcctggctggggcttgtcccgcgccagcattcatcaggtggaaaagaaagattaggacgtgtctcaaaggctggacaggctgatatccgcaagctcttaatcatgggagcaatgtcacgcctgaactggctcgggcgaaaaaacatcccagatggtgtttggttggccaaactgatggaaagaaaacccaagatgctggttgcaatcgctttggctaacaaaatggcgcgcgctatctgggcgatgctgacgaaaaatgaagactaccgggaaccggctggcgcagtcgcagcgtaaagggactgctgcgctcgcaacacaagccggtgaaagggaggtgagaagtcgacgactgcatgggcaaatgatcgtttggatctgggacgggaaaaccagcgctggccttcgagcgaacaagctcgatcatcagatttggacctgttccgcggatcaccataccggccagcggcgtctgataggccgcactgcaaaggcctgacagaagaccgcgctcgatcacctgcacacgcgccagaaacttcttgcattatcggcggcaaccacaga

SEQ ID NO: 2473 - DNA, 1396 bp, unidentified
  source 1..1396: mol_type = unassigned DNA; note = element_37d2d78
  misc_feature 1..2: note = core
  misc_feature 3..74: note = LE
  misc_feature 75..1139: note = CDS
  misc_feature 1140..1396: note = RE
  misc_feature 1115..1384: note = bridgeRNA
tgatgatgtgaccgctccctgacggcatcgatgtgccaaggtgggtctgtgaggatccacaaagggggacggtcatgtcggagattaccacggtcgggctcgacctggcgaagaatgtgtttcaggtgcatggcgctgacgcgtcggggcttggtgttctgcgcaagaagccgagacgggatcaggtgctggcgttcttcagtcaactgccgccttgcttggtggcgatggaagcctgcggcggcgcgcacgtctggggccgcgaggtcggcaagctgggccacgaggttcgcctcatcccgcccgcgaacgtcaagccgttcgtgaagcgccagaagaacgacgctgctgatgccgaagcgatctgcgaagcggccatgcgcctgacgatgcggttcgttcccgtgaagagtgaagagacccaaggggccgcgatggtcttccggatccgcgagttgctgatccgccagcggacgcaggccatcaatgcgctccggggccatcttggggagttcggccagatcgtaccgcagggggcagccaacgccgcgcgattgatcgccatcgtcgaggacccggacagcggactgcccgccgatgccattgccacgcttcaggtgttggtcggagccctcactcatctggagacagagatcggcgaactcgacgccgagatcacccgccgggccaaagagaacgacgttgcccggtgcctgatgaccgttccgggtatcggacccttgatcgccacggtcatcgcggtcctggccccgccgccggagacgttccggaaggctcgggattttgcggcatggcagggcttcacaccgaggcagcattccaccgggggcaagcaacgcctcggggccacgaccaagatgggcgagcgctccttgcgacggctgctgatcatcggggccaacagtgtcatcatcaagcggcatgtccatgccgcggcccggccgggcacctggctgggtgggatgctgatgcgcaagccgccgatactggtgcgagtggcgctggcgaacaagatggcgcggatcgtctgggcattcgccattgtgctcgaaccaatggcgcccaatggctcattggcccggggcggcgtctacccgtctccggccgcggcggcgtaagccgaccgtcggtcgagagggcgtcggagcggaagagggctaggagtagtttggcgcaacggtcgtgagacgggatcagaggaaccagcctgcaacaaagtgccatcgagcacgcggcgttgatttgggacctgatccgcgaacaccatacgggccggcggcatgacgatggccgcaacagaggccgaatacatgtcagcacccgacagcgcgcgaaactgatccagaaaccctcttgcgcatggggcagttataca

SEQ ID NO: 2474 - DNA, 1258 bp, unidentified
  source 1..1258: mol_type = unassigned DNA; note = element_37d3272
  misc_feature 1..4: note = core
  misc_feature 5..273: note = LE
  misc_feature 274..1233: note = CDS
  misc_feature 1234..1258: note = RE
  misc_feature 25..201: note = bridgeRNA
catataaaagaagtagccctaaataacattggctatttagggctaagctagggtgagaagaagagactaaatcgtcaaaagctacgagcttctcggtatgccaaagtctcttctcgctctagcgattctgagcttctataacaggtaatcgcacaagatctttaaccgatatgataaagccatgaatcgcacttaccttccaacataaggatagtagatttatgaacacactctctattccacacctaaaaaacctcacagctattggtatcgatgtttcaaaaaaagacgttagattttgctggtcttactgctgaacgaaccgtgcaatatcaactcaataacactgtcgagtcgatagagaaattggctaacaaactagtcagtgtggattacaaagggaagataatttgtgagtctactggtcactaccacttgaagttggtctcggtattttcaaagcataagctcaatctttacgtcattaaccctctgctctcaagcaagcatagtcaagctaacatccgcaaaaccaaaactgaacctgtcgatgcgaaaacgctcgcaactatgtgccttactgagagaaaccttcctaaacccacgctcacgaatgatcgtaatctattgattacattgaaagttggacaaatcaaagcgatggagaaacttatccagaagatgagaggtagtctgcgcttgtatgaagaaacctatcagggtctaggctttgataggagtgaaattcaacatggactttcgctaaaactagctgagttaaagtcgtttcataaacgtatgctcaaagagcttgaagacttgattatcgaagagaataacagttcgaacgataccgatattctgaacagtatcccaggtatatcttcgactactgttgcactcttaagtcaattagacaggaatgttcaaagttgtcattcatgggtagcttttattggactggatactagcattcgtcaaagcggaacttggaaaggtaaggggaagctgagtaaacgtggtaatacttacctaagaaagcgaatgttctgtgctgcgtggggagcaatgcttcatgacgataagtttagagcttactacgacagattaagagctgaaggaagggattacaaagaggcattatgcattctcgccaagaagcaaattagggtcgcttatcacttattgagtatcggtgaaaaatacgaccctaataaggctttttgtgtctaaaaaattgacaaagtcgtttaacagg

SEQ ID NO: 2475 - DNA, 1349 bp, unidentified
  source 1..1349: mol_type = unassigned DNA; note = element_37d6fc8
  misc_feature 1..2: note = core
  misc_feature 3..83: note = LE
  misc_feature 84..1088: note = CDS
  misc_feature 1089..1349: note = RE
  misc_feature 1122..1336: note = bridgeRNA
tgatggagtggatggctcccgctcccggcatcgtaatgtgccacattgggtgctgtcacacttaccaatgaagggagccatccatgaaggagattgccacaatcggcctggatctggccaagaacgtgtttcaggttcatggcgttgatgccaaaggcatcgtcctcgtgcggcggcaggtcaggagagcccaagtcctgctgttcttctcacgcttgccaccttgcctcgttggcatggaagcctgcgcaggagcccattactggtcacgggaactggcaaagcttggccatgatgtgcggctgatcccgccctcctatgtcaagcccttcgtcaagcggggtaagacggatgcggctgatgcagaggcgatctgcgaagcggtaacccgtccgaacatgcgcttcgtgccggtcaagaccgagaggcagcaggcggtgctgatgcagcaccggacgcgtgactttctcgttcgccagctgacgcagcttgtcaacgcaatccgcgcgcatctgggagagttcggcatcgtggtcccaaagggcgttcacaacatgggccgcctcattgccgaggcggaaacagccgatctgccgcccgaggcgcggatgccactcgatctgcttgccggccagttccgcgacacgaagcagcgcatcgatgtcatgaccggtcagctcaaagccgacgcagagaaagacgagaccgcgtgccgtctccagactgtgccgggcattggacccattaccgccagcgtgctggccgcaatgctgcccgatgtgtcgggcttcagatcagcccgtgacttaccggcttggctgggcctcacgccaaagccccattccagcggaggcaaagaacggcttgggtcgatctcaaagatgggcaaccggtatatccgacgcctgctttatcttggcgccatgggcgtgatctccgctcgcaaacgctctgaccccggcaccgactggctgggacgactgatcgcgaccaagccgctcaaggttgctgccatagccttggccaatcgcatggcgcgggccatctgggccatgttgaaaacgggcgaagtctggcgcccaacatgagcgatttgaaccacaggccgctcgcggcctgaccgaaatggcgagggcacagtgagatgatggcaaactgacggaaaataggcagggacaccccgtttgaaccggagcgccttgagcgcgtgccattgatagggacccatacctcaggcggacgttcatcagggcgcgcggattaccgcaaatcagacgccgaatacatggccgcacccgaccagatgccgaatatcacaagcctcttgccacgcgggagccatccataca

SEQ ID NO: 2476 - DNA, 1188 bp, unidentified
  source 1..1188: mol_type = unassigned DNA; note = element_37df897
  misc_feature 1..2: note = core
  misc_feature 3..219: note = LE
  misc_feature 220..1173: note = CDS
  misc_feature 1174..1188: note = RE
  misc_feature 22..193: note = bridgeRNA
cttgtatctttaatttgatgtgtgtgtatgaacatagttcatgcgaaacaggacgggacagatcgaagatttcttgattgaaagatcgcaagggagcatgggtcgtcccgttctgcctcccgaaaagctcgaacagttgcctgggttatcaaagcccgcatcatctgcaaggttgagccgtggtggagggaaaataaaatcgtcaaggaggattgagttttggaagtcggctttccttttgttggcatcgacgtgtccaaagcacggctggatgtggctgtgcgtccctcgggtgcgagtgagtcgtttttgaacgatgcggcgggtatcaaagagttggtcaaacgcttgaagcaaatccaacccactttgatcgtgctggaagccaccggtggtgtcgagcgtggggccactcgcgcattggccagtgccgaactgcctgtggtggttgtcaatccgcgtcaagtcagagatttcgccaaagccacgggtcagttggccaagaccgatcagatcgatgcggtggtattggcccgcttcgccgaagcggtgcgcccggctttgcgccccttgcccgatgaggtcaccttggagctgcgcgcattgattactcgcaggcgacagatcaccgacatgattgtggccgagaacaaccgacgcaacggagcttcgaaagcggtgaaaaaacgcatcgacgctcacatccgctggttggaagcggaactgggccgggccgacaaagatctcgaccaaagcatcggtcacagtcccatctggcaagaaaaccaagacttgctccgaactgtgcccggcattggtccggttactagtcgcagtcttattgccgagctgccagaactcggacaactcaatcgcaaacagattgccgccttggtcggcatcgccccgcttaatcgtgacagcggcaccctgagaggccgtcgtaccatttggggtggcagggctgctgtgcgggcagtgctctacatggccgtcttggtggcgagcagacataatggggtgatccgagctttctacaaacggctgcgcaacgccggcaaggcccctaaggttgccttggtcgcctgcatgcgaaaactcctgacgattctcaacgcaatgatcaaacataaaacgcgttggtctgaaactttttctgttcagacctcttgactttgaagacagttg

SEQ ID NO: 2477 - DNA, 1373 bp, unidentified
  source 1..1373: mol_type = unassigned DNA; note = element_37e03ae
  misc_feature 1..2: note = core
  misc_feature 3..159: note = LE
  misc_feature 160..1107: note = CDS
  misc_feature 1108..1373: note = RE
  misc_feature 1080..1360: note = bridgeRNA
tgatggggtggacgcccccaaacggcatcggtgtgccaaagtagaggtatcaacaacactacttgatgtaggcgtccgtggaggacggttagcataatcgggctggatatcgccaagtcagtttttcaggcgcacggggcggatgcctcgggtggggttgtgttccgcaagaagatcaaccgcgccaagctgctggagttcttcgcctcacagccgccgtgcaccgtggcgatggaggcttgcggcggagctcaccattgggctcgcgcgatcaccaggctcggccatgaggtcaagctgattgcaccgaaatacgtcaagccgttcgtcaagcgccagaagaacgatgtggctgacgctgaggcgatctgcgaggccgggtgtcgaccgaccatgcggttcgtggcggtccagagcgagacggttcaggcaagcgctctggtcttccgcacccgcgatatccaggttcgccaacgtacccagatcaccaatgccgtacgcggtcatcttgccgagtacggtatcgtcgttgcgcaaggcgccggccatttcaagaagctggtcgcgtatctggaagatccaacgtcccctcttcccgaagaggttcgctcgatcctgtcgctcctcgcccagaccgcaacgaggttggaggagaagatatccctgctcgacaaggagatcacgcgccgtacgcggacggatgaagtcgcgcggcgtctgatgaccattccgggtatcggcccgatcactgcaaccgcaatcgccgccccggcgccgccggcttcagctttcagaagagggcgcgacttcgccgcctgggtcgggcttacgcccccgcagaaatcaaccgggggcaagcagaagctcggcgcaacctcaaagatgggtgcgcgaaccctgcgcaggctgctcatcatcggggccgccgccgcgatccatcacgcggtgcgtcgaggggttccgccgacaagctggctgggccgcatgctcgcgcgcaaaccgcgcatgctggtgacagtggctctggccaacaagacagcccggatcgtctgggcgctcctcgtcaaaggtgaggattacaaagctccggaggtcgcagcggcgtaagccgcggcgctccctccgcgaggtcgttgaaggcgtaaggtggtcaaaggagaatatggcgcaacggtcgatgagacgaggtcaggaaaaccagtggggcccaacgtgcgcacagcacgctgctttgatttgggcctgatcttcgaactcccatacgggcccgcggcgatttactggccgcaacagaggccggacagatggctgcaccccgactacgcgctaaatttttctgagaaacatcttgcaccgggatgggcgtccacaga

SEQ ID NO: 2478 - DNA, 1459 bp, unidentified
  source 1..1459: mol_type = unassigned DNA; note = element_3800fbb
  misc_feature 1..2: note = core
  misc_feature 3..167: note = LE
  misc_feature 168..1208: note = CDS
  misc_feature 1209..1459: note = RE
  misc_feature 1231..1454: note = bridgeRNA
agatggggtaacggtccggcgccagggtcgcaagccgctcgctcgctacggcgctgtgtttggcgcgctcgctcgcggcttgcttggcgaagatggcggtcgtccctcaaatgatggtgtcaacggagtcggactttcgtctgctccaagcatcatgagggacgaccatgacctactatgcgggaatcgacgtgtcattggaatacgcgagcctttgcgttgtggacgcgagcggcgggatcgttcgcgagggcaaagtcgcgagtgaacctgaggctctgctcgcctggttcgccgctcttgggcttgatctgaagcggatcgggctggaggcaggtccgctgtcgcaatggctctacgcggcgatgcgggatgcggggcttgcggtggagctgttggagacgcggcacgtgcgcgatgccttcagggcgatgccggtgaagaccgaccgcaacgatgcgcgcgggattgcgcaactgatgcggctgggctggttccggccggtgcattgcaaatcgctggaagcgcaggagacgcgggcggtgctgacggcccgcaagcttgtgcagtcgaagcttcacgacgtggagatgagcctgcgcggcattctgcgggggttcgggctgaaggtgggcaagacgaccgcgcgccgctttgccgcacgcatcaccgagttggtggcggggcatccaaccctggagacgattgcgcagtccttgcttgcggtgcatgccgtgctgctgcgcgagttcgccggcttcgagaagcgcgtacgcggcctggcgcggtcgagcccgcgggccagcctgttgatgacgacgccggcggtggggccgatcgtggcgctcagttatgcgtgcgcgattgacgatcccggacggttcaaatcgtcaaaggcggccggcgcgcatttcggcctcaccccgaagagatatcagtccggcgagaccgaccggagcgggcggattagcaaggtcggcgatgcgtccgtacgcgaggcgctctacctggctgcccacgtgatgctgaccaagccagtcaagggctgttcgtcactcaagagctgggcgatgcggatcgccgggcgcgccggcatgcgcaaggccaaggtggcgctcgcccgcaagctggccgtgatcatgcatcgcatgctcgccgatgcagcaccgttcaaacccgcagccaaggcctcgaccgcggttgcctgacacaggagagcaagcgttttcgggcgggtcacgacaccagggccgttccgaagcgaagtcccttcgccgggacgatggatcaggtcaggccgccatccgggatctggcacacgaccacgcatccgtagattggccgacctatcctccacgcaccccatcaggcggcggccttgcgccgaccccggacagaagcaagtccccggcgagtggatgacgcaaaaagggattgactcgtcgaggcccgttacaga

SEQ ID NO: 2479 - DNA, 1317 bp, unidentified
  source 1..1317: mol_type = unassigned DNA; note = element_380b62f
  misc_feature 1: note = core
  misc_feature 2..90: note = LE
  misc_feature 91..1110: note = CDS
  misc_feature 1111..1317: note = RE
  misc_feature 1095..1311: note = bridgeRNA
gaatgaaagggacttccccgagccggcgacggcatcgaggtgccaagattgaagtgtctgagttcaatctaaatagccggaggggaagtcatggaagaggttactactgtgggcattgacctggcaaagaacgtgttctcgctgcacggcgtggatgaggcgggcaagacggtgctccggcgcacggtgcggcgtgagcggctggtagagacggtggcggctttgtcaccttgtctgatcggcatggaagcgtgctcgggtgcgcacgagtggggccggcgtttccagcagcacggccacacggtgaagctgatggcgcccaagttcgtcgcgccctacaggaagagcgacaagaacgacggcaacgacgccgaggcggtgtgcgaggcggtgagccggcccagcatgcgctttgtgccggtgaagagcaccgagcaacaggcgctgctcgccgtgcaccgggtgcgccagggcttcgtggtcgagagaaccgcgctcatcaatcggctgcgcgggctgatgtctgagtttggggtggtgctggcgcttggttcggtgacggtgcgccgccaggccgcgcaggcggccgagcaattgcccgagctcgcgcgcggggcgatcggcgatctgctcgagcagctgagggttctggacgaacgcattgccaagtacgacaaacagatcgaagcgcaggcagggctctcggagccggcaaggcgcttgatgcagatccgaggcgtcggcccgaccacggcgctggcgatcgtcgccaccgtcggggatgcacgcgagttcaagaacgggcggcaattcgccgcctggatcggcctggtgcccgctcagcattccaccggtggcaaatcgcgccttggccacatcagcaagcgcggcgacgcctaccttcgaaacctgttggtccaaggcgcccgctcggtgctgcaggtcgccggcgcgcatcaagaccgcatctcgcgctgggcgctcgagctgcagcagcgccgcggctattaccgtgccctggtcgccatcgccaacaagaacgcccgcatcgcatgggccttgctagccaagcgcgagagcgtgcgccgcgctcaaccaaacaccctttgactgcaagttgatgacgaaacggtcagaccgacgcccggagaacctggtcaaactcgacggcgacatccaacgccgactaacgagcgaggaccgggcgtgcggctttcatcagggccagagcgcgtaaatcgctcacaaacaggccggttatagtgacgcagtcagaccttctttcgtcaccattgcagcgaagaggaagtccttata

SEQ ID NO: 2480 - DNA, 1309 bp, unidentified
  source 1..1309: mol_type = unassigned DNA; note = element_380c2f3
  misc_feature 1: note = core
  misc_feature 2..269: note = LE
  misc_feature 270..1262: note = CDS
  misc_feature 1263..1309: note = RE
  misc_feature 55..251: note = bridgeRNA
cctttggtctaataaagatacttttttaacaaatattgttattgttgaaatggggggtctggggggtgttgaaaactaaaaaaattgtggaaagcgttaatgtaaaaggcagggttgaacttaactcccttctagttttggagaactttgtagagtatgagtcccctgccttttacgattgcccaaggcccaactagaatactttctttgttaaaacaaaggtaattggcaaaaggcaatttattaagatacttttaaaacacaaacgtatgaaaaagtggaatgttattttaggtgtcgatgtgtcgaaattaacgctcgacatctgctgcgctgaacgcaatctttacatcaaaattgacaataactcaaaagggttttgtgtattgaaaaagtggtgtaaaacaaatgggattgacttggcagaaacgctaatcgtattggaattcactggtgggtatgaataccggttccttcagttttgtgaatcaatgtccatatcgtattgcagagtatctgggctggagatcaaaaactctttaggtatgatcaggggtaaaagcgatgaaatggatgcctttcgtatcgggcaatatggtgaggataagatcaagcgccttaaaccttcaaaaccattggataagaacattcttgaacttaagcagctgctttcctttcgcaaaagactggttagggaaaaggctgggtttgaaagtacagtaaaggagcgtaaacatatgtatgggctaaaaaaagcggacacgatcacccacattgcccaggataagataaaacgtaatgaaaaacacatcctgaaggtagaacaggaaatcatggaaatcatcaaaagcgatgaaggtatgtggcgaaattaccggataataacaagcattaaaggtataggaaaaataaatggatggatgacgatagcttataccgaaaactttaccagctttacagatcccaggcagtatgctgtatttgtaggcgtaattccattcggccatacttccggaacaagtataaaaggacgcaaacgagtcagccatatggccaacaaagagctaaaatcagagttaaaccaggcagctaaaacagccatcctacacgacccggaaatcaggacctacgcagaacgaaaacttaaaaacaaagtgtaccccctggtattgaacaatgtgaaattcaaactgatcctaaggatgttctctttagtaaaaagaggtgaaatgtatgtggaaaactatagaagggttgcatagaaaaagcctttttaaattaaatttggaaatatggcaaacctagaata

SEQ ID NO: 2481 - DNA, 1490 bp, unidentified
  source 1..1490: mol_type = unassigned DNA; note = element_381aea3
  misc_feature 1..2: note = core
  misc_feature 3..234: note = LE
  misc_feature 235..1470: note = CDS
  misc_feature 1471..1490: note = RE
  misc_feature 14..242: note = bridgeRNA
ctaatcagtcatgggagtgagcccattccggcagactcccgggctggtagccgccggcaggtgagcactcacatccccaggacctggagtcccaaggaaagatcgtgcccctgccggtcggccgggagagttgatcgctgctgggatgtcgtgccccgccccgatcgggcgtgagcactgtttgattaggtcgctgatggttctcccgcaggctgctgagcggcggtttcggtgatgggagaggcgttgcgactgtttgttggggacgactgggccgaggctcaccacgatgtcgagctgatggatgccgccggacggcggcttgccaaagctcggctgcccgagggtgtggtagggatggcccggctgcacgccatgatcggtgagcagcttggggacgaggccgaccaggccgaggtcgtggtcgggattgagaccgaccgcggcccatgggtgctggcactggtagcggcgggctacaccgtgctggcggtcaacccgctgcaggccgcgcgttatcgggaacgcctggcggtgtcgggcgccaagagcgacgcggccgacgcgcacatgctggccgacatggtccgcaccgactcccaccagctgaggcctgtcgccggagatagcgcgcaagccgaagcggtcaaggtggtcacgcgtgcccacaagacgctgatctgggaacgtggccgccatacgcagcggctgcggtacgcgctgcgtgagtactttcccgccgcattggaggcctttgaggaccttgctgcgcctgacacgctggaactgctggccaaggctcccgacccggagtcggccgccaggctgacgatcacgcaggtcagcgcagcgctcaagaaggcgggccgctacaagatcgccgaaaaggccgcgcgaatccaggccgcactgcgtaccgagcacttgggacagcccgccgcggtcaccgccgcctacgcggcctcggcccgggccctgattgccgtgctgggcaccgtgaaccagcaggtcattgccatgcacaaagaggtggaagcccattttgggcggcacccggccgctgagatcatcctcagccagcccggattggggccaatcctcggcgcccgggtgctcgcagaattcggcgatgcccccgaccgctacgtcaccgccaaggcccgcaagaactacgccggcacctccccgatcacccgcgcctcgggcaagagaaaggttgtagccgcccggttcgtgcataacgatcggctcatcgacgcgctgctgatgcaggcatccattgcgattaccaagtcgcccggcgcccgcgcatactacgaacggcagcgcggacgcgatgccaactacaacaccgcgcttcgccaggtcgcgaaccggctcgtcggcatcctgcacggctgcctcaagaccggaacgctctacgacgaagcgaccgcctggtcgcaccaccttcaaagcgctgttgcttgacatcaaacctcctgggatgt

SEQ ID NO: 2482 - DNA, 1179 bp, unidentified
  source 1..1179: mol_type = unassigned DNA; note = element_381cd09
  misc_feature 1..2: note = core
  misc_feature 3..219: note = LE
  misc_feature 220..1164: note = CDS
  misc_feature 1165..1179: note = RE
  misc_feature 3..189: note = bridgeRNA
cttgtatgtttagaggtgtcggggtgagggactagagccgctatcggctgttagcgcagaccgaccgtgttagacccctcccaccccacctcatagcgtcgataaggaactgagcagcacgcggccctcaggctgcatgactgccgatctgaaggcaagccaacgcacaaggtggagcagcaccccgactggaccattgtctttgttggaggtgcttttatgcaaacaagcttcattggagtggatgtctccgaatcagaactggttatcagcgtagatgacttgccccctctgagcgtagtcaatgacctcgcgcatatcacgcgctggctagcccaactgcccagagattgctgtattgccatggagtccaccgggcgctatcacctgttacttgcgcagcttgccttacaagcgggcctcatggtctatgtgctcaatgcacgggatgtgtatttctacgccaaagctcttggtgcaagagccaagagcaatgccctcgactgtgtcgtgatccgccgctacgtgcaggagcacttccaaaacctgtatccatggcagccgggcacaaaagtacagcagcagttacatgcgctgttgacccggcgcgcacaagtcagtacccatcaggcggcaatcaagcaaacgctcaaagatacacctctgcctcaagagcacttgactcaactgatgcagtcattcaaggatttgattgcagcaatggacaggcaggtcattgatttgattgccaaggtcgaggtgatgcaacaaggctgtgtgcggctgcagaccatcacaggcattggcccacaaacgggagctttgctcaccgagttgctcagccgcgtgcactttgccaactcagatgcactggttgcttatagcggacttgatccgcgagcgaatgattcaggcaccaaaaaaggacgcaggtgcctgagcaagcgaggcccggctctgctgcgcaggcagatgtacctggccgcattcgcagccagtcacagcaaagctctcaagcctttgtacacccaaatcagggccaaaggcttctcaacaacggaatcaatggtgatcctggctcgcaagcttttacgggtggcatttgccatttggaagagccaggaaaccttcaatccggaacaattgctgcccaacgctgcttgacgaaaaacatagaac

SEQ ID NO: 2483 - DNA, 1419 bp, unidentified
  source 1..1419: mol_type = unassigned DNA; note = element_3826ac5
  misc_feature 1..2: note = core
  misc_feature 3..117: note = LE
  misc_feature 118..1155: note = CDS
  misc_feature 1156..1419: note = RE
  misc_feature 1172..1372: note = bridgeRNA
agatggggtaatcggcttagaaccccagcttccagcgaaagaaggtgctgcgcttcgagctgatgataaaacgtggtctgaaccaccagccacaagcatcaggaaaggaagcgcagcatgaaatattatgccggtctcgatgtttccgtaaaggaaacttctgtttgtattgttgacgaacgagggacaattatccgggaacgcaagacggtgagccatcccgccgacctcgtggcaattctgagtgatccgcagttgcttcttgagcgggttggtcttgaagcagggccgctatctcaatggctgtacgaggggatggccaaggctgggctgcccgtgatctgcatcgagacacgacacaccaaggcgtttctcaaggcccatacgccgaacaagagcgatcgcaacgatgcacgaggcatcgcgcagatgatgcgcgtcaatctgttccgccctgtgcatgtgaagacgctgacaagccagaagcgccgcgccttgctgacagcccgcaagatgcttcaggagaaggcgatcgccatcgagaacgacatccgcgggattctgcgcaactttgggctcaaagtcggtgcggtcggcactttcaaattcgaggatcgtatccgtgagcttgtcgaaggtgcgcccgatctcgtcgccatcatagagccgctcttggccggaagggggaagctgcgggaggagttcaaaaagctggaccgccaggtgctgagagaagtgaaggtggacccagtgtgcaggagattgatgacggttcccggcgtcggcccgatcgtggcgctggcttatacctcgacaatcgatatccctgcccgcttccgaagctcgcgttccgtcggagccgtattggggctgacgccgattctcaatcaatctggtgagagccaccgaataggccgggtctcgcgatgtggcgatgcaatgatgcgaggactcctctacgaggccgcgcagaccctgctgacgcgagtggcaaaatggtcatggctcaaggcgtgggcaatgagtgtcgccaaacgacgcggggccaggaaggctatcgttgcgctggcccgcaggcttggggtgatcctgcatcggatgtggagcgacgaatctgagttccgttggtcacgagaggagctggcggcggtataaaaaatctccgaaacacgaagttctgcctgacggcggaagacgtccttcgcggacgatggatgatgcgagtccgctttctctcttagtccggtggtgtagcgcaccatcaggttgcgtcagagcttgaaccgcaccattcttctggtcccatggtgggagggcttaggggccgatcccggagagaagcgcgggccgcgaaaagacgtcaaacgcctcaatatttgcaagctatgaagtgcttgacctcaacacgccgattagaga

SEQ ID NO: 2484 - DNA, 1428 bp, unidentified
  source 1..1428: mol_type = unassigned DNA; note = element_382c2f3
  misc_feature 1: note = core
  misc_feature 2..227: note = LE
  misc_feature 228..1415: note = CDS
  misc_feature 1416..1428: note = RE
  misc_feature 14..242: note = bridgeRNA
ctacttgtttcattgacgtaaggaccggtgcctgcgcaggctcggttcaggtgtccgggttcgtcgctcgcaaaagcggctgcccacgccttgtcgtgtggctctcacatgggttgcgccgcccgggcaccgccgggcaggagaggctcaagaagggattgctctgctcgaagtagcggtgccctccacgcccaaccagtgatcggttcgaggcaacggaggacgcggtgaacgaagatgtctcgcgggtcgtgatcggcatggacccgcacaagcgcacggtgacgatcgaggtgatgactgccgacgagacggtcgtcgacgggggccgcttcgacacgacggtcgaggggtacgcagcaatgctcgagcacgtcgaggcctggccggaccgggtgtgggccatcgagggctgcgagggcatcggccggcacatcgcgcaccggctcctcgcccacgggcaggacatcgtcgatgtgccggcgaagctgtccgcaaaggcgcgggtgttcgcgaccgggcagggccgcaagacggatgcgaccgacgcgcactcggtcgccctggtcggtacccgcatggctggcctgcggccggtggtgtccgatgcgcagcttgaggtgctgcagctgctcgtcgaccggcggcgctcgatcggggacgaacacacccgcaaggtcagccagctgcaccgaatcctgttggaaatgctgcctggtggggcaaagaagtacctctcggcggcccaagcgcgggctctgctgtccacggcgcgtccgagggatgaggtcggtaagacccgcaagcgagtggccatggagctggtggccgacctggagcggatctatgcgcgcaagaaggccgccgacaaggagctgaaggagctcgtcgcagcgaccggcacctccctgctcgggctgcacggcatcggcccctccggcgccgcgcggctgctcgtcgaggtcggggacctggcccggttcccggaccgcaaccacttcgcctcctggaccgggaccgccccgatcgacgcctcctccggtgaccacgtgaggcaccggctctcccgtggcgggaaccggcagatcaaccgggtgctgcacatcatggccaccgtccagctgcggaccccgaccgagggccgcgcctacttcgaccggaagaaggccgccgggaagacctcgatggaagcgatgcgctgcctcaaacggcgcctgtccgacctcgtcttccgcaagtcgcccggcgactacgtcgctggccggctcaccaccgtgacgggcccgggagggcaccggggcaacggctctgactccagcgtgaccggctcacaaccccacaccggctcttcggaccagccacttcccggacccgccacgacccaccctagaacggccttgccgaccgcgtcttgacacagaagggagc

SEQ ID NO: 2485 - DNA, 1325 bp, unidentified
  source 1..1325: mol_type = unassigned DNA; note = element_38399c1
  misc_feature 1: note = core
  misc_feature 2..233: note = LE
  misc_feature 234..1310: note = CDS
  misc_feature 1311..1325: note = RE
  misc_feature 4..232: note = bridgeRNA
cagtgatgatggaggggtgagcgcttcccgccagggtctgacccatcaactgactgaccttgaggtcctcaacgggatctgtcggccctggacgggaagcgctcatctgcactcaccggacgcggcacctgtgacttcataggagcctggccagaggccccatcactgtcttgtccgcgctgccccggctggtgcgtgccgtcccgccccctcggtcagacgacaggacgacgatgacctccattacacccgacagcacgccgctcactgaagtcgccggcggcgtggacacccaccaggacacccacaccgcggccgtgatcgatggagtcggccgggtgctgggcaccgagcagttccccgccacccccgccggctacaccgccctgctcgcctggatgcgcgccttcgggcagctgagccgggtcggggtggaaggcaccggcgcctacggagccgggctcacccggctgctgcaggccgagcacatcaacgtgatcgagatcgaccggcccgaccgcaagagccgccgcttccacggcaagtccgacccgatcgacgccatcgccgccgccaaggccgccctcgccggtgaccgcaccggcaccccgaaacggcgcgacggccgcatcgaagcgctgcgcgccctgcgcatcgcccgccgcagcgccatcgaccagcgcgccgacacccaacgccagatcaaggccctgatcgtcaccgccccggacgccctgcgccaaagcctgcggggcctgtccagcacgaaactcatcgccacctgcgccgccctgacctccgaccgcgaggccgccgccgacccgaccaccgccacccagctcgcgctgcgctccctggcccgccgccaccagcagctgtccgccgagatcgccgacctcgacgaactcctggacgtcctggtgatggcgatcaacccacggctgatcgccgcccatggcgtgggcaccgagatcgcgggacagctcctggtcaccgccggcgagaaccacgaccggatcggcagcgaagccgccttcgccatgctctgcggcgtcgcgccgatcccggcctcctccggcaagaccacccggcaccgcctcaaccgcggcggcgaccggcaggccaacgccgccctctaccgcgtcgtcctgtgccgcctgcgctgggatgcccgcacccgcgcctacatggaccgacgcacccaagacggcctgtccaagaaagagatcatccgctgcctgaagcgctacgtcgcccgcgaactttacggactcatcaccacaacgaacgaccaggaacgctccgattgacatccataggagcat

SEQ ID NO: 2486 - DNA, 1371 bp, unidentified
  source 1..1371: mol_type = unassigned DNA; note = element_383c7ec
  misc_feature 1: note = core
  misc_feature 2..228: note = LE
  misc_feature 229..1356: note = CDS
  misc_feature 1357..1371: note = RE
  misc_feature 4..227: note = bridgeRNA
cagtgagaatgccgtagggcctgcacccctcctggtctgactctcccactgacagaccgtggtgtcttgtaaaggatccgtcgaccgggtcggggtgcaggtcccttgggcacgagctgtcggacgaagtgacctaataggagcctgcgctaccaggcgcccatcactgtcttgtccgccgtctggctgtgcgtgccgccccctcagctgatgacaagaaggacggcgatgaccatggtgacagatcttgcggcggtgcagcaggtgccggcggtgaccggcggggtggacacccacgccgacgtgcatgtggcagcagcgatcgacgcggtcggccgcgagctcggccaccgcgagttcccgaccaccccggccggctacgccgcgctgctggcctggctcgagggcttcgggccgttggagctggtcggggtggagggcaccggcatgtacggcgccgggctgacccgggtgctgcaggccgccggcgtggcagtggtggaggtcgaccggcctgatcgcaaggcccgccgtttccagggcaagtccgacccgatcgatgcctacgccgccgcgcgtgcggccttgtcgcgtcgggcgtcgggaacgccgaaggcgcgcaccggcacggtggagatgatccgcaccctgcgggtggcccgcagcggcgcggtgaaagccaaggcggtggcgtggaaccagctcaaggcgctgatcaagaccgccccggaggagctgcgtgagcggctgcgtcaccttgacggcgcggcgctgttggacgtctgcgccgggctgcgcgccgcccgcggccccgtcccagagcacggtccgcacgccaagcgccaccgtcccggcgtcctggtcgacccgactgcggcgtgcaagcgcagcctggccgtgctcgcccgccgcatccgagtcttggaggccgagatcgccgacctcgacgacgacctcgaaccgctgatcgtcgcgaccgcaccgacgctgctcgccatgtacggcgtcggcctcgacgtcgccggccagctgctggccaccgccggagacaaccccgaccggctgcgcaacgaagccgcgttcgcgcacctgtgcggcgtggcacccatccccgcctcatcaggcaagaccacacgccatcggctcaaccaaggcggcgaccgccacgccaaccacgccctatggcgcatcgccatgacccggctgcgctacgacccccgcacccgcgagtaccgcgaccgacgcgccaaggaccagaagaccaacaaagacatcatccgctgcctcaagcgctacatcgcccgcgaagtccaccgcgccctgatgaccgacctcaccgccccatcaccggcttgacatccataggagcat

SEQ ID NO: 2487 - DNA, 1217 bp, unidentified
  source 1..1217: mol_type = unassigned DNA; note = element_38456af
  misc_feature 1: note = core
  misc_feature 2..214: note = LE
  misc_feature 215..1201: note = CDS
  misc_feature 1202..1217: note = RE
  misc_feature 18..196: note = bridgeRNA
ttgtatcttgaaccctgtagtaggtggtggttagctaccccactctggaacagagtgaatttggagcatcctataaggtaaaaccttgcccagcagcttaaatcctctgtttcacctttcacgccagcattaactttgaacggttgccaggagctcagactccgtatgtacaaggaaaacgggcgtgatggtttatatgtgaaagggggagactatgattcagttaggaattgatgtcggaaaaagcaaaatagatttgtgccttaaatctgatggcccggagggaagtaagaaaaccaaagttctgcctaacgggccagatgttgctgtcaccgttctggggtggctgatgaagcagaagatcagcccctctgaggtgcaggtaataatggagcccactggtacgtatcacgatcatctggcttatggcctttatgaccgcgctatacgcgtcgtgatagctaaccctgcgcgtgttcgggcctttgctcagggtatgggtattcttaccaaaaatgacactgttgatgctgatgtactggctcgctatggcgccatgcgccagccggaagcatggctgccaccgtctccagccattcgtgaactgaaagcgctactcagcaggcgtgatgcactactgcaggatgtgaaccgcgaaaataaccggctggagaaactgctttcaacccgaggttcagcgcaggttgagttatcagtcagaaagatactacaggcgctgaacggcgagctggaggccgtacaggcactgacagatgaccatatcgacactcatcccgatctgaagcgggatatggagtatctgacgtcgataaaaggggtcggtgcagcggttggcagtaccctgctgacggtgctgcgggggaatcacttcaggagtgcggaacaggcagcggcctggctgggggtggtaccgaaggaaaagcgctcaggaagctctatacggggcaggacaaggctgtcaaagtgtggtcctccggcggtaagagccaaactctatatggccgccctggtagcagcgaagtacaacccgcatcttaaagcgttttatgagcgccttgtctcgaccggaaaagcgaagaggtcagcgctgggtggagtaatgcgaaagctggtacatatctgttacagcgtcttgatgaagcagcagaaatatgacgagaattatacggcagcagcttgacgtttaagacggtagc

SEQ ID NO: 2488 - DNA, 1383 bp, unidentified
  source 1..1383: mol_type = unassigned DNA; note = element_385ee67
  misc_feature 1..2: note = core
  misc_feature 3..1118: note = CDS
  misc_feature 1119..1383: note = RE
  misc_feature 1118..1370: note = bridgeRNA
tgatggtgtggacggccccctacggcatcgagtgtgccagaatgaggttgttgcaatctcagacaagggagccgtccgtgaaccagattatccgaattggaatggatacgtcgaagcatatttttcagttgcatggggttgattccgccgagcggccggtgctgcgcaggaagctgcggcgcagcgaggtgttggcgttttttgccaagctgccgccgaccgtgatcggaatggaggcgtgcggagcggcacattactgggcgcgggagttgcgcaagctcggccatgaggtgaagctgatggcgccgcaacacgtgaaggcttacgtcaagcgcaacaagaacgacgggcgcgatgccgaaggattatgcgaggcgatgagccggccgacgatgcagttcgtgccggtgaagaccgaagagcagcaggcggccttaatgttggcaggggttcgccagcagctgatcgcaaggcgcacccagctcagcaacgcgatccgcggctatgcggcggagtttggcctgacgacagcgaagggtctcgacaagatcgagccgctgttgacgcggatcgcgctagacgagaccgtgccggcgctggcgcgcgagctgttggcgatccatggccaggactacgcgcggctgcagattgaactgaaggcgatcgaggtcaagctaatggcctggcatcgcgccaacgcctgcagccgacgcctggcgcagattccaggggtaggaccgatcggcgccacggcgctggtgatgaagacccccgatccgcgcgcgttccgttccggccggcactttgcggcatggctcgggctgacaccgaaagaccattccaccgccggcaagaccaggctcggcaagatcacccgtgctggcgacgagatgttgcgcagcctgctggtggcgggggcgaccgcggtgatccagcaggtgcggcgcggccgcggccgtccgtcggcctggttgctcgccttgctgaagcgcaagccgccaaaactcgcggcggtggcgctcgccaacaaggttgcccgcatcgcatggaagctgatgacgacgggcgaaagttacgatggcgcgcggatgcctggcgcacaggcattcgccgcttaagagatcagccggtcggcgggttcgccgcaccggttgagccggagctgcaagaggacagcagatggtaggatcgatcgatccgaggtgcgagacactccgtgggacccattggcccgtaaaggtcgccggtgtgtttggaactcgcgtcgcggaaaaccatcttggccagcggttcaaagcgaccgcatcaacaggccggacatatggatgcaagcgatccgatcagaccctgaaaaactcttgcggcacgggggccgtccacata

SEQ ID NO: 2489 - DNA, 1357 bp, unidentified
  source 1..1357: mol_type = unassigned DNA; note = element_38641a8
  misc_feature 1..2: note = core
  misc_feature 3..74: note = LE
  misc_feature 75..1100: note = CDS
  misc_feature 1101..1357: note = RE
  misc_feature 1124..1354: note = bridgeRNA
ttaatgagatggtcaccccacaccctgcgagggctacgctttcgcagggtgttttgttttcggaggccatcatcatgagcgagtcagcgctgatcggtatcgatctcggtaaacacagtttccaccttcacggccaggataagtcgggtcgtgaggtgtttcgcaaaaaatgctcacgaccgcagatgatgcattttttcggcaacctaccgagctgcgtcgtggtgatggaggcctgcgctggtgcgcattttgttgctcgccaactgacggctatggggcatacggccaagctgatttctccacagttcgttcgccccttcgttaaaggcaacaaaaacgacttcgtcgatgccgaagcgatttgcgaggccgcttctcgtccatccatgcgcttcgttacgcctaaaaccgaggcccagcaaaccctgtctgttctgcatcgtatgcgcgaatcgctggtgcatgaccgcaccaaaaccgccaatcaaatgcatggcttcctgctggagttcggcgtcggcctgcccaaggggctggcgatcatgcggcgcttggcgagtgccttggctgagcgtgagttgcccgttcgtttgacggtgttgttgcagcgcctgcacgatcacttcgtctacctggatgagcagatcaaggcgttggataaagaattggctggccaactggccggcgatgatctgggtagtcgtttgctgagcttgccgtgtgtcgggccgatcaccgccagcctattggctgtggagatgggcgatggtcagcagtaccgatgcagtcgcgattttgctgcgtccgttggcttggtgcccaggcagtacagcacgggtggcaaggccaacctgctggggatcagcaagcgcggtgacaagcacctgcgacaactgttggtgcagtgtgctcgggtctatatgcagaggctggaacaccaaaaaggggcgctggctgactgggtgcgttcactgctcagccgacgacactccaatgtggtggcctgtgccttggccaataaactagcgcgtatcgcctgggcgatagccgctcaccatacgcagtatgaagcagggccagacgcgctgaacgcctgaccctgcggttgttgcagtaccacgaatcacccttcaggttttgcgatagctgaacaacggatgacgtgaacggcctaccggcctggcgaagatcctgacacaaaaatcggctccagaagccgacggttttttaaggatcgtcaggcgcgactctcatcgtggcgctggggcatgccccaaacagacgccggatagatttaagcaagccaaccacttcacccactaatcagtattgcaaaaatgggggtgaccataga

SEQ ID NO: 2490 - DNA, 1394 bp, unidentified
  source 1..1394: mol_type = unassigned DNA; note = element_3868a9a
  misc_feature 1..3: note = core
  misc_feature 4..89: note = LE
  misc_feature 90..1121: note = CDS
  misc_feature 1122..1394: note = RE
  misc_feature 1092..1381: note = bridgeRNA
agatggggtggttgccgccctcccgaacggcatcgcaatgtgccaagaaaagtggcgttgaaggccacttagcagaaaggacggcaaccatgcagaaagatacgatgatcggcgtagatctggcaaaagctgtttttcaggtgcacggcgcgtcgatgactggggaaccaaggtttcgcaagaagctgtctcgccaaagcttccccaagttcatggccgagcagccaccggcgctagttgtgatggaggcttgtggcagtgctcattattgggcccgagagatgatcaggcttggccatgaagtgaagctgattgcgccacgctacgtaaaaccgttcttaaaacggcagaagaacgatgccgccgacgcagaggccatcgtaatcgcggcccggcagcctgagatgcgcttcgtcgaacccaaaggagccgagcaacaaagtcgcgctatcctgtttcgcgctcgcgaacggctcgttcatcagcgtaccgagcttatcaacgcactcagggcagccctttacgaatacgggcatgttgtcccgcaaggcatccgccaagtcggacgaatagaggagatccttcaggcgccacaaaatgccttgcctgaattgatgcgagacgaatgccgcgatctgttggaacagattgccgaacaaacggtccgtatcgacgcccggacggaaaagatcaaagtgctcgcggccgaggctgacacagctcggcgcctgcaaacgatccccggggttggtccgatgacggctctggcggtcgaggcatttgcgccttcaatggaaaccttcacctgcgggcgcgccttcgcggcctggctaggccttgtgccacgtcagttctcctcgggcggcaaagagcgtcttggtcgcacttcaaaggccgggcaggccgatatccgccgattgctgataatcggtgcaatgtcgcggttgaactggagggggcgcaaagccattccggaaaactcatggctagcacaaatcacctcgcggaagccgcggatgctggtggcgatcgccttggctaacaagatggcccgcacaatctgggcaatgctgatgaagaaggaggattatcgagtttcggcacaggtaggagttgcatagacattatgctgcgaattctacctgaggccggataacgggagtgtaagaaggcgatgacccgaatgggcaaaacgatcgaacagttctggatcagaaaaaccagttcaggactcagagcgttgcagctcgccaatgagatttggatctgatccgcggatcaccataccggctagcagcttctgaaggctgcatacaaaggccttacagaagaacgcactcgatcactgcgccacacggtcagaaacctcttgcatcacgggcggcaaccacaga

SEQ ID NO: 2491 - DNA, 1614 bp, unidentified
  source 1..1614: mol_type = unassigned DNA; note = element_3871135
  misc_feature 1..2: note = core
  misc_feature 3..286: note = LE
  misc_feature 287..1492: note = CDS
  misc_feature 1493..1614: note = RE
  misc_feature 16..306: note = bridgeRNA
ctactacaataagatttgttgggaaaggtccctgacttccagtcagggtttctcctggcttgttgcttaagctgttagaatgtagaagcaataggtacagcggtttacctcttggactgtgtgtccgtacctgagaatgctggcccgcttctcattcgcagtattcgttttatgcaggttgagctgctgtcatgcagtatgttcgtgtcacaccacagtagattgaataagcaatgagcaaagcaggtatttatccattgcaaattttttaaggagtgactagtttatgaacgcagtaggtattgatgtttccaaagggaaaagcatggttgctattcttcgacccttaggcgaggttgttagcaagccttttgaagttgtccattccgccagtggaatcagctcattgattgataggatcaagtccattgtcggtgaaacccggatcgtcatggagcacactggcagatattacgaagcgcttgccaatgagctttcccgtgctaacctttttgttagcgctgtgaatccaaaactcatcagggatttcggaagcaagtctttgcgcaaagtgaaatccgacaaggcagatgcattgaaaatagcccgttatgcccttgacagctggaacgatttgaaacagtattgtcttatggatgaactgcgcagccaactgaaaacgatgaatcgtcagttcagtttctacatgaaacacaagactgctatgaagaataacctcgtcggtatccttgatcaaacctatccgggtgccaatgcctactttagcagccctacgcgtaccgacggcagccagaaatggattgatttcgccgctacatactggcacgtggattgtgttcgtaaaatgtcccccggggccttcaccaatcattatcagaaatggtgcaggcggaagaagtacaatttcagcagctcaagagctgaggaaatttacagggaggcacaggaaattgtacctgtgctgccaaagaatgatttgacaaaactcattgtcaaacaggccatagaacaactggacattgcttcaaaggcattggaagaactacgggctcttatgaatgaaactgcatctaaactcccggaataccctgtagtcatggaaatgaatggtgtcggaccatcacttggtcctcagctaatggctgaaatcggagatgtcatgcgcttcaatcacaagggtgcccttgcggcgtttgcgggcgttgacccgggtgtcaaccaatccggaacccatgaacagaaaagcgtccatactaccaagagaggttcagcaaccttgcgaaagacgctgttccaggttatggatgtacttatccagacaaagccacaggatgatgatgtgtacatgttcatggataagaaacgttctgaggggaaaccctactttgtctatatgacagctggagccaacaagttccttagagtttactatgggcgggttaagaggtacttgaattcagaaacacaataatcgtgaatatgggagcaatctgtcaggccagcgatttaaggtggttgttttgtaatgcacttgagccttggtcagaaccctccaaacattacagattttcctattgactttttatttgcagg

SEQ ID NO: 2492 - DNA, 1256 bp, unidentified
  source 1..1256: mol_type = unassigned DNA; note = element_387488a
  misc_feature 1..2: note = core
  misc_feature 3..245: note = LE
  misc_feature 246..1247: note = CDS
  misc_feature 1248..1256: note = RE
  misc_feature 13..190: note = bridgeRNA
cttgtatgttgctaacgcgtcacatggattatggtttatcggttaccggggaggccgttcgctcctggaagcagcttgctctgacttcgtctgtagagcggctccccgcctcattacctactccgaagggtatcccgaagccgcttgcgcgtgacttcgtatcacaaggtcggtagcaggtaagtcagtacgaggtcggggaaccggtgactattgtcgttaatttagcgttacgagtgaagggtatgtctgtatttgtcgggatagatgttggtgctagctgtgtggatgttgtgagctgtggggaagggaagtttagcaagcccaagcagtacaagcagtctccggatggacacaattcactggtgtctgcgatgatgaagcttcaaccgaagtgcatcgtcatggaagcaaccggcgtgtactactttgatctggcggtggctctggctgaggcaggtctgcctgtggcggtgatcaacccaaagagcaccaagcacttcgccaacataaagctgcaaaacagcaagaccgacagcatagatgcggcgctgctggccgagtatggcatgcgcatggagccgcgattgtggacatcaccggatcagcaccgccaagccattcgaagcctgggaaggcagattaaccgcctgaccggcagtcgagtacaggcaaagaaccgccttcatgccatgaaggccacacagtctacgcccacgttgcttgttgaagatgagcaggaggcgattgagatgctggatcggcgtattgaccggctcaaacaggctgcgatggagcttctggaacaatcagctgagctcaaacgcttgtatacgcacttctgcgcggccaagggcatcgcggaggcgacagccctcgcgttactggctgagctatgcgtcttgccggagcacctgaaatccgctcaggtcagccgtcatgcggggctggatatacgcctgcaccaatcaggaagcagcgttcatcaggcctcacggatcagtaaagcggggaatgtgtacatacgctccgcgttgtatatgccggccatgtcagccgtgcgctttgacccgaatgccaaggcattctacgaggccttggtggcccgcgggaaaaccaagttacaggccctggtggcggtaatgcgtaaatatctgacaggcctgtgggcctgtattaagacggacaccccattcgattcatcgctgctttttagtgattgccatgcaaaaaatgcttgcgtctgaacagggtat

SEQ ID NO: 2493 - DNA, 1382 bp, unidentified
  source 1..1382: mol_type = unassigned DNA; note = element_387a9d0
  misc_feature 1..2: note = core
  misc_feature 3..84: note = LE
  misc_feature 85..1116: note = CDS
  misc_feature 1117..1382: note = RE
  misc_feature 1125..1370: note = bridgeRNA
tgatggtgtggaacggcccttcgaggcggcatcgaaggtgcctatcgtggtgatccctcgccacgagacagaaggacctgctccatggaaacgatcaccaccatcggtctggacttggccaagtcggtcctccaggttcatgccatcacgcaggatggccgcgtcatcatccgcagggcgctgcggcggtctcaggtgctggacttctttcgcggtctcgcgccctgtctcgtcggactcgaggcctgtgccagcgcacatcactgggccaacgcgatcggccagttcggccatacggtgcggatgatgccggcggcctacgtcaaagcctatgtgaagcgcaacaagaccgatgcagcggatgcagaggcgatctgcgaggcggtgacgcgacccacgatgcgcttcgtaccgatcaagacgccggacgagcaggccgcctgcatggtcctgaagacccgagagctgttcgtgcgtcagcgaacccagacatcgaacgcgatgcgggcccacatggctgagcttggcatcatcgccgcgacgggcatggccagcatcgataagctgatcgccatcctgcgcgacgaggcggacacccgtcttccagtcgcggcgagagcggcgcttctggaaatggccgagcagatcgaacgactgtcgtcccgcatcgcggcgttggacacgaagatcgtcaaggccgtgaaggaggacgaaacggctcgtcgcctgacgagcattcccggtgtcggcccgatcatcgcggcgaccgtccgagccgcgatccaggatccggcggctttccgaaccgggcgtgacttggcagcttggatcgggatcacgccgagcgctcactcgagcggcggcaaggagcgcctcggtggcatcacgaagcgcggtaacgcgcagctgcgctcgcttctggtggtcggcgcgacatcgatcctgaaacaagccaaacgcggcgtgaagctgccggcctgggtcgtctccctgatggcccgcaagccttacaaggtcgcagctgtggccctggccaacaagatggctcgcacgatctgggcccttctggtcaagggcgggacctaccgggcaccgatggtgatggccgctgcgtaggaacaaagagcttctcggcacttcggcgccgagaggagccaggcaaggtgcccaagcgtgatgaccccgaggggcgacacctcgatgtcgatcagaccgtctgttgcaatgcgccttcgagcgcgacagtttgattcaggcgatcgacgttgcggatctcatcgtggccagcggtccaggaccgcgctcacaggccggacatatgactgcaccgtccgacggcgattgacgcgacgcgtaccttgcaaaccgggccgttccacata

SEQ ID NO: 2494 - DNA, 1511 bp, unidentified
  source 1..1511: mol_type = unassigned DNA; note = element_3899688
  misc_feature 1..2: note = core
  misc_feature 3..254: note = LE
  misc_feature 255..1490: note = CDS
  misc_feature 1491..1511: note = RE
  misc_feature 6..242: note = bridgeRNA
ctaatgggtgttaccgggtcggtcgctggcagactcggtggctggtagccgctggcgggtgagcactcatacctcctggactgtttgagtcctgacgacagagcgtgccctcgctggtggtgcgggagattgtagggctgatggggtgtcgtgcccaccgctgctggttggttggtgtgagcactgatccattagggcgctcaaggtctctcgcgggctgccgggattggtcgggaggcgatgggagagttgttgtgttgtttgtgggtgacgactgggccgaagggcatcacgacctgcaggtcgaggacgaccagggccgggtcctggcccgtgggcgggtggacgagggcattgccgggatggttcggttccacgagttggtggcggagttcctgggcgatgatgccggtccggaggaggtggtgatcgggatcgagaccgatcgcgggccgtgggtggccgcgttgctggcggcggggtatgtggtgttcgcggtgaacccgaaacttgctgcccggcaccgtgagagtttgtcgttgtcgggtgcgaaggacgacaagaccgatgcccggacgctggccgacctggtccggacccgtaggcatcaactgcggccggtcacggccgattccgagctggccgacggggtcaaggtgctcgcccgggcgcatcagtcgctgatccaggagcggacccggcacctgctgcggctgcgggccgcgctgcgggagtacttcccggccgcgctggttgcctaccagcaagggacgttgacgctgaccggtgccgacgtgctggcgttactggccaaggcccccaccccggcagcggcggcgaaactgacgatcgtccagatcaccgcggcgttgaagaccgccgggcggcgaggcgacctggccgaacgggccgcggcggtgcaggccgcgctgcgcaccgagcacctcggccagcccgagatcatcaccgccgcctacgcggccacggtcggctccacggtcgcgatcctgcagaccctgaacacccagatccctgccctgcaggaaggggtcgaggcctcttttggccggcacccggacgttgagatctaccgcagccagcccggcctcggaccgatcctcggcgcccgggtgctcgcagagttcggcgacgcccccggccgctacgccgacgccaaagcccgcaagaactacgccggcaccgcacccatcacccgccaatccggcaaactgaaaaccgtgcacgcccggttcatccacaacaaccggctcgtcaacgccatcgacctgtgggccagcgccgccaccctgcacgacgccgatgtccgcgcctactacgaccaactccgcggccgcggcctcggccaccacgccgcgctacgccagatcggcaaccggctcgtcggcatcctccacggctgcctcaaaacccacaccctctacaacccccaaaccgcctggtcacaccgcgccacaacccaagccgcttgacacccttagctctaggggtgt

SEQ ID NO: 2495 - DNA, 1380 bp, unidentified
  source 1..1380: mol_type = unassigned DNA; note = element_38a51c7
  misc_feature 1..2: note = core
  misc_feature 3..84: note = LE
  misc_feature 85..1113: note = CDS
  misc_feature 1114..1380: note = RE
  misc_feature 1108..1352: note = bridgeRNA
tgatggggtggatggccccctcagcggcatcgagttgtgccaaaagggcggttcatcaagaagcgccacaacggaaggccatccatggtcaagattagcacgatcggcatcgacatcgccaagaacgtctttcaggtccacgccaccgggccggacggtggaatcgtcctgtgccgccggctgcggcgcgacaacgtggcggagttcttcgcctcgatcccgccctgcctggtcggcatcgaggcctgcggaacgtcgcaccactgggcgcgcgagatcgcggctttcgggcacgacgtgaggctcatgccgccgcgctacgtgcggccctacgtcaagcgcagcaagaacgacgcggccgacgcggaggcgatctgcgaggcggtccgtcgacccaacatgcgcttcgttccggtcaagaccgcgaagcagcaggccgtgttgatcgagcatgcggtgcgggatctgctggtgcaccagcgcacccagctggtcaacaccctgcgggggcacctggccgagttcggcattgtcgcgccgcaggggctgcaccgggtgagggagctgacggcaatcgtcgacggcagcgacgtccgccttccggacgccgcacgcgccgccctgcggttcgtcctcgacgaactcgccggcgtcgacgcacgcatcgcggcgatcgaggccggcatcgccaagtctgtcaaggcggaccagaccgccaagcgcctcatgaccatcccggggatcggtccgatcatcgcgtcgcgtctggtggccacggtcgccgaccctggcgtgttccgctccggccgcgacctcgcggccttcatcgggctcgtgccgagacagcactcgaccggcggcagggcccgcctcgggcgcatcaccaagcaggggaacggcgcgctgcgccgcctgttcgtcaacggcgccatggcggcgatgcgccaatccaaggcgctgagtgccgacccgtggctgctgcgcctgcgcggccgcaagccgccgttggtcgtcgccgtggcgctcgccaacaagatggcgcgcgccgcctgggcggtcatgacccgcgaagaggattggcggtcgcggcccggcgaagccgcgaccgcctgagcgagctgcaggacttcgtgttgcgaggacagaaccgaaactgatggacgaagatgaggtcggtcgacccgacggaccgggtcaaacctgggataacgactgggcttcgggcccggctaattgatgaggccccggtccgcggattccatcaaggccagcggtcatgtcgaccgcaccaacaggccggacacatgtgcgcaagcgatccgaccgtcgacgttcaacaggttcgaagaaagtccttgcctctcgggggccatccacaca

SEQ ID NO: 2496 - DNA, 1373 bp, unidentified
  source 1..1373: mol_type = unassigned DNA; note = element_38a9aac
  misc_feature 1..2: note = core
  misc_feature 3..84: note = LE
  misc_feature 85..1110: note = CDS
  misc_feature 1111..1373: note = RE
  misc_feature 1087..1360: note = bridgeRNA
tgatagagtggatgccccctcccgacggcatcgcaatgtgccaagctggtgaagtgaaggtcaccagagaaagaggaggcatccatgaacgaggttacaatcatcggcgtcgacttggcaaagagggtgttccaggcgcacggcgctgccgcggacgggtccgtcgtcttccgcaagaagctctcgcgtgcacaggtgctgccgttcctcgagcggcaaccgagctgcatcgtcgccatggaggcctgtgcgaccgcgcaccattgggggcgcgagatcgggaagcttggccatgaggtgcgcctgatcgcgccgcactacgtgaagccgttcgtcaagcggcagaagaacgacgccgccgatgccgaagcgattgccgaggccgcctcgcgcccgaccatgaggtttgttgctttgaagagcagagagtgccaggcccgcgcgctcctgttccgaagccgcgatctcatggtgcggcagcgcgctcagctgatcacctccctccgcggccatctggcggagtacggtctggttgtcgccaggggaaaagagcagatccggcacctcgcgcgggcgctcgaggatcccgagaccgacctccccgagctgctgcggacgacgagccgcatgtacctggagcagatcggggcgctcaccggcaggatcggcgagctcgacaagatgatccgcaccgaggcggcacgcggtgcgaccagcgcccggctgcagaacatgcccgggatcgggccggtctcggccatggcgatcgagaccttcgcaccctctatggagaccttcggccgggggcgtgacttctcggcctggcttgggctcgtgccgcggcagaattcgagtggcggcaagcaggttctggggaagacctcgaagatgggacaacgcgacatccgaaggctcctcgtgagcggagccatgtcggtgatccgagccgcgtcacggaacgcgccgccggagggatcgtggctcgcccgcatgctcgctcggaaaccccgcatgctcgtcgcgatcgcgctggccaacaagatggcgaggtccgcctgggccatgctgacgaagcaggagaactatcggaatccggcggcggccgcctgaaagggtcggctgctttcggagcctcgggatgtgaggaggtcaaggacaagacgggcaaatgatcgatcagatcgggaccaggaaaaccagggaattagcaagagctccgagctcgcctcattgatctggatctggtccgcgcatctccatctcggcctgcggtcatcatcagcgccgcgtctacaggcctgacacatgaccgcacccgatcacatgccccgaaggttcaaaagccgacttgcataacagggggcatccacaca

SEQ ID NO: 2497 - DNA, 1395 bp, unidentified
  source 1..1395: mol_type = unassigned DNA; note = element_38c0a86
  misc_feature 1..2: note = core
  misc_feature 3..86: note = LE
  misc_feature 87..1121: note = CDS
  misc_feature 1122..1395: note = RE
  misc_feature 1139..1379: note = bridgeRNA
tgatgaggtggaacagcccgctacgacagcatccaggtgctaaaacgtggtcgttgatctcaacgccacaaagtaggagccgttccgtgaagcagattaccaccatcgggttagatttggccaagcagttctttcaggttcatgccgccgacgctgagggtacccctatcctaaaccgcaaactgcgccgggccgaagtgctcaggtttttcgaaaagcagccagcatgcctggttgggatcgaagcctgcggcagcgcgcatcattgggcgcgcgaaattggcgcgctcggtcacgaggtgcgattgatcccaccagcctacgtcaaaccgttcgtgaagcgggggaagacagacgatgctgaagcgattagcgaggcggtgacacgcaagacgatgcgtttcgttccagtgaaatcggctgagcagcaggcggcggggatggtgttgaagacacgcgcccttctcgttcgtcagcaaactcaggcgatcaacgctctgcgtgcgcacctgtcggatctgggaataatcgccggcatcggtacgacgaagattgtaggcctgatggcaatcgtccgtgatgagaccgacaaacgtttgcccaaagcagcccgcttcgctttgacgacaattgccgaccaaatcgaggcgctggcgctgcagatcaacaaactggagcgagagcttgttgccgaagcgaagcgtgatcaagacatgcgacggctgaccacaattcccggcgtcggcgcgatcacggcagcttccatcaaagcgctcattccagatcccagtggatttaaatccggtcgacatctcgccgcctggctgggattgacgccgaaaccacattcgagcggcggcaaggaacgtctggtcgggatatcaaagatgggcaatccggagcttcgctcgctgttggtgcttggggcgaccgcggttctgcgttacgtgcggggccatgccaatgcgccaaaatggttgggcgacctgctggggcgacgccccttcaaggttgcggccgtggctctcgccaataagatggcgagaatcatctgggcgctgctgaccaagggtggtgtatatcgagggctggagcgggcaaaggacgttgcgagcgcctgagcccaattgcgacaagaacacactaatcggcgcgatagccggcagaggcaaggtgcatgaaaagacgatgattccccggggacgaaatcccaaggcgagtgaggtcgcggcgacatgcgctcaaagcgcgtttgattgattaacccctcgccttgcggacttcatcaaggccagcggtcatgcgccgcacacaaaggccggacatatgaccgctaccaaccccacggcgaatatcgtcagaaaatgctccttgacacgcgggccgttccacata

SEQ ID NO: 2498 - DNA, 1475 bp, unidentified
  source 1..1475: mol_type = unassigned DNA; note = element_38c37a2
  misc_feature 1..2: note = core
  misc_feature 3..230: note = LE
  misc_feature 231..1454: note = CDS
  misc_feature 1455..1475: note = RE
  misc_feature 7..231: note = bridgeRNA
ctaatggggatcgaccacctccttcgttccacggatgaggctggtcagccgagccgccgacaggtgagcactgatactcgctgaacctggagttctagccctagatcgtgcccctgccggtcggtgaggtcgccctgacggctggtgggatgtcgtgcctcgagcactgatccattagcgagctgctggtgaccttgggctcgttggtgccggtcgatcgaggaggacagatgatctttgtcggagtggactgggctgaggcccaccatgacgtgcacgtcgaggacggagacggcacacgattaggcaaggcccggctgcccgagggggttgagggcatcgcccgattccacgatctggtggcgccgttcgccgacgatcccgctgaggtggtgatcgggatagagaccgaccggggtctgttcgtcgccgccctggtggcggcgggctacgacgtgtacgccgtcaacccgatgtcgacctctcgctaccgggaccggcactcggccggcggggccaagtctgatgccggtgacgccaaggtgctggccgacatggtccgcaccgaccgccacaaccaccggcccgtcgccggcgacaccgaaggagtcgaggcactcaaggtcctggcccgggcccatcagcgcatggtgtggtcccggggacgacagaccaacctgctgcgctcgacgctgcgagagttctaccccgccgccctggtggcgttcgacgacctgagcagctcagatgcgctggaagtcctgcgcatcgcaccgacgccgacgctcggagcgggcctcagccggtcgaagatcgccgccgcgcttcgccgaggaggacgacaacgccggatcgacgagaatgcagagaagatccagaccgcactgcggtccgagcagctccaggcacccgccgtggtggccacggccatgggcgcctcggtggccgccaacgtggccgtgatcgccgagatgggtgcacagatcgcccagctggccgtcgagctcgaagcaaattttgaacagcacccggacgcagaggtggtccgttccctgccaggactggggaccatcctcggcgcccgggtgctcggcgagttcggcgacgagccgaaccgctatgccacggccaagtctcgcaaaaattacgccggcacgtcgcctatcactcgggcatcgggcaccaaacgagccgtgctggcacgccacgtgcgcaaccaacgcctcgctgatgccctctacctctgggccttcgcgtcgatcacggcctcaccaggggcccgcctctactacgaccagcgacggtcggctggtgacacccaccaccaggccctgcgggccctcggcaaccggctcgtcggcatcctccacgggtgcctcgctcaccgtgctgcttacgacgagaccatcgcctggggtcaccgttcagagggggatctccaacaagcggcttgacacgctatgggcgtgggatgt

SEQ ID NO: 2499 - DNA, 1461 bp, unidentified
  source 1..1461: mol_type = unassigned DNA; note = element_38d44a5
  misc_feature 1..2: note = core
  misc_feature 3..159: note = LE
  misc_feature 160..1206: note = CDS
  misc_feature 1207..1461: note = RE
  misc_feature 1230..1460: note = bridgeRNA
agaatgaaatggacgcctcccacctgaacaagtggcacgctgaacggcaggaaaggaacgaggggtagcggcaaagtggaccctcacgggccgacggcgtcagaagcgcctaaagtgaaagtctcaagagctttcgaggcaaaccggaggatccacatcatgaatgctactcgcaaaacggcggtcggtgtcgacacggccaaaaatgtgttccaggtctacaccgtggagcaggagactggcgaagtgatcaacaaacagctcaagcgcgcgcaattccttgaatggtttgccaaccgcgcgccttgcctggtcggcatggaggcatgcggcggttcgcagcactgggcgcgcaagctccaggaactggggcacgaggtcaagctgatgagtgggaagatggtcaaggctttcgtgtgcggaaacaagaacgatgcggccgatgcgcgcgcgatctacatggccacgcagcagccggaggtgaaggccgtggcggtcaagagcgagggccagcaggcggtgctggcgatgcaccggatccgccagcaactggtgaaggtacgtacggcacagatcaacgagctgcgcggcctgctgggcgagtacggcgaagtgttcggccagggcagaaaagccttcgatgccggcgtgaaggcggcgctcgaacggctggccgaacgcttgccggcggcgttgatcgacacgctgcgcgaccagtggaatgaattgcgccggctcgatgagcgcatcgcccgcatcgaacgatcgttgttggaatggatgcggcaagaccggggcgccaaggcgatctccgcgattcccggtgtcggtttgctgaccgccaccgccgcggtagccgccatgggagatgccaaggcgttccggtctggccgtgagtttgctgcgtggatcggactcattccgggccagaccggcagcgggggaaaggtacggctgctgggcatgagcaagcgcggcgacacctacctgcgcaccctgctgatccatggcgcccgggcggtgcttcagcatgctaagacgcccagcccgtggttgcagcaactgagccagcgccggccacccaacgtggtgatcgtggcgctggccaacaagatcgcgcgcacgatttgggcggtattggcccatgaccgtgcgtatgacaaggaccacgtcagcctgcggccgcttgcggcgacggcggcgtgaaactcaacctacaggagaaaggatggcacgtcaccagttgcgataggtatcgacagcgatgacagacaggtcagaccgggatccaccaaacctgaatgcgtcctggggctcacagcccgttaggagaatgaggagtgggtcagcggatttcatcggggccagcggcgttgccgcgcacaaggccggatatagaactgcgactttccttgtctgaacaaagctgaaaaataccttgcaaaagggaggcgtccatat

SEQ ID NO: 2500 - DNA, 1222 bp, unidentified
  source 1..1222: mol_type = unassigned DNA; note = element_38d8539
  misc_feature 1..2: note = core
  misc_feature 3..223: note = LE
  misc_feature 224..1207: note = CDS
  misc_feature 1208..1222: note = RE
  misc_feature 12..196: note = bridgeRNA
cttgtatcttgaaggcggtggtgattagctatcgctactagcgtatccggtgagtttgttctgacaccgaaagcctggactttgtgacgcagattaggccccggatgcgcgcctctgagagccgactggacattggacggtagcctagggcattgtgaccctgcatgtacaaggcaaatgggcgcagtgggcttggaggccaagttaagaggagtccgagtcgatgttttttctgggaattgacgtttcgaaggccaagctgaactgcgctctgatcggcgctgaaggcgataagcgcaagaccaaggtggtgcccaatacggtcgcgggcatccaggccttgctagggtggtgcgccaagcaaggtgcgcagccggagcagttgcacgtggtgctcgagccgagcgggccgtaccacgagcaggcgggcactgcgctgcatgacgcgggggccagggtctcgatgatcaatccggcgcaggcgcgcgattttgccggtgcgctggcggtgcgcaccaagaccgatgagatcgacagctacgtgctggcccgctacgggcaggcactgcgtccgccgttgtggcagccggcgccgctgcacgcgcggcaactgcgcgcgctgctggccaggcacgaggcgctggccaaggatctgcagcgtgagctcaaccggcaggagaaggcccagttcggccagtcgcccgagccggtcaccggctcgattgaccagggcgtggcgtttctgaccgagcagatcaagcgcctggaacgtgctatcaatgaccatatcgaccgccatccagacctgaaagaggaccgggacctgctgaccagcattccggccgtcggtccgcagaccggcaacgcgttgctgtcgatcatgcataaccggcgcatcgaatcgcctcagtcgctggcggcctatctgggcttggcgcccgtacagcgccagtccggcaccagtctgaacggccggtctcggctgtccaagacggggccggctagagtgcgagccaccctgtacatggccgcggtcgtggccgtgcgccataaccctcacatacaggcgctctacgcccgtttgctggccgccggcaattccaaaatggccgctctcggggcagccatgcgcaagctggtccacctatgcttcggcgtgcttaaaaaccgcaccccatatcgcagcgattacgcgttagccacttgactgccaagacggtat

SEQ ID NO: 2501 - DNA, 1336 bp, unidentified
  source 1..1336: mol_type = unassigned DNA; note = element_38d9b4b
  misc_feature 1..2: note = core
  misc_feature 3..77: note = LE
  misc_feature 78..1094: note = CDS
  misc_feature 1095..1336: note = RE
  misc_feature 1072..1314: note = bridgeRNA
tgttggggtggacggccctacggcatcggatgtgccaagatggggtcggactaccaacccaatgaaagggccgcccaatggaatacaagcgcatttcgattgacacgtccaagcatgttttcacgatccacggggtcgacgagaaggagaggccggtgctgcgtcgcgaagtcggacgcgctcaggttgaacggttctttgctaaaatcgcgcctaccgaggtcgttctcgaagcgtgcggcggctcccatcactgggggcgtgtgctcagccggatgggccaccgggtgaaattgatccctccgcaatacgtcaagcccttcgtcaagcggggcaagaatgaccgcaacgacgcggaggcaatctgcgaggcggcgtctcgcccgacgatgcgaaccgttcccgtgaagtcggtggatgagcaggcggcgacactcatcctgaagcaccgggagatgctggtgggccagcggacccaggcaatcaatgcgctgaggggacacgcgaccgaattcgggatcatcggcgccaaggggtgcgcgaatgtagaggctttaatcacggcgctattggctaacacggcggttccggacgttgcgaaatcgatgttgaaggatatgggcagtcacgtagccgatcttgatgccaagatatccgtattggaccagaaactgaacgagctccataagaccaatccggtcagccagaggctcgcggcgatccccggtgtggggccaatcaccgcgatcaccatggcgctgaccatcaacgcggcagatttcgagaccggacgacattttgcggcgtggctcgggctgacgccgcgggagcattcgaccggtggcaagcatcggctgggacggatcaacaaagcgggcaatgaaaggttgcgccagctcctggtcgtcggctcgatgtcggtgatccgattcgccaaaccaggcagcaagtccgcgtcggaatggctattgaaattgctggagcgtcggccgcggaaggttgccgccgtcgctctggccaacaagatcgcccgggtcatctgggcgatgatggtgcggggggaagtgtatcggcgtcagccggtagcggcctgaacctcgcgccggtgcagaagggaaagctctgagcaggagatagtgatcggtcgatccgacgaacgagagaatccgtaattcccacaggcgcactcacgccgtagtagtgtttggatctcgttcgcggaacctatctgggctcgcggtcattggccgcacaaagaagccggacacatgatcgcagtcgaaccgccactaaatcttgcaactccagatcttgacctcaccgggccgtccacaca

SEQ ID NO: 2502 - DNA, 1380 bp, unidentified
  source 1..1380: mol_type = unassigned DNA; note = element_38ebcde
  misc_feature 1..2: note = core
  misc_feature 3..1112: note = CDS
  misc_feature 1113..1380: note = RE
  misc_feature 1086..1367: note = bridgeRNA
tgatggagtggatgccccctcccgacggcatcaaatgtgccattgtgatgtttgcgaacgtcacagcagaggagaaggcatccatggacgaggttagcattgttggcctggatctggcaaaaagggttttccaagcgcatggggcgtctccgaacggggacgcgatattccgcaagaaactcagccgatcccaggtcctaccgtttctggcgaagcagccaaaatgcattgtggcgatggaggcgtgcgccagcgctcacttttggggccgggcgatcagagaactggggcacgaggttcgtctgatcccgcctatttacgttaagccatttgtgaagcggcagaaaaacgatgctgcggacgctgaggcgatcgctgaagctgccgttcgaccaaacatgcgctttgttgaggtgaaatcggagagccagcaagcaggtgcgatggtgttcaggacacgggacctacttgtcaggcaacgcactcaactcatcaacgccttgcgcggtcatttcgccgaacatggtgttgtcgcgcctcaggggatgacgaatgtgcggatcctcgaggccgcgatcgaggaagttaaaaagtcgatcgatctgctgatcgttgagacggcacgcctttaccttgcgcagattgcttcattgagtgagcaaatcgcgaccctcgaaaaagttcttcagaaaacggcgaccaaggcggccaattcagcccgactcctcaccgtgcccgggattggccacatcaccgcaatggcgatcgaagccttcgcgcccccgatggagacttttcgacgcgggagggattttgccgcctggcttgggcttgtccctgttcagcgatcgacaggtggaaagcaggtcctgggcaggacatcaaagatgggtcagcgtgacattcgacggctactgattactggggccatgacgatagtgcgctgggcgagccgtaaaacgccgccgaaaggttcatggctggccggcatgctggaacgcaagcctcgaatgcttgtcgccattgccctggcaaataagatggctcgctccgtctgggcgatgttgaccaagggtgaggactatagggatccggtagctgtcgcggtctgatcaaacgatcgcgcggtcagtttccggtgcgtcgggcgtgtgagaagatcgaggagtagtaagggcaaagtgatcggacagatccggttctgaaaatgcattccgagtcatagggctaagagcccgcagaagtgttttgcatcagatccgcgcatctccataccggccagcaggcgtaagtctgcgcaacaggcctgatacatgaccgcatctgatcacatgccggcgccattccgatttctcttgtacgactgggggcatccataca

SEQ ID NO: 2503 - DNA, 1385 bp, unidentified
  source 1..1385: mol_type = unassigned DNA; note = element_38eda4a
  misc_feature 1: note = core
  misc_feature 2..87: note = LE
  misc_feature 88..1119: note = CDS
  misc_feature 1120..1385: note = RE
  misc_feature 1151..1377: note = bridgeRNA
caatgggatggactcctcctcacctatcggcgtctaggcgcctaaactggagtttcgacacaaccagttaaggagaaggagtccaccatgaagattatccgcgtcggcgtcgatctggccaagagtgtctttcaagtgcacggggttgatcgttgcgaaaaggtcgtatggcgcaagaagctaagtcgtgcagaatggctgtcggcattgctagagaaaattgaaccggggtgcgaaattggcatggaagcctgtggtggcgcatatcactgggctcggcaattgcagaagcgaggcttcactgtgaagctgattgcacctcagttcgtcaagccgtatgtgaagagcaacaagaacgacgcgaacgatgcggaggcaatttgtgaagcgatgagccgtccgaacatgcacttcgtcgcgatcaaatctgtcgagcagcaggacttacaggcgatacaccggatcagggctgagttatgtaatcagcgcagggccaagggcaatcagattcgcggcctatgttccgagtatggcttggtagcgccaagggaaatgatccagttgcgagcagccgtgccttgctggctggaggatatggagaatggtctgacgatacggctccgtcgcatgctgcgcggcttgtggcttgatctcatgaacctggaactcagagttaaagaattggatcaggaaattgaaattgcggcggctaccgatccggtcgccaccaggttgcagcaactgcgcggcgtcggcccgatcatcgccacagcgatcgttgccaacgtcggcgatgcgaagcagttcaacagtggcaggcagatggcggcatcgctggggctaacgccacggcagaacagctccggcggcaaggaacgattgctgggcattacgaaacgcggcgatgctcagctgcgaacgctgttgattcacggtgctcgttcagttttacgaacggcggccagcaagaatgatcggatgagtcgctgggtaacacacatcgctcagacgaggcaccataatatcgcggcggtcgcgctagcgaacaaaacggcgcgtatcgcctgggcgatgatgaccaagggcacggactaccagcctggtccggtgacagtttaaacagagagcggctagtacgtaaaaaggagtatccaaccacgattgcgaaacaagccgttgatggccaacaggtcgaaccggcgctggcagaacccgagaatgtctgtggcctccgagcccgaaatagcgatagggaaccggcgcgcgaatagcccattatggtccttgcccgacgacgggcaaagcagttagagaccgaatatacgtgagcagtcgtacctaaaagtcaaagacggaatgtttgcaaacgaggaggagtccatata

SEQ ID NO: 2504 - DNA, 1180 bp, unidentified
  source 1..1180: mol_type = unassigned DNA; note = element_38f0d09
  misc_feature 1..2: note = core
  misc_feature 3..205: note = LE
  misc_feature 206..1165: note = CDS
  misc_feature 1166..1180: note = RE
  misc_feature 22..202: note = bridgeRNA
cttgtatctagcactcgagagagtttgcagtcattctgatcggggcgccagctcgatgctgcctgggtggtgaacaccgtgcgttagccgcagcggcgtcccgatcgttgtcgcagagagcccgaacagttgcgggggccgacttggtcgagcccgaattctcacaaggacgggcgacgcgacactccttccctggagggtgcacatgtttgtcggtatcgacgttgcgaaagcagagctggtggtgagcgtgcgtccgaccatggagcgcttcacggtcgcgaatgatgagcgcggcgtgcggacgctcgtcgagcggctgcgcgcgattggccccgagctcatcgtcctggaagcgacgggcggctatgaactgctcggcgtcgccgcgttggcggccgcggcgctccccgtcgtcgtcgtgaacccgcgccaggtgcgcgacttcgcgaaggccacgggccagctcgcgaagacggaccgcatcgatgccgacatcctcgcgcgctttgctgaggtggtgcgtcctgcggtgcgcgtgatcccggacgctgaggcgcaggaactcgaggcgctcctcgcccgacgccggcagttactcgagatgctccaggcggagcgcaatcgcttaggccaggtctttgggaagggcaagcgcctcgtgcggaagagcctcaaggcgcacatcgcgtttctcgagcgcgagctgcgcatgacggataccgatctcggcgagatggtgaagaacagtcccgcctggcgcgagcgtgatgagctgctgcaaagtgtgcctggtgtcggtcccgtgctctcgcgcacactgctcgcggatctcccagagctcggtcggctctcgcgacgcgagatcgcgaaacttgttggggtcgcaccgctcagccgggactcgggcacgatgcgcggccggcgcttcgtgcaaggcggtcgggccacggtgcgggccgtgctgtacatggccgcgctcgtcgcgacgaagcgcaatgcggtgatccgagggttctatcagcgtctcgtggccgcgggcaaaccgaagaagctcgcgctggtggcgtgcatgcggaaactgctcacgatcctcaacacgatggtccgcatgcgaacgcgctggaatccggcggcagcatgcggaatgctcacgaccgcttgactttcaagacagttg

SEQ ID NO: 2505 - DNA, 1375 bp, unidentified
  source 1..1375: mol_type = unassigned DNA; note = element_38f3aea
  misc_feature 1..2: note = core
  misc_feature 3..89: note = LE
  misc_feature 90..1121: note = CDS
  misc_feature 1122..1375: note = RE
  misc_feature 1117..1363: note = bridgeRNA
tgatggagtggatgctccctgctcaccggcatcaaagtgccaaagggtggtcgtcatgaagatcgccacaaggagagggagcgtccgccgtgcagattaccacagtcggcctggatctggccaaacacatcttccaggtgcacgtcgttgatgccgccggccacgtcgtggctcggaagaggctgcgccgaggcgaggtgctgtcgttctttactggtctgagcccgtggatgattggcatggaagcgtgtgcgaccgcccaccactgggcgcgtgagctgatcaagcttgggcatatagtcaagttgatgccgccggcttacgtgaagccttacgtaaaacgacagaagaacgacatggccgatgccgaggcaatctgcgaagcggtgacccggcccaccatgcgctttgtcccgatcaaatccgccgaacagcagagcgtactgatgctccaccgggtgcgggctcttctgatccgccagcgcaccatgctggtccacgccctgcgtgggcatttggccgagttcggcatcatcgtcgctcaagggatcagccgcatccgcgagttgattcagctcctgaccgacgagagcgccgatgccgcgctgtcgcctctggcccgtcgggctctggcacctctcgtggaccagttgctcgatctgcagccgcggatccgagcgcttgaggccgaactcctgatctggcatcggcagagccaggagagccgcaggcttgagacgatcccgggggtgggcttcatcacggccacggccatcgcagcgactgtgacagatccctcgcagttccgctccggccgggagtttgccgcctggctgggactgacaccgcggccgaactcatcgggcggcaaggagcggttggggcgaatctccaagatgggcaatggctacctgcgcacgctgctggcggtcggtgctacggccgtcattcgctatgctcgtacgaggaccgcggcgggcacaggctggatcaacagtctgctgagcaagaaaccagtgcggctagtctcgatggcgctcgccaacaagacggcccggatcgcctgggcgcttctggccagaggagaggtctaccaatctcctgcaccagctgccggttgagcaccgctgcgggttgatgttctcagttcgggaagggtgatgaataacgtgatgcaaatcggtcgaaccgggattaggacaacccgcggcgttgtcagagccttgagctcgataatgtgattgggacctgatcggcggacttccatcagggccagcggtcagatgaccgcaccaacaggccgtacatatgacggcacccgaccattttgcagatacgttcaacaaaacccttgccggcagggagcgtccacata

SEQ ID NO: 2506 - DNA, 1362 bp, unidentified
  source 1..1362: mol_type = unassigned DNA; note = element_38f5bc9
  misc_feature 1..2: note = core
  misc_feature 3..74: note = LE
  misc_feature 75..1091: note = CDS
  misc_feature 1092..1362: note = RE
  misc_feature 1118..1349: note = bridgeRNA
tgatgttgtggacggcccccgcacgaaatgtgcgaggatgaaatcgtcaccgtctgcaacgcatggagccacctatgggaacgatttcgacgattggcctcgacctggccaagaatgtttttcaggtgcatgggatcgatagtcttgggaacattctcgtacgccgtcgcttacggcgcggtgaagttctccggttttttgaaacactcccgccatgcctggtcggtatggaagcgtgtggcacgtcgcattactgggcgcgctcgattgcggctttcggacatacggtcaagatgatgccgccggtctatgtgaagccctacgtcaagcggggtaaaactgatgccgctgacgccgaggcgatctgcgaggcggtgacccgcccgacaatgcgcttcgtgccagtcaagtcaccggctcagcaggcagcgttgcttcagcacaagacgagggatttgctggtgcgtcaaagaaccatgcaggtcaatgccctgcgggggcaccttgccgagttcggtattatatcggcagctggcgtcgcgggcctgaaccagatgattacattgctgcatgcggagcaggagatgttgcccgagcccgctcggaaactgtttcaggaaattgtcgcgcatctgcgggctcttgagcaacgcatcgacgatatcgagaagcagatcgtcgcggaacatcgggcaagcagtgtcagccgtcggttggctggcattcccggtatcggcccgatcactgccagcgcgatcgtcgcggccgttccggatgcctcgactttccggtcaggtcgtcaattcgctgcatggctcggtctgacgcccaaaagtcacagcagtggtggcaaggaacgacaggttggcatcagcaaacagggggatagctatctcagacgcctgctcgtgctgggcgccacggcggtgatccgtcttgcacgcaaggaaaactccagtcgtcaatgggccgcaaagttgctcgagaagaaggcggcgcgtgtcgtatctgtcgctctcgccaacaagactgccaggattgtctgggcactcctcacaacgggcaatgcatacagcgccaggagcgcctgaaagaattcagagattcgccctcgtcgaacaccagaagcgacgaaggtgaatgtgcggagtggtgagatatgatggcgaaccggtcaggccggggagaggataaacccgacgggaccaagcgcagcaaaagcgcgcagaggtgatcagggatccaatccgcggacttcatcagggccagcagcctccgggctgcgcaaacaggccggacacatggctgcacccgaccatcaaagtcatactttccacttgcatcgtcagggccgtccacaca

SEQ ID NO: 2507 - DNA, 1170 bp, unidentified
  source 1..1170: mol_type = unassigned DNA; note = element_38ff1f2
  misc_feature 1..2: note = core
  misc_feature 3..199: note = LE
  misc_feature 200..1141: note = CDS
  misc_feature 1142..1170: note = RE
  misc_feature 39..212: note = bridgeRNA
cttgtatgtttaaagtcacttcagttacccgccatcaggcgggtaaactgtcaccgtgtttgacctgatgccacagcccgtccaccctctgggcctgcaagcccgcgggagagcttttggcgtggcttcagttttcctgtaaacccgaacagctgccagggcggcacacgccagcccgtatcttacaaggccgggagacatgaacgtgactcaatctgatttcgtcggcgttgatatcgccaaagagacttttgatgtgtttatcagcccgtcaggccggttcctccatcttgagaacacgcctgccggacatcagcaacaccttgagcaactggcttcccttcacgtcagactcgtcgtgatggaagccaccagccgttatcacaacctgcttgctgcgacgcttgaactcgcaggcatcccggttgccgtggtgaaccccagacaggttaaaaacttcgcccgggcccttgggacgctctacaagacagacccgaatgatgcccgcgtaatctgtgagtttggccggcggatggagcctgatgtgcgtcctgctcccgatgagcagacgcaacgtctggctatgatggtggcccgtcggcgccagctggtagacaaccggaccatggagcaaaaccgttacggcacctgtgatgatgaactcatccgggtgggtatcaagcggcatatagactggctcaatgccgaaatcaaagacacggatgacgacattgaccggcagataaaagtgatgccgctgtggcgggaaaaggtaaagctgctggaagaagtgaagggtatagggcggacaacgatggcagtactgctgtcgatgctgccggagctgggtacgctgaaccggcgaaaaatcagcgggctggtaggagtgtgcccgtatgcccatgacagcgggaaaatgaaagggaagcggtgtatctggggcgggaggagtgcagtacgggcggcgttgtatatggcagcgctgtcagcggtacgatttaacccgacgctgaaagcgttcttcgagagactacgaggaaaggggaaagtgtttaaagttgcgatgacagcctgtgtcaggaagctggtgacaatcctgaatgcgatgctgcgggacaataaaagatgggcagcagattaactgccctcagttgactttaaacacagctg

SEQ ID NO: 2508 - DNA, 1354 bp, unidentified
  source 1..1354: mol_type = unassigned DNA; note = element_390c23b
  misc_feature 1: note = core
  misc_feature 2..73: note = LE
  misc_feature 74..1093: note = CDS
  misc_feature 1094..1354: note = RE
  misc_feature 1096..1344: note = bridgeRNA
tatggatggcccgccgcttaagcgagaggccgttgtaaactgacggctgctttgatgaggaaggagcggaacaatgcacatcgcggttctgggtgtcgatcttggcaagaacagctgcagtgtcttcgggctggacgaggccggcaaggtcgtggtccggcgacggatgcagcgtgcgacggtgatcgccttcgccgcaaaactcgacgggtgcatcgtcgcgatggaggcgtgctgcggcgcgcaccacatgggccgggcgctggcggcgcagggtcatacggtgcggctgatgtcgctggagtatgtccgtccctacgtcaaggcgcagaagaacgacgaccgcgacgccgaggcgatcgcggaagcggcaacccggccgacgatgcgtttcgtcgaactcaagcgcgaggagcagctcgacatgctgacgctgcaccgcgtccgcgaccaactggtgggcgagcgtacatcgctgatgaaccagatcaggagcctgctcctcgagcggggccacatcgtgccgcagggccgcgccaaactggcagtacgcctcggcgagttgctcgccgatcccgaagcgctcagccagcgcatccgcgacctggtcggcgacatgcgcgaccgctggctggcgctcgatgcgcggatcggtgctttcgacgccgagttcaccgagcatgcccgccgcgacgatcacgcccgccggttgctgaccattcccggcatcggcgcgctgaacgcaacggcgctggtcgcggcggtcggcgacgcacggaccttcgcgcggggtcgcgatcttgccgcttggcttggcctcgtcccgcgacaggcgacaaccggcggcaagcctcgcttgctcggcatcaccaagcgcggcagcaggtatctgcgcaagacgttgatccagagtgcgcgggctgcgatgccgacgctcaggaaaagcgacacacggctgggtgcatggcgcgcgctgctgtcgcgctcccatcccaacacggccgtcgtggcgctcgccgctaagctggcgcgcatcgtctgggcgttgctgcgccatcagcggacctacgaggccgctgccgtggcggcgtaaacgagatcggccagtgcaccgtgcaccgtgcaccggctggatgatgtctgcgggtggtgagaggaagatggcctgacagtcgaccggtgtcctggaaccctatggctcaaaatggcgcatcgacgccggcccctttatgaggaccaggacgcgcggatctccatcttggccaatggcatcgccaaaaaaaggccggatacgttttcgcagactgctcggatcatcagacacaaaccacttgccgacggggcgggccatacg

SEQ ID NO: 2509 - DNA, 1351 bp, unidentified
  source 1..1351: mol_type = unassigned DNA; note = element_390ce9b
  misc_feature 1..2: note = core
  misc_feature 3..79: note = LE
  misc_feature 80..1105: note = CDS
  misc_feature 1106..1351: note = RE
  misc_feature 1109..1347: note = bridgeRNA
ttaatgagatggtcagcctgaccgaaacggtccgatcggcttacgctgatcgggccgtttccttttccgggaggccatcatggcaaacgcgacgttgatcggtatcgatctgggcaaacactgcttcttcgttcacgcgcaagacgctcatgggcacgagttgtggcgcaggaaggcatcgcgcagccagttgtacacccagattgccaattgccccgcctgcacagtcgccatggaatcgtgcgccggtgcgcactggctggcgcgcaaattccgggcgtgcggacacgaggtgcgcctgatcgcgccgcagttcgtcaaaccgttcgtcaagggtaacaagactgacttcgccgacgccgaggcgatctgcgaggcagcctcgcgtccgtcgatgcgctttgtcgccgtcaagacgcctgagcagcagatcctgctggccctgcatcggatgcgcgaagcactggtgcgcgagcgcacggcgacgagtaatcagattcatgcctttttgctggagttcggcgtcagcctgccgatcggatcggttgccatcacgcgcctgcccgtgctgctcgatgatccggctcacgcgctgccgccgccaatggtgagcctgctgctgcgtctgcatcggcgccacggccaactcagcaacgaaatcgctgaactcgaaaccgaactcagacgtcagctggctgggaacgaagccggccagcggttgcttaccattccgggaatcggcccgatgaccgcgagcagtctgcttgcgatggccggtgacgtgcatggattcaggtgcggccgtgacttcgccgcgtcgctgggcctggtgccacgacagcactcgaccgggggccgggcgacgctgctgggcatttccaaacgcggtgacaggcacttgcgatcgttgctggtgcagggcgcacgcgctgtgttgcgctgcgtcgacaggcgtgccgatgcgctcggcgtatgggtgcaggccctgctgcgacgccgtcacaccaatgtcgtcgcctgcgcgctggccaacaaaatggccagaatcgtgtgggcgatcctggccagaggcggcgagtatcgcgcaaatccgcgtcccgcctgatcaacacttcctgcctgcttttgcgaccatcaacctgtgatgaagataaacggcacacggcccggctgaacacctgacacaaaatccagtcccgcagactgatggctttttaaggacagtcgggcgcggcttctcatcgagggccgggcgcttcatccgcgcccatttcgagcccggatacatttgcgcaggcccttctatcttaggtcacacattgaggttgcaaaactaaggctgaccatacat

SEQ ID NO: 2510 - DNA, 1194 bp, unidentified
  source 1..1194: mol_type = unassigned DNA; note = element_390dd2b
  misc_feature 1..2: note = core
  misc_feature 3..213: note = LE
  misc_feature 214..1191: note = CDS
  misc_feature 1192..1194: note = RE
  misc_feature 40..194: note = bridgeRNA
tcctttagatttatactaggaaaaataatatatttatgtaagaagagaaaagtgtttaagtaaactaagatacactccgagtaaaactcatagttcgattaagacttaaacactttcttatcaaaaactcggatagaaattcgggatacaagcccattattaaggagttgagatgatgataagtttctcttttaaattaatcaaaacaaatttatggaaaaagtttttattggaattgatatcagtaagctaacgctggatgttttcgttaatagttgttcgaaaacacaacattaccaaattgagaactgctcaaaagccatcaaaaagttctttaaaagtttctccaatgatgcaaatactgttgtaggaatggagaataccggaagatataattttgaactttatgaagttttaagtaatttaaatttattggtttttgttatcaatccacttcatttaaagaaaagtattggtcttctaagaggtaaaaacgataaactcgacagtcagagaataggtatttttttggagaaaaactatatggacctacagccttggattgcaaaatctagtgaaattcaaaagataagtttactcaattctgaacgcaggcatagagtgaaaataaaatccggtttattgaggcagatgaaagatttaagctttcttaaaaatcatacagataaggaaattattaaactcaacaagcaattgattttactcttagataaacagattaaaacaattgagaaaaagatggtagaaattattgagtctgatatagaattaaaagacaaatacgcaagaatacagactgttccgggtgttggaaaagtattggctactatgttgattgtgaaaacgaatggttttacagaaattctatcggcacgaaagatggcttgttattcaggtgtagttccgtttgatcatcgatcgggttcatcaatttattacaaacctcgagtctctacaatggcagacaaagaattaaaaaagattttacacttagctgccctgagttccataagattaaaaaatgacctcgctttatattttcaaagaaaggttcttgaaggaaagaataagatgtctgtattaaatgcgattagaaataaaatcatacacagagtttatgctttaattaaaaacaattctgtgtatgaaaacaacttgcaaatgtcatagaaa

SEQ ID NO: 2511 - DNA, 1249 bp, unidentified
  source 1..1249: mol_type = unassigned DNA; note = element_3911a92
  misc_feature 1: note = core
  misc_feature 2..237: note = LE
  misc_feature 238..1236: note = CDS
  misc_feature 1237..1249: note = RE
ctacttatctactggtgctacgaccgcagcccggccaggcttggtcgaggtgaccggcggggtcgctctctcatcggctgcctaccgcggttcggtgtggctcactcatgatccgcgaccatcgagatcatcaacgacagcgagaagatcctcgcccagggccggttcggcaccgaccgcgacggctaccaggccacgctcaagctcggccggcagcacaaagagcggatctgggcggtggagggctgtaacgggatcgggcggcacatcgctcaacgcctcgtcgccgacggcgagaccgtggtggacgtgccggcgaaactgtccgcgcgggctcgcgtgttcgacaccggtcagggccgcaagaccgacccagtcgacgcccacagcgtcgcggtcgcagccctatgcaccaagggtttgcggcaggtcaccatcgacgatgtggccgttgcgctgcgcctactcgttgatcgccgcgacggtcttggccacgcccacaccggcctgctcaaccgcatccacaaactcctgctggaactgctacccggcggggccaagcagttcctgtccgccccgcaggcccggaccctgctcaagacgattcggccgcgtgagcttgtcggggccactcgccggcggttggcgtcggaactgatcaccgagctggcccaggtcgacaagaaaatcaaggcagcgaacaaggaactgacagagctcgtcgagaccaccggcagcagcctgcaggacctcaacggcatcggcccctccggcgccgcccgcctgatcggcgacatcgctgacatcagccggttcgccagccgcgggcacttcgcctcctggaacggcacagcacccctggacgcctcctccggcgatcacaaacgccaccgcttgtcccgtgccgggaacgggcgcatcaaccgagccctgcacatcatggccatcgtccaactgcgccaagacaccgaaggccgcgcctactaccggcgcgaactcgccgcgggcaagaccccgatagaagccatgcgctgcctgaaacgacgcctgtctgacgtcgtctacaagcagatgatcaacgatgcaagacagacgaggacgggcccgggaggacacgcgggggcgactctgcaatccagcgcggctgacccgatccccatggtcaacacttcggaacagtcactacccggacccgccgactcccagcctagaacaccgctcctcgccgtctcttgacacagcggggtgc

SEQ ID NO: 2512 - DNA, 1474 bp, unidentified
  source 1..1474: mol_type = unassigned DNA; note = element_3912646
  misc_feature 1..5: note = core
  misc_feature 6..222: note = LE
  misc_feature 223..1458: note = CDS
  misc_feature 1459..1474: note = RE
  misc_feature 1..226: note = bridgeRNA
cccccgttaccttcttgatcaagcccggtgagggcttgcaggccaccggccacggcatgacttgtcgcccctgtcgttgatgatctggggggtgttgtcaccgtggtcggagggcgccaacgaccgctgatagagacctgacccgcacgcgtggtctgctcgtaacgtggctgccggcgcgggtgtccgggtcggcctgccacggttagcgaggaggcctcgttgtcgggatccgacaagaccagagatcacgggttcgcagtgttctgcggactcgacgtgggcaagtccgcccaccatgcgtgcgcgctggacccgaccgggcagcggctgcatgacaaggccctgcccaacgacgagaccgccctgaccgaggtcttccaacggctggccacgaacggacgggtgctggtgatcgtcgatcagcccgcctcgatcggcgccctggctgtggccgtcgcccgctcgctgggcatcgaggtcgcctacctgcccgggctggcgatgcgccggatcgccgacctgcacccggggcagggcaagaccgacgcccgcgacgcctacgtcatcgccgacgccgcccgcaccatgccccacaccctgcgccgggtcggcaccgacgacgagatcctcgccgaactcaccgtgctcgccggctacgacgacgacctcgcagcacagaccacccggctcaccaaccgcctgcgcgacgcgctgttgcacgtccaccccgcgctggaacgcctgctcgggccccgcatggaccgcggcggagtactcgatctcctcgccgctgctcccacacccgacgggctgcgccagctcggcgaggacggcatcaccgcagtcatgcgatcccgctcgccgcgtctggccaagaccttgcctcgccagatcctcgccgcgctcgacgcccagaccgtcgtcgtccccggcactgtcgcgttcgggcgggtgatcgtcggagtcgccacccagctgcgggaggtccgcaccgagcgcgacaccctggccgccgaactcgagacccgcctggaggcccaccctcttgccgaggtcctgacctcgatgcccggcctcgggttcaggaccgccctcaagatcctcaccatcgtcggcgacggcgccgcgttccccaccgccgggcacctcgccgcctacgccggcctcgcccccgtcacccgcagatccgggacgtcgatcaagggtgagacccgttcccagcgcgggaaccacgccctgaaatccgctctgttcttgtcggccttcgccagtctcgccgacccgaccagccgcgcctactacgaccgcaaacgagcccagggcaagcgacacaacgccgccctgatctgcctcgcccgccgccgcaccgacgtcatctacgccatgctccgcgaccgcaagccctaccagctctccgcaccggccgagcccgactcgcaccccgccgccgcttgacaacgacatagagaca

SEQ ID NO: 2513 - DNA, 1401 bp, unidentified
  source 1..1401: mol_type = unassigned DNA; note = element_3918348
  misc_feature 1..2: note = core
  misc_feature 3..117: note = LE
  misc_feature 118..1149: note = CDS
  misc_feature 1150..1401: note = RE
  misc_feature 1163..1396: note = bridgeRNA
agatgccgtaatgggccggcactcctcgcatagccaagaaggtggctgtccctcagagtgatgatgttgaaacggggtccgatgatctcggccccaagcatcaagcgagggacaaccatggactattatgcaggaattgatgtgtcgctggaacagagcagcatctgcgtcgtggatgggtcgggcaagatcgtgcgtgaggtgaaagtggcgagcgagcctgaagcgctgttgcagctttttgccgatctggagctgccgatcgtcacgatcggcctggaagcaggaccattatcgcagtggctgcgcgctgcacttgtcgaggcgggccaggatgtggtgttgctggagacgcggcatgtgaaggcggcgctgtcagcgatgaccgtgaagacagaccgcaaggatgctcgcgggattgcacaattgctgcgcatgggctggtaccgcccagtgcatgcgaagtctgcgaatgcccaagacgttcgggcgcttttggtcggtcgcaagcttttgcaggccaaactgcttgatgtcgagctcagcatccgcgggatcctgcggggttacgggctcaaggttggcgaggtgagccggggccgtttcgaggcgcgcattcgcgaattgatcgaaggccatgagatgcttgggacggtgatcggggcgatgttgcaggcacggggtgcattgtggaacgagtttacccggctgcatcgcgcgatgctgaagattacccgcgccgatcctgtctgccaacggctgatgagcgcccctggtgttggagccttggtagccattacctatcgctcggcagtcgacgatccgggtcggttcgaaaagtcccgcaccgtcggtgcgtattttggactgacgcccaagaaataccagtcgggagagaccgacatcgacggcggagtaaccaaggtcggcgatgccatggtgcgcactgcgctttatgaagcggcgcatatcatgctgacgcgtgccacgcggttctctgccctgaagcgctgggcgctggacgtggcgaagcggcgcggtatgaagcgagccaaggtggcgctcgcccgcaaactcgcgaccgtccttcaccgcatgtgggttgacgtcagcgcgttccgttggggtaaggatactgtcgccccgtaaaggcgagatgagattaccgaagcaggccgccgacggcgctgcttctccgaggtcccgtcgctgggacgagggcttggcaaggtcgggagtagtgctgtgaaggcttcggcaaatcacgcgtcctagattgacctgccggcttaaggatctgatggcatggtgtggcagtcttggtgctgaccacggacagaagcatgatcctggcggcgtgatgatcacggagggacttgacgagcaagggcccattacaga

SEQ ID NO: 2514 - DNA, 1360 bp, unidentified
  source 1..1360: mol_type = unassigned DNA; note = element_391ac67
  misc_feature 1..2: note = core
  misc_feature 3..87: note = LE
  misc_feature 88..1125: note = CDS
  misc_feature 1126..1360: note = RE
  misc_feature 1151..1348: note = bridgeRNA
agatgtatggactcctccccttaacgggaaaattacggtataaagtgaaagcattcactcaatcaacttttaccaggagtccacacaatggaacaatgtaacgtaattgctatcgatttagcaaaagatatttttcaagtttgcattatgacaacaaatggaaaaattatttttaataaagcgatgaatagagccaagttaaaagaatggttagccaaaaaaaagctagcccttgttgccatggaaagttgtggcggtgctcattactgggcaagatttgctttatctttaggtcataaagtaatggttataccgcctaaacaagttaaaccgtttagaacaggtcaaaaaacagatgccaatgatgctgtagccatcgccgttgcaagtcgagcagcgaatataaaacccgctaggattttatctatcgaacaacaaggtcttcagtctattgaaaagatgagaagcctgattgataagcagaagctacaactatcaaatcaagtacgtggcttgttgctagagtttggcattgttatcaataaaagtattaaaagctttaaagaacggatacctgaaattttagaagatgctgaaaatgatttatcttttccaatgagaaaggttttacttcaaatgtgggaactctattctcgtcttgaaaacgattttgacgtaataaataatgagttaatacaattaaccgcacaagatagtgactgccagaaattaatgaagcttgaaggtgtgggacctattaccgcagttaggctaaaaatacagctaggcaatggtgaacacttccacagtggcaggcaagtcgctgcctgcattggccttaccccaaaacagcacagcagtggcgggaaagtaaaattagggtcggtaggaaaaggctcatacgataagccgttgcgcagttgtattttcttaggggcgagagcagtggtgtctaaactaaaaaataggccagccaaaacagaaaaagaacgttggctaaaagccttaatagaacgaagaggtgttaattgtgcatcgatggcgttagccaataaaacagcacgaaccgcgtatgctttattgaaaaacaacacggattacaagccagtattgattgcggcttaaaaagtaaaaagttataaagcgtttaatattgttcaataaagatctttaaaatggttagaccaaccttcaacagcctgtaatatgctctgaacatatttataatgtcgtgcaggagattaggcatgaaggtgcgaatacatcaaagtgaccgggatagcttcccaataagagtccgtatataagcacgcatctaatattttaaaattgttattgcacaatatgaggagtccatata

SEQ ID NO: 2515 - DNA, 1352 bp, unidentified
  source 1..1352: mol_type = unassigned DNA; note = element_391af82
  misc_feature 1: note = core
  misc_feature 2..282: note = LE
  misc_feature 283..1308: note = CDS
  misc_feature 1309..1352: note = RE
  misc_feature 104..262: note = bridgeRNA
ctctaactttgcataggattgcgacgatagtcgcataaaataaaaaataagaagaaagataacagacaactcaagacagtttcttacctttgttgtttgaaggaagaatcggtctgtcgaagaggtaaaccagaaatctttcaagcgcagaggctacgatttgtttaggacctcctcgacatagttgcagagaccagatagaaagttattggcctagagccttgttagagtgttagtccatacaactattgaccgattctcataaactaacaatacaaaggtatgaaaaatttatttattggtatcgatttctctaaagaaaaagttgatgtggctatcatttctgcagaaggactagtcgaaacatcaatgagagtcttcaatgagttcaagaactccgtgtctggctacaggcagcttgtcaagtgggttgacaagaatgcaggcggcatagatccgtcaatgtggctcttctgcggagagaacactggtgactacagtaagccattgtgcaaccatctctacggtaagggatatgacatgtggctggagaacgccaaatgcatcaaggacaactctggaataagacggatgaagtctgaccgtgcagatgccaccatgattgcggaatacgcaatgagaaaccacgatagggccgttctctatgaaccacttagtgaatctctggctcaattgcgagagtactatctgtacaggcagatggtggtaaggcacagatgcagttttgaggtgcgcagaggcgagaagaggcttatgatggaggagtccgctgccaagactgtgattgcccagagcggaaagcatatcgtctctgaactcaacaaggaaatagcgaagattgacaagaaaatagcgtcactcattgagtcctcagacgaactctctgaggtgtaccagatagtaacgtcagtacctggtattggaacccagaatgctgtttgcctgatggtgtatacagacaatttccgcaggttcaactatgacgcaaggagtatagcttgctactatggcattgctccattcggcaaggactcaggcaccagtgtacatgtggatccacatgtgcattacatggccaacaggcacataaaagcgatgctgacacaagctgcattggctgctgttcgtttcaacccaaacatcgctcaatactaccagcggcttataggacggggtaaaaagaagcctgtagcgatgaataacgtcaagaataaactactccatatcgtcacatccatggtcaaaaataagcaagtttacaacatggaatatagattatcagcataatactaaaaataatggtcaaattatttggattttaacatagaaag

SEQ ID NO: 2516 - DNA, 1395 bp, unidentified
  source 1..1395: mol_type = unassigned DNA; note = element_39321f4
  misc_feature 1: note = core
  misc_feature 2..309: note = LE
  misc_feature 310..1380: note = CDS
  misc_feature 1381..1395: note = RE
  misc_feature 9..299: note = bridgeRNA
ctgtgaggattgtggtggctggtctgggactggctggcagagtggtagtggtccgttctgccccgcgggcgtggctctccaagtgactggccccagcatgggtgccttggagtgggatttgtccgtccgcggggtggggcggccggtaccgccggcccacatcggtaacttgatcagaaggttgcccaccctgtttgagagggcgtggctcgtcacagtgttgttccgaagtgacctctacccggactggtaccggccgttgacggccctgaccatatccgcgaagtagaggaaggtgccagaaccgccatgtctatcgttgcgcattcccgcccgtttgtcgttggcgtcgacacgcacgccagaaaccatgtctacgccatcgtcaccgcaagcaccggtgaactcatggccacccgggccttccccaccacggcggctggcatcaaccggtccatcgcctgggtggcgcgtcacaccggcgctgacctggggaccttgtgggtgatcgagggcgccgcctcgtatggggccctgttgtccggtgctgttgctgccgccggctaccaggtcgccgaagcggcgcgcatggatacccgggcccggcacggggtcggcaaatccgatccgatcgacgcgcaccggatcgccgcggctgtcctgcccctggacgagcagcaactgcgccggccgcggctgaatgacggggtccgtgcggccctgcgggtcctggtcaccgcacgggaatccatgaccaccgagcgcacccggaccgtgaacgcgttgaccgcactgctgcgggtgaacgaccttggcctggacgcacgcaaatccctgaccggggcccaaatcgcggaggtgtcgcggtggcgttcgcgcgaggaaccgctggcactctccgttgcccggtctgaggcagtccggctggccaaacggatctccgaactcgacatacagctgaagaccaacaactcccggatcaccgaactggtcgagatcagcgacgccgcgcccttgctgcaggagaccggcttcggtcccgtcacggcagccgtctgcctgaccgtatggtcccaccgcggacgcgtccgctccgaggcagccttcgcctccctggccggagtaaatccgattccggcgtcctccggcaataccgtccggcacagactcaaccgcggcggcgacagaaccctcaacaaagccctgcacgtggccgccctgagccggatgaccttcgaccccgccaccatcgactacgtccggaaacggcaagccgaaggacggacgaaaaaggagatccgccgctgcgtgaaacgctatctcgcccggcggatctttcgaaccctcaacgccacaaacccggtcctctgccacccttgacaggcatagaaggat

SEQ ID NO: 2517 - DNA, 1869 bp, unidentified
  source 1..1869: mol_type = unassigned DNA; note = element_3933dca
  misc_feature 1..2: note = core
  misc_feature 3..275: note = LE
  misc_feature 276..1499: note = CDS
  misc_feature 1500..1869: note = RE
  misc_feature 13..295: note = bridgeRNA
ctactataataaaattagtcggtaaatccatgacaacccagccatggtttacacgtgctcatatttaagttataatgaaagcagtgattggactgacgttcacccccttgggacaccacgcccgttcgagagacagtcatccatgctttcattatagcgttcgtttttgcaggttgagccgccataggtgcgttcgtatcactcagtagactgaataggtaatgagcaaagcgtggttttccgattacacaaattcattatagggagagatgtttatgaacgctataggcatcgacgtttccaaaggtaaaagcactgttgctgttcttcgcccctttggagaaatcgtggctgaaccattcgatgttattcacaacgatgatgatttaaatagtcttatcaaccgtattaagtcattatcgggtgaaacaaaggttgttatggagtacactggaaaatattttgaacctatcgccaatgcactccacaacgcaggtatatttgtttccctagtcaatgcaattctggtacacgactatggcggaaactcaatcagaaaggtcaaaaccgataaaaaggacgctttaaagattgcttcgtttgcccttgataaatgggttgacctacctgaatacactcccgaggaggatattcgcaaaactcttaaaattcttaatcggcagtatattcagtttagtaaaattcagatcatgcagaaaaacaatttaatttctctgcttgacactgtttttcctaatgccaattcattgtttacatcacctcaaagaaaatctgacggacacgaaaaatgggtcgatttcgtatcaaaattttatcatgttgactgtgttgcaaaactttccttatcagcatttcagcttaaatatcaaagctggtgcagaaagaataattactactacaaagaatctcaagctgagaaaatccatacatatgcaagagaacaagtcagcaccttacctatgaccgacagcgttaagcttttaattgaacaatcggtaaatcagcttaattctatccttgaaactctcgctgcgatcagaaaagaaatggacaagctctcatcacagcttcccgaatacaataccgttatggatttttacggtgtaggtactgttctcggctcacagcttatggctgagataggcgatacaagacgttttcataaccgcaaggctattactgcatttgctggtcttgacgctcctccttatcagtctggaacccttgacgttaagtcaagaagtatttccaaacgaggctctccatcattgcgtaagactttatttcaggtcgttgacgttattattaaaaatcagccagaaaacaacgctgtttatcagttccttgacaagaaacgttcagagggcaaaccctacaaagtgtacatgatggctgctgccaacaagttcctgcgtatttactacgctcgtgttaatgaggttttaaatatggagatttattcttctgagacatcttaacaactccttgacaaattaattttaatatggtatcataaatgtagccgtaacggaggatatggcaacgctgaagagcgaccagagcgccatatacggggtttagcagaaagagtgataccattgggtattgctctttgttttttgcgtgttatggcttatttgctgtttctgctaaacctacaatgcgataaacttcgggagtttgagggcagagccctcatcagccgttaggctgcttaaaatttgacgcttgattatattttacttatggacttagactgcttcgcgcggtcttttcggtgtgtctgtttttatgtttgttaattatttatgaattattgtttttacctattgacttttatttgcaggt

SEQ ID NO: 2518 - DNA, 1398 bp, unidentified
  source 1..1398: mol_type = unassigned DNA; note = element_3935bcf
  misc_feature 1: note = core
  misc_feature 2..89: note = LE
  misc_feature 90..1121: note = CDS
  misc_feature 1122..1398: note = RE
  misc_feature 1162..1390: note = bridgeRNA
caatgggatggacccctcctcacctaagcggcatcgaggtgccagactggaagtgtcaaccaccagtcgagagggagaaggagtccatcatgaagcttattcgcgtcggggtagatttggcaaagaacgtgttccaggtacatggcgtagatcggaacgagaaggcagtatggcgccgaaagctgtcgcgggagaactggctcaaggtgttgctcgagacagttgagcctggctgcgagattggcatggagtcctgcggtggcgcgcaccactgggcacgccgactgcaggctcgcggattcagggtgaggatgatcgcgccgcaatttgtgaagccctatgtgaagagcaacaagaacgacgccaacgatgccgaggcgatctgtgaagcggtgggccggccccatatgcggttcgtcgcggtcaagactgtggagcaacaagacatccaagccgtgcaccgtatacgcgccgagttgaccaagcaacgcacggcgaaagggaatcagatccgcggcttggtcaccgagtacgggttggtggcgccgaaagagttggtgcaattgcgccgggcgttgccgtgttggctggaagatgcggagaacggcttgagcgcgcggttccggcgactgctcaacgggttgtggggtgatctgcggacgctcgatgagcggatcaccgaattagaccgcgaaatcgcggtgattgcgcagaatgacccggtcgccaaacggctgcagcaactgcgcggggtgggaccgatcactgccaccgcactggtggcggccgtgggcaacggcgaacagtttgccaatgggcggcagatgtctgccgcattcgggttaacgcccaggcagcatagctcgggcggcaaggagcggctgctgggaatcagcaaacgtggcgacgcgtatttgcgggtgctgctgatacacggcgcgcgctcggtgatccgcacctccaaagacaaggatgaccgcctcagtcagtgggtgacccgtctggccgcccgcagccacccgaacgtcgccgctgtagcgatggccaataagaccgcgcgcatggtttgggcgatgttgaagaacggcactgattaccaaccgaccatgattacgagctgacgcaacgagaacgcacaactgcatcgtcaacaggagcacatccaccacgattgctaagcaagccgaacgatggcgaacaggtcgaaccggcgccggcagaacccgagaatgtccatgtgcgagaagcacgaagaaccaatggggagccggtgcgcgaatagcccatcagggcccggcatcgtcaaatcgatgcagcagtaagaggccggatatacgtgagcagtcgtacctcaccgcccaagaacggaatgcttgcaaacgaggaggggtccatata

SEQ ID NO: 2519 - DNA, 1221 bp, unidentified
  source 1..1221: mol_type = unassigned DNA; note = element_393e36d
  misc_feature 1..2: note = core
  misc_feature 3..207: note = LE
  misc_feature 208..1197: note = CDS
  misc_feature 1198..1221: note = RE
  misc_feature 11..191: note = bridgeRNA
cttgtatctttctcacgtagtgattagctatcactacatgaaacagagtgagcttccgcagggcgctaaggctatcaaccttgcgattgagtttaagccctctgtttcacctttcacgccagcattaacattgaacggttacctagagcactgactctgaatgtacaagcggaacgggcgtgacggcttcagtgaaagggggacattatgtattacgtcggcattgatatcagtaaacgttttatcgatgtgtgcttattggttgatggcattaaaggtaaacggaagacgaaagtgttacccaatgaccccaactcagcactggctttggctcaatggttaatcctgcaaaaatgtgacccgagtcaggctcatatcatcatggaagccactggggtttatcacgaacacctcgctgatggccttcatcagtcggacattcttgtctccgtgataaaccctcatcgggtgcgtgaattcgccaaaggaatggggatattgacgaagacggataaagtggatgcctatgttctggcatgctatggctgcctgaaacaaccagaaaactggctcccgccttcgcaagaaataaggaaactcaaagccttgttacagcacagggatagtctgctgaatgataaacaacgcatagaaaatcgactgagcacgttaaaatccaccacggccccggaagaaatcctgacctcgctggagtcgattgagcaaaacttaaaggatgagctggcaaggattgaacgcctgatagcggagcatatagataagcatcccaggctaaaaaacgacctaaaactgctgaaatcgattgatggagttggagagcaaatcgggtggaatatgttagccatcatccggggcaataacttcaggagcgcggaacaggtggcggcatacctgggcgttatcccgattgaacgtcgttcaggcacctcggtgtgtggcagggccagactgtcgaaaatagggccgccgggtatccgggcaaaactgtatatgggagccatagcggctatcagttggaacagtcatgtgagagccctctatgaaagactgcggctaaaaggaaaagcgaagatggtggcgataggagcggcgatgaggaaactggtccatctttgttatggcgtgctgcatacgcagcagccctatgataaaaatcatggggtggtagccggttagaggacttgactaacaacacggtta

SEQ ID NO: 2520 - DNA, 1176 bp, unidentified
  source 1..1176: mol_type = unassigned DNA; note = element_3944f6b
  misc_feature 1..2: note = core
  misc_feature 3..205: note = LE
  misc_feature 206..1153: note = CDS
  misc_feature 1154..1176: note = RE
  misc_feature 3..181: note = bridgeRNA
cttgtatggtaggacttgaagggaggaggagggacaaggctcgattctgactgttagcgcagtacagaccgtgggagattttcaccctcctcctttcacccaagcgccgataaagaatgcatctggcctagaccgacgataggaacaagcctgcgcctctgggtgaacccttcaagtgttcaaaccttagcccggaggatttctcatggcaatgcccgtcgctactacccagtcgattgtcggggttgatgtcgccaaagacgaactggtgatttatcacgtcgaatcagatcggctcgagacaatctccaataccaaaacggcgatcaagaaatggctcaagaccgttgccaaaccagtagcaatcgccatcgaagccaccaatatttatcaccaggagttcgccgagctggcgcacgcggatggctgcaggatctatatggttggcggttatgaactcagtcattaccgcaaaggcgtgaacgttcgcgctaaaactgatgcgctggatgctcgtttattggcccgctatctgacaaacgaaggggaccatttgcgcccttggacaccgccgtctccgctgtattgccggctcatcagtctgttccggcgtcgtgcggctctggttcaggctcgtgtcagcctcaagcagagctgggagaatgagccgctgctcaaaaccgctttcaagaatcagataagcgccatgcaaaggctggaaaccttgcttgaaaaaacgatcctgacgcagatagaagaagccggtttgggcgcacagctcaagcgctgcatgaaggtcgaaggcatcggtacgttgactggcgcccgcttgctcgcatcctttcagcgtggggacttcaggaatgccgacgctttcatcgcttttctaggcatggatctgcgcatagcggactcaggcaaaaagaaaggccggcgctgcctgaccaaacgaggcgaccctgaggcacgtcgattgctgcacaacgctgcaatggcggccagtcggacctcggtgtggaaagggttttatgaggctatgagagggcgtggtttgagcactacccaagcactggtcgcactagcccgcaagcttgcacgggtggtatttgctctgttgaaaaaccagagcgaatactcacccaaaggcgtttaggggctaggcatgaaccatagaat

SEQ ID NO: 2521 - DNA, 1892 bp, unidentified
  source 1..1892: mol_type = unassigned DNA; note = element_3947597
  misc_feature 1..3: note = core
  misc_feature 4..294: note = LE
  misc_feature 295..1722: note = CDS
  misc_feature 1723..1892: note = RE
  misc_feature 105..270: note = bridgeRNA
aaaccgtcactaagtgaacttacccaatcctcggattgaacgtacattcatttccgtctcggtcggtgggcttatctcaggcaaaatgattaccttgggaaagagcaaaacaggaagcagagtagtcgtttctaaattagtggcatcgtccctgataacaaacctgacttccgaggattgcgacccaaaatcatggtgagaggattatatccgtagttcccgtttagaaaaataagcatacgtttcgcccacggagcttctctgttttgctttcaaactctaaaatacaaaattatggaaaaaacaagtaaaaacaaactggaggatgtaacaagattacttgctcttcaaaagattagagatgtaaaggacctggaatcctacaagctgtcggtatgccatccgcattctgccggtattgatttgggaagccgggagatttatgtagctattgatccacgcattgcggcagaaatgggaatccctattgtccatgtctttaatacgtttacatccggtttgcaagattgccgcaaactccttatgaattgtggcatccaaacagtagcgatggaatctacatctatttattggaccacaatttattccatattggtaagtgcaggatttgaagtttgtctggttaaccccaagaagtttcgcatggttccgggccgtaaaacagatgtcttagattgtcaatggcttcaaacgcttcatttatatggtttgctccgcggatctttccatcccgaagaaaagatagcttgtttacgaagttacatgcgggagagaaatctgattataaaggatcgtagccggcatgtaaaccgaatgcaaaaggctatgactaaaatgaatctgttactaactaattcccttagtgatattaccaataaaacggggatatctattataaaagctattattgctggcgaaagagatcctgaaaagttggcttctttacgttcggtacgatgtaaatttacccaagaagagattgcagagtctttaaatgggtattataaagaggaccaattattcctgcttaaaaccaactatgaggcattttgctttttcgatagccaattgtatgaaattgacaagaagataacggacctattagaaacattccctttaaaaaaaggcaaagatgaaatatctccaccatctcaaaagtcgaaatatcaaaggaaaaacaagaatgatatccgaacagataaaaacctgaaagatatgctgtacagaatcctgggaacagatgtgacttcggtcacaggtttacaatctaatactattttgcaaataatatcagaagtaggaatagacatgagcaagttccccacatgtaatcatttcgcttcctatttgggctttgttcctcataacaagataaccggaggagaaattaaatcttccaaaaccgacaggataaagagcacggctgcacaagccttcaggaaggtagtaccggctatatcgcgtactgactctgagctggccggtttttataaaaggattgttcccagaataggaaccggaaaagcagtggttgctgtttgtagaaaattggctattatcttctataatactcttgtgtatggaaatgagtatgtagaatacgggctggaaaaatacaaagagcaaattaaagaaagagaaagaaaattagttatgaagttggctcggaaaaataactgggacattagttgctccttataggacaactgcttcttgataccttagtgatataaataacgacttacagagaagtctgtgagtgtaagtcttataatgtattatcagataaaatacactatttactaagaaattagaagcataatggaccgttcgtttgactgagcacgacggaaataaatttagttcattag

SEQ ID NO: 2522 - DNA, 1406 bp, unidentified
  source 1..1406: mol_type = unassigned DNA; note = element_394a61b
  misc_feature 1..2: note = core
  misc_feature 3..219: note = LE
  misc_feature 220..1320: note = CDS
  misc_feature 1321..1406: note = RE
  misc_feature 14..241: note = bridgeRNA
caacttgttgaattggggtcaggaggggctggtctgcagccatgcttctctaggcgctggccggcttcgctcgcctcccacctgtcgcctgaatgggttgactcagtagtgacctgcgtccggccagcgccgcttcgaggagtggcttgagagaggcatgtgttgctgaaagttgatgtgccctcctcgctttcaacacagcagagtaaggagtggagaatgtcagcggcatcaagtattgaccgacgagtggtgatcgctatcgacccccataaagcgtcgtggacggcggccgcagtcgacgcgtccctgcggcccttggacaccataagggcgccggttacccgtgacgggtaccggtcgctgcagcgcttcgcccgcacctggcgcgccaatatgtgggccattgagggggcacacggaatgggcgccccattgaccgcccagctggctcgcgacggagtgaacgtcgtggacgttccagccaaacttgctgcccgcgtgaggcttctgtccaccggtcacggccgtaagaacgacgacgccgacgctctgtcagtcgggatcgctgctcttaatgccggccacctcacgacggtcaccattgatgacgctgcgactgcgctgcgagcgatcgtcgagcaccgcgaggatttggtgaagacccgcacccaaacagtcaaccggctgcacgtcctgctcaccaagttgagccctggcggagtatcaggcactatgaccgccgaacgtgctgccacattgttacgtacgatccgtccccgcgatgccgccgccaaagcgttgcgcgctttggccgtggacatcgtcagcgatgtccgtcacctcgaccgccggatctccaaagcagctggcgacatcgattccgcggtcaccgcctctggcaccaccctcaccaagctgcatggcatcggaaccatctcggccgccaagatcctcagtcgcgtcggccccatccgcagattccgttcagctgccgctttcgcgacctacacgggtaccgcccccatcgacgtctcctccggggaggtcacacgccaccgtctctcccgggcaggcgaccgtcaactcaacgcttgcctgcacaccatggcgctcacccaaatcagatccaacacccccggacggacgtattacttgcgcaaacgatctgaaggcaaaagcaaacgcgaggcaatgcgctgcctcaaacggcgcctctccgatgtggtctaccgacagctcacacgcgaagccaaccccttaaaggcggacccaggaggacactcgggggcgactctgttgtctcgcgcggtcggctgacaccccatacaccggcacttcagacaagtcacttcccgggcccgcaactacacgctacaacgacggcccttgacacagagaggcgt

SEQ ID NO: 2523 - DNA, 1526 bp, unidentified
  source 1..1526: mol_type = unassigned DNA; note = element_394bcf8
  misc_feature 1..2: note = core
  misc_feature 3..327: note = LE
  misc_feature 328..1401: note = CDS
  misc_feature 1402..1526: note = RE
  misc_feature 12..347: note = bridgeRNA
ctcctacaatatagttacggtgaaaggcacggcagccagccgtgtcttttgtcgactcaaagctgaagctgtagaatgagggagtaaatggcctgacaccgctgaccttgggccaacacgcccgatcaagagtccgtcagccgtctctctcattcgcagcgttcgatttgcgcaggtagagccatctcatcggagtaaacttcacccgttttgccgggtgggttttggcgagactccagacgtggtgcgctcgggtcagtcaggagattgaataagcggcgaggaacagaggcggaggccattggtcaatcacacaggagggaaaccatgaacgcagtaggaattgacgtatccaaggggaaaagcatgatgatggctctgcagccaatgaatcaaattgtgctgaagccaagggaatatccccataccgaggttggtctggagcagatggcccatgacatcttaaggctgggagaagacacgcgggtgatcatggaggccacaggccgttaccatgagccggtagtggcagtcctgcacgagcatggcatccgtgtcacggtgatgaatccgctgttcattaagcagagcggcggtggttctatccgaaaggtcaagactgacaaagcggacgccagaaggattgccaaatacgggcttgataattggacggatctgcgggaatatacacccatggaagcaatcagagagcagttgaagctgatctcacggcagtacgatttgtacatgaagaacgtggtggcactgcaaaataacctcatctctctcacggacaaggtttttccgggggtaaacgagatgttttccagcccggaccgtgccgatggtagccaaaagtgggtggatttcatcatgaccttctggcactgtgaatgcattgccctgatcagcgaggccgcttttacggagcgttaccgcaagtggtgcaagcggaagggttatcatttcagcggctccaaagcggcggatctgtacatcgacagcatcgggcatattacgaccctgcccaagaacagcaacaccaagctgatggctgagattggcgacgtgcgccgcttcccccgccgcagctccattgtgagcttcgccggcgtcgatccggcagtggacgagtccggcaaacacatttccaagagcaatccgaccaccaagcggggttcgccccacctgcgcaagacgctctatcaaatcgtctgcacctatctgctcaaggcccccgctgatgagccggtctaccagttcctggacaagaagcgggccgaaggcaagccgtatttcgtctatatgaccgccgcccagaacaagttcctgcgtatctactatgcccgcgtgaaagagtgtctccttgcggctgacgcccgggaatattctgagcgttaacccgtgctaaaatccacagctcgtgtggcctgcgaaaaattccgcttttgcaggcttggtttgttatacccttttttaccccctcaaaattttctcattttagggcttgacatttatttgcagga

SEQ ID NO: 2524 - DNA, 1488 bp, unidentified
  source 1..1488: mol_type = unassigned DNA; note = element_39600ee
  misc_feature 1..2: note = core
  misc_feature 3..247: note = LE
  misc_feature 248..1468: note = CDS
  misc_feature 1469..1488: note = RE
  misc_feature 6..243: note = bridgeRNA
ctaatgggaggtaccgggtcggctgatcgggcagactcggtacctggtagccgctggtgagtgagcacttccgtccgctggaccgatgtttgagtcctggggtcagaccgtgccctcaccagtgatcaggggtttgatcactgatgggatgtcgtgcccgccctggtggcgtgagtactgatccattagcacgtcgaccggctcctgcgggctgcctgatggcgtcgtcgaggggttggaggatcgggtgctgttcgtcggtgatgaccgggccgaggaccaccatgatgtggaggtgcaggacgagcagggccgggcggtcaagcgggcccggttgcccgagggtgccgcgggggtggcccgcttccacgagctggtcgcctcggtcctgccccaggacgccgaaccggccgaggtgctggtgtgcatcgagaccgaccggggaccgtgggtgcgcgcgctggtcgcggccggctaccgggtgttcggggtgaaccccaaacaagccgcccggcaccgggaggtgatgggcaactccggggccaagagcgacaaggccgacgcgcacgcgctggccgacatggtgcgcacacgccgccaccagctccgccagatcgccgccgactccgatgaggccgaggcggtcaaggtcgtcgcccgcgcgcatcagacgatgatctgggaacggactcggcacatgctgcggctgcgctcggcactgcgggactacttccccgccgcgctcgcggcctaccagccgctcggcctgaccagcacggctgtgctcgccctgctggccaaagcccccaccccgcatgcagcggcacggctgaccgtcacccagatcaccgcggcgctgaagggctaccgcgacaagagcgccaaggccgccgcgatccaggccgaactacacgccgagcatctcgggcaaagcgacctggtcgcgtccgcttacgcggccaccgtggcggcgaccgtcgcggtcctgcagaccctcaacacccagatcgccacccttgaaaggcaggtcgaggcccattttggccggcactcggacgctgagatcctgctcagccagcccggtatcggcgccatcctcggcgcccgggtgctcgcggagttcggcgacgcgcgcggccgctacgccagcgccaaggcccgcaagaactacgccgggacctcaccgatcacccggcaatcgggcaggtccaagtccgtccatgcccggttcatccacaacgaccgcctcatcgacgccctgcacatgcaggccagcgcagcgatcttgcacgatccggccgtccgcgcctactacgaccagctcaaaacccgcgacctcagccacaacgccgccctgcgccaggtcggcaaccgcctcgtcggcatcctgcacggctgcctcaaaacacacactctctacgaccgggcaaccgcttggtcacaccgacaagaggatctcgctgcttgacatcccggctccagggatgt

SEQ ID NO: 2525 - DNA, 1358 bp, unidentified
  source 1..1358: mol_type = unassigned DNA; note = element_39603cd
  misc_feature 1: note = core
  misc_feature 2..66: note = LE
  misc_feature 67..1116: note = CDS
  misc_feature 1117..1358: note = RE
  misc_feature 1131..1352: note = bridgeRNA
taatgggatggcctgccccgccctccagcctcatcgtgaggcgccgttgaagaggaggtgagagcgatgaacaggaccgtaccacgtggcgccgccatctacggcgtcgatctcggcaagaacgtcttccacgttgtcggactcgatgcggacggcgcggtgatccagcgtgcaaaatttcgccgtgagacgctgctggcattcttcgagcaggtatcgaaggtgatcgttggcatggaggcgtgtccgggttcgcagtggctggcgcgcaagcttgaagcgatgggacaccgggtacgcatcgtcccggcccagttcgtgaagccgtacgtcaagtcgcataaaaacgacacgatcgacgccgaggcgatcgccgaagcggtgacgcgtccgacgatgcgcttcacacgcgtgaggacgacggacgaggtcgaccttcaggcacgtcatcggatccgcgatcagctgatctccagccggacacggctcatcaaccaggtccgcggcttttgcctcgaatacggtgtcgcgatccgtcagggcgccggcgtcttctgccgagatctcccaggcgcccttgccgatgaagggaacgacctgacgcccgcgatgcgacgcatgctcgccgagctctacgaagacatcgagcggctcgacacccggattgcggcggcgacgcgcgaggtagagggactggcggcccgcgacgaccgcgccaggcgactgatgacgatcccgggcatcggtccgctcggtgcaaccgcccttctcgcgggggtcggcgatggcacgcagttcaggcgagcgcgcgatctcgcggcctggctcgggctcgtgccgcgacaaagctcgaccgggtgtcggacagtgcttctcgggatcaccaagcgcggtaatcggtatgtgcgccggctgctcgtccacggggcccgatcgtgcgtgacgcatctcgatcggtctcgcgatcggctggggaactggctggatgggctctgcgcgcggatgcacgtgaacaaggtgacggtggcgctggcggcgaaggtcgcacgggtggcgtgggtgatcatcaccaagccgggcgcgacctacgaacggcgggatccggccgtcgcctgacacgcggcggttgggcggaaagcgaggctcgaggaagtgatgacgaaacagtcgatcggcgcgtcgtaagccctgcgcaaaaaagcgtgcggactgcacgaaccattattgggaacgatgcgcgcggatctcatcacggcctggctgcaacagcagtccactcgcgagaggccggatacatttaggcggactgccgtcgtcagaacgaccgagagacttgcccgggcggggcaggccataca

SEQ ID NO: 2526 - DNA, 1209 bp, unidentified
  source 1..1209: mol_type = unassigned DNA; note = element_39633b8
  misc_feature 1..2: note = core
  misc_feature 3..215: note = LE
  misc_feature 216..1187: note = CDS
  misc_feature 1188..1209: note = RE
  misc_feature 12..190: note = bridgeRNA
cttgtatcttgaacgtgttggtggttagctaccaccaactgaggtgaagaccaacttgtgccaacccttacggcattgaccgtgtggcgtagataaagctcttcacctctccccaccccattgcaagacactggacggtatctaagggcaatgaccctgcatgtacaaggagagtgtggagtggacgagggaaattcaagacacaggaggaagtgatgttctatctcggcgttgatgtctgcaaaaagactttggactgcatgctgttcgatacctctacaaacaagtcgaaatcgaagtccataccgaatacaagtgctggctttgtgcaactgcttgaatggttaggcaagcagaaggcactcgatgcacatgtcgtgctcgaacctactggggtttatcacgagccagctgcattagccctgagtgatgcaggcttgacgctgtcgctggtcaatccagctcaggcgcgtcagtttgccttgggcctcggggtcaaaaccaaaaccgacaaggccgatagcatggtgctggcgcgttatggcgcagccctgaagccgcaggcatgggaaccgccatcgaaatcagcccgccgactcaaggcattactggcccggcgcgatgcgattgctgacgatatacagcgcgaggaaaaccggcagggggcagtcgaattcggcgagtcgcctgaggaagtcagagcgtccatcatcaaatccatcgacttcctcgaagctgaactccaggcattggacgcgataattcggaagcacatcgacgacgatcctgatctgcgtggcaataaaaaattgctcgaatccatacctggcgtcgggtctcgtgtttcgacccatatgaccgcgctattcgcggccaaaagctttacgagcgcggagcaactagcggcatacctaggcctggtgccagtgcaatgggagtctggctcgtcggtccgaggaaagcctcgcatgtcgaaagctggccccaagcacctgcgcaagctgctgtatatgccagctgtcactgcgcgtcggtggaacccccatatcagtgccatgagcgaccggctgctcgccaagggcaagactttgatggccgtcatcggggcctgcatgcgtaagctggctcacctatgctacggcgttattaaatcgggcaagccttacgagcgaaatttcggcatgtaaggcttgacaggtgagacggtat

SEQ ID NO: 2527 - DNA, 1534 bp, unidentified
  source 1..1534: mol_type = unassigned DNA; note = element_3972111
  misc_feature 1..2: note = core
  misc_feature 3..620: note = LE
  misc_feature 621..1514: note = CDS
  misc_feature 1515..1534: note = RE
ctaatgagagaagccgggccacttgcttcccttgtgaaaggctcagccgcagcagcggccggcgggtcagcactcgtcctaccagaccaccctttcggggaggtctactggcagatcgtgcgcccgccggttcgccggcgaccgaactgctgatgggatgtcgtgcccgcttcggcgtgagcacttgatcattaggttgcagaggttcccgggttgctgtgacgttgttctgtccggacaccaaggaaggttgttgccaggatgctgttcatcggagatgactgggccgaagatcaccacgacatcgagatcgaagacgcagacgggcggcggctatgcaaggccaggttgccggagggacttcagggtatcgctgccctgcacgctttggtcgcccagcatgccccgccggcctgggttgatttggacccccatcaggtcgctggtcaggcgctcgttggcattgaaactgaccgtggcccttgggtggcggggcatgctgggcggctggctatcaggtcttcgcgatcaacccgctgtcgtcggcgcggtatcgggaacggcattccacttccggagctaagagtgatgccggggatgcgcatgtactggccgagattgtgcggcttgatcgtgatcaccaccgactgattgccggtgacaccgatctggccgaggcggtgaagctggtggcccgtgcgcaccagacggcgatctgggagcgaacacgacacgttctgcgcctcagatccactctgctgcaatactttccggcagctgtggaggcgtttgaggatctggccgcgacagactcgctgatactgcttggccgggcaccgtcgccgatgcgggccgcgaaattgacgcgagcgcagatcgattcggcattgcgtgccgcgcgccggcaccacatcgagacgaagacacccgcgctcatggcgctgctccgggctccggcgttgcagcagccgccaactatcgacggggcattcgccgctgttgttctgggcgaggtccggatcctcactgctttgaacatgcagatcgcggagttgcagttggtggtggccgaccatttttctcgtcacccagcagctgagatctatctcagccagccgggttgcgggccgattctggccgcacgtgtcttgggagaattcggagacgacgcagaccggttcaccgacgcccgcggacggaagaactactccgggcagagccccatcaccagggcgtccgggaagaagagcgtcgtcatggcgcggtatgccaccaaccggcgactcggtgcagcgctgcacctgcaggccttctccgcgctgacgggatcacccggtgcgcgcgcctactatgacgagttgcgtgccagaaaaatcggccaccacgcggccctgcgccaactcgcgaaccggctcgtcggcatcctgcacggatgcctcaaaaccgccacaaaatacgacgaggacaccgcttggcagcatcgccgccccgacattcagaccgttgcagcttgacatgaatcggcatgggatgt

SEQ ID NO: 2528 - DNA, 1490 bp, unidentified
  source 1..1490: mol_type = unassigned DNA; note = element_397575f
  misc_feature 1..2: note = core
  misc_feature 3..251: note = LE
  misc_feature 252..1469: note = CDS
  misc_feature 1470..1490: note = RE
  misc_feature 7..236: note = bridgeRNA
ctaatgggggctaccgggttggcctgcaggggcagactcgggtccggtagcgctcagcgggtgagcacttgcttagccaggcagccgatgcctgaacgtagactgtgcccccgctggccgcgaggaggacaagaccgctgatggggtggcgtgcccgctggtggctggcgtgagcactgatccattaggccgctggcgttccttctccgtgctgccgctgacgtccaggtgccggggtgcgggaggtggcagtgctgtccgctggtgatgactggtccgaagatcaccatgatgtggaggtgcaggacgcgtcgggccgggtgctggggcgggcccggctgggtgagggcgtggcgggggtcacccggttccatgagctgatcggccggttcgctgatccggatgccgggccggatcaggtgatgatcgggatcgagactgaccggggcccgtgggtcgccgcgctgatcgccgccggttacgtggtgtatgcggtcaacccgcggcaggcggcccggtaccgggaacggcaatcgacctcaggagccaagagcgacgccggggacgcgcacatgctggcggatatggtgcgcaccgactcgcaccagttgcgggcggtggccggggatagcggcgaggctcaggcggtgaaggtggtggcccgcgctcatcaggccctgatctgggaacgcacccggcatgtgctgcggctgcgctcggcgctgcgggagttcttccccgcggccctggaggccttcgatgacctgaccgctcctgatgcgctggagctgctggcccgggcggcggacccggcgagcgcggcacggctttctaccgcgcagatcatcgcggcgctgaggcgggcccgccgccgcaacgccgcgcagaaggcggcgcagatccaggctgtgctgcgcggccagcagctgggccagccccaggtcgtcgcggctgcctacgccgctacggtgcgggccgccgtggcggtgatcagcgtgctgaacgaacagggcgcggtgatggaggctcaggtggagtcccattttggccggcacccggacgctgagatcatcgtgtcccagcctggcctggggatggtcctcggtgcccgggtgctcgccgagttcggagacgacccggaccgctatgccggtgcccgggcacgcaagaattacgccggtaccagccccatcacccgcgcgtcgggcaagaagaaagccgtgctggcccggtacgtgcgcaaccgccacctcgccgacgcgctccatcagcaggccttctgcgccctgaccgcctccccaggcgcccgcgcctactacgaccagatccacgcccgcggcaccagccaccatgccgccctgcgccagctcgccagccgcctggtcgccatcctgcacggctgcctcaaaaccggcaccacctacaacgaggcaaccgcctggcagcaccggctcgacgacgccgcttgacaaccaagcgccatggggagt

SEQ ID NO: 2529 - DNA, 1383 bp, unidentified
  source 1..1383: mol_type = unassigned DNA; note = element_397d4dd
  misc_feature 1..2: note = core
  misc_feature 3..78: note = LE
  misc_feature 79..1128: note = CDS
  misc_feature 1129..1383: note = RE
  misc_feature 1100..1370: note = bridgeRNA
tgttggtgtggacggcctccgtacggcatcgatgtgccagaatgagttcgttgagatctcagacaaaggagaccgtccatggaagatattatccgaattggaatggatacgtcgaagcatattttccagcttcatggggtaaatgcggccgaggaactggtcttgcgcaagaagctgcgacgcaaggaaatgatgaagttttttgaggtgttgcccgcaacgcaggtcgcgatcgaggcgtgcggtagctcacatcactgggcccgtctgctgcagtcgtttgggcatgcggtgaagctgataccaccgcaatttgtcaaaccgtacgttaaaaggaataagaacgacgccgcggatgccgaggcactttgcgaggcgatggaccgcccgactatgcgcttcgtgccagtgaagaccgctgagcaacaagccgcattgatgttggttgggatgcgcgagcggctggtgcgcaatcggacgcaacttagcaatgctatccgcggctatgcggcggagtttgggataacggcttcaagggggctaatccgaatcgagcagctactggaacgcgtcgcgaccgatgagacgctgcctgcactggcgcgggaactgttcgggcttcatgccaaggagtacgagcagctgaaggcacggattgaagaggtagacgccaagctgatggcgtggcaccgcgccgacgactgcagccagcgcctggcccagatccccggcataggcccgattggcgcgtcaatgttggtcatgaaaacgccggcccctgaaaccttccgatcggggcggcattttgctgcctggctcggtttgacgccaaaagatcattcgactgctggcaaatctaggctaggcggtatcagccgtgcaggcgatgaggctttgcgaagtgttctggtgatggggtctacatcggctctgcagaaagttcgacgacagcagggaggggcttgctcgccatggctcatggagttgctgaagcgcaagccacccaagctggtggccgtagcgttggccaacaaaaacgctcgcatcgcctggaagctcatggtgagcggcgagcgctaccgacctgccaaacccattacaggattcaactcgacacaggcggcttaacaacgcgctcgtgtcgagatgatgcggaacttgcaagaaacgagaagttggtgtgatcgatcgatccaacacgcgagacactccgaattgtgcaccggccgttagaggccgacttagtgttaggaactcgcgttgcggaaaaccatcttggccagcggtcatgtgcgaccgcacaaaacaggccggacatatgatcgcaagcgatccgatcaaatctctgctcaactatcttgcaaggcggaggccgtccacata

SEQ ID NO: 2530 - DNA, 1511 bp, unidentified
  source 1..1511: mol_type = unassigned DNA; note = element_3981ade
  misc_feature 1..2: note = core
  misc_feature 3..94: note = LE
  misc_feature 95..1189: note = CDS
  misc_feature 1190..1511: note = RE
  misc_feature 1208..1467: note = bridgeRNA
agacaaaatagcgccccttctgggcttgaaaagcgtgggttagatgcaagatttgcatttaccacaaaacaagaaaaccaacagaaggaacgtaatgaaaagaaaagtgtatgtaggaatggatgtccacaaagaaacgatccaaatcgcgattttaccgagtaatacaaaggctttagtgaaggaacagcaaatcaagcatgaagaaggacagatcaagaagttcatccaaaagctaaaatcggaagggactgaaatccattgttgttacgaagcaggggtgacaggttacccactttacagatatctaaagactttaggagtgaattgtatcatcgcagcaccgggaaagataccaaggcaaagttcggataaaattaaaacggataaaagggatgcgatcaaattagcgagattattgcgaagtggggaattagaatcgatccatgttccgagtgaagaagacgaagcggtaagagattacttgagatcccgggacagtcttcgtttggatttgggaagaaaccgtcagaggttgatgaaatttcttttaagaaagggaatcaagtattccacaaccaagtattggacggcgagtcattacaaatggttgaacaatctacactttgaaaatgagatacttcaagcaacgtttaacgactattacagcagagtgagagttcaggaagagaatctgaaagcgatggatcaaaagatacgggagatagcggagagtgaaccgtatcgtgagaaggttggaatcttaagatgctttcgaggagtggattatctaactgcaatgtttttactcagtgaggtaaatgatttcaaaagattcaaaacggctggttctttcatgagttttctcggacttgttcccggagaatattcgagtggttccaaaagaaaacaaacaagcattacaaaaacgggaagtcccagacttcgaaggattctggtagaagctgcttggcaacatcgatttcctggaacaggaagtaaggttgtagtcgcacgaagagtgggtcaatctgcgttagtcgtttctttagcggaaaaagcatccttaagattacacaagaagtttaaaagtatgcagctaagaggaaaaactcctcaggtaatgataaccgccgtctcaagggaattatccgggtttctttgggcagcaatgaacttggttgcttgaattggagtaatatgtgatagttcatcaaatggttttattcgttagagaagatgacacgataaaggagaaattcttgtgagttccttgttgaagcaaatttgaatttcaaatttgatcttagaacgcgatccatagagagcgttctgctgagttatttttgtagactaagaacagctcccgatgtatagattatcctgcggtatccaaaacccgcgaatatcagtctgatcaatcgtcgcgaaggcttttctctaacgagttaaactatttgatgagatatatgcgaaaaaagatttactgctccagttgggggcgccatatc

SEQ ID NO: 2531 - DNA, 1393 bp, unidentified
  source 1..1393: mol_type = unassigned DNA; note = element_3989179
  misc_feature 1..3: note = core
  misc_feature 4..87: note = LE
  misc_feature 88..1116: note = CDS
  misc_feature 1117..1393: note = RE
  misc_feature 1087..1380: note = bridgeRNA
agatgggatggttgccgccctcccccgacggcatcgcgatgtgccaagatcgtggtgttcaacgccacgaaaaggagaggacggcaaatgaaagatacaatgatcggcgtggacctggcaaagagcgttttccagcttcacggggccgacatggccgggcacttgaagttccgcaagaagatgacgcgagtccagttccgggattttctggcaaagcacgaacccgccgttgtggtgatggaggcctgcggcagcgcgagctattgggcgcgggaagtggccaagcttggccatgaggtccggctgatcgcgccgcaatatgtccggcccttcgtgaaacggcagaaaaacgatgctgctgacgccgaggcgatcgtcgtagcggcacagcgccccgagatgcgcttcgtcgagccgaagtcggaagaccagcaagcttgcgcggtgcttttccgggcgcgtgaacgacttctccatcagcgcaccgaactcgtgaatgccctgcgttcagtgctctacgaatatggccatgtgtttccgagaggtctcgcccatctcaagcggatcgaagcagtccttgcagagcctgccagcgacttgcctgcgctggtgcgggaggagtgccaggatctgcttgagcagatagccgagcagacaacccggatcgaagccaagacggcaaaggcccggaatcttgctcggacaaatgatacggcgcggcggctgcaaacgatgcccggcgtggggccgcagacggcgttggccatcaacagctttgctccgcccatggagagtttcaagcgcggccgagattttgcggcctggctcggccttgtgccacgccaatacacctccggcgggaaggaacgcctggggcgcatctcgaaagccggccagaccgacatcagatatctgctgatcatcggcgccatgtcgcgcctgacagtgctggcccggaagtcgatccaagagggctcatggctggcacgtatgctgcaccgcaagcccctcatgctggtcgccatcgcattggccaacaagatggcacggactatctgggcgatgatgacaaggaaggaggattatcgagatccggcgtcggcagttcccgcatgagggccgcaagccccgtgcgcgctgagcgccggtaaaggaggtgtgagaagtcgatgacctgaatgggcacaatgatcgaaaagatctgggttgggaaaaccagacatcgttctcgagcggcagagctcttgcagaagatatggacccgatccgcagatcgccatcccggccagcggcttctcgaacggccgcactcaaaaggcctgagagaagaacgcattcgatcacctgccccgaccggccaaaagcaacttgcaccaagggcggcaaccagaga

SEQ ID NO: 2532 - DNA, 1378 bp, unidentified
  source 1..1378: mol_type = unassigned DNA; note = element_3999b33
  misc_feature 1..2: note = core
  misc_feature 3..86: note = LE
  misc_feature 87..1118: note = CDS
  misc_feature 1119..1378: note = RE
  misc_feature 1148..1366: note = bridgeRNA
tgatgctgtggacggctcctccaccggcacgtgagtgccatagacgtgggtgctgttgaagctcccacgattcggaggagctaaacatgcaagcgatcacgacaatcggtctcgatatcgcgaagtcggtttttcaggtccatggcgttgacgctgacggccaggtggttgtccgccggcagttgaagcgtcgctatgtcctcgcgttcttcgagaagttggctccatgcctgattggcatcgaggcctgcgcgtcatcccaccattggtcgcgccagctacgggcactcggccacaccgtgcggctaatgccaccgagctatgtgaagccctatgtcaaacgacaaaagaacgatgccactgacgctgaggcgatatgcgaggcggtcggcagggccaacatgcggtttgtgccgaccaagacaccagaacagcaaagtggtctggtgctccatcgcacgcggcacttgtttattcgacagcagacctcggtgatcaatgcaatccggtcccattgcgctgagtttggcatcgttgcgccagtcggccgtcaaggtgttgaggaactgcttaatgtcatcgccaatgcgaatgacgagcagattccagagatcgcccgtgcctgtttgtcagcgcttggcgatcagctccataggattaaagcgcagattctggagttcgaccgcatgatcggggcttggcatcggtcctgtgaggcaagcagacgactcgatgagattcccggtgtcggcccggctctcgccaccgcgcttgtcgccagcattgccgacccgaggacattccgatcagggcgagacttctcggcctggattgggctggtgccgaagcagagctcaagcggaggcaagccaaggctcggtagcatcagcaaacagggcgatcgctatctacgtggcctgttcacagcgggtgcactcgcagtcattcgctatgccaagacccaccgtatcggacatcgaccgtggctcaccgcattgctagcgcggcggccgaccaaggttgccgccatcgcactcgccaacaagatcgccagaatagcttgggccatgatggccaggggcgaacactatagagaacccgtcgcacttgcggcgtgaatgagatcgcgtcgacatccggcgtgatgtgaaagtgggaagggcgaacagcacgtaatgcagagccggtcgatccggcgatcaggacaacccacttgtgccattgcattttcgaatgcgggttattgaccgggacctgatccgcggagggcattatggccagcggtgatgtgaaccgcacttaaaggccgaacacatggctgcaccgacctagcctgcaacgtgaagattctccttgccaactcggagccgtccacaca

SEQ ID NO: 2533 - DNA, 1738 bp, unidentified
  source 1..1738: mol_type = unassigned DNA; note = element_399ac73
  misc_feature 1..2: note = core
  misc_feature 3..315: note = LE
  misc_feature 316..1473: note = CDS
  misc_feature 1474..1738: note = RE
  misc_feature 73..279: note = bridgeRNA
ctcttacctttgcaccagattatagataatgttctaaatgtccgatgttaaacatcgtataagtttgggacatgcggtcacgattttgtagttttgctagagattgtggccgtggaggacgagagcaggctgagctaggtaggtctttgcaccatgtcgtgagcaagaacttcgcccgtcctcctttaaagtctttagagtctggacaaagaatcgaagcacgtcactggacgatgctgtgtccgataagagtaaagtcgatgaagattttggctatagtctaactttagtattaatcctttaatagttatcaagatgaagccaaattcacagatgacattgggagagtccttccggcaatgtgtcggtatcgacatctcaaaagacaagttcacagcctgcctgtacatgtacgacagggcaagcgacgtgggctgctgcactaaaagtatcgacttcgccaatacgaagtcaggttttaaccagatggtaaaatggagccgtaaggaggccgtaaaagagtatcctttggtctacctcatggaacctacaggcatatattacgagcgtttggcttatcaccttcacaagataggccagacactctacatagtgcttccaaacaaagctcgcacgttctgtgaggctgagggtctcaagaccaagactgacgctgtggatgcgcgctgcctggcactgatgggttgcaccagtcgaaaacttcgtccttggtctccgccaaaagccatctacagcgaactgcgtcagctgacgcgcttccatgccgacctctgcaaggttaggacttcggtaacgaatcgccaggaggcactgctccacatggaagatgcagccaagggcgttctgaagggctgtgagaagctgattgcagagattgacaagctgctggaaaagaacgagaaggacataaatgacaagcttgcccaagacaaggagctgaaggctaagatagaacgcatcaccactgtcaaatgcatccgcatagccaccgttacatgtgttgttgctgagacacaaggtttccacctcatcaacaaccgcaaacaacttaccagttttgcgggattggacgttgtcgctaagcaatcaggaaaggaagatcccaaacatgtcatatccaagaagggtaacgcccacatacgcgcagcactctatatgccagccctgagtgccacattccacaacagacagatgaaggctgtctatggaaggatatgtcagaagcacccgaatgaaaagaaaatcgcagtaattgccgtcatgcgtagaatgctgctactcatatatacactgtggaagaacggggaagtgtatgacgaagaaagagacaccacacacacgttgagaaagaaagattttgtggcggaatacacaaaggaggactgtatgggaacaattcaagaacctgtagactggaatactgtggatgaaaacggtgagccgcctttctaacaaaagtggctgcgcccaaagctacagccacacgagatagtacagaactggaatataccagcgacttcccttagtggctgcaaaggtaattaaattctgcgaaacgacaaaggaatagacaaaaaacatatcgattactatttgtcctgatccacaattcacatgtgaaacagggcatggaaggcacgctcctatggtcaaggaataactaaactgttaaaatgttctatttttcttcccttttctttggagattaacacagaat

SEQ ID NO: 2534 - DNA, 1577 bp, unidentified
  source 1..1577: mol_type = unassigned DNA; note = element_399cde1
  misc_feature 1..3: note = core
  misc_feature 4..245: note = LE
  misc_feature 246..1448: note = CDS
  misc_feature 1449..1577: note = RE
  misc_feature 8..224: note = bridgeRNA
gttcgtattataaggttagccagttttttgctggttgacctttttttaatagaatctattatatcagtagccagggtaggacgtacgggtgcgtgggacatgatctcgtgaagtaaactgtccgccacctacttgtagaaacatgtttgaggctggttgggacgtagatctcgtataacaagcgaagctatgacactacatgaaggactaggggtactggttaatatatagaggaggaaaaaactatgaattcagtagttggtctggatgtggcaaagggagagagccaagttcaggcatttttagatcaatcagaaccgtatggaaagagcttttctataaagcatactagagaggaattagatcgttttataggatttttaaaagaaatcgaagaggtgacggcgaaaatgcctatgatcattttagaatctacagggcattaccatactcccgttattcaatacttggaggaacaaggggttctatatatcttactaaatccgattatttcttatcaggcaaagaagtccagtttacggaaggtaaaaacagacgcaatcgatgcgtaccagttgtgtgtgctgtattacaaagaggattttgaacctcataaaattagaggaattcagctgttagaccttcggaatttgtcaagacaacaggaaatcgtaacgaatatgtatgtggaagctaaacttcagtttcatactattttagatcaagtgtttcctgaataccgaaaggtttttggcgatttatattcaaaggtttcattattgatgttaaaggaataccctacttcagaggcggtattaacagtcggggaaagtaaactagcagagagtgtaatggagttctgtcctagccgatctggtcaatgggcatgggaaaaagccaaaaaaataatggattccgcatctcgaaatccatttggaacaagcgtgtatcaaagtcacttaattaatctgcgtatgtatattgaattgctttttcattaccagggacacctttctgatttggaagatcgtatagttgccctggcaaatgaaatggaagaatataagatgatccaatcgattcccggtatcggagaaaaaatcgcagccacgattatctctgaaattggtgaaatcgatcggtttaatcatccgaaaaaactagttgccttcgctggagtagatccaagtgtccactcatcgggtaagtttacggcaaccattaatcgtattactaaaagaggttcgagcagactacgtcattctctgtatcttgccgttttatgcggtataaggagttcaagaaacaaaaagcttaaagcgttctatgataagaaaaagtcagaaggaaagccagccaaagtggcaatcgttgcctgtattaataaacttcttcattggatttacgctttattaaagagaaaagaaatgttcctagatttagcctaattaacggttttgtgaaacagagaaaaatccttccaaaagggttttggagggttatttgttatgaccaaaaatagtatatcataagggaaatgaaaattttagagaaagatattgacatcctattagctg

SEQ ID NO: 2535 - DNA, 1933 bp, unidentified
  source 1..1933: mol_type = unassigned DNA; note = element_39a9525
  misc_feature 1..2: note = core
  misc_feature 3..274: note = LE
  misc_feature 275..1513: note = CDS
  misc_feature 1514..1933: note = RE
  misc_feature 14..294: note = bridgeRNA
ctactacaatgtatttatggttagtattcctgacatccagccaggatgttacccatttcgttgcctaagctgttagaatggtggtgcaatcggtctggcacagggctcccaggacctggcgtccgttcttaagtctgccagccagcccccattcccagcgtccgttttacgcagattgaacccaaaggcgttcgtgtaaggcccagtagattggacaggcaatggataaaactggcaacggccattgctaatacattacaaaggagcatttcttatgaacgctgttggtattgatgtttccaaaggtaaaagcactgtcaccatctgcaggcccggcggtgttgtccttatgcccccgtgtgacattccacacacacaatccgcggtcaatgctttcatctcacagctcagggggcttgacggcgaaacgaaggtctgcatggagcacaccggaaggtactatgaaccggtcgctacatggctctccgatgccggtatcttcgtcagcgccgttaaccccatcctcatcaaaggctttggggatgattccctccgttctcctaagaccgacaaggccgattccaaaaaaatcgcccgctacacccttgaccggtgggaaaaactgaagcagtatggaagcatggataaaacacgcaacctgttaaaaaccatgaaccgccagttcggtttctatatggaccagaagaccgccatgaagaacaacctcattgccctgcttgaccagacctgtccgggtgccaatgacttctttgacagccctgcacgcagcgacggcagccagaaatgggtggacttcgtccatacctactggcatgtggactgtatccgctctaaatcactggatgcctttacagagcattaccggagctggtgcaaacgcaaaggctatcatttcagcgcccggaaagcggaaaatatctatcatttctcctctgacctaatcgccgtattcccaaagagtgacaatacaaagatgctcatccggcaggcagtggctgtgcttaacagtgcctcccggacagtggaatccctccgcctggaaatggataagaccgcttccacactgccggaataccctgttgtcatggctatgggaggcgtgggccctacccttggcccccagctcatggcagagatcggggatgtaagacgcttcacgcaccgcgaggccctgactgcttttgcaggcgttgacccccaaaaggacgattccgggcagcgcgtccgtaaaagtatgcctaccacaaagaaaggttcaccctgcttgcgcaagacgctcttccagatcatggacggccttatcaagcgttccccggccgatgaccctgtttacgccttcatggataagaaacgggcgcagggcaaggagtattacgtctacatgacagcaggagccaacaagttcctccgtatttattacggacgggtaagggaataccttgccttactgccccaggcatccgacagggaggagggggataatggaatataaaacatacccctgcgaagtgaagttcaaatacctggtccgcaggaagctgtctgtggtggccggttttttctgtgaaaaagatgggctggactatgccatggccatcggagggagcgtcgtaaaagctgcggaaccccggcaatgccggaagggtcccgaaattttctgaccgtgagaaagaggccatcagggaacggatttcccatggcatcccagtacgccgtgttgctgaagaattcagaagctccgcaggctgtgttcaaaaaataaaaagtgggcattccctgtgggagggcgcccaaatagctttcttttttccttaagccagcgtaaaccggtggcttaatgtttatgacttaatttcaacctgtataaatttttcaaagttcacaaatttatgcttgactttttatttgcaga

SEQ ID NO: 2536 - DNA, 1471 bp, unidentified
  source 1..1471: mol_type = unassigned DNA; note = element_39b2162
  misc_feature 1..2: note = core
  misc_feature 3..248: note = LE
  misc_feature 249..1454: note = CDS
  misc_feature 1455..1471: note = RE
tctaccattggatttttcgcggagacagccacgcctccggtgaggtagactgaccttgacgggggtgtggctcacggggtccgcggtctttgaccgctcggctctgaagtgccgcccccgtcttcgtctgccatccaggagagtccaacgggatggtgccagctgcgcggcgaggccgagcagtccgtggctctgagcagtagacgagatcgcctggatgtgcgaactcagactgcaaggaggcacgtatggatcctcacctctgtgttggcatcgatgtcggttgcagatcacatcgtgtgggtatcgctctcccagatggctggatcctcgaggagttcgacatctctcacagcgatgccggcttccaggagttcttccggcgcgtcgaggtacaccgctgtgagctgtcgcttcctgtcgctgttgcgatggaagggtacaacgggtatgcacgtcccctggatcagcttgtccaggacaagggctaccggctgtacaacgtcaacaacctgaagctcgcacgcttcaaggaggtcttccccggcgcggccaagaccgatccgatcgacgcccggaagatcctcgagctgttccgtctcaaggatcagctccctcttgccaaggatgccatccaagaggtactcagtgcgcctgtcgtaaacgagaagctcaagcgactcagccgccgtagacgccatctcgtgatcgagaagatgcgcgtgttgaatcggatgcaggccgacctccaagcggtctgccctgagctgcttgccgcgacgaacgatgcggacaacctctggttcctccgactgctgaccttcggcgatgatttgcggcagctggcacgtctgcgtccctcgacgatccttcagatccctagtgtagggcagaagtacgccggcctgattcagcagtggcaagtcaaggcgcagttctcaggcgaggttgagtacgtcggaccgatgatcatccaggatgcacgacggatccttgagctacgagagcagattcacgcgctcgatgaagtcatggccgagctggcggatcagtccgagatcgcccggcgcctgtcgacgattcctggcttcggcaagacctcgatcgctgagctggcaggagagatcggcacgatggagcggttcgcgtccgaggcgagcttggcactgtacctcgggatgtgtccgctaacgcggcagtctggacagatgtgtactgcgagagcgcctcggcaggtgaacacacgctgcaagtccgcgatgatgacaaccgttgccaggcacatcggttgcgttcctcagtcgagggcgtactacgatcgcaagcgagccgagggcaagactcacaaccaggcgatccgctccttgggaagacacttggtgcgcgtcatctgggcgatgctacgcgacgggcggaattacgagacccgggaggatctgcaccccaccacttgacaatccaagagggatgt

SEQ ID NO: 2537 - DNA, 1421 bp, unidentified
  source 1..1421: mol_type = unassigned DNA; note = element_39b2934
  misc_feature 1: note = core
  misc_feature 2..128: note = LE
  misc_feature 129..962: note = CDS
  misc_feature 963..1421: note = RE
  misc_feature 1186..1419: note = bridgeRNA
atgtaatggatgcctccccctacaggaccggcagcggggtgcttcagaagggagtccccgcttgatccggacggcatcaaggtgccaaggtggaaatttatccacgtaaaggacaaggaggactcgtcatgcaggttacaacatacggattggatttggcaaaaagggtcatgcaactgcactgggtaaacctggagaccggcgagattcaccgcaaacagttgaagcgccgtgcactcctggagtttttcgccaaccgccaaccgggaatcgtggcgatggaggcttgcggtagcgcccactattggggacgggaattgcgtaagctggggcatgaggtccgcttgattgctgcccagtttgtgcgtcccttcgtgaagaccaacaagaacgatgcggccgatgcggcagcgatctgggaagccgtacagcggcctgatatgcgcttcgtggcggtcaagagtgaggaacagcaatccgttctgtcgctgcaccgtatgcgggagcaattgatcaagatgcgcactatgcaggtgaaccagatccggggcctgctctacgaatttggtgctgatctgccgcagggccgccagcgggggctgaaagaggttcctgatgctttggccgacctggaaaaatcgatatcgcccatgctgcgggacacggttcgtcagcaattaaaacgtcttgaagagatggacaaggatattgcggatatcgaaaagcgtttgacgctgtggaagaaaggccaagaggccgtgactcgattgatggctatccccggcgtggggctacttacggcaactgccattatcgccaccgtgggagatatgaagtcctttcgttcaggacggagtttgcggcgtttctggggctggttccccgccagagtgggaccggtggcaaggtccgattactggggatcagcaaacggggggatacctatctccgaacattgctgacccatggagccagggcggtggtgaacttccagatcaagaatcggaatccctggattgacaaactgctcagtcggcgaccccataatgtggtggtcgtggcacagtccaacaagatggcgcgaaccatctgggcgctgctggtgaaaaacacagaatatgtggccaatcacgctaggaatgcggccgccctatagtaacagttacaggattgttgacgttcagcaaaaggagttgcgcaggcggtacacgattgatggcaaaacaggtcagaccgcaggaaagggaacctggaagctctctgtcctaataaggacgctttagagatgaggactttcctggcggatttcatcagggccagcaggcttaatgtcctgcatcaaaggccggatataagactgcaacccgacctcaacatgtcagacatcgcaatcctcttgcacacatggaggcatccatata

SEQ ID NO: 2538 - DNA, 1196 bp, unidentified
  source 1..1196: mol_type = unassigned DNA; note = element_39b4cc5
  misc_feature 1..2: note = core
  misc_feature 3..176: note = LE
  misc_feature 177..1193: note = CDS
  misc_feature 1194..1196: note = RE
  misc_feature 33..194: note = bridgeRNA
tcctttagacttgtatagttatatttaacaaaacaaaagagcagaacttaagtacactataatcactcagaattcacaaattcattattcgattcagacttaagttcgttctttcatcagcaatctcaaatagaaattcgggatttaaagcccattatcaaggagttgagttattgatgaattgctctttatcaaagtcaaacaaagttatgaaaagtatttatgtagggattgatattagtaagaaaactttagacatttgtcttattgatcaaggattagaatcctattttaagattactaataccattaaaagtgttgctaaatttttcaaaggtttagctgaaaaacaggttcaattttttgtagcaatggaaaatacaggtcattataactataatctttatgaagtattgaagtgctattcatttaaagtatatgttgtagattcaagacatgttaagaaaagtatagggttagctcgtggaaaaaatgataaagttgatgccaagcgaattgctatttttatagaaagaaatcatcaagattttcaatgttggaaaccagctagtaagcaagtacaagctattaaaattttattaagtcaaagacgtcataaagtcaaagccagacaaggtttgaagcaacaaaataaagaactcaaaataatgaaagaccttgcttgtgttaaaaaaattattagtatcaatatggaacaaatcaaacagcttaccagccatataaaaacattagaaaaattaattgagttagaaattaaagaagataaagaactccatcaaaatataaaacgaatcaaaacagtaccaggtataggacctataagcgcttggtctttagtggtaaaaacagaaggttttacacgattaaccgatccaagaaaacttgcttgtttcactggtgttgtaccttttgaacaacaaagtggcactagtttaaaaaccaaaccaagagtctctaagatggcagataaacaactcaaatgtgtattacaaatggcagcgatgagagctgtgagaatggaaaatgatttacaaaaattctatcttagaaaagtcaaagaaggaaaaaataaaatgagtgtattaaatgcagttcgcaataaactaatacatattacaatggcactaataaaaaatcaaactttttaccaaaatcgtttgcaaatgtcatagaaa

SEQ ID NO: 2539 - DNA, 1425 bp, unidentified
  source 1..1425: mol_type = unassigned DNA; note = element_39c35e4
  misc_feature 1..2: note = core
  misc_feature 3..75: note = LE
  misc_feature 76..1182: note = CDS
  misc_feature 1183..1425: note = RE
  misc_feature 1161..1414: note = bridgeRNA
tgttggggtggacggccccgcggcatcttgtgccaaggtttggttgttaatatccgaacctgaaggaccgtcctcatgaactttaagcgcattggcctcgacacgtccaaggctgtgttcacgctgcatgacgtcgatcacgacgaaaaagccatcttgcgctgcaacctcaggcgggccgagatggaggcgttcttcgccaagctgccgccgacgcacgtggcattggaggcgtgcggcggctcacaccattgggggcgccggctggtggcgctgggccactcggtgcagctgatcccgccgcaatacgtcaagccgttcgttcggcgtggcaagaacgatcgcaacgacgctgaggcgatcagcgaggcagcagcgcggccaggcatgccgagcgtggcggtgcggttggccgagcagcaagctgaagcgatcgtgctttcggcgcgcgagttgctggtgcggcagcggacgcagttggtcaacgcggtgcgcggccatgccgccgagttcggcatcgtggcggccaacaacaccagccagctgccagcgctacttgaggccgtggcggccggggaggctgtgcccgacgcagccaaggagatgctggcgtttttgggcgggcaaatggctcagctcgacgcgcggatcggggagctggaacgccggatgaagcaacagcagcacaagaccaacccggttagccaactgttggccgaggtgcccggcatcggcccgatcggcgcgttaagcctggcgctgatgatcgaccctggccggttccaatccgggcgacacttcgcggcttggcttggcctcgtgccgaaagagcactcgacgggtgggcgccaacgcctgggcggtatcagccgagccggcaacgaacggttgcggcagttgctggtgctgggggcaacggcggtgatccaatatgccaggccgggaagcaaaactgcttcggcctggctgctggccttgctggagcgcaagccgcgcaagctcgcggcggtggctctggccaacaagatggcccgcatcgtgtgggcgaagctggtaaaggttccaactgatcggcttcgatcggttggaatgccagcggagggcatgatggcgaccggggaagcgtatcgggggagcaagaaggtcgccacgcaggcggccggagctgccgcgaccgcctgacccgttcgcaggtgctagggtgtaagaagagctgcaggagatgatgatcggtcgatccgacgaacgagtgaacccgggacgcgcaacggccggtcgaggccgcttgattgttgtggtctcgttcgcggaacccatctgggccagcggtcattgtgccgcatcaaaagccggacacatgaccgcaatcgcaccgcttgtcagactcagcagcagatcccttgcacccaaagggccgtccacaca

SEQ ID NO: 2540 - DNA, 1455 bp, unidentified
  source 1..1455: mol_type = unassigned DNA; note = element_39c67c7
  misc_feature 1..2: note = core
  misc_feature 3..143: note = LE
  misc_feature 144..1190: note = CDS
  misc_feature 1191..1455: note = RE
  misc_feature 1210..1453: note = bridgeRNA
agatgtaatggacgccctcccttcttagaccgccgcgtggtgattgaggtgggcagtggaagcggcccccttggatcccgacggcatcagatgtgccagagtggaagtgtgtgtcatccacttaaaggtcaagggggcctgtcatgaagggtacgacgatcggattggacttggcaaagcgggtgtttcaggtgcatgcagtggattgcgatacgggtgagattgaccggcagacgctcaagcgcagccaggtgctgaagtattttgtgaaccagccggcgagtgtcgtggcgatggaagcgtgcggctccgctcactattgggcgcgagagctggtaaagctcgggcacgaagtgcgcctcattgcggcccagtttgtgcgcccctttgtgaagggcaacaagaccgatgccgccgatgcgcaggcgatctgggaggcggcgcagcgtcccggcatgcgctttgtagcgctcaagaccgaggagcagcaggcggtgctgggtttgcaccggctgcgcgcgcagcgggtaaagatgcgctgcatgcatgtccatcaaatgcatggcctgatgggcgagtatgggattgctttgccgaggggctgggcggtgatgttaaagcaggccctcgaggtactcggcgggtcagaaggcaaccccattcccgcactgctgcgccctggactgatcgagcagattcagcagatccgcgccttgagcgagcagatcaaaacgctggagcgccagatcggtgcttggcagcgccgagccgaggactgtcaacggatcgcagcgattccaggcgttgggttgctcaccgcaaccgcagcggtcgccacgatgggcgatgcgcacgcgtttcgttcgggacgtgagtttgccgccttcgtgggcttggtgccgcgccagtcgggcaccggtggacgagtgaagctgttggggatcagcaagcgcggcgatcgatacttgcgcacgctgctgatccatggggcgcgcacggtgttgagctggcagcgccagccgggacgggagctcgacccctggctcaaagggttgctcgcaaggcgagcaccgaatgtggtggtcgtggcgctggccaacaagatggcgcgcatgatctgggcgttgctcgcccacggcagaacgtttcaaaggggctatggtcgggcgatggcgcccaccgcagcatagtcaacgtttttaactggaagggtggaccgccaaaggttgcgcgggtaaagcatcatgtgatgacagagcaggtcggaccgtgcgggaacaagcctgaataagccctcggacctcgagtccttttaagagatgaggcttccctcagcggatttcatcggggccagcagagtccaatctgcacaacaggccggatgtaagactgcaaccgtacctcgtgcgtcaccacagaaaagctctatctcgcaaatcgggaggcgtccatgta

SEQ ID NO: 2541 - DNA, 1204 bp, unidentified
  source 1..1204: mol_type = unassigned DNA; note = element_39c9985
  misc_feature 1..2: note = core
  misc_feature 3..223: note = LE
  misc_feature 224..1201: note = CDS
  misc_feature 1202..1204: note = RE
  misc_feature 32..198: note = bridgeRNA
cttgtatggttctatagccctcaccgaaatgtgttcggtgggagctggggatagggacacacccatccatcagccgttccagcggactgacgtcggtagatatcccaccccgcccaaacacgtcgattaagaatctagcggccaggaccgccgattgatcgcaaggtaacgcatcgggcgaggcttccccagcaggcttaacgctagcgcaaggggtctacagatgcaaatcgcatgctctttcttcggtgcggatgtcggcaaggccgaaatcgtggtggccgactatcgccacaccaagcccgtcaccaaaaccctcaagaacaccctcagcggcctgacgccctggctggaaagcttgcccgagggcagcgtactggccatggaatcgaccgggggttacgaacgcctgctggctgatctggcctacgagcgggggctgcgggtctacgtggtcaatcccaaggttttgttccattacgccaaatccctgggccaacgcggcaagacagaccagcttgatgccgtcatgatcgcccgatttatcgcctcagagcaccatcgcctgcacccgtatcagccgactccgcaccacatcctgcgtctgcgccagatgctgcacttacgcaaaatgaccgtgaacacccggacccaactgcggctgtccagcgagcgtcaccagcaggcgtgcgcccaggctcaggtgcagaaggtactcgatgccctgaccgaactggctgactctctcgaaacccagatgatcgcccagatcgaagcggagccggacctggcgcaagactttaagttgcttaccagcatcaccggggtgggtaagctgaccggtacggccctggcgaccaccttcgctcgcataccattcgccagctccgatgccgtggtggcctatgcaggcctggaccccaggcccaaagagtccggcacctataaaggcctgcgtgtgctcagcaagcaaggcgatgccatcctgcgtagcctggcctacaacgccgccagcgccgcctccagatcggaggtcttcaaacccttgtatcaggcattgcgcgccaaaggctgggctaccacccaagccttgaacatcatcgccagaaagctcttgcgcatcgccttcggcgtatggaaatcacgcaaacccttcgatccgacgcgcttcaacgtcaatcaggcttgcgcgaaaccatagaat

SEQ ID NO: 2542 - DNA, 1171 bp, unidentified
  source 1..1171: mol_type = unassigned DNA; note = element_39d8ef4
  misc_feature 1..2: note = core
  misc_feature 3..206: note = LE
  misc_feature 207..1160: note = CDS
  misc_feature 1161..1171: note = RE
  misc_feature 3..182: note = bridgeRNA
cttgtatgttcgaaacttgaaggggtggtgggaccgacaagccaaatctgactctagccagtacagaccgtgggagacctcgccccacctcttcaaccaaagagcgccgataaagaatgcatcgggaaaaccgacgatagaggcaagccagcgcgctttggtaaaagccccaacaagccctgaaaacctagcgtggaggattgttcatgacaaccatcacttcgcaaacggtcgcaggtgtcgatgtggccaagactgaactggtcgtctatcgcgcagacctgcaagaaacccttatcgtcatcaacgagcttggtccgatcaagaagtggctgagatcgttgcccaaaggcagtttgatcgccctggaagccacgagctcttatcacatacaaacggtggagttggctcatgcgatgggccatacgctttacgtgatcgacggctaccgccttagcaactaccgcaaaggtaccggcggaaggtccaaaaccgacttctctgatgctcgccttttagctcgttacctaaccaacgaacttgaagacctgcgtccgtggagcccgccacctaagggctttagcaagcttcaggggctgatgcgtaaaagaagccaactggtacaaatcaaggttgccctgaatcagagctgggcagacgagccgatgctcaaacgccagcttaaagagctactggcggtaatagcgaaggtggatacccagattcaaaaaatgcttcacacgctaattgaggaagcaggattaacgtcccaagtacgaaggtgtgaggggatcgagggcgtaggaccacttaccgccgcagccttggcaacctcgttttcacggggtgattttaaaagcagcgatgcgtttatcgccttcttggggctggacttgcgggtaagcgactctggccagaaaacagggcgccgacgcctatccaaacgaggcgactctgagccgcggcggttgctgcacaacgcgtccatggccgcgtcccgcagtgacatctggaagcctgtttacgagcgctatttggcacgtggcctaaaggccacgcaggtctacgtgatcatggccagaaagatcgcacgggtggcattcgccttgatgaaaaaccaaagcgaatatcagccggcagggatggaaggtgttgcgtagcaacatagaat

SEQ ID NO: 2543 - DNA, 1363 bp, unidentified
  source 1..1363: mol_type = unassigned DNA; note = element_39dc3de
  misc_feature 1..3: note = core
  misc_feature 4..88: note = LE
  misc_feature 89..1111: note = CDS
  misc_feature 1112..1363: note = RE
  misc_feature 1107..1349: note = bridgeRNA
tgatgaggtggacggcccctgacccagcggcatcgattcgtgccaggatgatgctgtcagcgaccatcaacgggaaggagccgtccggatgcagattaccacgattggcctcgacatcgccaagaacgtttttcagcttcatggcgtcgatgatgcagggcagccggtgttgcgtcggaaagttcgacgggatcagttgctggcggttctcggcggctttgagccgtgcctgatcggcatcgaagcctgcgcgacagcgcattactgggcgcggcagctccaatgcctgggccatgaggtgaagctgatgccgcctgcctacgtgaaggcttatgtgaagcggaacaaaaatgatgcagccgatgccgaagcgatctgcgaggcggtgaggcgaccgacgatgcgctttgtggcgatcaagtcggccgacgcgcagagcgtgctgatgttgcatcgcgcccgtcacctgctggtccggcagcggaccgcgcaggttagtgcgctgcgcgcgcatctggccgaatatgggattgtggcacccagaggccgcgcccatgtccgcgagctcgtcggcgttctcaacgcgggcgaagcagcgatcccggaactggcgcggcagacattgctgctgatcgccggcatgattgatggcttgagccaacagatccgtcagatcgagatcgagttgatggcttggcatcgcgccaatgccgcgtgcaagcgtttggagacgatccccggcatcgggtttatcaccgccaccgcgctcgttgcgaccgtcggcgacgccgctatcttccgttccggtcgccagtttgccgcctggctggggttggtacccaagcaacattcctccggcgggaaggagcgaatgggcgcgatatcgaagatgggggatcgctatctgcgccatttgctagtcgtcggcgcaaccgccgttgtccgctacacccggcgcaagcagacgaccgtcagcatctgggcgaaccagctgctcgagcgcaagcccgcaaggctggtgaccgtcgcggtcgccaacaagatggcccggatcgcctgggccgtgatggcgcgcgatgaaaattaccgcgccggtccggtaaccgcctgacctggcgccaaccactttgggcaggagagaacgacacgcgtgatgccgatccggggcttgccggggatggaaacaacctgagtgattcaacgcgcatcacagcgcgccagcttgatgaggatcccatccaccgacaccatcatggccagcggcctttcacgccgcgcaaacaggccggacacatgaatgaacctgacccggctcagatcaacgcgtcaatttcccccttgcccaacaggggccgtccacaca

SEQ ID NO: 2544 - DNA, 1436 bp, unidentified
  source 1..1436: mol_type = unassigned DNA; note = element_39dccc1
  misc_feature 1..2: note = core
  misc_feature 3..41: note = LE
  misc_feature 42..1181: note = CDS
  misc_feature 1182..1436: note = RE
  misc_feature 1189..1434: note = bridgeRNA
agatgacatgaacgccgcccgtcctttggcaggagggcgagatggaagcgaagaggaaggaccccctgaccctacggcatcgatgtgccagagtggagatgtctagtaaccactcacaggacaggggatccgatatgcaagttacgacgtatggcgtggatttggcaaaaagtgtgtttcaggtgcattgggtcgagacggacagcggggaggtcaggcgcaagatgctcacgcgagggcagctgcaagccttctttgcgtgccgtgcgcccggtgtggtggcgatggaggcctgcggctcggcgcatcactggggtcggactttgaaggccctgggacatcaggtgcgagtgatctcgagccagttcgtgcgtccattcgtaaagagcaataagaccgatgcggccgatgcccaggcgatctgggaggcagcgcagcggccggagatgcgttttgtggccctcaagagcgagcagcagcaggcactgatgggactgcatcgcatccgagcgcagctggtcaagcagcgcacgatgcaggcgaaccaggtgcggggactgttgtatgagttcggcgtggtggtgcccaagagctggcgggcgctactggcccaggccgctccgattctggcggatgcgagccgtggagagattcccgatctgatccgcggcgagctacagcagcagctgcagggtctgcgggacctgacaggtcgcatcgagcagctggagcgctcgatcggcgcctaccgagcgcaggatgagcaatgccggcgtatcgaggcgattcccggggtgggactgctgagttcgacagcgattgtgggcagtgtgggggatgcgcgcacgtttcgctcggggcgagagtttgccgctttcctagggctcgtgccgcgtcagtcaggcacgggcggacgagtgaagcttttaggcatcagcaaacgcggggacccgtacctgcgaaccctgctgatccatggggcgcgagcggtggtgaaccacagcagtcggcccggacgctcgatgccgcgctggctgcgagagctcctgtcgcggcgaccgaagaatgtggccattgtcgcgctggccaacaagatcgcgcgcacgatctgggcgctattagctcatgagcgcacatttgatgataggtggggacaggcgatgcctatccctgtgctttaactagctggaggattagccaatcgaattgagcgggtgcaacactcgtgatggcaaataggtcggaccgtgaggaagtaagcctgtatgaggtcttggacttcgagtcctccatagagatgaggccttcctcagcggattttcatcagggccacgcagagccaaagctctgcttaaagtaggccggatataagactgcatccgtacctcgatgcctcgcgatcacagcatctgtccaatacgggcggcgttcatata

SEQ ID NO: 2545 - DNA, 1624 bp, unidentified
  source 1..1624: mol_type = unassigned DNA; note = element_39e58d2
  misc_feature 1..2: note = core
  misc_feature 3..271: note = LE
  misc_feature 272..1483: note = CDS
  misc_feature 1484..1624: note = RE
  misc_feature 76..229: note = bridgeRNA
cctattagtgtatactggtagcagggcgccaacggagtagaatggtgggtgtgtgttgagagcccacacatccactccgtcggcgacccgcctgggagtaaagacctacgaagcccagcaccgcgagtgccaggtggggacagtctcccaggtgaactggcgctatctgctgaaagtacgtagcactacgagtgctgtaatagggcggcaaaggccagttgtagccgatgggaacagacatactgagatctggtgaaaggaggatccaattatgttgctcatcggcgttgatcagagccacaaggaacacgaggtttgtatcatagacgtcaccggttgtcaactggcccgtctatcggtaccccatagtgccagcggatttcgacggctgcacgaatgctgtcagatgctccagaccccgccccgcgaatgcctggtggctctggagtcagaccacagcttggtggtcgactatctgctggaccaccagtaccaggtctacgtcatcccgggcaaggcagtcgaccgttaccgcgaccgccaccgtcagagtggttcgtgcagtgacaagagtgatgccgcggttctggcccacatcttgcgcacggatcgggagctgtataccccgtgggaagcggatatgcccttgacccgccagatccgcagccaggtcaaagcgctcttgaacctgaagcgcgccgtggtccgcttcggcaaccagttgcgcgcactgctgtggcgttactacccactggccgccgagttgttcagcgacttggacacgcagatcgccctgcagttcatccaggcttacccgacacctcaagctgcccagcgcctgacccgggcacagttcaccgccttctgtcatgcccaccagtaccggcgctcggactacatcacacgccgctacgcccaactgctcaacgcccagacctatgccagccccgacgtagcggccgcctatgcggggcaggcccagacactggcccgggtgctaggcttcctggccgccgagcgggatgcgactcagaaagaactcacccactcgttcgaacaacatcccgatggccacatcttcgcctcgctgccaggtgccggccagttcctggctccggccctgctggccaagttccgcgactgtcgggcccgcttccccaccgcggccgtagctcaagccatcgccggcaccagtcccgtcacgagccaaagcggcaagaagcgacgtgtcctattccgtcaggcatgcgaccgggagttccgctactttgccacccagttggcccgtacttcggtcaaagaggcttcctgggctgcagcttacctggccacggtacgaccgcgctgcgacaaagcttcccaagcctatcgtcgcctggccaaccgttggatcgccatcatctggcgactgtggatggaccgcgtcgagtacgatgagtccatccaccttcgaaatcggtttaccaaccgcacccccagttagtcactggttgcggtaggtttcagagctctctatgtctggagtgggctgctcaacatctcgacatcttatgtcaacaacgcccatcggagcgctggcattgccgcgcgcctattgcacaaattggggcttgacaaagtacgt

SEQ ID NO: 2546 - DNA, 1267 bp, unidentified
  source 1..1267: mol_type = unassigned DNA; note = element_39e691e
  misc_feature 1..2: note = core
  misc_feature 3..231: note = LE
  misc_feature 232..1077: note = CDS
  misc_feature 1078..1267: note = RE
  misc_feature 1054..1252: note = bridgeRNA
agatgtatggactcctccccctaacggagttttgcggtataaagtgaaaagtattcactcaaatcaacttttaccaggagtccacacaatggcgcaatgtaacgtaattgctatcgatttagcaaaagatatttttcaagcttgtattatgacacccaatggaaaaatcactttaaataaagcaatgagccgagcaaagttaacataatggctcgttagtcccttgtggctatggaaagctgtggcggcgctcattattgggtaaggtttgctaaatctttgggccataaagtgatgcctataccgcctaaacaagttaaaccgtttagaacggggcaaaaaacagatgctaatgatgccatcgctattgcggatgcatcgcgtgcgcctaatatcaaacctgaaagagtgttaaccgttgaagagcaaggcatacaatccgttagtaaaatgagagatttactggataaacaaaagcttcagttatcaaatcaagtgcgtggattattactcgagtttggcatcatcatcagtaaaagtataaaaagctttaaagcacgtatacctgaaatattagaagatggtgaaaaccagctacctatgccaatgcgccactgtatagataaaatgtggcagttatattctcgcctagaagatgattttcaagccctaaatgagcaattaattcgcctaactggacaagatgatgattgtaaaaagctgatgaaacttgaaggtgttggccctataacctctatgaggctgaaaatacagttaggcagtggcgaccattttaacaatagtaggcaggtatcagcttgcattggccttaccccaaaacaacatagtagcggtggaaaagtacaactcggctcagtcgggaaaatctcatgtgataaaccactacgaagtagtctttttttaggggcaagagccgtggtgtcaaaactaaaaaacagacccaccaaaacagaaaaagagcgttggctaaaagctttaatcgaacgtagaggggttacttgtgcatcaatggcattagcgaataaaaacgtcaaattgctacaaagaagatcttaaaaaaggttagaccaaccttcaagagcctgtaaattgctctgaacatatttataatgtcgcgcaggagattaggcatgaaggtgcgaatacatcaaagtggccaggatagcttcccattatgagcccgaatataagttagcgtctaatttatttcaatttttgattttgacattaacaggggatccatata

SEQ ID NO: 2547 - DNA, 1404 bp, unidentified
  source 1..1404: mol_type = unassigned DNA; note = element_39e8ac2
  misc_feature 1: note = core
  misc_feature 2..89: note = LE
  misc_feature 90..1121: note = CDS
  misc_feature 1122..1404: note = RE
  misc_feature 1167..1396: note = bridgeRNA
caatgggatggacccctcctcacctgatcggcatctaggtgccagactggaagttccacccaccagtcaaaaaggagaaggggtccaccatgaagcttattcgcgtcggggttgatttggcaaagaacgtatttcaggtgcacggcgtagagcgtaaagagaaagcgatctggcgccggcggttgacgcgggagaactggctcaaggtgttgctcgagaccgttgagcccggctgcgagatcggcatggagagctgtggaggcgcgcaccactgggcgcgcagggtgcaggagaagggattcacggtgaagttgattgcgccgcagtttgttaagccctacgtgaagagcaacaagaacgacgccaatgatgcggaagcgatctgcgaggcgatgagccgacccgggatgcggtttgtagccgtgaaaacggttgagcaacaggacatccaggcggtacaccgtgttcgcgcagagttgaccaagcaacgcacggccaaggcgaaccagatccgcggcctggtggccgagtacgggctggtcgcgcccaaggagatcgtgcatttgcgaagggcgttaccgtgttggttggaagatgccgagaacggcttgagcgagcgattccgccggctactgaatgggctgtggggtgatctgagggcactcgatgatcggatggcagaactcgagcgcgagatcgcacttatcgcgcagagcgatccggtggcaaagcgcctgcagcagctacgcggggtcgggccgatcattgcaaccgccctggtggcggcggtgggtaatggggaacagtttgccaacggccggcagatgtcggccgccttcgggctcacgccacggcagcacagctccgggggcaaggagcggctgcttggcatcagcaagcgcggcgacgcctatctgcggtccttgctgattcacggagcgcgagcggtgatccgaaccgccaagggcaaggacgaccggctcagtcagtgggtcactcgcctggcggcgcgtcgccatccgaacgtcgcggcagcggcgctggccaacaagaccacgcgcatggcctgggcgatgttgagaagtggcaccgattaccaacctgatctggtgacgggctgaggccccagccagacgcactgactacgcaggcaacccaaggagcacctcactcacgattgctaagcaagcctgacgatggcaaacaggtcgaaccggcgccggcagaacccgagaatgtccatgtgcaaaaagcacgacaaagcaatggggagctggcgcgcgaatagcccatcatggcccgagatcggtaacccgatccagcacttagaggccggatatacgtgtgcagtcgtaccttagtgccaaagaaaagcgtgcttgcaaacgaggaggggtccatata

SEQ ID NO: 2548 - DNA, 1413 bp, unidentified
  source 1..1413: mol_type = unassigned DNA; note = element_39f8bff
  misc_feature 1..2: note = core
  misc_feature 3..91: note = LE
  misc_feature 92..1126: note = CDS
  misc_feature 1127..1413: note = RE
  misc_feature 1174..1411: note = bridgeRNA
cgatgtgatggtctcctcccctcctaatcggcgtcgcaatgcgccaggatagggaaggagaatttcctatcagaaatgaggggaggagaccatggcaaagcttacaacgattggcattgacctcgcaaagaacacgtttgccctttacgggctgggcccgaaaggccaatgcggctggaagcgcaaagtacgccgtaagcaattgctggagcaactggtgcggctggagccgtgtaaggtcgccctggaggcgtgtggcagctcacattactgggcccgtcagatacaggccttggggcaccatgttgagcttttaccgccccagcacgtcaagggctatctgcgtggtcaaaagaatgactacaacgacgcccaggcgattgcagaggcgagcgagcacgggcgaatccgcccggtgccaatcaagggcgctgagcagcaggatgaacggatgttgcacaagctgcgccagggtgcgagcaaggaccggacccggatcagcaatcaattgcgggggctgttggccgagtacggcgtgatccttccccaaggcatagcggctttacgccgggagctaccgctcgctctgggggacgccgagaatggattaactgaccgggcccggcagttactgaaccgccagtatcagcggtttttagaggtagagaaggaattggcctggtacgaccagcaagtgcagcagatggcgaaacaggacgagacctgtcagcgcctgcaagccataccgggtattggcgaggtggttgccagcctgctgaaaggctggatgggcgatggccgccagttccgcaagggcagagacgccgcagcggcgttgggactggttccccgtcaaaacagcacgggcggcaaagacgtactgctggggatcagcaagcgaggcgacccgtacgtgcgagcccaactggtccacggagcccgatcggtggttgcccgagcagacgggaaaaccgaccggctcagccgatgggttcagcggctcaaagccgaacgagggttcaacaaggccacggtagcgctggccaacaaactggttcgcattgcctgggtgattatcgcccgaggtgagtgttatcagccactggggcaacggctggctggatgagtgaatgaaatagacaaacgacacgaagtaaacgagtaaggaagttaccttccctcaggttgcgagggtcacagcgatcgatggcacaacaggtcagaccggcctgccgaaaacctgataaatccgagggcccaacaggccgttaggtcgataaggacggcaggcgcggatcttccatcaaggccagaggcgacaaagccgcctcgttaaacaggccggatatacgggcgcaaacctgtccctggcatcgaaggctgagaccttgcaaacggggaggagaccatata

SEQ ID NO: 2549 - DNA, 1395 bp, unidentified
  source 1..1395: mol_type = unassigned DNA; note = element_39fcf7b
  misc_feature 1: note = core
  misc_feature 2..88: note = LE
  misc_feature 89..1123: note = CDS
  misc_feature 1124..1395: note = RE
  misc_feature 1165..1387: note = bridgeRNA
caatgggatggacgcccccacccgtaacggcatcaacgtgccaaagtggaggtgtcaccaaccacttgaaccgagaggggcgtccaccatgaagattacgactgttggcatcgacctggcaaagaacgtgtttcaggtccacggcatcgacgagcgcggcaaggtcgtgctgaagaagcagttgcggcgcgaccaggtggcagcgttcttcgtcaaccttccgccgtgcctcgtcggtatggaagcgtgcggtggtgcgcaccactgggcgcgcaaacttcaaggcatgggacacgccgtgcggctgatggcgccgcagttcgtcaagccatacgtcaagaccaacaagaacgatgcagccgacgccgaggcgatctgcgaagcggtggctcggccaaacatgcgcttcgtaccggtgaagaacgtcgagcagcaagcggtcctcgcgttgcaccgtgtgcgtcaaggcttcgtgagagcgcgcacagctcaggcgaaccagattcgggggttgctcgccgagttcggtctgatcattccgcaaggcatcggctacatcgccacgcgcgttcccgagttgatcgaggacggtgccaacgagttgccgggtgtgttccgactgctcgtgcaacgacttctcgaccacctcaaagatctggatcgccaggtcgatgaactcgaggcaaagatccaggcatggcatcgcggcaatgatctcagccgcaagcttgcccaagttccaggcatcgggccgatcacagcgagcgcgctggtcgcctccatcggcgacgcgaagaatttcgacagtggtcgtcaggtcgctgcgtggctgggcctcgtgcccaaacagaactcttccggtggcaagacgaacctgctgggcatgagcaagcgcggcgatacgtacctccgaacgctgctgatacacggcgcgcgctcggtcatctatcgagtgagccagaaggccgatgcatgcaattggatcagcgccgtcgtgaaccgacgcaacaagaacgtggcggcggtggcgctggccaataagaacgcacgaatcgtctgggctctcctggcgcatggccggcaattcgacgagggttacgtgcgcaaggcagtgatggcatagccaagggcatccaacgacaacaacaaccggggagaactaccaccgattgctcaggtgatcatgaagtgatggcaagacaggtcagaccgtggttggcaaagcccgcgccggacgaggcacccggagtgcgtgtatgcgatcgaggcgtcaaccagctgttcccatcagggaccgtggctcaaaaggccgcaattaaagtccggatgtacgggtgcaatctttaccttcgagtcgtcgcgaattgagagcttggcatagggggcgtccatgta

SEQ ID NO: 2550 - DNA, 1436 bp, unidentified
  source 1..1436: mol_type = unassigned DNA; note = element_3a0a2f9
  misc_feature 1..2: note = core
  misc_feature 3..230: note = LE
  misc_feature 231..1421: note = CDS
  misc_feature 1422..1436: note = RE
  misc_feature 18..205: note = bridgeRNA
gtcctacgtttcaagggcgggctcgggccggtcattcgtaggatcggtggggcccggggctccgggtatggctcagtgcgtgtagccgtcggatggcttcagaaacttggccgcccggagcccgcgacgactcgaccgctgattgggatacgcgactccatcgcttcgtaggacagtgccggcgaggtcgtctgcagggtgaacgtgacggcgacctggcggaggtgaccgtgcccgagatctgggctgggttagacatcggcaaggaacatcaccactgcgtggtgatcgactcggcaggagagcgacttctgtcgcggcgggtcctcaacgacgaagcccagctcctgcagctgatcggcgacgttctggccctctccgaggacgtgctgtgggcggtggacatcaaccgtggcggcgccgccctgctcatcggtctgctgctcgaccacgaccagcccgtggtctacctgccgggcctggccgtgcaccacgcttccgctgcctaccgggggcagggcaaaaccgacgccaaggatgcgcacatcattgccgaccaggcccggatgcgccgcgatctcggcatcctgcggcccggcgacgaggtagccatcgacctgaggccccttatcacccgccgcaccgacctggtctgcgaccgcacccggcagatcaacaggctccgcgcccagctgctggagattttccccgcactcgaacgcgcactgaccctgactaaccagggcccggtcatgctcctgaccggctaccagacgccggcggccatccgccgcaccggcgccaagcgcatcgagacctggttgaagaaccgcaagatcagaggcgccaccgaactcgcccgggcagcggtcgaggcggcacaggcccagcacaccgccttgcccggcgagaagctcgccgcgtccctggtggcccgcctcgcgaaaggggtgatcgccctcaacgaggaaatcgccgagatcgacgccctcatcgaggcccgatttcaccagcaccaacacgccaaggtgatcaacactctccctggcatgggaccccggctcggagcggagttcatcgccgccaccggtggtgacctggagcctttcggcaccgccgaccgcctggccaccttcgccggcctggcgcccgttccacgcgactccggccgcgtcaacggcaacgtgcgccgacccagccgcttccaccgcggactcctccgggccttctacctctcctcgctggccagtctcagagtctgcccggcctcgcggacgtactacgagcgcaagcgcaaggaaggcaagaaccaccagcaggccctacgatccctcgcccgccgccgcgtcaacgtcctatgggccatgatccgagacggagcgtggtaccagggggcgccgacggccgcctcaacgacttgacaacggcattgggaa

SEQ ID NO: 2551 - DNA, 1608 bp, unidentified
  source 1..1608: mol_type = unassigned DNA; note = element_3a0b712
  misc_feature 1..2: note = core
  misc_feature 3..280: note = LE
  misc_feature 281..1498: note = CDS
  misc_feature 1499..1608: note = RE
  misc_feature 16..303: note = bridgeRNA
ctcctataatgtatttatggtggttagatacctctcagccagaaaggactaaccgttccgttgctaaagctgttagaataggtgggcattggtgtgacgattgtctccttggacccacaggcgtccgtttgaaagcccgtcagccagccctccattcgcagccgttcggtttatgcaggttggactgcctttgtgtatgtccgcatgataccccaggagattgaataagcaatggaaagccgctggcccatgcaattctttattcttggaggtacaggcaatgtacaacgcagtcggtattgatgtttctaagggcaagagcaccgtggcggtcctgcagccgggaggtactgttgtcaggaaacccttcgatgttacacactcttcctgtgagttgaaaagccttactgattacatcctgaccctggatggcgagacgaaggcggtgatggagtgcactggcagatatcatgagccaatcctccgtgccttctccgatgccgggatctttgtcagcgcggtgaacccccatctgatcaaaaacttcggtaataacaccatacgcaaggtcaagtccgatcctgccgattccaagaagattgcccggtatacgcttgacaactgggccgatttacgtgagtattccagtatggatactacacgcgcacaactcaaaaccctcaatgcgcagatggctttcttcacaaaacagaaagtcgctgccaaaaccaatctcatttcgcttctggatatgacttacccaggcgtaaatgacctctttgacaccccatcacgagatgatggaagcgagaaatgggtcgattatgcggcctctttctggcatgtggactgtgtacgcaagatcggcctcaaagccttcacggagcgctatcaggctttctgcaaacgccatggctacaacttccagaagagcaagcccgaagaacttttcaatgcctctaaggaacttgtcgccgtattcccgaaagagcaggaatacaaggatatgatccagatgagcatcaggcagctcaatgtcatttctgcaaacgttgaacacacgcgtcaggaaatgaaccggcttgcctcagccctgccagaatacagcactgttatggccatgcgcggcgttggggccacctttggcccacagctgattgctgaaatcggggatatttcccgcttcaaccatcgggaggctctcacggcttttgcgggagtggatccaggggtggatgaatccggcaagttcaaaagcaaaagtaacaatgcttcaaaatgcggaccttcacgcctcaggaagaccctttttcttattatgtcttctcttcttcaaacgaagccgattgacgaccccgtctatcgcttcctggataagaaacgttccgaaggaaagccctatcatgtctacatgactgctggcgccaacaagtttcttcgtatctactacggcaaagtcaaagagtgtctaagaactcagtcggaaacggcaaactgagtatggtggataacttttactgcaggccagctttagaggtggcttatttgtgatgctcaaaaccagctccgatattttcttcaatttcctcttgactttttattagcagg

SEQ ID NO: 2552 - DNA, 1560 bp, unidentified
  source 1..1560: mol_type = unassigned DNA; note = element_3a0d9ec
  misc_feature 1..2: note = core
  misc_feature 3..77: note = LE
  misc_feature 78..1118: note = CDS
  misc_feature 1119..1560: note = RE
  misc_feature 1298..1547: note = bridgeRNA
tgttggggtggacggcccccgacggcatcggtgtgccagaatgaggtcaggttagatctcagacaaaggagccgtccgtgagcgatattatccgaattggtgtggacacgtccaagagcgttttccagctgcatggggtggatgcagcggaactaccggtgttgcgcaagaagctgcgtcggcgcgatatgctggcctttttccgacggctgccggcgacgaaggtgggcatggaggcgtgcggcgggacgcattactgggcccgcgagctgacggcgctggggcacgaggtgaagctgctgccgccgcagcacgtgaagccctacgtgcggcgcggcaagaatgaccggaacgatgccgatgcgatctgcgaggcaatgagccggccgcgcatgagcttcgtggcaatcaagagcgcggatcagcaagccgcgcaaatgttgatgacaacgcgcgagcggctgatcgcctctcgcacccaactcatcaacacgatccgcggtcacgcggccgagttcggcctgacggccgccaaaggacccgcccatgtcgcgccgctgcttttgcgcattgccgaagacaagacggtgcccgagctggccaaagagctgttcgccttgcacggccaggagttgaaccggctgaagatcgagctgcgcgagatcgaggcgaagctgaaggtttggcaccggcagaacgagctgagccgacggcttgccgaagttgatgccatcggcccgatcggcggctgtcttctggcgatcaaggctcccgatccgcaggtcttccgctgcggccgcgacttcgcggcctggatggggttgaccccgaaagaccattccaccgcaggcaagatgcggttcggggcgatcacccgcgccggcgacgaggccttgcgtcgcaccctggtggtcggcgccacctcggtgatcaagcaggtcagcaagggtaaaggcgatccctcaccctggctgcgggatttggtggcgcgcaaaccgccgaagctcgcggcggtggcgctcgccaacaaggttgcgcgcatcgcctggaaactgatggtcggcggcgaacgctacgacgcggcccgggccggcgtcgtctccccgaccgcaagttgagcaccgtgctcgcgccgtcaaggccgctgcgcgccgccagcggcggtggcctgcggccagccttgacgcctctgcgcgcggtgctcaaagcgcgccgccatcggtgaaacgacgcaatccgggctccgccctgacacacaaggtgatcaaaatggcccttcagtcgacccactagaaccacgaaccgcggcgcgagcccatctcgcgccgcaggccgaagcttgctcgagaacggaagatggaccggagcgatcgatcacagtcacggcaaaatccgcaggacccgttggtgctcgacaccgccggctatgcttggccccgtgctgtgaaccccatcttggcagcggtcatgcgcgaccgcgacaacagaccggacatatggccgcaatcgcttcgatcagattatcattccgcctcttgccagcagggggccgtccacata

SEQ ID NO: 2553 - DNA, 1661 bp, unidentified
  source 1..1661: mol_type = unassigned DNA; note = element_3a0df94
  misc_feature 1..4: note = core
  misc_feature 5..247: note = LE
  misc_feature 248..1450: note = CDS
  misc_feature 1451..1661: note = RE
ctcattgctgcaccatggatggtgcgacctgattgagggagggtcgcaaacttcggtgaccaccggggcacggcctagttcgctcgcccgatgagggccagcatgagtgttgccggcctcggtgggccgaggaccttagaccggcattagggacaagccgccgtgacggccgaccaatgagcctccggcttcggccctcagcaccgaggagagcttcattgtccctcgcagacccggaggtgtgcgcatgtacgtgggttgggactgggccggaaagacgcacgatgtcagcgtgctcgacgagcagggacgcctggtcgagcacttcgcggtcgaccacgatgaggccggtttcaagcaggccctcaggcggctgggtcgccacggtccagctgaggaaatgccggttgcgatcgaacgcccgagcggcctggtggtcgaacggctcgtggaggcgggtcatcccgtgattccgatccatcccaacgcgttcaacgcggcccgcgcgcgatggggcgcgtcgcgggcgaagtccgaccccggggacagctatcgcctggcggattatctgcgcaccgacggccgccgcctgcggcggctgcggcccttggatgaggcgacccgccagctgcgggccctggtgcggatgcgcgacgatcacatcgaagcccgcgttgccgccagcaaccaactcgaggcgctgctcaacgcgcactggcccggagccgtctgcatcttcgagaccgtcgcgtccgacatcgccctgcacttcctggaccgctacccgacgcccgacgccgcggcccggcttggggagacgcggctggccgccttcctgaagcggcgctgctactccggccgacgcaccccggcccagctgctcgagcggctgcgtcgtgcgccgaccgcagccagcggcctcgaccccgaggtgctggccgaactggtccggcaccaggtcgatctcctgcgcacccttctccacacctgcaaagaactcgaacacgccattgcggcggtcttgcctgatcacggcaaggtgcgtatcctcgccggcctgccccgcatcggcgacggcgtcaacctggcccaagtcctcagcgaagtgggacctatcctggatgccagcctcaatgtcgatcatgccgccgcccagtgcggcgcctgccccgtcaccaaggcgtccggccaaagccgcggggtccagtttcgctgggccgccaacacccatgcgcgccaagcgctgcagacctttgccgacaactctcgccatgcctcgccctgggcggcccgcctctacgccaagcacgtcgccgccggcaagcgccacccccacgtcgtccgcatcctgatgcgcgcctggctgcgggtgatctggagctgctggcattccgacatcccctacgatccggcccgtcaccgcaacgagctccgcctcgcgggcgcctaaccacggaggcgaccgatggggctgaggcgccttgccgttacgaaattccgaacccaggtcgtcacggctgccggcttccgaccctgccccgtctgccgccgcgaaatctggttccacccacctggtcccggacgccctcgcacctactgctcggatgcgtgcaagcaaatcgcctaccggcgtcgacgagaaaaggggttgacttagggaa

SEQ ID NO: 2554 - DNA, 1352 bp, unidentified
  source 1..1352: mol_type = unassigned DNA; note = element_3a1561b
  misc_feature 1..2: note = core
  misc_feature 3..81: note = LE
  misc_feature 82..1092: note = CDS
  misc_feature 1093..1352: note = RE
  misc_feature 1086..1339: note = bridgeRNA
tgttggggtggacggcccccctacggcatcgaatgtgccaggctgtgatgttgtgacaacgcagccaagggagccgtccgaatgacgattatcagaattggtttggatacgtccaaacacgtctttcaaatgcatggggttgacgagaacgatcagccggtcttgcggcagcggatccggcgcagcgaggtggagaaagtgtttgccaagctgccgccgacgcgaatcggcatggaggcttgcggcgcctcgcactactgggcacgggtgctgcggcggctggggcacgaggtgctgctgatcccgccgcaatacgtcaaggcttacgtgcggcgtggcaagaacgacgcgatcgatgcggaggcgatctgcgaggcgatgggccgcccgaggacgcggtttgttccggtcaagagcgccgggcagcaagcggcgctgacgatgctcggggtgcgtgacttgctggtcaagcaacgcacgatgctgatcaacgccatccgcggccatgcggcagagttcggcgtcaccgtggccaagggacccaagcaggtggccgcgctgctgcagcgcttggccaccggagaggacgtgccggcgctggcgcgcgagattatcggggtgctggccagccagctcgatggcttgaacatcaagctgaaggcgatcgaggcgcgagtgatggcttggcaccggcaagatcagaccagccaatgcctggcgacgatccccggcatcgggccgatcggtggcgtcagctttgcgctcaaggtgccggacccgaaagcgtttcactcgggccggcattttgccgcctggatcggcatcacgccgcgcgaggactcgaccgccggtcggcagcggctcggcaggatcagcaaagcaggcgacgaggatttgcgccggctgctcgtactcggcgccaccgctgtcatacagcaggccaagccgggccgcgcctcgccgtggcttatgggattgctggcgcgcaaggcgaagaaggtcgccgcgcttgcgctggccaacaagatggcccgcatcatctgggccatgatggtgagcggcgagacctaccgccgtacgacggcagtctgagcccgcccacacccaaacctggcacaccgagacctggcaaggacagcaacagcaagatggcgatcggtcgatccgaggatcgggacaacccgagggacccattggtgcttagacatcaccgcgatgtttgggacccgatccgcgtaacccatctgggccagcggtcatacgaccgcaccacaaaggccggacatatgactgcattcgaccagatcatcatcgcgctgccgcgtccttgcgaaacgggggccgtccacata

SEQ ID NO: 2555 - DNA, 1388 bp, unidentified
  source 1..1388: mol_type = unassigned DNA; note = element_3a1c284
  misc_feature 1..2: note = core
  misc_feature 3..87: note = LE
  misc_feature 88..1119: note = CDS
  misc_feature 1120..1388: note = RE
  misc_feature 1090..1375: note = bridgeRNA
agatggggtggttgccgccctcccagacggcatcgcgatgtgccaaaatagtggtgttgaggccactgagcggaaaggacggcaaccgtgacgatagatacaatgattggtgtagacctggcaaagactgttttccaggtgcatggcgcgtcgatgacggggcagccgaagtttcgcaaaaagctgtcgcgacagaacttccccaagttcatggccgatcagcccccggcggtggtcgtgatggaggcctgtggcagcgcgcatcattgggcccgagaaatgatccgacttggtcacgaggtcagactgatcgcgccgcactatgtgaaaccgttcatcaaacgtcagaagaacgatgaagccgatgcggaaggtatcgtgatcgcggcccagcgacctgagatgcgctttgttgaacctaagtcggcatctcagcagagcaccgccattttgtatcggtcacggcaaagactggttcggcagcgcacagaaatagtcaacgctcttcgagcttgtctatatgaatatggccacatcgtgccactgggcattcagaatattgggcgcatccgcgagatcttggaagagaaaagcagtgacttgcctctttcgatgcgtgaggaatgtcttgagatgcttgatcagatcgctgaacagacaacgcgcattgcagcccggacaacaaagattaaggaactggccgccacgcaggagacatctcgtcgtctgcagacagtgcccggagttgggccgttgactgccatggctgtccaagccttcgcgccaccgatggaaagcttccgcaacggacgtgatttcgcagcctggctcggcctggttccacgtcagttctcctcggggggcaaggagcggcttgggcgtattacgaaggcaggccaggccgacattcgtcaaatgctgattattggtgcgatgtcgcgcctgaactggatggggcgtaaatcaatcccggacggttcatggctcgcaggcatgctgatgcgcaagcccaggatgctcgtggcgatcgctttggccaacaagatggccaggcaaatctgggccatgctgaccagcaacgaagattttcggaatccgacgctggcggtagctgcatgatactacggcagctcacgccgcgcggataaatgggagtgtaagaaggcgacgacccgaatgggcaaaatgatcgaacagatctggatcaggaaaaccagctaattgctccgagcctcgagctctcccgtgagttttggacttggtccgcggatcaccataccggccagcggcttctgaaatgccgcaatcaaaggccttacagaagaccgcactcgatcactagcacaagagcgtcaaaaccctcttgcatcacgggcggcaaccacaga

SEQ ID NO: 2556 - DNA, 1543 bp, unidentified
  source 1..1543: mol_type = unassigned DNA; note = element_3a1dcf2
  misc_feature 1..2: note = core
  misc_feature 3..257: note = LE
  misc_feature 258..1523: note = CDS
  misc_feature 1524..1543: note = RE
  misc_feature 12..256: note = bridgeRNA
ctaatgagaggtgagcctgccggttcggcagaatcggatcgattgatggtgggccgccggcgggtgagcactcctgccccctggacaccttcggagtcctagacacagatcgtgcccccgccggtgaccgagagagttgatcgctgatgggatgtcgtgccggtcggcgctgagcgtcgggtgagcactccttcattaggtcgctgatggttctctcgaacggcccgccggacaggacgagaacgaagggagcgccgatgctgggagagctggcaagcgtgaacacggtgcggttgttggtcggtgacgactgggccgaggaccatcacgacatcgagatccaggctgctgacgggcgcgtgctcgccaaagcccgcgttcccgagggcgcagccgggatggcgcgactgcacgagatggtcagcgccgccgtcgaccgcatcgaggacgccgacgcggtggaggtgctggtcgggatcgagaccgaccggggcctgtgggtgcaggcgctgatcgccgccggttacgtcgtctacggcatcaacccgttgcaggcggcacgctaccgagagcgccgctcggtttcgggagcgaagtccgactccgccgacgcgcacgtgctggctgacatggtcagaaccgatgcgcaccagctgcgtccgatgtccggcgacagtgcgcaggtcgaagcgatcaaggtcgtcacccgcgcgcacaagaccctcatctgggaacgcgcccgcaccgtccagcggctgcgctacgcactgcgggactacttccccgccgcgatcgaggcgttcgagatcctcggcggtctggacgaaccggacgcgctggagctgctgaccaaggcccctgacccggccactgcggcccggctgacgacggcgcagatcaccgccgcgctcaagcatgcccgtcgtcgcaaggtcgccgacaaggctgctgcgatccaggcgatcctgcgggcgccgcagctgacccagcccgccccggtcgtgtctgcctacgccgccacgacccgtgcgatggtcgcgatcctgggcactctgaaccagcagatcgacgtgctcgaggggcaggtgcaggcccattttcgcgcgcacccggacgctgagatcgtgctgtcccagccgggcttaggggcgatcctcggcgcccgggtgctcgccgagttcggagacgacccgcaccgctacgccagcgccaaggcccgcaagaactatgccggcacctctccgatcaccatcgcctccggcaagaaacgcagcgtgatcacccgctacgtccacaacgaccgcctcgtcgatgccctcggcgcgcaggcgttcgccgccctgagccgatcacccggcgccagggcctactacgacaagctccgcgcccgcgacgtcgggcaccgcgctgcgctccggcaactcggcaaccgcctcgtcggcatcctccacggctgtctcaagacccgcaccacctacgacgaaaccacagcctggggtcatcacctcacggccgctgcttgacatccaagctcatgggatgt

SEQ ID NO: 2557 - DNA, 1775 bp, unidentified
  source 1..1775: mol_type = unassigned DNA; note = element_3a24c56
  misc_feature 1: note = core
  misc_feature 2..355: note = LE
  misc_feature 356..1672: note = CDS
  misc_feature 1673..1775: note = RE
  misc_feature 115..286: note = bridgeRNA
tagtataataatggtatagtcaatcaagactatttgattaacaaatttctatatgtataacagaagaaggcattctaccttcatcagatgttatcataaattttatcttgcctgatggcttccgatagacataagacaaaacataaggtattatctcttaggataggacaaagaatggctacctccttgggatgctgaactgtcagcatatacctgtagtaaagtcaattagtccattcgacagggttttatgttttagctggttgggagcctttaaggctatacctgaataacacgctaggttgtgtacctgccgtattggaaatggattcctatcagaaaggagcttgtacttatgacaagcaatattgtttttaactccgatgatttatttatctctgtcggtattgatgtcggagcggatttttcctggatgtcaattgcacttccaaaccagcagtttataggaaaaccttacaaaatcattcataactgcatggagtcccttgaatcagctgtctttaaaataaaagaagcagaaaagctgtattctctggaaacccgcattttcctcgaatccacgggaatttatcattacccacttttctgctatcttcgtgataagggttttaactgctccgttataaatcctatcattactaagaatagcacaaatattaacataagaaaagtacataatgaccgttttgattcaaaaaaagctgctttagttggtttgaagcctgaccttaaggtttcgattatgccttctgagctagcccttaactgtagaaacctctgtcgtgaatactattcgcttatggactcccgttctgcttatgtcaataagctgcaaggtgaactccgtatggcatttccacagtacataggtgtattttcaaaggtaaccgttaacacctctctagttctgcttgagacatacacatcaccgaaggcctttatagaggcggatgagcaggaagtaatcggaatcataaagtctacagcacgttttggtcttatatatgctaaagataagtataatgccataatcaaagctgcaaatgatgcgaacaagttcggctgtatatcctgcagcaacacaatccgcatccgtctctacattagcttcatccgtaagtacgatgaagaaatatccagattgcttgagacaatgaaacagcttgtaaaagccaatgaagataccgagtttgtcaggcagttaaagctgattgaaacctttaaaggagcagggttcttatcagctatatctctgatgtctgaaattggtgacttctctgctttcaaaaagccaaaacagctttttgcctactttggtcttgatccggcagtcaaacagtcaggcaagttcgaaggaacaaaggttaaaatgtcaaagcgtggctctgcaatagcaaggagagtaattcatgtgctgacactccagagtataagccctgcaaggaatggcaatgctaaaaaccccgttttaagagagtattacctcaaaaaatgcgaatcaaagccaaagcttgtggcaatgggagctgtatctcacaaagtatgcaacatgatttttgctatactaagggatggtaaaccttttgaaatcatcactccacaagagcacatcaggcaatacaactcttcaaagagtaatacagctgcataattttttcaatgccatctgcaccaagggggtagtctgtccttttttacctaaaataaaaaataagatttttcccttttaggtattgacatttattagctggact

SEQ ID NO: 2558 - DNA, 1339 bp, unidentified
  source 1..1339: mol_type = unassigned DNA; note = element_3a27b02
  misc_feature 1..2: note = core
  misc_feature 3..81: note = LE
  misc_feature 82..1107: note = CDS
  misc_feature 1108..1339: note = RE
  misc_feature 1094..1324: note = bridgeRNA
agataattggactcccccatattctgaggcatggggtaatatctttgttaccccacaaaaaatattttgagagttcataatatgtatcgtactaaagttggtgttgatttagcaaagtatatcattcaagtctgtattctgaatggtaaaaaagtcacatctaatctagagatgactaccgatgagtttctttgctggttagtaaaatctaagcctatgactattgcttttgaagcctgctccacttccaattattggtatcaacaagcgataaaagcgggtcatgatgcacgccttgtcagtgcaaagttagttaaagccgttaggcaaaaccaaaaaactgataagaacgatgccttagcgattgtacaaaccttatttttgcctgaaatgtcttttattgcaggaaaaagtattgaacaacaacaattgcaatccatacagcgtttacgtgaattggcgcttaaacatcaaggtgcagctcaaaaacagatagtgtcactgttgttggagttgaatatccgagtgcctaatgctcaagccagtttgctgagtaaactcgaagatatgttggaagacgcagaaaatgacttacctgatatctttcgagcaacactgggtgtggcaaaaaatcaactcgaaaatatgatcaatactattcgcgaatatgacaagcacctggaaaaaactatccactcgttgcctgattgtaagaagctattaaagcttgaaggtgtcgggcccatcaacgccgtcaacctgtatattgcattaagtggagagcagtcacagccctttaaaaaaggtaaagatgcgtctgcttgtattggtttaacccctattcagtattcttctggcggtaaaactaatattggtaccatcggtaagcattgcaaaaacactttcctacggagtcagttaattgccggcgccatggccgtggttatcaaagtacttaagtatgggacaaaaactaaaaaagaactgtggttacaagggctaatgcaacgtagaggtaataaatgtgcagcggttgcgctagccaacaaaactgtgagaacagctcacgccatgctgtcacaaaacaccgagtaccacgctgcataactcacagcgcaacatgagttaatcaatcaaaatgcatgagcaaagataaaaatctgcaaacgaagtcagtcgaatacattgagcatcatagctcgccagtgagaattgaccgtttgttcgcgtaaacatcattgagcctgagatagcttctctattagagctcgtacataagtacgcatttatttctttgtaatattaatattttggttgttgacaagggggagtccacata

SEQ ID NO: 2559 - DNA, 1140 bp, unidentified
  source 1..1140: mol_type = unassigned DNA; note = element_3a28b94
  misc_feature 1..2: note = core
  misc_feature 3..168: note = LE
  misc_feature 169..1125: note = CDS
  misc_feature 1126..1140: note = RE
  misc_feature 10..183: note = bridgeRNA
cttgtatctttaggcctcggaccagctcgggtagcccgagcggcctctgggccagttgttgaatcccgcttctgagcactgggcgcccgagttggaccgtcctttcttgcagcccgaacggttgtaggaactcgaagttcgcatagacaaggatgggagcgagaggacgtgtccgactctgttttcgtgggtatcgatgtctccagccagatactggaggtagccagcagcgaccaggccaagacctggcaggtgagcaacgacgtcgcggggttggaggatttggtcagccagttgtcgacgcttgggccggcactgacggtactggaagccactggcggctacgagttcgaggccgcgtgcgcgctgcaggcggccggcctggcggtggcagtggtcaacccgcgcacggcgcgcgacttcgcccgcgcgatgggcgcgctggccaagaccgacgcgctggacgccaggatgttggccgccttcgctcgggtactgcaccagcaccccgagcgggagcgcttcgtcaagccactggctgatacggaactgcagcgcctgcaggccctggtgctgcgccgccgccagctggtgcagatgatcacctccgagcgccagcgcatgcgcatctcgcacgtcgcagcccgaccgagcatcgagcgcgtcatcgggttcctcaagaccgagctcggtgactccgacgccgacgtggccgcgcacgtgcagcgtcaccacgccgaactcgccgccgcgctggccagcgtgcccggcatcggcgcggccagcgtggcggtgctgttggccgagctgcccgagctgggcaagctcgatcgccgccgtgtcgcagcgctggtgggtgtggcgccgctgaaccgcgactccggtcagatgcgcggccagcgaacgatctggggcgggcgcgccaacgtgcggcgaatcttgtacatggccaccctcacagcggtgcgccacaaccccatcctcaagacccactacgaacgcctgttggctgtgggcaagcgcaagaaggtcgccctggtggcctgcatgcgcaagctgctgaccatgctcaacgccatcgccaagcacggctcgcagtgggatccgacgcttcatagtgcttgaccgtcaagacggttg

SEQ ID NO: 2560 - DNA, 1390 bp, unidentified
  source 1..1390: mol_type = unassigned DNA; note = element_3a2dd5d
  misc_feature 1..3: note = core
  misc_feature 4..89: note = LE
  misc_feature 90..1118: note = CDS
  misc_feature 1119..1390: note = RE
  misc_feature 1089..1377: note = bridgeRNA
agatgggatggttgccgccctcccctgacggcatcgcaatgtgccaagaatgtggatgtgagagccacaaaatcggagaggacggcaagatgaaggatacaataatcggggtggatttggcaaagcgggtttttcaggtccatggcgcatcgatcgctggagaggtgaagtttcgcaagaagctgacccgcgaacagttccggcttttcatcgcccaacagccagcttgcatcgttgtgttcgaggcatgcggcagcgccaactactgggcccgggaagtggagaagctgggccatgaaccgaagctgatcgcccctcagtacgtccggccattcgtgaaacgccaaaagaatgacgcgaccgatgccgaggcgattgtgatcgcggcgcgtcagccagaaatgcgctttgtcttaccgaagacggcagagcaacaggccaagtctgtgctgttccgcaaccgcgaacggctggtccgccagcggactgagctcgtgagcgcgctgcggtcagcactgtatgagtatggctacgtgtttccgatcggcctggcccatctgaagcgaatggacgcgctggtccagggccctgactgcgaccttccctccctcatcatcactgagtgccaggagttgttggcgcagatcgcggagacgaccgagaagatcactatgaagaccaagaggctcaaggcgcttgcggatgaaaccgatacggcacgcaggctgcagacaatgccgggcgtcggtccgttgacggccttggcggtcgaggcttttgcccctcagatgggtcagttccgatgcggccgagacttcgcggcctggctcggccttgtgccccggcagcactcctcgggaggaaaggagcgtctgggacgggtttcgaaggccggccaaaccgacatccgtcggcttctgatcatcggagcaatgacgcgcatactggcgcacgcacgatacaagggtcctgctgagagctggctcggccgcatgctggcgaagaagcctaaaatgctggtcggaattgcactggcgaacaagatggccaggcagctttgggcgatgctgacaaggaacgaagattacagggatccggcgatggcagctgcgatgtgagtatcacagcgcagtaaaccacgtcggtacaacggggggtgtgagagagcgacgacctgaatgggcacaacgatcgaatagatctgggtcggggaaaccagacgatctctacgagtttgaagctcgggaagtagattcggacctgatccgcggatcaccataccggccagcggcttctgaatgtgccgcactcaaaggcctgacagaagagcgccttcgatcacatgccgacacggtcacaagcctcttgcatcacgggcggcaaccacaga

SEQ ID NO: 2561 - DNA, 1379 bp, unidentified
  source 1..1379: mol_type = unassigned DNA; note = element_3a2e42e
  misc_feature 1: note = core
  misc_feature 2..94: note = LE
  misc_feature 95..1126: note = CDS
  misc_feature 1127..1379: note = RE
  misc_feature 1146..1371: note = bridgeRNA
caatgggatggactcctcctctccttaacggcatctacagtgccagactggaagaagcgtgttttccagtaacaggtagagaaggagtccacacatgaagcttagctatgtaggcgttgatttggcaaagaacgtattccagctgcacggtgttgatcgatccggcgaggcgggttggcgtcgccgcctgcgtcggcatcagtggctcagcgcgttgatggaggctgcggacaccaactgcgtgatcggcatggaggcttgcacgggcgctcaccactgggcccggcagctgcaggcccgcggctacacggtgaagttgattccaccgcagttcgtaaagccgtacgtgaagagcaacaagaacgacgctaacgatgctgaagcgatctgcgaagcgatgactcggccacacatgcgctttgtcgcggtgaagactgtcgaacagcaggacatccaggccacgcaccgcatccgcgcggaactcaaggatcagcgaaacgccaagaccaaccagatccgcgggctggtcgccgaatacggcctggtggcaccgcagacactgttggcacttaggaaagcgataccggactggctcgaggatgccgagaacggtttgaccgactacttccgatcactgctgcacggtctgtggggcgatcttttagcacttgatgaccgtatcaaggaactcgacaagcagatcgagcaactcgcgaacggcaacgaggtcacacgtcgactacagcagctgcgtggtgtcgggccgatggtcgccacagcgcttgtggcaacggtcggaaccggcgagcagtaccgcaagggccggcagatggcagccgccctggggctgacaccaagacagaacagctccggtgacaagcaacgcttgttcggtatcagtaagcgaggcgacgcctacctaaggacgttgttgatccacggcgctcgagcggtgatgtcgcaagccaggcatcgagacgaccgtctcagccgatgggtgaccgacatcgccaagcgcagtcaccccaacgtcgccgcgatggcgctggctaacaagaccgcgcgcatggcctgggccatgctgcaccatggaacggattacgatcctgccttggccgttagctgagccagggcgcaaggaggtcttctcagacgattgcagtagcaagctgcttgatggcaaacaggtcgaaccggcgtcggtgaaacccgggaatgtccgagtaccttgagtacgaagcagcgattgggagctgacgcgcgaatagcccattatggcccggcatcaacgtgtgccgactacagaggccggatatacgtgcgcagtcgtaccttgtcagtcgtcaacaggttgcttgcaaagaggaggagtccatata

SEQ ID NO: 2562 - DNA, 1619 bp, unidentified
  source 1..1619: mol_type = unassigned DNA; note = element_3a32738
  misc_feature 1..3: note = core
  misc_feature 4..250: note = LE
  misc_feature 251..1486: note = CDS
  misc_feature 1487..1619: note = RE
  misc_feature 8..225: note = bridgeRNA
tttcgtattataaaggtcagccagttatttctggttgaacaatttttatatcgatatatgataacggtagccggggtagaacgttcctgcccgtggggcttggaccccgtcaactaaacagttcgccccctacttgcttaaacatgatttggctggttgggaccaagatctcgtataacaagcgaagctatgatactgcaagaaggattaggggttaccggcaatattatgtttttggaggagataaaaaatgaatccagtggttggtctggatgtagctaaaggtgaaagtcaggttcaagcgttcttggataaaaagaagccttataaaagaagttttaaagtagcacataccattgaaggactagagagcttacaccaatatcttagagagatagaaaacgtaacaggaattcgacctccggtcgttttagagtctactgggcattatcatacgcccgttgtacagtattttgaggagagaggttacttattaattatcgttaacccactcatttcttatcgtgcgaagagctctagtttacggaaagtaaagacagatttaatcgatgcacgtcacctctgcgagctgtactataaagaggatttagagccttatagaaaaagagggatacaactcttaaatcttcgtaatctttcaagacaacatgcaaatataacaggtatctatgtacaaacaaaactacagtttcaggctgttcttgatcaagtatttcctgaatatagaggggtttttggagatttgtattcggttgtttctttgcttactctattagaattccctacttctgaagacatatcagcagtcgatgaagaaactgtagcaaataggattaatgaactttgtccaagtcgttctagaaagtgggcgaatacacaggcagagaaacttatggctgcctcagctcgaaatccttttcagagaactttatatcagagtcacattttaagcctagagatgtatataaaaatgcttctagaataccaaaagcacctatccaaatttgaagaagagataaatgctttggcaaaagaaattgaagaatataagattatccaatccatccctggtatcggtgaaaaaatcgctacaacgattatttctgaaattggagagattgatcggtttaatcaccctaaaaaactagtggcatttgccggaattgatccaagtatctttgaatcaggtaaatttaaaggctcagtaaatcggattaccaaaagaggttctggtagactacgccatgccttatatatggcagttcgttgtgccattcgtgattgtcgcaagaagaaaacgacagatgaaatcatccctcggaacaaaagattacgagagttctatgataagaaacgtgaagaaggaaagccctttaaagtagctgtgatagcatgtgccaataagcttctacaatggatttatgcactattacaaaataactcgactttccaagatctaacctagtttaaaagtataactaaatagcacaaaactttccaaatatagttcattggaaggttatttagcatgcacaaatttagtatggcatgaaatattttaagttttcattgaaaaatgttgactaactattagctgg

SEQ ID NO: 2563 - DNA, 1431 bp, unidentified
  source 1..1431: mol_type = unassigned DNA; note = element_3a35b83
  misc_feature 1..3: note = core
  misc_feature 4..122: note = LE
  misc_feature 123..1160: note = CDS
  misc_feature 1161..1431: note = RE
  misc_feature 1183..1383: note = bridgeRNA
agatggggtattcggcttgagccccatctttggcggggatgcatggaggtgctgcgcttcgagctgatgatagaacgtggcctgtcttaaacagccgcaagcatcaggaaaggaagcgcagcatgaaatattatgccggactggacgtgtcggtcaaagagacatcggtgtgcatcgtggacgaaacgggcgcgatcagccacgaaatcaaggtcctcagtcacccggaagaccttgcccaggtattgaagaatcccgcatgggagctcgtgcggatcggacttgaagccggaccattgtcgcaatggctgttcagcggattggcagaggcgggcttgccggcgatctgcatagaaaccagacatgcgaaagcattcctgaaagctcaggtgaacaagaccgatcgcaacgacgcgcgcggcatcgcgcagatgatgcgggtcactctgttccgacccgtgcatgtcaagacgttgaggagccaaaagcgccgagccttgctgacagcccgtaagctactacaggaaaaagcgattgccatcgagaacgacatccgtggcctgttgcgcaacttcgggctcaaggttggtgtcatcgggacaatccgctttgatgcccgtaaccgcgatctcattgaaggcctacctgatttggtagagatcacgacgcctttgctcgctgccaggcagaagttgcgcgaggaattttcccgactgcatcgaagagtgctggagatcgccagagacgatacggtctgcaatcgcctgatgacaatcccaggtgtcggccccgtcacctctctcgctttcatcagcaccatcgatgttccggcccgattccggaactcacgggccgtgggtccagcgctgggattgaccccagtgctcaatcaatcgggggagagccatcgcgttggtcgcgtctccctgtgtggcgacgccatgatgcgggcgctactttatgaagcagctcaagtgatgctgacccgtgtgcagaaatggtcgtggttgaaagcatgggctatgaacgtcgcaaagtggggtggcctgcgcaaagccattgtcgctctggcacgtcgactagccgtgatcatgcaccggatctggacggacggcaccaatttccgctggacaagggaaacgacggcggtcgccatctgattggccgaccagaaaggagactaaagttccactgccggtggagagatgtccttcgcgggacgatggatgaggtgagttcgctttgggctcttgtgccgatcgctttatcgcggttaggacgcgagtcagattgagccgcttcattcttctgattccatgctgggagggccggagagccgatcccgaagagaagcgaggccccgcgaaagacatcaaatgccggcgaaccggaaagctcgaaaacgcttgacctcaacacgccgaatagaga

SEQ ID NO: 2564 - DNA, 1457 bp, unidentified
  source 1..1457: mol_type = unassigned DNA; note = element_3a383e8
  misc_feature 1..5: note = core
  misc_feature 6..401: note = LE
  misc_feature 402..1442: note = CDS
  misc_feature 1443..1457: note = RE
  misc_feature 14..200: note = bridgeRNA
gtcctacctttcgaagcgtgggtttgatcgggtcgttcgtaggatcggagaaccccacgaactgcgggtatggctgtcattggggtgcggtgtggaccgctcaaaggacttggccgcccgcagtttggcaacggctcgactgctgattgggatacgcgatgtgatcgctgctgtaggactacgccgggacgtcgttgccagggaccgcaaagagtgacggctatgagtgtggaggtggcgttgaccgaaaaggtctgggcaggaatcgatgtgggaaaagaacaccatcactgcgtggtgatcaacagcgaagggcaacggctgctgtcgcggcgagtgttcaacaacgagcctgaactggcgagtctgctcgacgaggtgatcgagctggcggcggccaagtgttgtgggcgatcgacctcaaccatggagcggcggcactgctgatcggcttgctcgttgctcgcgagcagccgctggcatatctgaccgggctggcaattcaccgagcgtcggccagctaccgcagcgagggcaaaaccgatgcccgtgacgcgttcgtcatcgctgatcaggcccgccttcgccgggatatcagtttgctgcggcccggcgatgagatcgccgtggatttgcgtatcctgaccacccgccgcgtggatgtggtctttgatcgcacccgccagatcaaccgcctgcgcgcgcaactgctcgagatatcccctgcattggagcgggcgttgaccttgaccaacaaaggtccgctggtgctgttgaccgcctaccaaaccccggcggcgatccgccgcgcgggagttgcgcgcctggacgcgtggctgcgcaaacagggcgcgcgtaacgccaccgcgctggcccagaccgcggtggaggccgcccgctcccagtcggtggtgttgcccggagagcgtttggcagcccagatggtcgcccggctggccaagggggtgatcgccctcggtgacgaaatcgccgaactcgacgagctcatcgaggcccgatttcgcgaccatcgacacgccgaagtaatcatcagcctgccaggcatcggaccccggctgggtgcggaattcctcgccgccaccggcggagacatgaccgcgttcaccggtgctgatcaactcgccgggttcgccgggctggcaccacaaccccgcgattccggccgcatccatggaaatctgcgccgccccaagcgctatcaccgcggactgctgcggtcgatgtacctctcggcgcaaatctcgatcaccaccagccccgcctcgcgcaccttttatcagcgcaaaagagccgagggcaaatcgcacaagcaagccgtactcgcattggcaaggcgccgtatcagcgtcctgtgggccatgctccgcgaccacaccacctaccacgacttaccccccatccccatcacgacggcggcttgacaacacgattgggaa

SEQ ID NO: 2565 - DNA, 1486 bp, unidentified
  source 1..1486: mol_type = unassigned DNA; note = element_3a3a37d
  misc_feature 1: note = core
  misc_feature 2..238: note = LE
  misc_feature 239..1471: note = CDS
  misc_feature 1472..1486: note = RE
  misc_feature 9..239: note = bridgeRNA
cgttaccgttttcgtggccccgcaatggggtgcctggtctccgggtccggtatgacttccgccccttgtcgatcatggtcgaaaaagtggtgtcaccgggccgggaggcattggcagaccgctgatcaggggcatgaccgctcgccgagctcgtcgaggtgaagcaggccttcgtaacgtggatgccggcacgctgatgccgcaagcgagaccgggcagggatccatggggagggtttgtgcaccacgaaggcgagatcgacgtctacctcggtctggatgtcggcaagggcgagcatcacggtaccgccctcactcccgcgggcaagaaagtgtttgacaaaccgctgccgaacagcgaaccgcggctgcgcgagctgttcgagaagcttcaggccaaacacggaaagatgctggtcgtggtggaccagccggcctcgatcggcgccctgccgctggctgtggcccgcgatgccggctgccgtgtcgcctaccttccggggctgacgatgcggcggatcgcggacctctaccccggcgagtcgaagaccgacgcccgggacgctgcgatcatcgccgatgccgcccggagcatgccgcacactctgcgggacctggcgccggacgctgagaccgttgccgagctgaacatgatcgcaggctttgatgacgacctggctggcgaggtcacccgcaccaagaaccgtctgcgcgggctgctgactcagatccatccctcgctcgagcgagtcctgggtccccgcctggatcacccggcagtccggttcctgctcgaacgctacggctcaccagcacagttgcggaaagctggcaggcgtcggctgataaccatgctgcggcccaaggccccacgcatggcggaccggctcgtcgaggacatcttcgacgcgcttgacgagcagaccgtcgtcgtgccgggcaccgatgccgcggcgctgatcgtccccagcctggccgcgtcactcaccgccgtgcttgaccagcgccggctcctcgccgccaggatcgaggaactgctggaggcgcaccctctttcgcaggtcctgacctccgtgcccggcatcggggtcaggaccgcagcccggatccttgtcgatgtcgatgtcgatgtcgatgtcgatgtcgatgtcggtgacggcagcggcttcgccaccgctggctgcctcgccgcttacgccggcctggcacccgccacccgccggtccggctcctccatccgaggtgagcacccagcccggcgaggaaacaaacagctcaagcgagccttctacctcgccgcgttcgcctcactgtcgcagccggactcacgcgcccactacgacaggaaacgacgcgaaggaaaacaccacgtcgcagccctcgtctgcctcgcccggcgccgcatcgacgtgctgttcgccatgctccgcgacggcaccttctaccaaccacccaagatcgctaccgcttgacgaaagccatagggg

SEQ ID NO: 2566 - DNA, 1523 bp, unidentified
  source 1..1523: mol_type = unassigned DNA; note = element_3a48183
  misc_feature 1..4: note = core
  misc_feature 5..259: note = LE
  misc_feature 260..1513: note = CDS
  misc_feature 1514..1523: note = RE
ctcactggtgcaccatccttaggtctgtgatcttcggtagatcactgatgcacccgcggtgccgccaggtcatcgcccggctcgcttgacgcttttgacgtccggcatgagttctgcgagacctggcggttacccgggacgtgccgaccgtcgacagggctgagcgccaccgagcgccgatcagtgagcgaaccggcagccgcgtcccggcaccgcatgagggtgcctccccactgggtctagcagcgaggaggcaggcttgcagtctgccagaaacaccctgcccgaagaaccgcctggcgacgtgacgtgcgggatcgactgggcgcgtgatgatcacgccgtgtcggtcgtcaacgccaggggccgggagattcaccggtgctccgtcgagcacagcgccacggggctgcgagagatgcttgccgcgctggcccgccacggcgcccgggaggccgcgatcgagcgccccgacggcccggtggtcgatgccctgctcgaagcagggatcaccgtcgtggtgatcagcccgaaccagatcaagaacctgcgcggccggtacggctcggccgggaacaaggacgaccgcttcgacgcctgcgtcctggccggcacgctgcgcaccgaccgggcacggctggcacccctgacccccgacagcccggccacggtcagcctgcgccgcgcctgccgcgcccgcaaggacctcgtcagccaccgggtcgcggttgccaaccagttgcgcgcccacctgcgcagcgccttccccggcggggccgggctgttcgccgagatcgactcgccggtcagcctgcgcttcctggcccgcttcagcacccaggaccgcgcggactggctctcgccccggcgcctggcagcctggctggccagcgccggatacagcggccgcaccgaccccgccgtcctgcacgcccggctgaccgccgcgccccatggcgccaccggcgacgacggcgccgcgcaagcccacgtcaccgcggccctgctcgccgtcctgaccaccctggtcgagcagatcaaggccctgtcccagcagatcggcgagcagctcgccctgcacgccgacgcgcacatcttcacctcgctgccccgctccggaaccgtccgcgccgcccggctgctcgccgagatcggcgactgccgcgcccgcttccccacaccccaagccctcgcctgcctcgccggcgccgcgccctccacccgccagtccggcaaaatacgcgccgtcagcttccgctggtcctgcgacaagcagctccgcgacgccgtcaccgacttcgccggcgactcccgccacgccagcccctgggccgccgacctctacaaccgcgcctgcgcccgcggccacgaccacccccacgccgtccgcatcctcgcccgcgcctggctgtacgtgatctggcactgctggcaagaccacaccgcctacgaccccgcccgccacaaagcactccagaccctgctcaaccaagatcaacgaaccgcagcttgacacagggcta

SEQ ID NO: 2567 - DNA, 1364 bp, unidentified
  source 1..1364: mol_type = unassigned DNA; note = element_3a4900c
  misc_feature 1..2: note = core
  misc_feature 3..80: note = LE
  misc_feature 81..1106: note = CDS
  misc_feature 1107..1364: note = RE
  misc_feature 1130..1351: note = bridgeRNA
tgatggggtggacggcctccgctcctggcatcgaggtgccatagtgtggctgtcgccagtcacatgagggagagccgtccatggaaaagattatcacaatcggtctggatatcgccaagcacgtctttcaggttcacagcatcgacgcggccggtacagttgttgtgcggcggaagctgcggcgcgacggcgtcatcgacttctttgaagcagtgccgccatgcctgattggcatcgaggcctgtgcgtccggacatcattgggcgcggatgctgatagcgttgggccataaggttcggctgatgccggcatcctacgtaaagccatatgttaagcggcagaagaacgacgcaacagatgcggaggcgatctgcgaggcggtgacgcgccccacaatgcgttttgttgcggtaaagagcgaggaacagcagagcgtgttgatgctgcatcgggtccgtgagcttctgatccgtcagcggaccatgctggtaaatgccttgcgtggccatctcgccgagtttgggattgtgtcacgtcaaggcattgccggtgtcggtatgctgatcgcccttgtcgaagaagacagccagaacgtaattccttttctggcgcgcggtgctcttcttcccatgatcgatcagctccggaaagttcaggagaaggttgacgaattggatctgcagattcatgcctggcaccgctcgagtgagttgagccggcgcctggagacgattccgggggtcggaccgataaccgcgagcgcgatcgcggcgacggtgccggacgcatctttgttcaaatccggccggcagctggcggcttggctcggtctcgtgccgcgacagaactcgtcgggtggcaaagagcggctaggtcgtatcagcaaacagggtgacccctatatccgccggcttctcgtcgtcggcgcacatgctgtcctccgcttcagccggaaaggcaaagcgccgccgacacgatgggcggccaagctgctggagaagaagccatacaacgtcgttgccgtcgctctcgcgaacaagatggccaggatagcgtgggcactaatgattactggtaaacgcttcgaagcttccgccagcacataagggaaacggcggcggatcctgacagaggttggtgaggtgctgatggtgtgatgacgaacggtcgaaccgggatcggacaaacccgctcagtgggggctgctttctaagcgcgatgacctgtctgggagccgatctgcggacttcatcagggccagcggcatgaacacgccgcaatcaataggccgtatacatgcctgcacccgaccaactcgtcagaaatgccaatatgccccttgccaggcggaggccgtccataca

SEQ ID NO: 2568 - DNA, 1373 bp, unidentified
  source 1..1373: mol_type = unassigned DNA; note = element_3a4aef8
  misc_feature 1: note = core
  misc_feature 2..88: note = LE
  misc_feature 89..1120: note = CDS
  misc_feature 1121..1373: note = RE
  misc_feature 1148..1368: note = bridgeRNA
caatgggatggactcctcctccccttacggcatctatgtgccagactggagtagttactttcagtcacaggaaaagaaggagtcaaccatgaatattagtcgtattggaattgatttggcaaagaacgtgtttcagttacacggtgttgatcgtcatggcaaggcggtgtggaaacgccgattgaagcgtgctcaatggctcaaggcagtgttagacaagacggcgcctgattgtgagattggcatggaggcttgtgccggcgcccatcactgggcacgcgagcttgaatcccgaggatacacagttaagttgatggccccgcagttcgtaaagccgtacgtaaagagcaacaagaacgatgccaatgacgcggaagcgatctgtgaagccatgagtcgaccgaacatgcgctttgtaacggtcaagagtatcgagcaacaggatattcaggccacccatcgcgttcgttctgaactgatgtcgcagcgcaccgccaaggccaaccagatccgtggcctggtggccgagtacggcctggtggcaccacaaacgatgtgtgctctacgtgcggcggtaccctgttggttagaggatgccgagaacggtctgacgggtcacttccgttcattattgcatggtatgtggaccgatctggttgcattggatgatcgtgtgcgtgagttggatcgggggatacaaaaacttgccgacagcaacgaagtcacccaacggctacaacagttacgtggtgtgggtccgttagttgccactgcattggtcgccacggtcggagatgcccggcaataccacagaagccggcagatggccgctgccatcgggctcacgccaaggcaacatagcagcgggggtaaagaccgtttgctgggcattagtaagcgcggtgatgtttacttgcgcagcatgttgatacacggagcccgcgcagtggtctcacaagccaaacacagagatgatcgacttagtcggtgggtcatcggaatcgcaacacggcggcatccgaacgtggcagctgtggcactggccaacaagacggcacgcatggcctgggccatgctgcgcaatgaaacagattacgatcctgacttcgcgatcagctgagacaggataaacaaggagaacctcaactacgattgctaagcaagctgcataatggcaaacaggtcgaaccggcgtcagtcaaacccgggaatgtccgagtactccaagtacgtaggagcgatagggaaccgacgcgcgaataacccattatggcccggcatcaacgtatgccaactttagaggccggatatacgtatgcagtcgtgccatgtctgccagaacagattgcttgcaatgaggaggagtccatata

SEQ ID NO: 2569 - DNA, 1390 bp, unidentified
  source 1..1390: mol_type = unassigned DNA; note = element_3a4e417
  misc_feature 1..2: note = core
  misc_feature 3..74: note = LE
  misc_feature 75..1130: note = CDS
  misc_feature 1131..1390: note = RE
  misc_feature 1106..1378: note = bridgeRNA
tgatgatgtgaccgccccccgacggcatcgatgtgccaaggtgggtctgcgatgatccacaaaggaggacggtcatgtcggagattatcacggtcgggtttgacctggcgaagaatgtgtttcaggtgcatggagccgacggcactggccatgcggttcttcgcaagaagttgagacggcaccaggtgctggagtttttctgccaactccctgcatgcgtcgtcgcgatggaagcctgtggcggtgcgcatttctggggccgggagatcggcaagctgggccatgacgttcggctcatcccgcccgcctacgtcaagcccttcgtaaagcgccagaaaaacgatgcggccgatgccgaggcgatctgtgaggccgcactgcgcccgacgatgcgcttcgtgcctgtgaagagcgaagagacacagggtgcggcgatggtgttccgcgtgcgagagcttctgatccgacagcaaacgcaggccatcaacgcccttcgcggtcacctgagcgagttcggccagatcgtgccacaaggggcggccaacgcgacgaagctgattgcaatcgtcgaaggtccggaatgcgctctgccttccgacgccatacctacgctgaaggtcctggttgcgacactggcgcagttggaggcagagatcggcaagctcgataccgagatcacccgtcgcgccaaagagaacgagttggcgcgccgcctgatgacggtgccgggtattggcccgctgatcgccacggccattgcgacccttgcgccgccacctgagaatttccgcaaggcccgagattttgcagcgtcgtgctggaagcacgcctccggcgtgacgctcgggcttgcgccccgccagcattcgacaggcggcaaacagcggctcggggccacgacgaagatgggcgaacggtccctgcggcgcctgctgatcattggcaccaacagcgtcatcatcaaacggcacacccatgccgaggcccggccgggcacctggctgggcgacatgctgtcgcgcaagccaccaatgctggtgcgggtggcgctggcgaacaagatggcgcgcatcgtctgggccctgatggcccggggaggcgtttaccagtctccggtcgtggcggcataagcccgctgtaggtcgcgaggacgtcggagcacaagagggcaaggagaagtttggcgcaacggtcgtgagacgggatcagaggaaccagcctgcaacaaagtgccaccgagcacgcggcgttgatttggagcctgatctacgaacaccatacgggcccgcggcatgtagtgcgccgcatacgaggccggatacatgtctgcacccgatgacgcgccaagatcagctctgaaaaaccctcttgcgcaaggggcggttataca

SEQ ID NO: 2570 - DNA, 1383 bp, unidentified
  source 1..1383: mol_type = unassigned DNA; note = element_3a59ba2
  misc_feature 1..2: note = core
  misc_feature 3..77: note = LE
  misc_feature 78..1115: note = CDS
  misc_feature 1116..1383: note = RE
  misc_feature 1116..1370: note = bridgeRNA
tgttggtgtggacggccccctaccggcatcgatgtgccactatgaggtcgttaaggtctcatacacgggagccgtccatgaaccaaattacgcgcattggggtggatacgtctaagagcgtttttcagctgcatggggtcgacgagcgggaccagcctgtcctgctcaagaagcttcggcgccagcaggtgttgaactttttcggcaggttggcaccaacaaagatcggcatcgaagcgtgtggcgcatcgcatcactgggcgcgatcactgcgcgagttgggtcacgaggttgttcttctgccgccgcaatatgtgaagccctatgtcatgcgtggcaaaaacgatgctgcggatgcagaggcgatttgcgaagcaatgagccgacccaagatgcggtttgtcgcgatcaagagcgttgaacaacaagcagcccaaatgctgctgggggttcgcgatgggttactgcggcggcgaacacaagtcagcaaccagatccgcggctacgcggccgagttcggcctgactgcggccaggggattggctcggatcgaggcgcttttggcggaggttgccgatgatgcgtcgcttccaggccttgctcaggagatgttcatcatgctcagcgggcagtatcgccacgtgaacgcacagatccaagagatcgaaagcaaactgaaggctttacatctgagtgatgaacagagccgaaggctggccgagattccgaccatcggacttatcaccgccaccgcgctcagtgcgaaggtagctgacccgaaagccttccgctccggtcgtgattttgcagcgtggcttgggttgacgcccaagaatcactcgacggcggggaaggtcagactaggcgggatcacccgcgccggcgatgagatgctgcgatgcctgctcgtcagcggcgccaccgcggtcatcaggcaagcaaaactcggcaaggggtatatctcagcctggttggcggcgttgctccagcgcagccctccaaagctcgcagctgtcgcgctcgccaataaaatggcgcggatcgcctggaaattgatggtcagcggtgaacgctataacccattgaaagcgaccaccgtcgcggtgagcgcttaacgcattcgagctgcagctggtcatagggcgcgcagctcgagactgaaacttgcaggagacaaataggtggtgtgatcgatcggtcccagacgcgcggcattcctccgaggcgcagggcagtcaatgccgtccccttgttcggaacgcgcgttgcggaaaccatctgggccagcggtctacaggccgcactcaaacgccgaacatatgaccgcaagcgatcaggcacacgacccatcaaatctcttgcaagccgggggccgtccacata

SEQ ID NO: 2571 - DNA, 1435 bp, unidentified
  source 1..1435: mol_type = unassigned DNA; note = element_3a61d31
  misc_feature 1..2: note = core
  misc_feature 3..82: note = LE
  misc_feature 83..1183: note = CDS
  misc_feature 1184..1435: note = RE
  misc_feature 1253..1374: note = bridgeRNA
taattggatggactcaccctcaccgaggcgtcaaggcgccacggtggcggtctaagaagccaccgacagtgagggtgagtccatgaaaaagcatacgacgatgaataagccggtgtctgcaaccgatgtatcggtgtgcatgacagtcgccgtggatctggcgaaaaaggtccaggtggcgggggaagacgccctgggtcaactggcgtacgaacagcgaatcaagtcgcgtgaagcgtttcaggtgtttctgcagaagctgccggagggcgtgacggtgctgatggagaccggtcctggagcacaagcctgggcccggctgctgcaggcgcagggcaacctggtgcgtatcctgccggcccagcgggtggccgagcaccggagcggagcgaagaatgatcgcaatgatgcccacgccattctgcgggcgggccgggatagcagtattgcgtcggtaccggtgaagagcgtcgcggcactggcgatgcaggcctggcaccgtgtccggcggggctatgtgcggcggcgcaccgccatgggtaatcagatccgcgggctgctgctggagcagggtatcgccctggcgcagggggatgtgggcttgaagcaaggtgtcacccgggtgctggaggacgccagccagccgttgccggcgctgctgcgcgagctgatcgacgagatgctgaacgaatggaaacggctgggcgagcgtatcgccgcgctgaccgggcgtctggaagcctgtgccgccgccgacccgacagccaaacggctgatgacggtacgtggtatcggtccgatcacggccacggctttgctggccaaacaggtcgagccggaacgtttcgccaatgcgcgtcagttcgctgcctacttcggtatcgtgcccgaccagcacagcagcgggcagaaggtgcggctgggcaagatgaccaaacgtggcgacgcctatgtgcgcagcctgatggtcgtgggctcgcatgcggtgttgaagcaactgcggcccgattccgaacacccggacgatcggcgcctgcagcgctggctacaacgtctggggcgcaagggcgcggcagtgcgactggccaaccgcaacctgcgtatcgcctgggtgctgctgtgcagcgaacagacctaccagcgcaagccgaatgcttgccgggagatggaaatgagccactgatcaacgagttcccgccaacggggcgccaagtcgctccaacccttgctgaagaacattgacccctggtcagaccgtcgcggatcgatgcctacgctcctaccggccttcgaggcctctttgtaatcggcattccgcgggcttacccaatgttggccagaagcccgacgtggcttcctcgaacaggcctaatacatagatgcagtcgggttttcatgttcaaaagcgggttgacggtgggggtgagtccataca

SEQ ID NO: 2572 - DNA, 1350 bp, unidentified
  source 1..1350: mol_type = unassigned DNA; note = element_3a6987d
  misc_feature 1..2: note = core
  misc_feature 3..77: note = LE
  misc_feature 78..1112: note = CDS
  misc_feature 1113..1350: note = RE
  misc_feature 1145..1345: note = bridgeRNA
tgatgtgatggacgccctttcctgaagcaggcagtgccatacttttactgtctgcatttgcaacgggagtaaatcacatgagcatgatcaaggttgttggtattgatatcgccaaatctgtttttcaggtatgcgtctggatggtcgatggctccgtcgcatggaacaaaaaaatctctcgatccaaattgctggataccatccgacaattcgaacccggaactcttgttgcaatggaggcctgcgccacttcacacttctgggggcgaaccatatcctccatgggctattgcgtcagactcattcccgcacaacacgtgaaagctttcgtccgcagccagaaaaatgatgccaatgatgcgctggcaatttgcgagacagcgcttcgcccgggtatccactttgttgctgtaaaaaccacagaacagcaggatatcaaggcgcttcggaatacacgtcaactgatggttgaacagagaacggcgctggccaaccagcttcgttctctgctcgctgaatatggcgtttccctgtctgccgggatcctgcacctccagcaacagctgccggaggtgattgaagatgcgtcgaatgagttaacgtttactcttcggcgtttactttattcattgcgggaagatatgcaggcactgaatgaacgcgtcaccggcctggacaaagaaattactgcattatcttcacaacagacagcatatcaccatttgttaacaatcccgggcgttggcccgctcatcgcggcggcatttatcagtgaagtggatgcaggacaattttccagcggcagagaattatcagcctggtgtggactggttccccgacagcacagttcgggaggcaagcaacgattatcctccgtgacaaaaaatggtaatcgtagtctcagaacattaatcattcatggtgcgcggtctgtaatgcgctgtgtgaaaaagcgcgatgactgtatgggcctttggctgcaaaggcttgaggctcggcgggagttccttaaaaccacagtcgcactggcgaataaactaacccgaattatctggcgcgtactgactgaccaggttgattttaatatgagtaaggccttttctatgatttaacccataggaaactgacagcaaaaatgtaccactgagtttgcatagcactgatgagaaaacggtaaaccgtctctgtaacagcctgaagtgtgcctgggtagtaatataccggtgtagtgataaggaaacagggtgcggatgacatcatggcgcgggtcatcagatccactaacgacgccggatatatggcagcaaaccgcatcgaatcagtacttgcattacccggggcgtccatata

SEQ ID NO: 2573 - DNA, 1445 bp, unidentified
  source 1..1445: mol_type = unassigned DNA; note = element_3a6b00e
  misc_feature 1: note = core
  misc_feature 2..77: note = LE
  misc_feature 78..1142: note = CDS
  misc_feature 1143..1445: note = RE
  misc_feature 1210..1436: note = bridgeRNA
taatgggatggacccgccgtgctcctgccccacccagccgcatagctggttcggggctacagaatcaggagcattccatgccacgccaccgcagtgatcttgaagccgttgcaacaatcggcgtcgacatcggcaagaacacgttccacctcgtcggtctcggcagaaatggcgcgatcgttctgcgccagaagctttcacgcccgcaagtcgaggccaggctcgcgaacatgccgccctgcctcatcggcatggaggcgtgcgtcggggcgcatcatctcagccggcaactcaaggcgctcggccacgacgcgcggttgatgcctgcccggtacgtgcgaccgtattcgaaagggcagaagaacgacttccgcgacgcggaagcgatcgctgaagctgttctgcgtcccaccatgaagtttgtcgccatcaaaacgatcgagcaactcgatcttcaggcgctgcatcgcgtgcgcgaacggctggtttgccagcgcaccagtgtaatcaaccagatccgcgctttcctgctcgagcgcggcattgcggtgcgccagggactgcgagcgctgcgcactgagatgcccattatcctcgcgatgacggacaagctgtcgccgcgcatgatccacgtgatcgaggctctctgcgcggactggcgccatctcgatgcgcgcatcgagaccgtgtcggaggagatcaaaacgctgtccgagcaggatgacggagccaagcgcctcatgaccgtgccgggcattggcccgatcatctcgaccgcaacggtcgctgcgatcggcaagggcgatatgttctccaagggcagagatttcggcgcttggctcggactcgtgccgcgacaaatgtcgaccggagggcgcacgatcctcgggcccatctctaagcgtggcaatcgctacttgcgcatgctgttcgttcaggcagcgcgtgctgtgctactgcgcccgcagagctgggggaagcatggcctcaaatcctggatcgaggccgcagcccggcggctcaatcgattcaagctagcgattgcgctcgccaacaaaatcgcccgcatcgtctggggggtcctccatggcggtcgtaacttcgaggtcagaacgctgaggcccgcgctccaagcggcatgagtcggtggtcaaattaaggaactactcacgacaaggagaaacgcgatgtaagcgcgacaatcgctttacctaccgaggtctgcgagagaaatagaagagatggagaaatggtctttccagcgcatccgagaactgatgacccaaatagcccttcgaggcatggccgctaatgaggtcgggcgcgcgcggatttccatgatggtccggagcatgagctccaacgatgaggcctgatacattggtgcaagaccgtacactccaggctcagctgttttctcttgcaacgcacggcgggtccataca

SEQ ID NO: 2574 - DNA, 1590 bp, unidentified
  source 1..1590: mol_type = unassigned DNA; note = element_3a6e27c
  misc_feature 1: note = core
  misc_feature 2..293: note = LE
  misc_feature 294..1469: note = CDS
  misc_feature 1470..1590: note = RE
  misc_feature 39..269: note = bridgeRNA
tcgtattatatagtagtagtttttatagaccctctccaaggtctttacaactattaggtcatagtccattctttacctcttctgtaggttcgactatgatatataagatgctgtggattggttttatttctcctaccacttgatggttttaggaaggctccaaccacagtctctttgttcatttgttaatcagttagataccgcatgacggtttatttagaacgaggttacaatcgcaaagtgtttagtggtttaaatacagtatcaatattttatttaaaggatgtgtttttatgatttttgttggtattgatgtttctaaggataaacacgattgttttattactaattctgatggtgaaatactttttgattcttttacgattgcaaataatatagaaggcttcgaagatttatttcataagattaaatctatttcaaatgatttaactaaagtaaaagtaggtcttgaagctactggacactacagttataacattttaggattccttcttaacaaaaaccttactgtatacgtaattaaccctttacacactagtctttacagaaaaagtctaagccttaaaaagactaaaacagataaggttgattcccaaactatcacaactatgcttatgtccgatgtagacttaaagccctactcaaatgaattatatcataatgaagagctaaagtcactatctcgttatcgttttgataaagttcaagaacgtgctaaacttaaatcttctatagctcgccttgttaatatccttttcccagaattggaaaaattattttgtaccatacacttagcaactgtttatcaacttcttagcgaatatcctggtgcttcttatattgcaaattctaatttaaatgacctttcaattcttctttcttcttcatcaaaaggaagatttgattattcacaagcagaattagttcactctgttgcaaagaaatctattggctccattatgcctgctaagtctcttgaattaaaacacactattaaacttattaaagaacttgattcagaagttgatgagatagagaaggaaattaaaattatcatggataaaattaattctcctattttaacaatacctggtattagctatcgcatgggagcaatgattttatctgaaattggctgtttttctaagtttgattcccctgataaaatacttgcttttgctgggctttctccatccacatatcaatctggaaaacttgattcttctcactctcatatggaaaaaagaggctcaagatatctacgttatgcactatttaatgctaccaaatttgtgtgtaattgggatcccatttttaatgcctatctcttaaagaaacgttctgaaggcaaacactacaatgttgcaatttctcatgctactaaaaagttagtacgagttatgtttcaattagaaaaaactgggcaagtatttcaaagagttgcttagtacttctaatattctaaatttttgagtgcctgtatgacactctatttgtcatgcaattttcaatgttcaacaaattttttattatttttttgaaaaactattgacttttaatagttagtct

SEQ ID NO: 2575 - DNA, 1365 bp, unidentified
  source 1..1365: mol_type = unassigned DNA; note = element_3a7df02
  misc_feature 1..2: note = core
  misc_feature 3..75: note = LE
  misc_feature 76..1122: note = CDS
  misc_feature 1123..1365: note = RE
  misc_feature 1092..1352: note = bridgeRNA
tgttggggtggacggccctgcggcatcttgtgccaaggtttggttgtcaacatccgaacctgaaggaccgtcctcatgaaccttaagcgcattggcctcgacacgtccaaggccgtcttcaccctgcatggcgtggaccacgacgagaaggccgtcctgcgccgcaacctgaggcgggccgagatggaggcgttcttcgccaagctgccgccgacgcacgtggccttggaggcgtgcggcggctcgcaccattgggggcgtcggctcgcgtcctttggccacacggtgcagctgatcccgccgcaatacgtcaagccgttcgtcaagcgcggcaagaacgaccgcaacgacgccgaggcgatcagcgaggcggcatcacggccgggcatgccgagcgtggcggtgcgatcggccgagcagcaggccgaggcgatcgtgctctcggcgcgcgagttgctggtccggcagcggacgcagctggtcaacgccgtgcgcggccatgccgccgagttcggcatcgtggcggccaagggcaccagccagctgccggcgctgctcgaagtcgtggcggccggggaggcggtgccggacgcggccaaggagatgctggcattcctgggcgggcaagtggcccagctcgatgagcggatcggggatctggaacgccggatgaagcagcagcacaaggccaacccggtcagccaattgctggccgaggtgcctggcatcggcccgatcggcgcgctgagcctggcgctcacgatcgacccgggccggttccagtccgggcggcacttcgcagcctggctgggcctgacgcccaaggagcactcgacaggcgggcgccagcgcctgggcggcatcagccgagccggcaacgagcggctgcggcagttgctagtgctgggggcaacggcagtgatcaagtatgccaagccggggagcaagactgcttcgccttggttgctggccttgctggagcgcaagccgcgcaagctcgcggcggtggctctagccaacaagatggcccgcgtcgtgtgggccatgatggcgaccggggaagcgtatcggggcagcaagacagtcgccacgcaggcggccggggctgccgtgatcgcctaacccgctcgcaggtgccagggtgcaagaagagctgcaggagatgatgatcggtcgatccgacgaacgagtgaacccgggacgcgcaacggccggtcgaggccgcttgattgttgtggtctcgttcgcggaacccatctgggccagcggtcatgacgccgcgttaacaggccgaacacatgaccgccgtcgcaccgcccattaaatccagcagcaagaccttgcactccaggggccgtccacaca

SEQ ID NO: 2576 - DNA, 1379 bp, unidentified
  source 1..1379: mol_type = unassigned DNA; note = element_3a7e514
  misc_feature 1..2: note = core
  misc_feature 3..86: note = LE
  misc_feature 87..1118: note = CDS
  misc_feature 1119..1379: note = RE
  misc_feature 1149..1367: note = bridgeRNA
tgatgctgtggacggctcctccaccggcacgtaagtgccattgaggtggtcgccgatggggcgaccacgattcggaggagggcagcatgcaaagggtcacgacgataggtctcgacatcgcgaagtcggtttttcaggtccacggcatcgacgcgataggcaaggtggtgatccgccgccagctgaagcgacggtatgtcctggcattcttccagaagttgccgccatgcctcgtcggcattgaggcctgcgcatcgtcgcatcactggtcgcgcgaactcaaggcgctcgggcacacagtacgtctcatgccgccggcctatgtcaaaccctacgtcaagcgacagaagaacgatgccgctgacgccgaggcgatctgcgaggcggtcaccagggccaacatgcggttcgtggagaccaagacccccgagcagcagagctgcctgatgctgcatcgcacacgccatctcttgatccgacagcaaacggccgtgatcaatgcgatccgcgcccatcttgccgagttcggggtcgtcgcgccggtcggacgccggggcgtcgacgagctgctcgacgttgtcgccgcttcaagcgaggaacgggtgcccgaggtggcccgtggttgtgttgccgctctcggagttcaactgcggatgctaaaagcccagatcctggagtttgaccgccagatcatggcctggcaccgatccaatgagacgagcagacggctcgatgagatacccggcgtcggcccggcgctggccaccgctctggtcgccagtgttgcagacccgaaggccttccgatcggggcggaacttctcggcctggatcgggctcgtgccgaagcagcactcgagcggcggcaagcacaggctcggcagtatcagcaagcaaggcgatcgctatctgcgcagcctgttcacggctggcgcactcgcggtcatccgttatgccaagatccatggcaccaggcatcggccttggctcgcggcgttgctggctcgccggccaaccaaggtcgccgcgatcgcgcttgccaacaagatcgccagaatggcctgggccatgatggttaagggcgaacgctacaaggaacccgccgcgcttgcggcgtaaccgaagtcacgccagcaaaacggcgtgatatgaaggttgggagggcgaacagcacgtaatgcagtgccggtcgatccggcgatcaggacaacccactagtgccagcgcattgtcgaatgcggggttttgaccgggacctgatccgcggagggcattatggccagcggtcatgagaaccgcgcaaggaggccgaacacatggctgcaccgacccagctgcaaacgtgaagaaaacccttgccaacggggcgccgtccacaca

SEQ ID NO: 2577 - DNA, 1113 bp, unidentified
  source 1..1113: mol_type = unassigned DNA; note = element_3a8673c
  misc_feature 1..2: note = core
  misc_feature 3..177: note = LE
  misc_feature 178..1104: note = CDS
  misc_feature 1105..1113: note = RE
  misc_feature 1..176: note = bridgeRNA
cctgtgtgttggttctggtgtatggtttgaagtgggaaggagaccgaatgaatcctggtcgtcctttcggacaggccgtggcatggcccggtcccttcccaccggtgaaccatcaacctgaacagttgcacggggctgtttcaagccagaccccgcaccacaggaagaggcgtggacatgatagcccagaactatgtcggctgcgacatctcaaagcagtggctcgatttttttgatgagacaagtggccgtcttcggcgcatcgacaaccaggccgacgcgatcgcggcgtatgtggcgggccttgatcccagtcgggacttcgtcgtcatggaggcgacaggcgtccatgaccggcttctgcgccatgcgctggccaaggccggcgtgccgttctcgcggcacaacccagcgcatacccaccactatgccaagtcgacgagacggcgggccaagaccgatcctctcgacgccaggatgctgagcgactacggccgtcgctataatcctgaggccgagccggcgccgcgcgaagaagtcgagcggcttcaatcgcttgcccgctaccgcgatcaactggtcgagatgcgggcaacggcgaagaagcacctcgccgaggccttcaatgagatcgtcattgccgatctggaagaaacgatcgcctacctcgacacgcgcatcaaggcgatcgagagccagattgccgaagtcattcgccaagccgaggacaccgcccgcgattattcgctcatggtctccgtgcccggtgtctccaaggtcggcgcattctcgctgctggcgctcctgcccgagctcggccagcgctcaccaaggcgatcgcggcactggtcggcctttgccccgttcgacaacaaaagcggcaagctcaaccgcaggagccagatccagggcgggcgatcacgcgtgcgccgcgctctctacatggcagccctcaccgccattagaacctgtgagcgcttcaagaccttctacagcgcacttgctgcccgctccggctccaagaagctcgccatcatcgccgtcgcaaggaagctcctggtcgtcctcaacgccatcatgcgcgataaaaccgcattcgcatgaacacagttg

SEQ ID NO: 2578 - DNA, 1563 bp, unidentified
  source 1..1563: mol_type = unassigned DNA; note = element_3a92762
  misc_feature 1..2: note = core
  misc_feature 3..282: note = LE
  misc_feature 283..1503: note = CDS
  misc_feature 1504..1563: note = RE
ctggtattatcttcactcagtacatgagtaaagaaggtttatgttaaaatagatcaaatttccgtagggagacagcttgcgtccctccttatggcggcatacgccgaccattctaaaaagactgttgcttcctgcgatctgactgggaatgttgattaaggatgctatggggaccggttgatatcggcctaccatttatatcccaggatacatgaagtcagacgctgcaggaatatcctctctactgaaaaagaacaaccaccacaacaaaaggacaccattatgaaatatctcggcattgatgtctcaaaatcaacgtcccgttatgtcatcctcgacaatgacggggaaaaagcttcaaaacccttcacgctcaataacgatcaaaatgcttttacgcaattactcgaacggctcaaagaacttcatctgcggcctgaaaatcttctcgttggtattgaagccaccgggatctggtgggaaaacctttactgtttcttgaccgaacaaaagatcaacgtcatcgtcttaaacccgcaccagaccaacaaattccgcgaagccttacgtctcaaagccaagaccgacgatattgatgcttatgtcatcgcggggctattacgttccggcgaatacgccgccagttacatccccgaagaaactatccaaatcttacgtgagatcgtcaagttgcgacaccaactcgttacaaaccgtcaaggttttgagcgtcaaactcaagcgctcttgggcctgctgttcccggaatacgagaaaaccgccatcaagaatccgttctccgtcgcatcgctggccattcttaaggcttatccgaccgccaaacacttagccgaagccaaaccaaagaacatcgaaaaaatcgtccgtcacattaaagggaacaattttaatatcactgaaattcaaacactcatcgaaaccgctaaaaattccatctattccggccgtgcgaaagatgctcgcggcatgaatctcaacatccttctcactcacgtcgaaacgctgcatcattcgatcgcccaactcgaccaaaggatcaacgacatcctctctccgcaaaaccctgacgacgctcagagcttcccaggagccaatcttctcaccatcccaggcgttagccccaaaactctggccgccatcctctccgtcgttggtgccaacggtaatgcttacccggacgggaaaaatttcatcggttacatcggattctttccgaaaatctacgaatccggcgaaaccaaacgagataacgtcatctccaaacgcggccccaattacatccgtcgcgccctttacatcgccgcggtcgctggactcaaacacaacaccgagtttaaagccctttacaaccggaaaatatctcaaggcaaacccgctaaacaagcgctcatctgtgtcgccaaaaaacttgctcatctttgcctgagcatgcttaaatctggagaatcttataatccgtcacgcgtctttatgcctgtctgagaaagatcttttactgctctttgacaacctgtttttttaacttgactctttataggatgt

SEQ ID NO: 2579 - DNA, 1344 bp, unidentified
  source 1..1344: mol_type = unassigned DNA; note = element_3a93939
  misc_feature 1: note = core
  misc_feature 2..61: note = LE
  misc_feature 62..1093: note = CDS
  misc_feature 1094..1344: note = RE
  misc_feature 1117..1335: note = bridgeRNA
taatgggatggtccgccgcagatctccagaaggtgtagagtgcggggcaaggaggcattccatgaaactacacgtggtcggcattgatttgggtaagacggtttttcatttggtggggctggattcgacaggtagggtggtgatccgcaagagatgttctcgcacccaactactggttttcaccgcgaatttacaggtgcagttgattggcatggaggcctgtagtggatcgcactttctggggcgggcgttgcgcgaacaaggtcatgaagtgcgattgatgccggcgcaatacgtgaaaccctacgtgcagacgaacaagagcgactacctggatgccgaagcgattgccgaagcggtgcaacgaccgagaatgcgttttgtaccgatcaaaacagaggaacagctcgacctgcaggctctgcatcgcgtgcgcgagcgttgggtgatgcgacgcacggcggtggtgaatcagattcgcagccttcttctggaacgtggactgaccgtgcccaagggccgaagtcatctcgaggagcaactgcctcgtatcctggaagacgctgagttaaatctgtccgactcattccgtgttctgctggctcaactcaaattggaactggaacaactcgccgcacgcattgaggagatggatcgggtcatccagaaaacggccagagagaatgaagcctgccaacgactcacggagattccgggagtcggtccagttaccgcaacagcactgatcgctgcggtgggcaatgccagcgcctttggaaaagggcgaaatctgtcagcctggatggggatcgttccgggagagtactccactggcgggaagcagaagttactgggcattagtaaacggggcaataagtacttacgaagactcttcgttcagggcgcacgcagcgtattgcaacagcgccacaagcaggttcccgggctgcgggagtggctcgcgcaactgctggcgcgaacgcaccagaatgtggtcgtcgtcgctttggccaacaagctggttcgcatggcctgggcggtcttatgtaagaacgaacgctatcgcgctcccgtttttgtggggacaaattaaaatacctgtttagggaaaaaagttcctgccaggtctgctggcggaaaatagagatggcaatgggtctctcccacgctttcgaaacccgatctcggaaaaggtcgcatccaggccgtccagtttatgaggacgaaagcgagcggacatccatcatggcccggagtcacggactccactgaaggccgaatacattggcgcagaccaactgccattgaacatttttcgcttgcaactctgcggcggaccataca

SEQ ID NO: 2580 - DNA, 1342 bp, unidentified
  source 1..1342: mol_type = unassigned DNA; note = element_3a99366
  misc_feature 1: note = core
  misc_feature 2..246: note = LE
  misc_feature 247..1326: note = CDS
  misc_feature 1327..1342: note = RE
  misc_feature 7..243: note = bridgeRNA
ctgtgagggttgcctcgtcagttcctcggtgatgggctgacgccgaccacggcggctgtgactcttcggctgactggcgtgatgccttggcgcggacttgtccggctgccgtggtcggtaccggcccggccggagacgttggcctgatcaggagcttgaccgccggtagccgccggcgtgtcccgtcacagtcctgccatctccagaccggaccggacctcgcgtcccgtctgcgaaggagaacgcatgtccatgctggcagaactggtcgaggtcgtcatcggcgtcgacacccacaagcacacccacaccgccgcggtcctcgacgcccggaccggcgcggtcctggaccgggtcaccgtcaccaccgatccggacggctacgccgagctcgtcacgctcgccgagcggcactcaggtctgcgggcgtgggcgatggaaggctccggcgggtacggcgccggactggcccgacacttggccggcctgggcgagctggtcgtcgagctggaccggccggtccgcccggcccgcaaggcgggagcgaagtccgacccgatcgacgccgaacgcgctgcccgggacgcgctggcccggacccagttggcccagcccaagaccggcccggaaagggccgcgctgcagatgcactgcacagcccgccgggccgcggtcgaggccgccggcgacgcccaacgtcagctccacgccctggtcgtcaccgcgccggagccggtccgggcccggttccgaggccggaccacccgggcgatgatcaccgtcgcggagcggctccgcccgcaggcatccaccgcggctcgagcaagcacgcggaccgcaagcaccgatccggaggtgctggccgcgttgcgggtgctgaagatgttggcggcccggattcggttcctggagggcgaggcggccgcgcacgagaaggcgatcctggccctggtccggtgctggcgccccgacctgctcgccctgcgcggggtcggcccgatcgttgctgccgcggtcctgaccgcctggtcccacccgggccgctgccgcagcgacgccgcgttcgcgatgctcgccggcgccgcacccatcccggcgtcctccggcaagaccgtccggcaccggctcaaccggtccggggaccgccagctcaaccgagccctgcacaccatcacgctcagccgcctgcagtacgaccccgccacccgcgcctacgccgaccgccgccgagcccagggcaagaccgaccgcgagatcaagcgctgcctcaagcggtacatcgcccgacagctctaccgccaactcgaagcaccatcaccggcttgacgaaccataggagcgt

SEQ ID NO: 2581 - DNA, 1773 bp, unidentified
  source 1..1773: mol_type = unassigned DNA; note = element_3a9a3bd
  misc_feature 1..2: note = core
  misc_feature 3..117: note = LE
  misc_feature 118..1389: note = CDS
  misc_feature 1390..1773: note = RE
  misc_feature 1443..1695: note = bridgeRNA
agcattcctgtagagcgttaattatcagctttgcaaaaaaacaagcgcctcggtacgatgggagtacgcaacgggtcatagccctttaaatcccatcatccaggaggacgctctactatgaagtttaaatcgcaggacagacaaaatcaactcattgaaaaaattaccgcccagcatctagtcgtaggaatcgacattgctcagcaaacgcatgtcgctcgtgctgttaactttcgaggaatcgtggtcggtaatcctctatccttttctaatgatgaagagggttttcaattccttcttcgttggattcaaacgttgcaatccacacacgctttaacggaggctattgttggtatggagcctaccgggcactattggtttagcctatccaactggctttcggatcgccagtttgaagtcgttctagtcaatccacatctcgtgagaaaaaataaggagaaccgcgacaatacgccatccaagagcgacaaaaaggatgctctggtcatcgctgatatggtcaaaaacggctattatttgttcattcgcaacacaccagaagccttcgaagaattacgtgtctttctctcaaaccgcgactctgtcgtaacgagactcgttagtgcgaagaaccaaatccatcgctgggtcgacgttgtttttcctgagctgcgacaagtcttcaaaaacatcatgtgtacaggttcactagccacacttcgtctttttcctacacccgaagaattgtataaacttcagcctcaagacgtcctgcaaggttggaaatcggttatgaaacggcattctggtgaaccaaaggccaaagctcttatctcttttgctagccgttctgttggcactaagcaagcattgcatgcctacaaacttcacttgaagcaacttctcgatgagtacgaccttgcttgcctgcaactaaaaacggtagagacagagattgttgccgttctaaaacgtattccatttgctgaatccatgcttgctgtcaaagggataagtgttatttcactagccggtattctaggtgaggcaggggatttaagcggatttgtgcacggcaatgccttgctgcgccatgctgggctaaacctcgcagaagctagttcaggcaaatggactggacaaatgaagattagcaaacgaggacgatctcgtctccgccgtttcatctttatgatgaccatgagtttagtagcaagtaattcggagtttaaagccatgcatacctacaatgtacaagtaaagaagatgaagaaaatgaggtctattatgaaactgtgtggaaagttagctcgaatacttgtagggatggcccgcagtggcgaagcttacaaccctccaaaaacaatgcctattcagctcgcagcttaacctataacctaccgtttcgtagcacgagtattggcttatttgcaggatttcaaagaaagcacggagtaccggatatatttaaccaaagggcacagacccgtaacgatagcaagaccggcctccaccccttggacaggcgtaacgaaggaatgagagggcacagacccgttgagacatgggagtgaaaacctccaagggaggcgtggagaaagcgtgcagtaaatggaattatatggggcaggatatgttccccactattcccgtgcgtcttcatgttgccgaagtctaacacggagttccccttctgatctttcaccccttacccaccgggcgaaatcctgcgaataagcgagtattagtgagaaaactatatcgtatcgaggg

SEQ ID NO: 2582 - DNA, 1579 bp, unidentified
  source 1..1579: mol_type = unassigned DNA; note = element_3a9e04e
  misc_feature 1: note = core
  misc_feature 2..243: note = LE
  misc_feature 244..1446: note = CDS
  misc_feature 1447..1579: note = RE
  misc_feature 6..223: note = bridgeRNA
tcgtattatgaggtcaccagattcttctggtggacctcattttagtgtggtcgtaagatagcggtagccggggatcgaacgtttctgcccgtgggagttggatcccgagagctatacagttcatcccccctacttgttaaaccatgattaggctggttgggacgaggatcccgaatcacatgcgatagtgtggacaacaagaaggttaggggttaccggtgaaattatattgggagtgattatatgaaccctgtcattggtttggatgtatccaaaggggaaagtcatgcacaagcttttgcagatcgaggaacgccctacggaaagacttttcgttttaaacatgatcttgagggactcgcgtcttttcttcgttatgctcaagatttggaatcctttacggggaagcgttcggccgtcatattagaagcaacgggtcattatcacagtccagttgttcaattcctggacgagcatcagtttctgcatgtcgtcattaatccgttactttcacaccaagcgaaaaaggctaatctacgtaaggttaaaacggatgccgccgatgcataccagttgggggaaatattctacaaagaagagctggagccttacaaaaaacgaggccaatttctgatgaatttgcgttacctgacaagacaacacgagtctttaacggatatgtacgttcaagcaaagttacaattccaagcggtgttagatcaggtcttccccgagtatcatggcgtgtttggtgacctttattcaaaggtttcccttcgtttcctggctttatatccaacgtctcagtcggtgcttgcgaggtccgagaacgacatcatgacgcacattcagactcttgcgggatttgttaatcccaacgactggacgctggaaagggcacaaaagctaatggctgcagcggagcgtaatcccttcaaggagacagctttcccaagtcatttaatctctctggacctacttattcatttacttcttcaataccaagagcatctagcgaagctagatcagtccatagaggagttagctcgaggactattggagtatgatttaattcaatcgatccctggcatcggtactaaacttgcagcaacaattttagccgaaatcggggaaatcgatcgattcaatcatgcaaaaaaactgatcgcctttgcaggtattgatcctagtgtattttcttccggaaagtttactgctactcgaaatccaattactaaacgaggttctagaaagctcagaacagccttatacctagctgttcgttgtggtctgcgaagctcacgtaataagaaattaagggctttttacgataagaagcgtgctgaaggcaaactgtttaaagtagctgtaatcgcttgtgccaataaactgatccactggatttatgctatcttaactaagaaagaacctttccgcttagtctgaattagcaagccttagacattgaggaaaaccttcccatatactgtgggacggttatttgttgtacccttttaccagtatatcatccttcgtttcgttcattaataattaaatattgacagcctattagctggta

SEQ ID NO: 2583 - DNA, 1294 bp, unidentified
  source 1..1294: mol_type = unassigned DNA; note = element_3aa8426
  misc_feature 1..2: note = core
  misc_feature 3..369: note = LE
  misc_feature 370..1218: note = CDS
  misc_feature 1219..1294: note = RE
  misc_feature 7..211: note = bridgeRNA
tcctttagattagcaaaatattttaaatggttagttttgtttaagaagacaaaccgaaaaagagaatgggtgaactatcgataactataaacctaagatttatatcccgaattagtcccaatctcttttctgttgaagtgcgccaattagaatcttaagtacaaagacttattaaaggatttagctaattcaacaatttcggtttatcaaaacatctaaaacaaaattatgaaaagaaattggtttatcggaattgacatctcaaaaaaaactcttgacattgttatttatgattaggaaaagcagaagtccaaaaaacattttaaggttacaaataatctcaaaggttttaaagaaataatacaggaattgaaagcagaaggaataaatcttaaagaagcattaatttgtcttgaatactgtggtatttatggacttgaattagggctttttcttgaaaataaaattgatttctgctttacagctcctttgcatattaaaagaagtttaggcctaaccagaggcaaaaatgataagctggatgcatataaaatagcacgtttttgctatttgtttcgagatgaactatcaccaactaaaatgccatctaaaacaatggttaagcttaaaactctaatggccgaaagaaatagagttgtaaaagctgctaaaacagaaaagcaagtcttaaaagagttctctatccaattagacccaaaagcaactaaaagaataaaacaaagaataaaattatcatcagacgatatcaaggctatagaaaatgagatacttctattaataaagaaagatataaagctgcaagaaaactataatctcctgttaagtattactggaataggtataataaatgctgtaatgatgatattatgtacaaataattttgagggaataactaacgcccggtcttttgcttgttattgtggtgtagcaccatttgaatatagttcaggaacaagtatgcggggaaaaaccagagtaagtaacctagcaaataaaaaaatgaaagcagatctaaccaatgctgcacgatcagcagttttgaatgatcctgaacttaggatctattataaacgaaaaagagaggaaggcaaagcacatggtacggtaatgagtgcagttaagttcaaaattataaccagagcatttgcaattgtaaatagaaaaacaccttatgtaacacttagaaaagtaggttaagagtatacataagacacatttgaataaataaaaatagtattaatttaaatcgaattgtttgttttagtcttagaat

SEQ ID NO: 2584 - DNA, 1496 bp, unidentified
  source 1..1496: mol_type = unassigned DNA; note = element_3abbb61
  misc_feature 1..2: note = core
  misc_feature 3..240: note = LE
  misc_feature 241..1476: note = CDS
  misc_feature 1477..1496: note = RE
  misc_feature 7..237: note = bridgeRNA
ctaataggttcttgtcagcctgctggtgcaggatggctccggtagcggctggcgggtcagcactccactcttcggacccttcgaggtcttgcggcagaccgtgcgcccgttggtcgtgaggagatgagacagccgatgggatgacgtgccccgctcgagcgcggtgagcacttgactattagatcgctggcgtctcctccacgctacttgcgcagatgatgtccatgagggaagggacagttgatctgggtcggagacgactgggccgaggaccaccacgacatagaacttctcgacgaccacggacgcagactcgcccgcgcacggctgccggaaggccttgacggcatcggccggctgcacgcgctgatcgcggagcacatgcccgcctcctgggccgacctcgagccggccgaagctgcccggcgggtgcagatcgggatcgagaccgaccggggaacctgggtgcaggcgctgctggccgccggctatcaggtgtatgcgatcaacccgatgtcggtggcccggtatcgggaacggcactccacctcgggtgcgaagtccgacgccggggacgcacacgtgctggccgagatcgtgcgcctggatcacgcccaccatcgccaggtcgccggtgacagcgtcctcgccgaagccgtgaaactggcggcccgggcgcatcaaagcctgatctgggaccgcacccggcaggtcctgcggctgcggtccgcgctgcgggagttcttccccgccgcactacaggccttcgacgacctgaccgccggcgaagcgctcgaactgctcgaccgggcaccagatccagaccgcgccgcacggctgccccggattacgatcattgctgcgctgcggcgcgccggccgccgtgacctcgacgccaaagccaccacgatccagcagacgctcaaggcggaacagttgcgtcaaccgcggccagtgcagaacgcctacgcggcgatcgtgtccagccaggtgcagctcatcaacatcctcaacatcgagatcgccgagctcgggcaggtggtggcctcgcattttggccggcaccgggacgctgaacgttacctgagcctgcccggcctcgggaccgtgctcggcgcccggatcctcggcgaattcggcgacgacccgcaccgatacaccgacgccaaagcacgacgcaactacgccgggacctccccgatcacccgggcgtccggcagccgccgcgtggtgctcgcccgctacgcccgcaaccggcgcatcgccgacgccgtgcaccagtgggcgttctgcgccatgcgaggctcacccggcgcccgcgcctactaccaatcgctgcgcgagcgtggcaccggacaccaagccgccctgcgccaactcggcaaccgcctcgtcggcatcctccacggctgcctcaaaaccgggaccccctacgacgaggtcaccgcctgggcccatctacagcccacctcttgacactcaaaaacatgggatgt

SEQ ID NO: 2585 - DNA, 1413 bp, unidentified
  source 1..1413: mol_type = unassigned DNA; note = element_3abc09a
  misc_feature 1: note = core
  misc_feature 2..91: note = LE
  misc_feature 92..1132: note = CDS
  misc_feature 1133..1413: note = RE
  misc_feature 1176..1408: note = bridgeRNA
taatggaatggacgctcactccccaacacggcattgaaatgccaaagtaagtagtgcaataaaacctacttgataaagaggagcgtccgaaatgaaaattacaacgattggtatcgatttagcaaaaacagtatttcagattcacggtgttgatgtacaaggcaaagcaatattgcgcaaacagctgcgacgaaacgaaatggcgaagttcttcgctaatcttgagccttgtctgattggcatagaagcctgtggcagttctcaccattgggcgagaaagctgagtgaatttgggcatacagttaagctcatgccgccacagtttgtgaaaccttatgtaaaaacaaacaagcatgacatggctgatgcagaagcgatctgtgaagcagtcaataggccaaacatgcgatatgtatcggtgaagacggtagagcagcaggcgatcttgtcagtgcatcgggcaagacaaagctttgtgaagacaagaacagcgcaatcaaatcaaatacgtggattgctttcagaatttggaatcgtgataccactgggaatatattcgatcatgaagcgggtaccggaaattctagaagatggagaaaacggattgcctggcatgatgcgaaccctactggaaagattaacggaaaacttggaagagatgaatcgtcaaataggagaactggaaaagcagattgtgttgtggcaccgagaaaatgaagcgagtcggagagtgtctgaaatcgcgggtattgggccgatcacggccagtgcgattgtggcgacagtagggagagccaaagaatttaagaatggccgtcagttagctgcatggatgggattggtgcccagacaacattccagtggaggcaaacagaatctgttgggcatcagcaaacgtggcgatacctatctcagaacactgctaatccacggagcaagagccgtgattcgatttgccgagaacaaggcaaagccggaaagttggttgagaaagctgatgactcgatgtaacaagaatgtagcagcggttgcactggcaaacaagaatgcccggattgtgtgggcactcctggccaacagccagacatatcaccctgattacacttcggcaactatcgttgccaaaatgtaatcaaggcgattgaataaaatctgagtaacaataaattattaaggaattctacgattgcacaggcaattatgaaatgatggcgatactggtaagaccgtgagtagaaaaacctgtaagtaacacagcacattaataatgtgcgaccccgtgattaggatctactcagcgaattccatcagggatagagacatagtctcacaaataatccgaatgtatggctgcaatctttaccaatttaaaatcattaaatgaaagcttggcataatgtgggcgtccatgta

SEQ ID NO: 2586 - DNA, 1582 bp, unidentified
  source 1..1582: mol_type = unassigned DNA; note = element_3acc119
  misc_feature 1..2: note = core
  misc_feature 3..100: note = LE
  misc_feature 101..1213: note = CDS
  misc_feature 1214..1582: note = RE
  misc_feature 1313..1509: note = bridgeRNA
agaccgtatgtccttcccttgaagaggcgactcaccctcgatgttgcggcgagggttacccggatcggccgggcagagcctcaagcaaggagagcgagtcgtggatcatcataatggcgcgttcgttggaatcgatacgtcgaagttgcgcaatgccattgcggtcgcggaggatggtcgtggcggggacgttcgctatctcggcgaaatcgacaccacggaagcggcgacgcgcaagctcgtcaccaagcttgcggccaaataccgtcaactgacgttttgctacgaggcggggccgacgggatacgggctctatcggctgatcaggaagcttggtcacgactgcatcgtggtggccccctcgctcatcccgaaaaaacccggcgatcgggtaaagacgaaccggcgcgatgcggtaggcttggccaagttatcgcgcgccggggaactgaccgcggtctgggtgcccgatgagcggcataaagctatgcgagatctctcgcgcgcccgtgaggcagcgcagaaagacctccagggcaagcgccagcaagtctcctcgttcatgcttcggctcggacgacattatccgggcaagaagacgtggggacgcgcccacatgaattggctcatgcagcagaagctcgagcaacgcgagcagcgtattgcactcgaagagcttctgggagcggtgcggcaggagagcgagcgtgtcgaacgtctggagcaggcgatccgtgacgcaacgcccgagtggtcccttgccgaggtcgtcacagccttgcaggcgatgcgcgggttagatctcgttgccgcggtgacggagctggccgagatcggcgatctgtcgcgctttcaaactcctcgcgagttgatggggtatctcggtctcgtaccctgcgaaagctccactggagacaccgtcaaccgcggcggcatcaccaaggctggcaacggtcgggcgcggcgtattttggtcgaagccgcttggagctatcgacatcctccgcgtgttagcctcaagaaacagataaaggtggccgcctcaccgcaggcagtacgtgagattgcctggaaagcgcaaatgagattgtgcggacgctttcggtcgctcacccggaagggcaagcggccgaacgtcatcgtcacggcaatcgcccgcgagctgtcggccttcatctgggcgatcaatcgcgaggttatggcaggtcgatagacgtaacgtgatccaggactttcgaccgcttgagtcatgaaggctcaaccggcccaaggcccctgcgttgcaacccacgaaaaaggatcaccagcaagacataatcgtgcagcagcgagggcgggaccacggccaggggaactcccgagctatctacgtggccgatcacatgatcgacgcccgacctcagacagggacagccccagacgaacaaacggaaatgcggtaaccaacccgcgcatcagagcttgatcaccgacgtcttcaggccccgccctctcttctgcacgatccataactaatcaacttcacgctgcgcgcgtggagaacgtctcagttgtgcccgcagtgcttgacaaaggacatcag

SEQ ID NO: 2587 - DNA, 1371 bp, unidentified
  source 1..1371: mol_type = unassigned DNA; note = element_3ace35d
  misc_feature 1: note = core
  misc_feature 2..300: note = LE
  misc_feature 301..1005: note = CDS
  misc_feature 1006..1371: note = RE
  misc_feature 1128..1325: note = bridgeRNA
gaatggaagggacttcccctgattatgcacctgattaactcttgtgcaatcatgggtacatatcgtcccggaggaatttgttatgaccatcgccacaatcggtattgatcttgccaaaaatgtgtttgctgttcatggtgttgaccacaatggcaaaacagttattgttaaatccagagtaacccgcgcagctcttcccgggctaattgctggtttgcctccctgtgttatcgggatggaagcatgttccggtgctactgggcaagactgttaaggcagtatggtcatgagccgcgtttgatggctgcaaaatttgtatcaccttatcgtatggccggtaaatcagggaagaacgatgctgccgatgctcaggctatctgtgaagctgtacgccgtccacatatgcggtttgtaccagtgaaagacaaagggcagcaggcgatgcagtgtttacatcgtacccgccaaggatttatcgaagagaaaacagctgcatataatcgactccgaggattgatatcggaatttggcgtcatcgcatcccaaagcaccgcagctctgcgctatgccgctgccaggcataaagattcattaccagcacaggtcaggcaatgtatcgaagatctgctggctcatatcactcgcattgaagaacaaattgcggaatacgatcggattttgtcccaagtagcaaaaacagataaccgaagccagcggttgatgaaattacaagggattggcccgacaacagcctgtgcgttggttgccagtattggtaatgcacatgattttaagagcggaagacaactggcggcctggctggggcttacgccgtcacaatacagcagcggcggaaaatcgaagcctggcaggataacaaaagcgggtgacgcgtatctgcgcacgctgcttgtacagggggcccgctcagttctgattaatgcagataaaaaaacagattcattcagtcgctggggatgttcactggttgaacgcaggggatagtggcgcgctgtggtcgccattgccgccaaaaacgccagactgtgttgggcgtctctacattacggttaggatttcaaattgtataatacttctgctgccgaaaaagaacagagcacccaacactaatgcactgcaatcgctgatgtttaaagggttcagaccctgtgaggtatatctgcaaaacgtacaggataataaatatccgattagcgaacgagaacctcacggcgtctttcatcagggcccggtatgaaagataaataccataatgaccgtttatagtaccgcagtattactcctaaactttggccacggtagtagtaaaggaacaatgtacggtattgacatgccggggaagcccttata

SEQ ID NO: 2588 - DNA, 1377 bp, unidentified
  source 1..1377: mol_type = unassigned DNA; note = element_3ace4d4
  misc_feature 1..2: note = core
  misc_feature 3..280: note = LE
  misc_feature 281..1102: note = CDS
  misc_feature 1103..1377: note = RE
  misc_feature 1153..1372: note = bridgeRNA
ataatgaaatggacgctccaacttttacggcatcagagtgcctaaatgtgagtgttaaaactcagaagaaggagcgtccacatgaaagtatctactcttggtatcgacttggcaaaaaatgttttccagcttcatggtgtcggctgcaacggtcaaactgttcttaagaagaaactcacccgcgataaattccttccttttctcatgcaacttgaaccttgcttgattggcatggaggcctgtgcttccagtcatcattttgcgcgtgttttacggcagtatgggcatgaggttaaactcattcccccctcagtatgtgaaaccttatgtcaaaacgaataagacagatgccgctgatgcagaagccatttgtgaagctgttgcacggcctaatatgcgttttgttcagattaaaacggcagagcaacaagctattctggtgctgcataccgagcgaaatatccttatccgcgaacgcactgcttgtgctaatagtatgcgggccattttggctgaatttggcattatcatgcctcgcacattaagtcagctgtataagaaagtccctgaaatactggaagaatatgataacgagttatcaccttttgtccgttgtagtgtcgcacgtcaacttgaacaccttcagggtgtggaagatcaaatcacgttgatcgaacaagaacttagcagttgggcaaaaacacaacccgcctgccagcgggtcttgaaagtccctggtgtgggattgatgacggcgacctaccttgtggcgtcagtggggaatgggcaacaatttcattcagcgaaacagtttgccgcctggttgggattggtgccgagagaattctccagtggcggtaagcagagattgggccgaatcagcaaaagaggtgaccgctatttccgttatcttctggtccatggtgcgcgggcagttgcagctgttattgagagacacaaagacaatatgccgtggctttacaggctgttgagtaaaaaggcctataacgtagccgttgtggcacaggccaataaaacggcacgtattttgtggtcgatgctggttcatcatacggaatatcgaaccttatccgtggtttgagataatctcaaacacggataaggctcaagaacaaaagtgaatacgtttcaggtaattgcaagtgtaattattgagatggcaaaacaggtaagaccgcaagtgagaaactccgtgagccgccggggcatttggcccgtaaggatgataggaactcacttggcggatttcatcatggttcgggcgcaatcgcgcccataaagaaaccggatatatggctgcaatacctgagcgctattttcaagaaaaaacacttggtttattgggagcgtccatat

SEQ ID NO: 2589 - DNA, 1399 bp, unidentified
  source 1..1399: mol_type = unassigned DNA; note = element_3ad6ba0
  misc_feature 1: note = core
  misc_feature 2..296: note = LE
  misc_feature 297..1373: note = CDS
  misc_feature 1374..1399: note = RE
  misc_feature 108..263: note = bridgeRNA
ctttaactttgcagtctataataagagtcctcaataactcttaaattatttaacgttcaatatacgagaaaatataccagtttttccttacctttgttgtagaaaggaaggattgactgccggaggtcaccctaattacccccgaaggccaggagtttataccccgttgcaggccctccggatttccagctgcaaatgccaaataggaaggtaggctcgaagcctaattaaagtaatagtcacagacagctttccttcagtcaatcgcttcctgtaattaaaaacggtacaaaggtatgaaaaaaatcgtaatcggcatcgacatttccaaagaaaaaattgatgcaagcgcaattgacgtcagaaacgcacagcaaggaatccaaaaactgggctatgaaacgttcgagaaccgcccgatgggcttccggcgcatgctggtctgggcacggcacctgatcaagggcgtaaccctggaggaagtcctgttctgctgcgagaccacgggtggctacgaccgctccctgtgcgactacatctatgcaaaggacctggacatctggcgcgagagtgcgctccagatcaagcgcagcatgggcgtgcgaaagggaaaggacgacaaggccgactcgctgatgattgccgagtatgccatgcgacacatggacaaggccgtcatctacgagacgcccagcgacaacgtccgcgagttgaaggcactgctgcagtaccgccataagctggtgcaggagaagacggagaagaaggtgcgcatgtcgcatctggcagacacggcggcaaagagcaagtccatgagcttcatcctccgtgatgcccgcaagagcatcaaggcactcgaaaagagcatcaaggagtgtgagcggcagatcctcgagctgatcaagggggacgaggaactctccagaagctacagacacatcatatctgtcagcggaataggaatcgtcaacgccacggcactcatcgcctacagcaacaatttcagggggattaccacggcaaacaggatggcgtcatactacggcatcgcagccttcagggacacttcaggcaccagtgtggacaagaaggcgtacgtcaaatgctattccaattccttgctcaaggcctacctcacacaggcggcagaatggacaatccgagagaacggaatataccacgactactacctgagactcaaagagaaagggaaaccatacggcatcatcatcaacaatgccagaaacaaactcatacacctcgtcttctcactcgtccagaacgacatggattatgaacggaaccatgagtacatcagaatgcagagaagagtaaatgctgactttacaacaggattaaagaatattaactaaatatgtttggataaaatcataggaag

SEQ ID NO: 2590 - DNA, 1405 bp, unidentified
  source 1..1405: mol_type = unassigned DNA; note = element_3adb02e
  misc_feature 1..2: note = core
  misc_feature 3..84: note = LE
  misc_feature 85..1125: note = CDS
  misc_feature 1126..1405: note = RE
  misc_feature 1143..1392: note = bridgeRNA
tgatgtgtggaacggccccgctatcgcggcatcactgtgccaaagtgtggtcgttgcgacaaccatatgaaagggagccgttccatgcagcagattaccaccatcggtctggatttggccaagcaagtatttcaagtccatggcgctgaggcagacggcagtcctgtcgtaagccggaagttacgtcggggcgatgtcctgcctttcttcaaaaagctgtcaccgtgcctggtcgggatggaagcctgcggggaagcgtattattgggcgcgcgagatcgccaagttcggtcacgatgtgcgcttggtaccgccatcctacgtgaagccgttcgtgaaacgcggtaaaaccgatgccgccgattcggaagcaatctgcgaagcggttatccgcaagacaatgcgatttgtgcccgtcaaatcggctgatcagcaggcggctgcgatggtgttgaagacgcgcgagcttctggtccggcaacgaacgcaagccatcaacgcgctgcgcgcccatttgtcagagctcggcattattgcaggcactggcccggcgaagattgcaacattgatcgagatcgtgcgtgacggggaggacgctcgcctaccgcctgcagcccgctttgctctcagcgaacttgccaatcaaatcgagtggacgaagcagcggatcgataagctcgaacgtgcgattgtcattgaggcaaaacgtgacgaggacatgcggcggctggtaacgataccaggcgttggagtcatcatcgcggcctccataaaggcgctcgttcccgacccccacgggtttaagtccggccgtcactttgccgcctggcttggcttgacgccaagatcacattcgagtggcggcaaggagcgcctcggcaggatatcaaagatgggcaactcaaccctgcgctccttgttgatcattggcgcgacggccgtcttaaagcatgtgcggcataaggcggatgctcccaaatggttggtggccattctggcgcggcgccccttcaaggtcgtcgccacagctctcgccaacaagatggcgcgcattatctgggctcttctcaccaaaggcggaacatatcgaaaatctggtttggcaatcggcacggcgaacgcctgagtcgagtgacaaccaggacaggctgcccggcttagacgccggcaggggcgaggtgcaccaagcagacgatgaacctacgggacgaaatcccgaagcgagagaggccgtctggtacaatgcgcacaaagcgcgtttttttgatcagccactcgcatcgcggacttcatcaaggccagcggtcaaaggccgcattaacaggccgtacatatgacctgaccgcaccgtcccaacgtggtgaaacgtctgaaaaaagcaattgcctgcagggccgttccacata

SEQ ID NO: 2591 - DNA, 1531 bp, unidentified
  source 1..1531: mol_type = unassigned DNA; note = element_3ade78a
  misc_feature 1..2: note = core
  misc_feature 3..169: note = LE
  misc_feature 170..1414: note = CDS
  misc_feature 1415..1531: note = RE
cttgtatgatgtatttagatattaaatacaccatatgctcctttcctaatttatttttgatataatttatttgacactgtggactttttatttatttcttatagctttgactatttaaaggagtgtactgccacagttttatcttaatcatttatagttggataagtctttgaactttcatctcccgcaagtttatgatggtaaaactaagtggaatatccgcagtgattatcttttaggagttgattttatgatttatgtcggcattgatattgccaagaaaaaacacttttcagcctttatggattctaatggggaggttctttttaagcctttttccttttcaaacgatatgtctggatttaaaaaattgctttctcacctaggttcttttccagtaaatgatcttcttattggtttagaatcaactgctcactacggtgaaaatcttatctgttttttgtatgataaaggatttaatatttgtattattaatcctattcaaactgctgctattagaaagtccaatatcagaaagactaaaactgataaggttgattgctatcttattattaaatctttgattatgaatcgttatcgtttgtttactgagcaagattttgaatcccttaaattaaaaaacctttgtcgctttcgccaaaatttaatgaaggctaggacaaaggttaaaattcagttagtttcttatgtggatttattgtttcctgaacttcagtatttctttaagtcaggtatacatactaaaacttgttataccttgcttaaagagtgttcaaatcccgacgagattgcgaatatgcatctcacaaggttaactaaccttctcactaaatcgtctcatggacgcttcaaacggtctactgccgtatctttaaaagagcttgcatcgcaatctgtcggtactaaaaataataccttatctttgcagattttgcaatcaattattcaaattgaactctttactaagcagttggctgaagttgaagattctatcaatgatattatgaatggtttagattctgttatcaaatctattcctggtatcggtaatgttaacggtgctatgattattggtgagattggtgatattaaccgttttaaaaaaccttcacaacttcttgcttatgccggtttggatccttctgtatttcagtctggtaattttaaagcttctaatactaaaatgtctaaacggggttctaaactgcttcgatatgccttaattaatgctgcttggcagcttactttaaataacaaaacttttaaggattattatgatttaaaagtttctcaaggccgtagacattactgtgctttaggtcatgtagctcacaaatttgttcgtgtgctgcataaaattatgactgataatattgaatttgacttagcttaacctatcctactatttaatttttaagcaacttctaagttgctttgtttgctatacctttttttagtcaaaaatttatttattattttgtcattttactattgacttttcatagttggt

SEQ ID NO: 2592 - DNA, 1536 bp, unidentified
  source 1..1536: mol_type = unassigned DNA; note = element_3ae1cda
  misc_feature 1..2: note = core
  misc_feature 3..240: note = LE
  misc_feature 241..1419: note = CDS
  misc_feature 1420..1536: note = RE
  misc_feature 3..216: note = bridgeRNA
cttgtattatagagtagtagtttttatagcccctctccaagggctgtgctacactgcaagggatgctgtggattggtattgacctcctaccgcgcgacggttcaaggaaggctccaaccacagttctttgcagatttgttaatcagttagataccgccagacggtttatgtggaacaaggttacaaggcaaagtgtctgtggatgacagcatcaccattcttttctctggaggtatcatcatgatctgtgtcggaatcgacgtagccaaagacaagcacgactgcttcatcctcagctcggaaggcgaggtgctggcggacgttttcactatccctaataaccgggatggcttcgagaccctgttgcaacgcatccgttcctgcgctctccctgctgacaaaataaaagtaggacttgaggctaccggacattacagctacaacatcctcgggtttcttcttgactgcggcctgccaacctacgtcattaaccctctgcacaccaatctctaccggaaaagcctcagcctgcgaaagaccaagactgaccgcattgatgcgcggactattgcggctatgctcatgtctgatgtggacctcaagtcctacacggacacagcataccataacgaggaactaaagtcactcacaagatacagattcgacaaggtccgggagagagccaagctcaagcagtccgtttcccgtctggtcaacatcctgtttccggagttggaaacgctggtgccgtcacttcacatggcatccgtttatgccgttctcagtgagttccccggtgccaaacagattgctgacgcccatctgacccatttcaagactgtgctgaccgacgcctcaaagggccggtatggtcgggagaaggctgtggagatccgcgaggccgccaggtgttccatcggctccattatgccttccaaatctctggagcttcaacacaccatccggctcatccgcgagttggatcgggagatcgtggacattgaggccgccatcaaggcaatcctggacgagatggctccgccgatcctcaccattcccggcatcagctaccgcatgggggccatgatcctcgctgagattggggacttctcccgtttcgagtccccggacaaactcctggcttatgccggtctttcgccgtctacttacgaatccggcaaactcaaggcttccggagctttcgcccacatggagaagcgaggctcccgttatctgcgatatgcacttttcaatgccgccaaattcgtctgtaattgggaaccatcctttgccgcttatctagccaagaagcgagccgagggcaagcattacaatgtcgctgtttctcacgctaccaagaagctcgtgcgattgatcttcgccttacaaacatccggcagagctttccaacctgcttaactcattccgaatccagtacagagcgccttgccggacgctcggcctttttgtgctcttttctaccttctgccaattcacactttttccttttttcggtcttgacttttaatagttagt

SEQ ID NO: 2593 - DNA, 1499 bp, unidentified
  source 1..1499: mol_type = unassigned DNA; note = element_3ae488c
  misc_feature 1..2: note = core
  misc_feature 3..243: note = LE
  misc_feature 244..1479: note = CDS
  misc_feature 1480..1499: note = RE
  misc_feature 15..239: note = bridgeRNA
ctaataactcttatcgggtccgccattcggcagacttggtagctggtggccgccggcaggtgagcactgttcctccccgggcctcgagccctgatgaaagatcgtgcccctgccggtgaccgggagagttgatcgctgctgggatgtcgtgcccgccgggtggcgtgagcactgctttattaggtcgctgatggttctcccgcaggctgctgacagatttcggcattttggacgggagaggcgatgcggctgttcgtgggtgatgactgggcggaagaccaccatgacgtggaggtgatggacgaggccgggaaggtgctggcccgcaggcggctgcccgagggggtggccggcatggccgggctgcatgagctgacgggccggttcgtgccagaggacgcgggtgaggcggaggtggtgatcggaatcgagaccgaccggggcccgtgggtgaccgcgctgatcgccgcagggtacacggtcttcccggtgaacccgctgcaggcctcccgctaccgccagcggcacggggtgtccggtgccaagagcgatgccggggacgcgcacatgctggcggacatggtgcgcaccgactcccaccagctccgcgcggccgccggggacagccccgaggctgagggcatcaaggtgatagcccggacccataagacgctgatctgggaaaggacccgcgcggtgcagcggctgcggcaccagctgcgggagtacttccccgccgcgctggcggcgttcgaggacctggacgcccccgacgcgttggagctgctgggcaaggcccccgacccggcccgggccgcgaagctgacccgggcccaggtcgccgcggcgctcaagcgcgcccgccgccaccacatcgcggacaagaccaccgcgatcctggcggcgctgcgcggcgagcacctcggccagcccgcggcgctgacggcagcctacgcagcgaccgtccgatccctgatcgcggtgaccgccgtcctgaatgagcaggtcaaggccctcgaagagcaggtgagggagcattttggccggcacccggacgctgagatctaccagtcccagcccggcctggccgccatcctcggcgcccgggtgctcgcagaattcggcgacgacccgcaccggtacgcgaccgcgaagaaccgcaagaactacggcgccaccagtccgatcacccgcgcatcgggcaagaagaaggtcgtcgccgcccggttcgtgcacaacgaccggctcatcgacgcccttatgtcctgggccttctcgtcgctgggtgcgtcgccgggcgcccgtgcgttctacgacgagcagcgcgccaacggactcgaacacaatgacgcgctccggaggctggctaaccggctcgtcggtatcttgcacggatgcctgaagacccgcaccctctacgacgaggccacagcctggggccaccggcaaaaccttccccaatctggcttcgcggcttgacatctaagctcctgggatgt

SEQ ID NO: 2594 - DNA, 1414 bp, unidentified
  source 1..1414: mol_type = unassigned DNA; note = element_3af3211
  misc_feature 1..3: note = core
  misc_feature 4..135: note = LE
  misc_feature 136..1149: note = CDS
  misc_feature 1150..1414: note = RE
  misc_feature 1172..1410: note = bridgeRNA
agatggtatggacgcctccccccggtaacgggccgccgggaagatgacgtagcgaatgcaagacgtcgagcgtgggttcgcccgaatgtgcgaaagtgagaatgctcgtcaaccattctttacggagaatctgaaatgaaactcacgatcatcgggatggacatcgccaagcaagtatttcaacttcacgcgcttgatccgcaaagcggacaagttgagcgattcaaactcaagcgcgcgcaagtgctcgagttcttcgcgaagcgggcaccttcgattgtcgtgatggaagcctgcggaagcgcccacgactgggcgcgacgactgcaagccctggggcatgaagcgaagctaatatctgcccgttcggtgcggccctttgtactacggaacaaaacggacgcagccgacgcgcgggcaatatgcaccgctgcccaacagccagaggcgcgattcgttgctgtcaaaagcgaagctcagcaaacagttctggcgatacatcgggtgcgagctcaattgatgaagttccgcatcatgcaaactaatgcgctgcggggcttgttgtacgaattcggagaggttttacccgaaagctatcgcgccttcagcaaagcattcccagctgctcttacacgtgccgccgaacgtctgccagccatgctcatcgacagcctgcgggaacaatgggctcgtgctcaggatactgatcgagaaatggccgttctagagcggcgccttgcaaacctatttcgccacaacccggactgtcagaaggtcgccgatattcctggtgttggacttctgactgcaacagcgaccgtcgcagctataggcgacgtgcgtacgttcaaatcggggcgcgagttcgccgcatggctagggcttgtgccgcgtcagtctggcacaggtggccgagtccggcagatgggtctgagcaagcggggcgatacatatttacgcacgctgttgatgcacggtgcccgctcggtgatcattcaaggcaagcgatcgccttgggtagacggtttgctcaaacgcagaccatttaacgtagcggttgccgctgttgccaacaagttggcaagaacaatctgggcggtactcgcgcggccggacaaataccaagcatctccgcgcgctaccgcctagaggcaacgatttgcaacattcacgactttctcaaggagcgcaagcaagtgctgcatgatggctaacaggttggaccggggcgaggaaaacccgataaggaagatgaaccattgcgttcgatgtgcagatgaggacctcgccagcgaattccattagggccagcaggcagataccggcctgcgcaaacgggccggacataagcgtgctgcctaaacctgccagtcaacatcgcaaaactgtttgcaatccgggaggcgtccacata

SEQ ID NO: 2595 - DNA, 1223 bp, unidentified
  source 1..1223: mol_type = unassigned DNA; note = element_3afc435
  misc_feature 1..2: note = core
  misc_feature 3..236: note = LE
  misc_feature 237..1205: note = CDS
  misc_feature 1206..1223: note = RE
  misc_feature 6..204: note = bridgeRNA
cttatgtcttggagccagtccttgtggattggtacccttcggctgatccccggagcgaggcaagcaagattgtgttcgtcctaaggacttgatcctgtgtaccagatcaatcgcttgcctcacctttgccaccagttcggacggtatccgaggcctgcattgagcatgagcctgaacagataaggatgaaccggcatagtccgcagatcgctgatatcctttgcaaggaggcagtcatgacccatcctatcattttcgtcggcatcgatgtagccaaggccaaattcgatgtcgctcttctgagcgcggaaggcaagtaccgcagcaaagtcttcccgaacacccccgctggccatcgacagctcttggattggctgaacaagtacgaggcccaggaagcccatctgtgcatggaaaccacgggcgcctatggacggaacctggcgcgttttctggcgcaacagcaactcctcgtcagtgtggtcaacccggcccagatccacgcctttggtaaaaccgagctcactcgggccaagacggataaggccgatgcccggctcattgcccgctattgccagatgcaccgtcctgcaccctgggtgccgccggctgaggagatcattactctccaagccttggtgcaacgtctggaggacctcctggctcttcaaacgatggagagcaaccgcctggaatctgcagagggaccagcgcgcaagtcggtggaggccgttttggaatttatccagcagcagatccagatggtccgcctgcagatcgagatccatatcgataaacaccccgatctcaaaaaccaacaggagttgctgtccagtatccctggtattggggacaacacagccgctaccttgctggccttcctcagccctctggatcgattccactccgccaagcaggtagttgcctatgccggcctcaatccccgtatacgtgagtctggtcaatgggcaggaaaaacccccatcgctaaggctgggaatgccctgttacgcaaggcgctttatctgcctgcggtagtggccaaacagcacaacccgattattgcggccttttgtgaccgactcctgacccgaggcaaacgccccatgcaggtggtggtcgcagccatgcgcaggctcttacatatggccttcggtgtgcttaaatctgggaagccattcgaccccaattttgggcttgcatagcccagtccaagacggtat

SEQ ID NO: 2596 - DNA, 1601 bp, unidentified
  source 1..1601: mol_type = unassigned DNA; note = element_3b125db
  misc_feature 1..2: note = core
  misc_feature 3..277: note = LE
  misc_feature 278..1492: note = CDS
  misc_feature 1493..1601: note = RE
  misc_feature 13..297: note = bridgeRNA
ctgttacaatataattgacgggtaaaaccttgcaagccagtaagggtttacacgtacttgttacttaagttatactgaaagcagtaattggactgacgagcgccaccttgggacaaaatgcccgtacaaaagactgtcatccatgctttcattatagcgttcggtttatgcaggttgagccacagtaagtgcgttcgtgtcaccaaacagattgaataggtaatgagtaaagtatggtttgcccgattacaatttcaattcaggagatgtatttattatgaacgcagtaggtattgatgtttccaaaggaaaaagtacagtttctgtactacgaccattcagagaagtagtggctacgccatttgatgttgcccacaccggaagtgatttaaaagtgctagctgacttcataaagaaacttcaaggtgagaccagagtcgttatggaagcaacaggaaactattatgaacccattgctcgctatctccacgaacaaaatatatttgtttcagtagtcaatcctgtgcttatcagtgacttcggcgaaaacacattgaggaagcctaaaaccgacaagaaagactcactaaagatcgcttcatacgctttaaactattggactgatttgaaagaatatgttcctcaggaagacttaagaaaatcattaaaactgctgaacaggcagtatcaacaagcttcaaaaataaagaccatgattcacaataaccttgtttcattgcttgatttaacttttcccggaatcaataagcagttttcttcaacatccagagaatcagacggacatgaaaagtgggttgactttgtgttagcatttcctcactgcaatatgatatcaaagctcacaatcaaagccttttcaaggaagtacaagaaatggtgcaacaacaattcttattacttctctgaaacagcatgcgagaatatttacgacttctcaaaagaatgtgtcagcagtatttcttcagaagaatcaaatggatttgctgttatacaagctgccaggatgctcaattcagccattgaaaattgccatgctatacagcttgaaatgaatcgattagcagctaggcttcctgaatacaataccgttatgtccatgtatggtgttggaaaagtggtaggtccacagctgattgctgagattggtgatccaagacgttttcataacagaaaagcaattacggcttactttggttatgatagcgagaattatgattcaggccaaaaagtatcagtatctaattctatgaccaagaaaggagcaagcgctcttcgaagaaccttatttatcattatgcaaatattgttgaaaaaaaagccgactgataatccggtatatgattttatgataaagaaacaatctgaaggcaagcattactattcatatatgaatgctgctgcaaacaaattccttcgtatttactatgcaagagttaaagaagccttaactgctgcagaagctacaacataaatactgttcaacaaaatatttttttcaggctgcttcggcagtcttttcgtcgtgcctattttttattgaaaacttttttcaatttagggcttgacttttatttgcaggt

SEQ ID NO: 2597 - DNA, 1316 bp, unidentified
  source 1..1316: mol_type = unassigned DNA; note = element_3b165a9
  misc_feature 1..2: note = core
  misc_feature 3..67: note = LE
  misc_feature 68..1066: note = CDS
  misc_feature 1067..1316: note = RE
  misc_feature 1099..1303: note = bridgeRNA
ttatgggatggacgcctcccgctccgcgcccttgattaggggcttttgatgagcaggaggccgggacatgcggatgctggcaatcgacttggcgaagcagtcatttcacgtgcatgggatcagcgcagacggcgagatcatctcgcggcgcgtcggccgtcagggcttgccgtcgctgattgtgaagctcgctccggcggttatcgccatggaggcatgcgcgacagcccattattgggggcgcctgttcatggctgccggacacgaggtgcggctgatcaatccccatttcgtcaagcccttcgtgcgcggatcgaagaacgacgcggtggatgccgaggcgatttttgatgcggcatcgcggccgacgatgcgtttcgtgccagtcaaaaccgaggagcaacaagatctgcagtcgcggcaccgcgtcagggaccgtctcgtggtgcaacggaccagcttgatcaaccacctgcgtggtctgctggccgaatacggcctgatctatccgaaaggtgcggcgcttcttctttcacgcgtccgcggcgggctcgccgaagcccgcgtctccgccatggcgcgggaaaccttcgaagcgcttcttgacgagttggagagcctggaaggccgtatcgagcggctagacgatagattgatcgccatctgccgagaggacgagacttgccgccgcctgatgacgctaccaggtgtgggcccgattgttgcgacggcactcgccgccagcatcggcgatcctcgacagttccagtctggaagagagatggcggcctggatcggcctggttccgcgccaatattcgaccggcggcaaatcccgtctgggcggggtcgggcgacgcgcgaaccactatctgcgtcgacaactcgtgcatggcgcaagagcggtcgcgttgaggttgaagaccaagacagatccgcgatcacgctggttccaggcggtgattgatcgccgcggcttcaacaaggggatcgtggccatggcgaacaagactgttcggatcgcctgggcgatgttgacgcggcaggaggactacgcccgcgcctgatgtgggtatgaaggtcgtcgcgcaagcgatgatgcgtgcgagatgaaggatgatggcaactcggcaaggaccgcgttctcgaccctgacctacgacatggccttcgaggccgatagcgttatgagggagagagcagcggagcccatcatggcccggggcgggatcgctccagcgacaggccggatagatttacgcacccaatgccgggttcaacgtcagaaatcatcttgctgcgggaggcgtccataga

SEQ ID NO: 2598 - DNA, 1549 bp, unidentified
  source 1..1549: mol_type = unassigned DNA; note = element_3b1df6e
  misc_feature 1: note = core
  misc_feature 2..101: note = LE
  misc_feature 102..1235: note = CDS
  misc_feature 1236..1549: note = RE
  misc_feature 1272..1493: note = bridgeRNA
agtcaccatggaacgaccggctcccgattcgcaagagcgcggattacgcttcggatcgggaagaaccgcggcgcagagccgcatacgaatgggagccggcgatgaagaacgtacgatttgtaggtttggatgtccatgcagagacgattgctgtggcggtagcagagacaggcggagaggttcgtagcctcggcacgattcccaaccgtcgcgagtcggtgggccgattgattcgcaagctcggtaaacccgagcagctgcgggtgtgctacgaggcgggtcccacgggctacgtgttgtattggcagctgagcgagttgggcgtgaagtgcgaggtggtggccccgacgctgataccggtgaaggccggagatcgggtcaaaaccgatcgacgcgacgccgagaagctggcgcgttgttaccggtccggggacctgacggcggtgtgggttccggatgccgcgcacgaggcgctgcgcgatctggtacgagcgcgcctggcaggcaagcgcgatcagctgcgcgctcgcaaccgcttgagtaaatttctgctgcgccacgggcggcgcgccccggcaggtgcgagcgcgtggagcacgaagtatctggtgtgggtcaagagcctgcgttttgagcaaagcgcccagcagttgacgctcgaggattatctgcacgaagtcgagcacgcggcggagcgcattgcgcgcctggagcgctcgatcgatgcggcgatcgagacgctgcccgtcaagatgcgcgccgtgatcgaggcgctgcagagcctgcgcgggatcgcccagatcagcgccgtgtcgatcatggccgagctcggggaggtatcgcgctttgagcgtgcgcggcaattgatgggctacagcggggcggtctcctgggaggactccagcggtgagcgggttcaccgcggcagcatcagcaaagcgggtaatgcgcacctgcggcgcattgtggtggaagccgcgtggtcctaccggcaccgccccgccatcggtaagacgctcgcggcccgtcagcgccgcagcagcgcgccagtgaccgagctggcgtggaaggcgcagcatcgtctgcatcaacgctatgtgcggctgatcgcgcgtggcaaatgcaaacagcatgcggtcacggctgtcgcgcgcgagctcctcggctttatctgggcgattggcatcgcagtcgagcgcacacacacgccaccggagatgcaacgcgccgcctgagacggggggtggggggcgaacacatcatgaacttggcacaggcgcaaatggtcagcagctgggaaagcacacggcaaaggagaatcctcgtaggctgctatgcggcaggccttcatggccggacccgcgaccctagtccgaggcagctcccgacgaatcacgaccatgatggcgagtgtccgcactcgatccacgaatatcagagtgatcaaccgtcgacgaacgctgcccccggctgctgtccgcttgcgcttggccaagatgcagacatgaaaccatcaaactcaccaccacttgacaggtcgttccatatc

SEQ ID NO: 2599 - DNA, 1340 bp, unidentified
  source 1..1340: mol_type = unassigned DNA; note = element_3b1e4df
  misc_feature 1..2: note = core
  misc_feature 3..82: note = LE
  misc_feature 83..1108: note = CDS
  misc_feature 1109..1340: note = RE
  misc_feature 1095..1318: note = bridgeRNA
agataattggactcccccgcacctgaaggtttggggtaatatttttgttaccacacaaaaaatattaaagagagtccttaatatgtatcgtactaaagtcggcgttgatttagcaaaaaatataattcaggtttgcacattacacggtaaaaaagttacgtctaatgtagaaatgagtaccgatgaattttcactttggttagctcaatctaagcccgtcactgtagcgtttgaagcttgctctacttcaaattattggtatcaacaggccattaaatctggtcatgatgctcgactgattagtgccaagttggtcaaagctgttaggcagaaccaaaagacggataaaaatgatgcattggccattgtacaaacactgtttttaccggaagtgtcttttatcaacggtaaaagcattgagcaacaacagttgcaatcaattcaacgtttacgcgagttagcaattaagagtcaaaacgcctcgcagaaacaaatagtatcgttactgttagaactaaacatccgtttacccaatacacaaggtggcgtgctgcgagggttagaaggtgtacttgaagacggagctaataatttatctgataccttccgtgccactctctcggtcgctaaagtacaacttgaaaacatgattagtgctattggtgaatacgataaatatttagaacaaagtatccaatcattacctgattgtaagaagctattaaagcttgagggtgtaggtccagttaatgcggtaaacctttatattgctttgggtgcaaatcaatcgcagccgtttaagagcggaaagaatgcgtctgcttgtattggtttaacgcccattcagcattcctctggtggtaaagaagtcatgggaaccataggtaagtattgtaaaaacggctcccttcgaagtcagctgatcactggtgccatgtcagtggtgattaaagtgataaaatacggcgcaaaaacgaaaaaagaactttggttgcagggcttaatgcaacggcgaggtaataggtgtgcagctgtagccctggctaacaagacagtcagaactgcttatagtatgctgcaaaataatacagagtattacgctgcataactcacagcgcaaagtgagttaaccaactaaaatgcttgaacaaagataaaaatctacaaacgaagtcagccgcaagcttggagcataaaagctcgccagcgagacttggccgtttgttcgcgtaaacatcagtgagccagagatagcttctctactagagctcgaacatatgcacgcatctttcttttttgtgatattaagttttggttgttgacatgggggagtccacata

SEQ ID NO: 2600 - DNA, 1499 bp, unidentified
  source 1..1499: mol_type = unassigned DNA; note = element_3b2435f
  misc_feature 1..4: note = core
  misc_feature 5..238: note = LE
  misc_feature 239..1483: note = CDS
  misc_feature 1484..1499: note = RE
gtcactggtgcaccctccttggtgcgggcactggaagagtgctcgtggttggatgccggtgagagccggggtgacggcctgggtgggtcgctgtgcgacagcccgcatgacactgccgcccccggctctcccgggactgtggaccggcaacagagggatgcgccgcagagcgccagtcagtgaccgcccggagagcagtcccgtcaccggtttgtcgccgatgagctgaaggagccctgtggcactgccggactgcgtttactacgtcgggatcgactggggatcgtccgagcacgcggtatgcgtgatcgacgaggccgggaagatcagaacccggttcaccgtcgcccacagcgccgccgggttcaccgagctggcccgccgtctgggcaggctgggcgaggccgagcaggtgccgatcgggatcgagcgccccgacggccggctggtggacgtcctgctggaggcaggacacccggtggtgccggtgaagtcgaacgcgatcaaggcatggcgggacgccgaggtgctgtcgggagccaagtccgacgccggcgacgctcacgtcatcgccgagtacctgcggctgcgccagcaccggctgaccccggcacggccgtattcggaccagaccaaggcgctgcgcacggtggtgcgcacacgcgacgacatcgtcaagctgcgggtgatggcgaccaacatgctctcctcgctgctggatgccttctggcccggcgccaaggagatcttcaaagacgtcgagtcgccgatcgggctggcgttcctgaccgactatccgaccccggcctcggcggcccacctgggcgagaagcggatcgcggcgttctgcgcccggcacggctactccggcaagcgccccgcagcggtgctgctggcccggctgcggtcggccccgcccggggtgatgggccaggccgagaccgccgcaggccgcgacgccgtgctggccctggtcgcggtcctgaagaccctcggcacggtgcgcaaggacctggaccgctcggtccgggcacggctggccgaacatcccgatgccgccgtgttcacctcgctgcccagggccgggcagatccgggccgcacaggtcctggccgaatggggagacgcccgctccgcctacgacggccccgacgcggtcgcggcgttcgccggagtcgctccggtcaccaaggcgtccggacgtcaccacgcggtcacctaccggtgggcctgcaacaaacgcttccgccaggccatcaccggcttcgccgacaacagccggcacgccaatccctgggccgccggcatctaccagcgcgcccgcgcccgcggcatggaccacccccacgccgtccgtgtcctggcccgcgcctggatacgggtgatctaccgctgctggctcgacggcatcccctacgaccccgccaaacacgggaccgcagccgcacaaaccaagcaagcgaccactccatctgctgcttgaggttgacacagggggt

SEQ ID NO: 2601 - DNA, 1351 bp, unidentified
  source 1..1351: mol_type = unassigned DNA; note = element_3b2f077
  misc_feature 1..2: note = core
  misc_feature 3..70: note = LE
  misc_feature 71..1099: note = CDS
  misc_feature 1100..1351: note = RE
  misc_feature 1117..1348: note = bridgeRNA
ttaatgggatggtcgcccccgcctccccggcaagagtacgctatggaggcaatcaccaaggggaaccatcatggaagaagtaacgcttgtcggaatcgatcttggtaagcattcattccatctgcatgcccaagaccgaaagggcaaagagatctttcgccggaaggtaacacgccgacaactcgttgagctgttcgtgaactttcctgcgtgcacgattgctatggaggcgtgcgccggcgcgcatttcatggctcgcacgttggctggtttcggccatcaagtccggctgattgcgccacacctcgttcggccattcgtcaaaagcaataaaaacgatttcgccgatgccgaggcgatctgcgaagctgcctcgcgcccgtccatgcgattcgttacacctcgaaccgaacctcagcagacactttcggcactccatcgagttcgagaatcattcgtgcgtgagcgcgtatgcactggaaaccaggttcacggaattctcctggaattcggtatcagtctgccggtaggctgcaccgtgctgaagcgactgccagcaatcatcgcgcaatactcacttcctccccgcctcgtggtgctgcttgaacggcttcacgcccactacaagtatctcgacgaacagattgcggaactcgacaaggatctggtttgccagttgggcgaagatgatctcgggcagcggcttttgaccatccccggtgtcggcccaatcactgcaagcgtgctatcaagcgaggtcggagacgggaaacagtaccggagcagtcgagacttcgctgcttcaattggccttgttccgcgtcagcacagtacaggtggaaaggcgaatctgctcggcattagcaagcgaggggacaagaacatcaggcgcttgctcgtacagtgtgcccgttcttatatgcgcgacgtcgcaaggagggctggccctctggcggattgggtacgcacgctactcgctcgacgacactcgagcgttgtggcctgtgcgctggccaacaagctggcgaggatcgcatgggcgatagctgcacgacacacggttttcgaaacggctggataccaattacagaagggttgaacaaactcaatagcgttttaccaaccatctggttttgcgatcgctggaaattgatgacgtgaacggcataccggcctgaacgaacaacccgatagtcacgaaggctccaaaagccgatgtgttttttaggatcgtcaggcgcgactctcatcgtggcgctgaggaaaaaacctcaacgaagacgccgaatagatttgagcaagcccgaaacatcgttgaacccagcattgcaaaaatgggggcgaccataga

SEQ ID NO: 2602 - DNA, 1717 bp, unidentified
  source 1..1717: mol_type = unassigned DNA; note = element_3b2f41b
  misc_feature 1..2: note = core
  misc_feature 3..68: note = LE
  misc_feature 69..1229: note = CDS
  misc_feature 1230..1717: note = RE
  misc_feature 1261..1481: note = bridgeRNA
agatgctatggggcgagcggcgaggacaatggcaccatcgtcgctctagcgaatcaatggagcgccctatgccacggctgaacgatttgagcagatccctcgtaactctcgaacaagatgcaacactgatcgccgtcatcgagatgagccttacgagctggctcgttgccggcatcgtgcctggcgtcgagcgccagccgttgaaaaagctcggggtcgacgagcgcgcattgctgaagttgctgcatcgatggcgagaggaagcggagaaggcaggacacaggatcaaacgcatcgccgtcgccttcgaggccggtcgtgacggcttctggctggcgcgatggctgagggcgtacggtatcgaggcccgcgttatccacgcgtcgagtgtggccgtgtcgcgcgagcatcggcgggcgaagactgaccgactcgacaccgagctgctcaaacgcgcctttctgggctggttgcgcggcgagcgtgatcactgcaggatggtcgcgattccgacaatcaaggacgaagatgccaaacggcccaaccgcgagcgcgagagccttgtcggtgagcaaagtcggatcgtcaaccgaatgaaagcagcgttgatcaggctcggcatccgcggctttaatcccaagctgaagaaggcagccgaacgtcttgacggcttgcgcacgcccgagggcgacccgatcccgcccaacacgctggctgagctgcgtcgcgacatggtgcgccggcggctcgtcagtgatcagatccggcagatcgagaatgctcgcctggagcgtctcgagcatgcatccggtgatggaccacacgcaatggtgcgcctattggcgcgcgtgatcggggttggcaccgaaacggccgacatgctggtgcaggaggtattgtcgcgaaacatgcgcgaccgacgcgccgtagcgcgttatgccggcctcactggctcgcccgacgagagcgggaagaagcgccacgagaaagggttggcccgttctggcaatgctcgagttcggcggggcatgatccaattggcgtggcgatttctcatgttccagaaggacagcgccttggcgcgatggtttcgtgcacgcaccgagaaggcccgcggcacgcgcaagaccatgatcgtggccttggcgcgcaagcttctgatcgccttgtggtggctcgtgcgagagggagtagtgccggacggagtcgttctgcgcccggcgcaatgaacggaggttgctcaaggcacccgaaagtttcggcccagtcggtccggtgatggatcgccgatgacggttcgaggtggcggtgacccgatggactccatggcttatcacgccgtaacagagaatgggtccgccgcctcggagcttcgctgccgatgcgcatggctgcatcatggttcgggtcctcggatccaccgaatacaaggttgtggcgcgattgatccgcgcccgcaagcgggctcccctctgatcgtcatcacccgaaccgcaccaagcgggccgtcgtgctcggagctgtcaaggtaaggcctggcaagggcggagcatgccgcgagttggcgcgacgggcaaccttgacagctcctgcgcgcgccgacgtgagcgaagtgcggatcgggacgaagaaacgggccgttcagatcgaacaaagaaactgacgaagaaaaatgcggcgccctgccaaatctcgttgacaaagaaagtcccataca

SEQ ID NO: 2603 - DNA, 1520 bp, unidentified
  source 1..1520: mol_type = unassigned DNA; note = element_3b31563
  misc_feature 1..2: note = core
  misc_feature 3..252: note = LE
  misc_feature 253..1479: note = CDS
  misc_feature 1480..1520: note = RE
  misc_feature 53..221: note = bridgeRNA
cttatattagcaccattgcagattgacatagaggagttcatgtttatgtgacaccgatttcaagagcttgctggttgaggaccaccctggcccgatccctttttgaggatctgggagagactgtcccagccagtaagagaacggagctgaaggttcaatagaaagtcgtccccttttggaggaccgatataaggctaactttccgttcagagcccttgggattggaataacataacggaggagcaagagaaggtgaaacgatactacatgggagtggattggggagaccgcttgcaccaggtgtacgtaggcgatgaggagggcaagaaggtaagagagatcaaagtgcaagagagtccggaggggctggcagagatcgggcgctggctcgacgagagaagagccgaggggattgagctgtgggcggccatagagaagccggcggggcgcatcgtggactttctgctggatcacggggtggaggtttacccggtcaatcccaagtcgctggatcgggtacgggatcgctatcggatgagcgactccaagagcgatgcctttgatgcctatgtgttggcggagtttctgaggaccgatcaggcgcatttgagagcgctgcgaccgaactctgagaaagcccaagaacttaaaatgcttagtcgggatcagcgccgagtggtgcgtcacaaaacgcgcttgctccatcagctcaccaccacgctcaaagagtattatcctcggcccttggaggtctttgaggacctggagactgagatcgccctggattttctcaaacagtatccgaccccggctcatctcagcgcccttaaacgtaaagagttcaatcgctttgccaccaagcaacatcatctcagtaaacagcgctgtgagcagttgtgggagaaacttcaaaaaccgcaacttgcggtgcccgaacatgtggtcagagccaaggcacagtgggttgaggtcctcatcgagcagcttcgggcttcgatcaaagcgatgaaaatctataaccacaaggtcgagagttttttcgcctctagcccggccgctcaggttgccaagacgttgccgggcgccaaaagcggaaccctggtggcggcgatctgggccgagctcggcgatgcccagggccgctggcaatcctctcgccatcttcaagccgaggcgggagcggtaccagtaacccaagccagtggcaaaagtcgtgtcgtacactttcgttttgcctgtaacaagcatctgcgccacacgatgtactggttttcttttgtctcgctcaaccacagtcagtgggctaagctctactaccggggacagagggacaaaggccatagccatcaccaagcgttgcgcgccctgggggccaagtggctcaagattatctttgtgatgtggcgagaccataagccttatgatgaaaactaccacttggccaacatcgctcttcagaagatgcgtcaggcggcgtgaaagatttttttaaaaaggtcttgacaagtttcatagaaagt

SEQ ID NO: 2604 - DNA, 1578 bp, unidentified
  source 1..1578: mol_type = unassigned DNA; note = element_3b32723
  misc_feature 1..3: note = core
  misc_feature 4..248: note = LE
  misc_feature 249..1448: note = CDS
  misc_feature 1449..1578: note = RE
  misc_feature 8..227: note = bridgeRNA
tttcgtattataaggtcaaccagatatttctggttgaccattttttatttggttttattatatcagtagccagggtagaacgtacgggggcgtgggacattagatcccgtcaactaaactgttcaccccctacttgtagaaatatgtttgaggctggttgagactaagatctcgtataacaagcgaagctataatactacttgaaggtaataggggttactggtgaatacgttagaggaggataaaagatgaacccagtagtgggtattgatgtagctaaagatgaaagtgaagtacaggcttttttagaaaaaggaaagccctatggggcaagtttttcaataaagcataatcgagaagaattagacaagtttataaaatttttagtggagattaaatcgataacaggtagtataccaatcgttattttagaatcaacaggtcattatcatacaccgatcattcaatgcctagaagaaaatgaaatactctatattttgttaaatccaatcatctcttaccaagcaaagaaatcaagcttaagaaaggtaaagaccgacgccttcgacgcctatcaattatgtgtcctatattacaaagaggaatttgaaccttataaaatgagggggattcagcttctaaaccttcgtaatctatcaaggcaacaggagattgtaacgaatatgtatgtggaagctaagctacaatttcatactattttagatcaggttttccccgaatatagaaaagtctttggagacctttctaaagtatctttattaatattgaaagaatatccaacgtcggagaaggttttagaatctaatgaagaggaactgacaaatagtatacgtgagtattgcacgagtcgttctgccctttgggcaagggaaaaggcaaaaaaattgatagattcagccaaacaaaacccttttcggaagatgatgtatcaaagtcatttatttaatctgaatatgtatattgatatcctatttcattaccaaggacacctttcggaattagagagccaaatgatatccctggcaagtgaaatagaagaatataagattatccaatcaatccctggaaccggagaaaaaatcgctgccacgattatttctgaaattggggaaattgatcggtttaatcacccaaagaaattggttgcctacgctggaattgatccgagtgtttattcatcaggaaagtttacagcaacgacaaatcggattactaaacgaggttccagtaggctaaggcacagtttatatttagctgttttgtgtggtataagaagttctagaaataaaaaactcaaagagttttatgataagaaacgttcagaaggaaaaccttctaaagttgcaatagttgcttgtattaataaacttcttcactggatatatgctttattaaaaaggaaagaaattttccttgatttagtttgattgattatattgaccagtaaatgataaaccttccataatgaatttggaggtttatttggtatgcccgaaaacagtatagcataaagaaaagtatcattttacagaaagatattgacaacctattagctgg

SEQ ID NO: 2605 - DNA, 1225 bp, unidentified
  source 1..1225: mol_type = unassigned DNA; note = element_3b41e3e
  misc_feature 1..3: note = core
  misc_feature 4..239: note = LE
  misc_feature 240..1217: note = CDS
  misc_feature 1218..1225: note = RE
  misc_feature 52..221: note = bridgeRNA
catcctatgtttgcggggagttgcaataatagcagataaggaataatttaattgcagaagaaaagggtaaagagaaaagattaagctttgtcattagcctctggaaaggctgttcagcatgctaatccctttacccccttgcttagagcttgaacagttcattaggccatgagcctgaatgcaggattgataagcaggtaagcaatcttctactttttattatctcttaaaacaaagttatgcaatcacaaactaattacgctggtattgacatttcaaaatcgttctttgatgtagctgttcccaatggcgaacagtatcgttactataaattcagcaatgatgctttaggctttgatgccttgctgaaagtgctttgtattgaaaatcaagtattgatggaggcatcaggtccgtattatctaagactggcgtgttacctgaataccaaaggcattagagtaagtgtgatcaatccgttggtgatccgccgtttctgccagatgcggatgtcaagggcaaagacagacaaaaaggatgcgcgtatgatagcagaatacggcaaagcagagaagcctgtcctatggcaaccaccacagcagcatgtaatcactttacagcaaatggaggccttgatgtttaatctgaataaagaatacaccgcattaagtaatcaactggggagtttcatcagtagcggtatgcttgatagacaattggagggaataatcagtaaagaactgattcataagcaagttctaataaataagctaacggaagaaatgcaacaaatagcagaagcgcattattcagctatgcttatcaacttacaaagcataccaggcatgggtaaaaaaacggcaatgatgctgatcgtactcagcggcggttttaaccgatttgatgattaccggaagctaagttcatatattggtttgtgccccaggatattcgaatcaggaacaagtgtaaaaggtaaggcaaggatatgcaagatgggaatgtccaggataagggctatgttgtatatctgttcctggagtgccaagcgatgtaataacgcttgtcgtgaactttacgaaaggcttctggcaaaaggaaaggctaaattgctggctctaattgctgtagctaataaattgcttaagcaggcttttgcaatagcaactaatcaaactaaatacaatgaaaattattcaaaatatatttgcttttaaacacagtt

SEQ ID NO: 2606 - DNA, 1403 bp, unidentified
  source 1..1403: mol_type = unassigned DNA; note = element_3b4363a
  misc_feature 1: note = core
  misc_feature 2..92: note = LE
  misc_feature 93..1202: note = CDS
  misc_feature 1203..1403: note = RE
  misc_feature 1175..1395: note = bridgeRNA
caatgggatggacgcccccaccctctagacggcatcgatgtgccaaagtggaagtgtctgacgaccacttaacgagaatgggagcgtccgctatgaatgttacagctgtcggtattgatctggccaagaacgtctttcaggtgcacgcggtcgatgcgcggggcaaggttgtgctgcgcaagcagctgcggcgggcacaggtagccggattcttttcgaatatgccgccgtgcttaattggcatggaagcctgcgcgagcgcccaccactgggggcgtacattcgagcgcttcgggcacacagtgcgtctgatggcctcgcagttcgtcaagccgtacgtcaagacgaacaagaacgatgtggctgatgcggaggcgatctgcgaggcagtaggccggcagagcatgcgctttgtgccgatcaagagcgtcgagcaacaagcgatcttgtccgtgcatcgggtgcgccaggggttcgtgaaggcgcgcacggcgcaggccaatcagatccgtggtctgctcggcgaatttgggctggtcatccctcaaggtatctgcaacgtcgccaagcgtgttccagaactgcttgaggatgccagcaacgagctgccggttccgttccgtcacttgattgagcgcttgacgcagcatctcaaggaactcgatcggcaagtgaaagagtttgagaaagaaatcattgaatggcatcgcagcagcgagctcagccgaaaactcgaagcaatcccaggcattggcccgctggctgcgagcgcgctggtagcatcgatcgccgatgcgcacagcttcgacaacggtcggcaagtctccgcctggctgggcctggttccacgccaaagctccaccggcggcaagccaacgctgctcgggatgagtaaacgcggcgatgcgtacttacgcacgctgctgatccatggggcgcgctcggccatcctggcggcaaagaacacggtcgacaacacccagggatggttgaccgatctgctcaagcgtcggcatccgaatatcgccgcggtggctctggcgaacaaaaacgtgcgcaccgtgtggcgctgcttgcccacgggcgcgagttccaggccgactataagtcgactcggatggccgcgtagtcggaaaatcttactgaccacaacggcagaacaggagcacacactaccgattgctcaggcgatcaagcagtgaaggcaaaacaggttagaccgtggttggccaaatccagaacggctgcagcacctcgagtgcgagaaagcaataggaagccaatcagcaaaacccatcagggacagcggcgcacgccgcagcaaaagtccgaatgtactggtgcaatctgatcctgcaagccatcacgaatcgaaagcctggacaagtgggggcgtccatgta

SEQ ID NO: 2607 - DNA, 1461 bp, unidentified
  source 1..1461: mol_type = unassigned DNA; note = element_3b45ed8
  misc_feature 1..2: note = core
  misc_feature 3..169: note = LE
  misc_feature 170..1213: note = CDS
  misc_feature 1214..1461: note = RE
  misc_feature 1229..1456: note = bridgeRNA
agatggggtaacgggccgcggccggggcaagtaagccgcttcgctcgcttcggcgctatggaggggcgcgctcgctcgcggctttacgaatgtttggtggtcgtccctcagaactgatggtgtcaacggagtcggacaggtccgctcctagcatcattgagggacgaccatgaactattatgccggaattgacgtgtcgttggaatgctcgagcgtgtgtgttgtcgacgggactggcaagatcgctcgggaggcgaaggtggcgagtgagccggaggcactgatcgcctggttcggctcgctgggattgagcctggagcggatcgggctggaggccggaccattgtcgcagtggctttacgcggcgctgcgggaggcggggtttgcggtcgaactgttggagacgcggcacgtgaaggcggcgttgtcggcgatgccggtgaaaacggaccgcaatgacgcgcgcgggattgcgcagctgatgcggcttgggtggttccgtccggtgcattgtaaatcggctgaggcgcaggaaatccgcgcgctgctcaccgcgcgcaagctagtgcaatcgaggctttacgacgtggagatgagcctgcgcggcatcctgcgcggctttggcctcaaggtcgggcgcaccacgccgaagcgctttgccgaacggatccgggaactggtcgtcggccatgccactttggaagcggtgggcgcggcgctgctgtcggtccatgccgtgctgctgcgcgaattcaacggctttgagaagcgggttcgcgcgatcgcccgctccgacgggcgggtgcgactcttgatgtcaacgcctggcgtcggcgcgatcgtggggctgacctatatctcagcgatcgatgatcctgcacgattcaagtcatccaagtcggtgggagcgcattttgggctgacgccgacgaaatatcagtcgggcgagacagacgtgaccgggcggatcagcaagctgggcgacagttcggtgcgcaccgcactctacgaagccgccaatgtcatcctgacccgaccgatcaagggcggcgggctcaaaagctgggcgatgaagctcgccaagcgtgccgggatgaagaaggcaaaggtggcgctggcgcggaagctcgccgtcatcctgcaccgcatgctcgccgacgccagcaagttcattgccgagaaagcgagcggttgtgttcgcgtagcggcttgaagaggacagataaggttttcgggtagggcacgacaccagcctttccgaagcgaagtcccttcgccgggacgatggatcaggtcagaccgcaggtcgggcagtggcattgcgaccacgcgtaccgagattggccggcctatcctcactcagatcccatcaggtggcggccatgcgccgaccccggacagaagcacgacccggcgattggatgacgcaaaagggattgacaaaccgaggcccgttacaga

SEQ ID NO: 2608 - DNA, 1356 bp, unidentified
  source 1..1356: mol_type = unassigned DNA; note = element_3b5883a
  misc_feature 1..2: note = core
  misc_feature 3..76: note = LE
  misc_feature 77..1102: note = CDS
  misc_feature 1103..1356: note = RE
  misc_feature 1078..1344: note = bridgeRNA
tgatggggtggacgccccccgacggcatctacgtgccaaggtgacggtgtcgagctgtcacctgaaggaggcgtccatggagcaggctaccacgatcgggctggatatcgcgaagcacgttttccaagcgcacggggcagatgccgccggccatgtgctgtttcgcaagcgtctgacgcgggccaagctgctggggttctttgcatcacatccgccctgctttgtcgcgatggaggcctgcgccgggtcgcattactgggggcgtgagatcggcaagctcgggcacacggtgcgcctgatcccgcccgcctacgtcaagccattcgtgaagcggcagaagaatgacgcggcggatgccgaggcaatctgcgaagcggcacagcggccgagcatgcgtttcgttccggtcaaggacgaggagcagcaggcgaacggcgtcgtgttccgggctcgcgacctgctggtgcatcagcgcacacagtgcgtcaacgccttgcgaggtcacctctccgaatacggctacgtctttccgcagggcatcacacacgccccagccctgatcgctcacgtcgaagatcccagcgcctctttgcccgacagtgccagggctatcctgaagatcttgatcgacaccttcaccgcgctggaggcgcagatcagggaactggatgtcgaaataaacaggcgctcgaaagcagatccggtcgcgcgccggctcatgacgattccgggcgtggggccgatcaccgccacggcaatcacggcgcttgtgccagcggctgagaacttccgggccgggcgtgacttcgccgcctggctcgggctgacaccgctgcagaaatcgactggcggcaaacagaagctcggcgccgtatcgaagcgaggagaacgaaccatccgtcgcttgctcatcctcggggccagcgctgtgatccggcaggcctgcatacgcggagcgccggccgggtcgtggctggcacagatgctttcccgcaaaccgaagatgctggtcaccgtcgccttggccaacaagatggcacgtgtcgtttgggctctcttggtcaaaggcggggtttacggaactccggctacggcagcgtaagctgagcgcagccgcgagggcatagggcgaacggaaggagagtatggcgcaacagtcggcgagacggggtcgggaaaaccagggctttccacagtgcctcgagcacgctttgggtgaattggacccggcccgcgaactcccatacaggccggcggcggaccatcgccgcatcacaggccggacagatggcagcatccgactatgcgtacggcaatcctgaaatctccccttgccaggaagggggcgtccacaga

SEQ ID NO: 2609 - DNA, 1502 bp, unidentified
  source 1..1502: mol_type = unassigned DNA; note = element_3b605f9
  misc_feature 1..2: note = core
  misc_feature 3..246: note = LE
  misc_feature 247..1482: note = CDS
  misc_feature 1483..1502: note = RE
  misc_feature 13..245: note = bridgeRNA
ctaatgagttctgggagtgagccatccggcaaactcctggtgggtaggtagccgccggcaggcgagcactcgtggtgcctggacgtggagtcctgatgaaagagcgtgccgctgtcggtcggtgtggagagttgatcgctgatgggatgtcgtgcccgcccggtcgcggcgtgagcactgcttcattaggtcgctgatggttctcctcctggctaccgaaggtgatcggctcggaaggtgggagacgtgttgctgttcgtgggagatgactgggcggaggaccaccacgacgtcgaggtgatggacgcgtccggtcgccggctggccaaggcccgactgccggaaggcatggcgggcatgacgaggctgcacgcgatgatcggtcaggcgctcggtgacgacatcgatgccgaggacgtgtccgggcgggtgaggatcggtatcgaaaccgatcggggtccgtgggtacaagcgctggtcgccgccggatacacggtgtatccggtgaatccgttgcaggcggcccgttaccgggagcgcctggcggtgtccggggccaagagcgacgcggcggacgcgcacatgctggcggacatggtgcgtaccgactcgcaccaactgcgcccgatggccggtgacagcgctgatgcggaggcggtcaaggtcgtctcgcggatgcacaagacgctgatctgggaacgtacccgcgccggccagcggctgcggcatgcgctgcgggagtacttcccggccgccctcgccgcgttcgaggacctcgacgccgccgacaccctggaactcctggcgaaggcgccggacccggccagcgccgcccggttgagcctggcgcagatcagcgcggccctcaaacgggcccgccggcgtgacattccggccaaggcggccgcgatccagaccacgctgcgcgccgagcacctcggccagcccgccgtggtcaccgccgcctacgcggcctcggtccgcgcgctgatcgcgctgctgtccaccctcaacgagcaggtcaaggtcctgcaggggcaggtggaggcccattttggccggcacccggacgctgagatcatcctgtcccagcccggactgggcacggttctcggtgcccgggtgctcgctgagttcggtgacgaccacgcccgctacgtctcggcgaaggcccgcaagaactacgccgcgaccagcccgatcacccgcgcgtccgggaagaagaggaccgtcgcggcccggttcgtgcacaacgaccggctcatcgacgcgctgatgacccaggcgttctccgcgttgaaggcctccccgggcgcccgcgcctactacgaccggcaacgcgcccgcggcgccagctacaacgccgcgctgcgccagctcgccaaccgactcgtcggcatcctgcacggatgcctcaaaaccggcaccccgtacgacgaggcaaccgcctggtcgcatcacctcaacgaggctgctgcttgacattcaagctcctgggatgt

SEQ ID NO: 2610 - DNA, 1150 bp, unidentified
  source 1..1150: mol_type = unassigned DNA; note = element_3b6cba5
  misc_feature 1: note = core
  misc_feature 2..199: note = LE
  misc_feature 200..1135: note = CDS
  misc_feature 1136..1150: note = RE
  misc_feature 14..209: note = bridgeRNA
ccttgtatctggacgctagcgccgaagcgtgatggcgaaggcgctgcgaggggaccggtggccaccggtcccctcgcgcggcggacggcgcccgcgtcccctcaggctgctaccgagacggagccttgggaccgccgccgcggtcacgcacgaccgaacagtcgcttgaacatcgatcgcatgcgcaaggcaggttaccgtggcggatatcatctgtggagtggatgtctcgagtgagacgttggacgggcgtatcggtctgtccggaccagttacgcaagtgaagcggacccctcaggggatcgcggagttgagatcgttctgcgccgcccatggcgtggagctggtggtgatggaggcgaccggcggctacgagaagctgcccttcagtctcctgtgggcgtcgggcgtcccctgcgccatcgtcaatccccgctcggtacgccgtttcgccgaggcgatgggcttcctggagaagaccgaccgcatcgacaccggcgtgatcgctgactacgcccgggtcaaacgcatcgccgcccacgagccggccagcgagagccaggaacggctgcgggccttggtggtgcgccttcgtcagctgaccgaactgaaggtggcccagatcaatcagcgccgcctgctcgaagacacccaggcccaggcctccgtcgacgaactgctgacggtgatccgccgccagatcaagaccttcgagggtctgatcgccgaactcctcggcagcgatccgctgtggcgggcgctcgacgcggccttccgcgagatcaaaggcgtcgccgatcgcaccgtggcgcgcctcgccgcggagatgccggagatcgggaccgtctccaacaaggccatcgccaagctcgccggactggcgccgatcgccaaagacagcggcaaacgccaaagcaagcgatcgatccgcggcggacgaagctccgtgcggtcgatcctggtcacggtcgccgccgtcgtgcagcgccacgacccggatctggccgccttccatcagcggctcatccaggcgggcaagccaaagatggcggctcgcatcgccgtggcccgaaagctccttgtccgcctcaacgccaaggctcgcgacgccagaaaaacactcgccaccacttgaccagctagacagtcg

SEQ ID NO: 2611 - DNA, 1394 bp, unidentified
  source 1..1394: mol_type = unassigned DNA; note = element_3b6d65f
  misc_feature 1..3: note = core
  misc_feature 4..152: note = LE
  misc_feature 153..1358: note = CDS
  misc_feature 1359..1394: note = RE
cttgtataataaattaaagatttgaattaaaaagtattgattatcacatagcctctatgagataatattctcgcagacagaggtttctcgttttcctccttgcggcacagtccgcggtaataagagtgagagcctctgtgcggcgggtttacatgaatgagctggatgtcggttcggctttgccgttctcttcgaatatctcacaaggttgtgttccgtcgctcggcaggcactctttctgcaattcttcacaaaccatgtttttcgtaggcattgacattgcaaagaattctcatgaggctgccgtaatcgacgaaagcggcaacgttgtagtaaaacctttcaaattccctaactcgctcggcggattcgagaagtttcttgccgccgttaaaggcgtatcggaggatttatcccaatttgaattcggcatggaagcaacggggcattactggctcaatctgtataccaaacttatggacttcaatgttgtcgtgcacgtaatcaatcccgtacagtcggacgcgttgcgcgggctatatataagaaagactaagaacgacgccaaagacgcattcataatcgccgagctcattcgctttggcagatattccgaaacgactctttcagatacagatttattctctttacgcgagctcacgcgccagaggttctatctcgtggattgcatctccgacgcaaagagaaaagctatttcgtttatagataagatatttcccgaataccagactctgttttccgacatattcggcgcgacgtccgtagagttgttgcaaacttacacttcccccgacgtcatagccgagctggacacagaactttttacgcgcttcttaaagtcggtttcgcacggtagattcggtaaatccaaagcagaagagatacaggacgttgctaaaaatactttcggctcgttcctgttcgccgactctgccacgctcgctatacggcagttcattcagcagataaaactccttgaagagcaaattgccgagctggaggaatttatttccgaaaagttcgcttcctttgattgcaaactcgacacaatcgtgggagtgggcacaacgctcgccgcttcgttccttgccgagattggcgatattacgcggtttgaatccccggataaacttgcagcttttgccggcatagacccgtccgtgaagcaatccggagaatttagcggcacgcgcaacaaaatgtctaaacgcggttcgccctatctcaggcgttccttttggctggcagccgtttcgggcattcgctccaaccctgcattgattgtgtttgctatcctgaaatccaacgagccttacaaaatcattctgcctgaataatttttccctctacacgcttgacttttcatagctggt

SEQ ID NO: 2612 - DNA, 1458 bp, unidentified
  source 1..1458: mol_type = unassigned DNA; note = element_3b79837
  misc_feature 1: note = core
  misc_feature 2..78: note = LE
  misc_feature 79..1143: note = CDS
  misc_feature 1144..1458: note = RE
  misc_feature 1222..1449: note = bridgeRNA
taatgggatggtccggccgtgctcctgccccgccagcgatggaagctggcaaggggcgccaaagacaaggagcaccccatgtctcagcagctcaacaccacgatcgccgtgatcggcatcgatatcggcaagaactcgttccacattgtcggcctggataagccaggcgcaattgcgctgcggcagaagtggtcgcgtggccaggtcgaagcacacctggccaacatgcccccgtgcctgatcggcatggaggcctgcgtcggtgcgcatcatctcagtcggaagctgaaggcgcttggtcacgatgcccggctaatgccggcaaagtacgtccgcccttattcgaagggacagaagaacgacttccgtgacgcagaagctatcgccgaagctgtgcagcgcccaacgatgaagtttgtggcgaccaagaccaccgaccagctcgacctgcaggcgctgcaccgggtgcgggagcggctggtgagccagcgcaccggcatcatcaaccagatccgcgccttcctcctggaacgcggcattgcagtgcggcaggggcaacgctttttgcgtgcgggattgccgaccatcctgaccacgccgcccgatgtcctgtcgccccgcatggtgcggattatcgagggcttggctagtgactggcggcggttggatgagcgcatcgagggcttatcgagcgagatcaaagccatcgcgtgccaggactccagttgcgagcggctgatgagcgtgcccggcatcggcccgatcatttctagcgcgatggtggccgcgatcggcactggagacacattttccaaaggccgcgactacgccgcctggctggggctcgtccccaagcagatgtcgaccggagaccgcacaatcctcggcaagatatcgaagcgtggcaatcgctacctgcgcgtcctgttcgtgcaggcagcgtgggtcgtactgatcaagccaaagagctggcagcgccacgggctcaagccctggatcgaggcggccaagaagcggctgcatcgcaacgttcttgcgatcgcgctcgccaataagctggcccgtatcgcctggagcgttttggctcgtggccggggcttcgaggcgagcacgatcaatgacacagctactcagcccgcctgatctgcgttctgcaccggcgaccattgggaccgcgcgaaatgaggagcccacaatgacgtagccagatcgatacgccttacccgccgaggtctgcgagaggatgagatgagatggaggttcggtcttcccggcgcttgcgaacactggtgacccgaatggcccgttgaggcctgtccgctaatgagatcgcacgcgcgctgatacccatgatggccaggagcaggacatgctccaatcaaaggccggatacattgatgcaagaccgcttaccgccaaatcgtcgaaacttcttgcaacgcacggccggaccataca

SEQ ID NO: 2613 - DNA, 1417 bp, unidentified
  source 1..1417: mol_type = unassigned DNA; note = element_3b7d65c
  misc_feature 1..3: note = core
  misc_feature 4..87: note = LE
  misc_feature 88..1137: note = CDS
  misc_feature 1138..1417: note = RE
  misc_feature 1156..1404: note = bridgeRNA
tgatgcggtggacggcgcccactctgcggcatcgaagtgccatagggtagttgcgtcgaaacgcaaccacattgaggggagccgtccatgggcgaggttagcacaattggtgttgatattgcgaagtcggtgtttcagattcatggcgtcgatgcggatggcacggtggtgatccgcaagcgtgttggtcgagcgaaggttcttgatttctttgccgaactaccgccttgcctcgttgggatggaagcgtgtgcaacggcgcaccagtgggcgcgcgagctcaagaagctcgggcacgacacccgtctcatgccgccgacctatgtcaaagcctacgtgaagcgcggcaagaacgatgcagccgatgcggcagcgatctgcgagggcgtgacgcggccatcgatgcgatttgtgccgatcaagagcgtcgagcagcagagcgcgctgatgctgcaccggacgcgggatctcctgattcgccagcgaactcaactgatcaacgcacttcgtgcccacctggccgaactcgggctggtggcagcgaaggggcatgaaggattgcatcaactggttacggccgtggcggagagcagcgatgagcagttgccaagtaacgcacgctttgcctgtcaggcgatcgctgcacaactgagcgcggtgcagacccagatcaacgggctcgacaaacgcatcactcaagcccatcgcgccaatgcagacagcaaacgactcgaagccattccagggttcggcgtgatcctatccacggcggtcgtggcaacgatgacagacccaatggcgttcaagaccggacgcgaatttgctgcctggatcggattggtgccgcggcagaactccaccggtggaaaggaacgtctcggctcgatttccaagcagggcgatcgctatctgcggcgactattcgtcctcggtgcaatatccattgtcgggaccgcgcgcacgcggccggacaagtatccctgggtaaccgaactgctgggtcgtcggccggccaaggtggtcgcggtggcgctggccaacaagatggcgcggaccgcctgggcggtgctggccaagggtgagacctatcgggcgccgacacgctcaagcagcgctgccatcgcagcggcggcctgaaaaggtttggcattcggaatgtgaggttgaggttacgtagagggcgtacaggaaagtcgagggtgatgatggtttgatgcgaaccggttggaccggggatcgggagaacccgctaatgggtcaagcactcttgagtgcgggctaatgatagggacccgatctgcggattacatcaaggccagcggctatgaacgccgcaccaacaggccggacacatgacttgcacccgaccgcaagctgagaaccaaaaatcccttgacccgtgggcgccgtccacaca

SEQ ID NO: 2614 - DNA, 1361 bp, unidentified
  source 1..1361: mol_type = unassigned DNA; note = element_3b80355
  misc_feature 1: note = core
  misc_feature 2..74: note = LE
  misc_feature 75..1112: note = CDS
  misc_feature 1113..1361: note = RE
  misc_feature 1129..1355: note = bridgeRNA
taatgggatggtccgctccggtctatcggtagcacactatatgtatcaagaacacagaagggagacagaccatcatgaagaaacagctccagacagttaccgtatttggtatcgatatcggcaagaacagcttccatgtcgtaggtctggattcaacgggccagccagtagtccgaactaagttccgccgtgatcggcttctacagtacttcgccaacgctcggactgcgactgtgggcatggagagctgccccggatcgcagtggctggcgcgcaagctcgaggcaatgggccacacggcgcggatcatccccgctcagttcgtaaagccctatgtgaagtccaacaagaacgatatggttgacgcggcggcgattgcggaagccgtgacccgaccaacgatgcgcttcgtgcaggtcaggcaaccagagcaaagtgctcgtcaggccttgcatcgtgtgcgtgatcgatacatgagccagcgtacgggtctcatcaaccagattcgaggcttcctgcttgagtttggcatccccattcgccagggagccggcgtgtttcgtatcgacatgccacgcgtgctcggtgatgaagacaacgagttgcctccctccatgcgccaactgctcgccgacctctggaacgacttcaaggaactggaaaagcggatcgaagagatcactcggcagattcagagaagcgtgcagtacagcgacaccgcccgacgacttatgactgtacctggcatcgggccgcttgcggccagtgctcttgaagcctccgccggtaacggtcaccagttcaccaacgggcgcttcttcgcggcatggcttggactcacaccacgagagtattccactggaggaaagaccacactgctcagcatcagtaaacgggggaatagctatcttcggagattactgatccatggagcccgatcttgcgtgcagacctgcgacagacagcgtcatcccctgggagcatggatcaccaggctggaacagcggatgcatcgcaacaaggtcatcgttgcagtggccaacaagatcgctcgagtagcgtggaagatcctcatcaagcccgacgagatttatcgctggtcggaagcctgagcaggattgcttttcctaagtttgctgtgtagagattgatgacacaacggttgatcggcttgctgtaaacccggtgcgggaaaccggtctgctttgaagaccgaagaaagttattgggaacggcatgcgcggatctcatcatggcctggccgccaaaaacggccgactcgcgagaggccggatacatttacgcaaaccgctatgtgtcagaagcatctctgcgcttgcaaaaacggagcggaccataca

SEQ ID NO: 2615 - DNA, 1333 bp, unidentified
  source 1..1333: mol_type = unassigned DNA; note = element_3b8195e
  misc_feature 1..3: note = core
  misc_feature 4..40: note = LE
  misc_feature 41..1090: note = CDS
  misc_feature 1091..1333: note = RE
  misc_feature 1096..1331: note = bridgeRNA
tgatgtgatggtctcctccctaattcggcatttaagtgccatgattgaattgcatacaatcaaaacgggagaagaccagatgcagattacaacaattggtatagatatagcaaaaaacgtatttcatgtggtgtgctgtaacgctaaaaataaaatagtccgtaagaaagccgtcaaacgtcgggaactgctccattatgtgacaaacttaccaaaaagtattgttgccatggaggcatgctctacttccaactactggggtagagagattgcctcattaggacataaggtaaagctacttcctgctcaacatgtaaaagcgtttttaacaggaaataaaaatgactacaacgacgcatatgcgattgttgtagcttcacagcaggcacatattaaagcagtgccaataaaaaccattgaagagcaggataatcagcttattcataaggtcagggaattagcgatagggcaaagaacagccttatctaatcaaattcgtgggttactgcttgaatatggagttagcattaaacaaggcatcaaaaatttacgcaaggacgttgttgatttattagatgagacatcaagcttaagtagtacatttaggcaagtattagctcagttatatagtcagctagtgcacttggataaaactattaaacaatatgacgagcatattaagaaacaggtagcaagtaatgacgcttgtcagcgtctacagactatcccaggagttggtccaatagtcgctagcggctactacaatgaggttggtaatggtagacactataaaagaggacgagatgtctcggcgtcacttggtttggtgccacgtcagcatagtactggcggtaaagacatattacttggcataagcaagcggggaaatcgctatctgagatatcttctagtacaaggtgctaaagcagtcgtctcaagagcgaaaaataaaacagataagcttagtcagtggataaatcgaatcgtagcaacacgaggacataacaaggcttgtgttgcctatgccaataaaatggcaagaatagcttgggctataaccgtttcaggggaaagttaccaagctttatagaaatactcttcagcgaattgcgaaggtaaatgggtagatgattaaacaggtcaaaccggcatattgaaaacctgtcgagctcaggggtagtaaaataccgacaacctgataaggacaatatgcgcgatttacatctaggtcagggcaaataaattaagtgctcataaacagaccgaatatatgacagcaaacctgtccctgttatcacctaatagaccttgcaatacgggaggagaccatata

SEQ ID NO: 2616 - DNA, 1166 bp, unidentified
  source 1..1166: mol_type = unassigned DNA; note = element_3b878bc
  misc_feature 1..2: note = core
  misc_feature 3..176: note = LE
  misc_feature 177..1145: note = CDS
  misc_feature 1146..1166: note = RE
  misc_feature 34..197: note = bridgeRNA
cttgtatcttgaaaacggtttaaaatagttacgattagatttggcaaggtgcatgcagcccgattcctcctagggttttaagcccgttaattagcgaccggcgcatacactgagccactcatctgaaacccgaacagttgtccgtatccataacgcatttgcaaggatgggtaatcatgagtcagccaaatccactttgtgtgggtattgatgtttctaaagcaacgctggacatagcagccagctgtgatattgcacagtttacggtcagcaatgactctgacggttttgatgccattatcgccgaattgagaaagcattcggtggtgttggttctgatggaggcaactggcgggcttgaagctactgtggcctgctcgctccaggctgaaggctttgacgttactgtgatcaatcccagacaagcccgagactttgcccgcgctatgggctatctggcaaaaactgaccgtattgatgccaaagtgcttgcacaaatggcagaggttattaatcgacatccggagcgagagcgctttatccggactctgccaaatgcagaacgtcaggttcttgctgcgatggtcgtacgcagacgccagttgattacaatgttggtggcagaacgtaataggctgtataccgcacatccacataatagaaaaagcatcaacatcatcatcaaggcgctggaagatgaacttgccagaatcgatgaggatatgaacaaccacataaggaaccactttaaggatctggccgctaggctgagcagcattaaaggggttggtaccatgacagttgctgcgttgttggcggagcttcccgaactgggcagcctctcgaggcgagctattagcgcgcttgtaggcgttgcccccataaaccgggactcgggtaccatgcgaggtcggcgaaccatctttggcggaagggacggagtccgaacagcactttatatggccgcgcttgtagcaactcgctttaattcggttataaaagccttttacatgcgtctgcttgcagcgggaaaagccaaaaaagtggcgctggttgcctgtatgcgcaagctgctgactatcctgaacgcgatgctcagaaagaacgaagaatggaatgagtcgtaccatcacgtttctccataattttaacgttcaagacagttg

SEQ ID NO: 2617 - DNA, 1292 bp, unidentified
  source 1..1292: mol_type = unassigned DNA; note = element_3b92c8c
  misc_feature 1..2: note = core
  misc_feature 3..245: note = LE
  misc_feature 246..1280: note = CDS
  misc_feature 1281..1292: note = RE
  misc_feature 22..248: note = bridgeRNA
ctgacttgttgaatgacagacagccggatgccgcgaggatcttcatcctcgtagcgtccgagggtgccggatggcactggctcgcactgctccttgccgcccgatgggctggctcattgatagcatgccaccgccttccggcaccctcgcggtgtggttcgacagaggcatgcaagtagaccgacttgaagtcaggatgcccaccgcgcacgcccccatcccaacgagcgcaaggacggccatctgtgatcctgatcggcatcgatccgcataaatccactcacaccgcagtggcaatcgacagttccggcaacaagattgcccagcctcgattcccggtcaatgcaggcacttttggccaactgatggcctggtcccagcgctggcccgagagtcgattcgccgtcgagggcgctcgcggtttgggccgcggtatcgctcagcagctcgctgctgacggcgagcatgtcgtcgacgtgccctccacgctctccgcacgggcgcggatgctggccaccggtggggaccgaaagaccgatgcggcagacgcacttcatgtcgcgcaggtcgcattgttccggccagatctgcgccaggtgtgctccgaagaccaggccacgatcctgcggttgttgaccgaacgccgcgacgacctcgtcaatgagcgcacccggctgctcaaacggctccatgtcctgctgcgcgatctgattcccggaggcgccccgatcgacctgtccgccgacaaggccgccgaacttcttcgacggacccggccagtcaccgccactgactgttgccggcgagacctcgcccgagaccttcttgccgacctgcgtcgcctcgaccgcaccaccaaagacaacgaacatcagatgcgacatgccgtcgacgccagcagaaccacgcttaccaacctgcccggggtgggcatcgtcctcgctgcgaaaatcctcggccatgtcggcaacatcgatcggtttcctaccgagcatcacttcgccagctacaccggcagcgcaccgttggaagcctccagcggcaacaaaacccggcatcgactgaacactggcggtaaccgatccctcaactgcgtgctccacatcatcgcgacgtgccaaatccgagacaccggactcgggcaggactactaccggcgcaaggtctccgaaggcaagacgcccgctgaagctcgccgagccctcaagcgcaggctctccaacgtcatctaccgcacaatgaaacgcgaccaacggaacctccttcccgacgccgcttgacacacagaggcg

SEQ ID NO: 2618 - DNA, 1612 bp, unidentified
  source 1..1612: mol_type = unassigned DNA; note = element_3b9cf59
  misc_feature 1..2: note = core
  misc_feature 3..277: note = LE
  misc_feature 278..1492: note = CDS
  misc_feature 1493..1612: note = RE
  misc_feature 13..297: note = bridgeRNA
ctgttacaatataattgacgggtaaaaccttgcaagccagtaagggtttacacgtacttattacttaagctatactgaaagcagtaattggactgacgaattcctccttgggtcaaagcacccgtgctaaagactgtcatccatgctttcattatagcgttcggtttatgcaggttgagccacattaagtgcgttcgtgtcaccaaacagattgaataggtaatgagtaaagcgtggtttgcccgattgcaatttcaattcaggagatgcatttattatgaacgcagtaggtattgatgtttccaaaggcaagagtacagttgctgtactacgtcccttcggtgaggttgtggcttcgccttttgatgttgctcacaccggaagtgaattaaagtcattagctgacttcgtaaagaatctttgcggtgagactaaggttgtcatggaggcaacaggaaactattacgaacccattgcccgctacctccacgaacaaaatatatttgtttccgtagtcaatcctgtgcttatcagtgacttcggtggaaacacgttaagaaggcctaaaacggataagaaggattcattgaaaattgcctcctatgcgttaagctattgggttgacctgaaggaatatgttcctcaggaagacttaaggaagtcattgaaaatgctcaacagacaatatcagcaggcttccaagttaaagaccatgatgaacaataaccttatctcattacttgacctgacttttccgggaatcaataagaagttcacttcaccttcaagagaatcagacggtcatgaaaagtgggttgactttgtattggcctttcctcactgtgatatgatatcaaagctcactgtcaaggcgttttcaaagaagtataggaaatggtgtaccggtaattcttatcacttcaccgaagcatcatgcgagaaaatatatgaattctcgaaagaatgtatcagcagcgtttcttcagcagaatcaaccgtgtttgctgttatacaagccgctcggatgctcaattctgccattgagaactgtcatgctatccggcttgaaatgaaccgtgttgcagctcagctccccgaatacgatactgttatgtccatgtatggtgttggaaaagccatgggacctcagctgatagctgagataggagatcccagacgcttccacagcagaaaggcaatcacagcttactttggttatgacagcgagaataatgactccggtcagaaagtatcaaaatcgaattcaatgaccaagaaaggtgcaggtgctctgcgtagaaccttattcatcatcatgcagataatgttgaaaacaaagcctgtcgataatcctgtgtatgattttctgataaagaagcaatccgaaggaaagcattactattcatacatgaatgctgctgcaaacaagttccttcgtatttactacgcgaaagtgaaagaaatcttaaccgcagcagaagcctcgacgtaagccctttattcaagaatacattttttcagactgcttcggcagtctttttgtcgtacacctttttacattgaaaattttttcttattttttcaatttaggggttgacttttatttgcaggt

SEQ ID NO: 2619 - DNA, 1615 bp, unidentified
  source 1..1615: mol_type = unassigned DNA; note = element_3b9f8c4
  misc_feature 1: note = core
  misc_feature 2..216: note = LE
  misc_feature 217..1497: note = CDS
  misc_feature 1498..1615: note = RE
agactcccatgacaaaaaaatttcgtcaccatcggaaggatgaaaacaaccattctgtcgaatggtctccttgcagctggggtcatgaggtcgttgtatctatggtacgtaaaagtccgatatatagacggaccccagtagtctggtgcactacggaatccagtagtctggtgcactacggaatgtcgctcccttgagggaagcacgcaggatagaatgcttgaacaaaggctactgcaccagctgtttttgagaacgaagcagggagggagaccgatgcgcgtcttgtatgaacgctgttgcggattggacgtgcataagcaatcgattacggcttgcgcccttacccctgaaggaaaagagattcgcacgtttggtacgctgaccgacgatctcgaggagttggtggattggctgaaagaaaaaaaggtgacgcacgttgccatggagtcgacgggcgtatattggaagccagtgtataatctcctcgaagcagagccgatcgaagtgcttgtcgtcaatgcccaacacatcaaagcggttcccgggcgaaagaccgatgtcaaagatgctgaatggatcgcggacttgcttcgccatggattgctaaaagggagttacatccctcatcgggctcagcgggagctccgggaacgggtccgttatcggcgcagtttgatcgaggaacgggcacgggagctcaaccgcatccaaaaagtgctggaaggagccaatatcaagctttcttcggtcgtatccgacatcaacgggatgtcggcccggctcatcattcgcgcccttatcgaaggaaagaacgatccggcggccctcgcccagctcgccaaagggcggctgaaacaaaaaacggaagagctccggcgcgcgttgaaaggaatgatagggccgcatcaacgcatgatgctggccgagcaatggcgtcatgtggagtatttagatgaagcgattgcccggttggatcgagaaatcgaggaacgaacgagcccttttcatgaagcgctggagctcatcgatacgatcccgggagtggggcggcaaagcgcggaacaaattgtagcggaaatcgggacggacatgagccggttccctaccgccgcgcacttggcctcatgggccggaatggctcccgggaatcatgagagtgcagggaaacggttgtcaggtcgaacgaggaaagggaacaagaagctaaggtcgtgcctcgtggaatgtgcccgtgccgccgcccgaacgaagaacacgtacctatcggccaagtatcatcggatcgccaaacgaagaggagcgaatcgagcgagtgtcgcggtcgggagaacgattttagaaatgatctattacatcttaactcgaaaggaaccgtatagagagttgggaaccgactactgggatcggcagcgagaagcgagcatcgtgcgtcaaacggtgaaacgattagaggggttagggtacgaagtgaaactggaaaaaacgagtgcatagcacttattaaccatgcatagcacttattaaccatatatatactgaaataccttcctttggaattcaattccgaaggctaggcgggtcccgtttttttgtcttaaatggtgttttcagg

SEQ ID NO: 2620 - DNA, 1347 bp, unidentified
  source 1..1347: mol_type = unassigned DNA; note = element_3ba9cae
  misc_feature 1..4: note = core
  misc_feature 5..74: note = LE
  misc_feature 75..1094: note = CDS
  misc_feature 1095..1347: note = RE
  misc_feature 1073..1335: note = bridgeRNA
atgatgaggtggatggccccctggcggcatcgatgtgccaaagttgagttgcaagcaactaacgggagccatccatggagaaggttagcacaatcggtctcgatgtggcgaagtcggtgtttcaggtgcacggcgtcaatgaggagggccaggttgtggtcgagcggcagctgcggcgcccccagctattggggtggtttgcgcaattgccggcgtgcctcattgggatcgaggcttgcggaacggcgcattactgggcgcgcgcgcttcgcaagctgggtcatgaggtgcggctgatcccgccggcttatgccaaggcgtatgtgcggcggaacaagaacgacgcggcggatgcggcggcgatctgcgaggcggtgagccggccgacgatgcgctttgtcgcgatcaagagcgcagagcagcaagcgctggcagggctccatcgcgttcgcgatctcctgatgaagcagcggacgatgctgcgcaatcagctgcgcggcctgatggcggagttcggggtcgtggcggcgcaaggtcgacgcgggctgaacgagttgctagccgtgctgtgcgatgacgcggatcaacgcattccggacaccttgcgcgccgcgctgctcgcggatgcggaagtgctgcgcgatctcgagcaccggatcgaggcgatcgagcggcagatggtggccgcgggccgcgagaacgcaacctaccgccacctcatcaccgcggagggttatggcccgatcctctccagcgcgatggctgcgatggtcgtcgatcccggcgccttccgccgcgcctgcgacttcgccgccgcgctcggcctggtgccgcgccaagacggcaccggcggcaaggtgcggctcggcccgatcagcaagcgtggcaacggctatctccgccgcctgctcgtcaacggcgccgcctcgctcatcatcagcggccgcgccaagcgcgatccctggctcgccaagctgctcgccaccaagccgcgcaaggtcgctatcgttgcgctcgccaacaagctcgcccgcatcggctgggcgctgatggtgcggcaacaggattaccgcttcaccccggcagcagcctaagccaccggcatacggtccagaatcttgcgagggtaaacacgcgtgatggcaatgtcggtcaatccgacgatcgagggcaacctgtcattcgtcatggggcatcgcgaccccgccgcaatgatcagacctcgatccacggatcccatcagggctcgcggccatgtcaggctgcatccacaagccgaacacatgaccgcaactggccgcatcccacacgcgcaaaaaacccttgccaagcgggggccatccacac

SEQ ID NO: 2621 - DNA, 1366 bp, unidentified
  source 1..1366: mol_type = unassigned DNA; note = element_3bae67c
  misc_feature 1..3: note = core
  misc_feature 4..255: note = LE
  misc_feature 256..1287: note = CDS
  misc_feature 1288..1366: note = RE
  misc_feature 29..237: note = bridgeRNA
tctcctatgtttgcgaaagttattggtttgatgttttaagttgataaatttgacttttaagtgaaagaaaatgagagcaggttcgcttcaaaatagtcttcgagacatattcgccgatagaaacagcctcattttcttttatcttttagagtctgaacagaatgtaaggaatcggacaagattcgatatccagaatatccagccaggagaaaagacgaaggaagatttatcactttatttatcagatttaggtttatgaaagaattaaaacatgtattaggagttgatgttgcccaaaaagaattagtcgttacgctaggcaaaatgtatgaagacttttcaatcagtttatatgcctataaggtttttaggaattccgaatcaggaatcctgtcccttataaattgggttcaaaagctattgaaagatgaagcctctaaagttcattatgtaatggaagccactggtgtttaccatcaaaagtttgcctattatttaaatgataatggattaaaagtaagtgttgttttacctaataaaataagtaactatatacggactttagaattgaaaactataactgacaagacttgttcagaggcaatagcaagatttggtttagagaggaaattagagtattggataaagccaaaagatgcttacagggaattgcagcaattgaccagagaacgcgatcagattgtaaatgaaagagttgttgtaaaaaatcaactgcatgcagagcaatccgaagccattccaaacttaaaaagtataagaaggctacaattaagaatcaattttttgaatggtcaggaaaaggaaatcaagttagatattgctgaaattgtaaaagccaatgccgaactagtagctgagatagagagaatgacttccattccgggaattggagccctaacggctgttattattttagcagaaaccaatggctttgaattgatacgaaataaaaaacaactcgttagttatgtaggtttagatgtgaaagaaaaacaatcaggaacatcaataaagggaaagcccagaatatcaaaaagaggaaacagaagtattagaaaggcaatgtattttccagcaatgtcagctgttaaatgggatgatcattatagagaatcatatgccagattggtatctaaacaaggaataaaaatgaaggctttggtatcgattcaaagaaaactacttgaaatgacctatatactatataaaaataaaaccacttatgagaagcaatacaaaaatagcgtgcaaacacaaatggcttaacacgctatggagtctagttttaaactgacttgatagcaaaattaaaaaaaatagattaaattttgaaatcaacacagaa

SEQ ID NO: 2622 - DNA, 1377 bp, unidentified
  source 1..1377: mol_type = unassigned DNA; note = element_3baec39
  misc_feature 1..3: note = core
  misc_feature 4..85: note = LE
  misc_feature 86..1120: note = CDS
  misc_feature 1121..1377: note = RE
  misc_feature 1144..1365: note = bridgeRNA
tgatgctgtggacggctcctccgccggcatccaggtgccacactgtggttgctgttgaagcgatcacaattgagaggagtcatccatgaaggaagttatcacaatcggtcttgatctcgcgaagaacgtgtttcaggtgcatggcgttgatgggtcgggagataccgtgatgcgccgccagttgcgccggtctcagcttttgcccttcttcaagaagcagcggccctgtttggtgggcatggaggcgtgcgccacctcgcatcactgggctcggcaattgatcgagcttggccatggggtcaagctgatgccggcccgctatgtgaagccttacgtcaaacgcaacaaaaacgatgctgccgatgctgaggcgatctgtgaggcggtcacacggccgaccatgcgtttcgttgcagtgaagagcgctcagcagcagagcgtgctgatgctgcaccggacgcgagagcttctggtccgccagcgcaccatgctggtcaacgcgatccgttctcatatggcggagttcggcatcgtcgcgccggtcggcgtgccgcgggtaaaagagctctttgcggtgattgccgatgcggatgatgaccggctgccagcaatcgcgcgagcctgcctcgaaggtctggcgaaccagttcctgtcattgcacgaggagatcgctaccgccgagaggcgcatccacgcctggcaccgctcgaacgaggcaagccgccgcctggagaccatccccggcatcggtccgatcacggccacggctctggccgcaaccatcaccgacccttcggtgttcacctcaggccgtgagctggccgcctggatcggactagtgccacgacagagttcgaccggcggcaaggaacggttaggccggatatcaaagcagggcgatcagtatctgcgatggttgctggttgccggtgcgatgtccgtcatccgccaggccaagcggcgtggcacgacgagcctgccatggctggcgaacctgataaccaacaaacccaccaaggtcgcggccgtggcactggccaacaaaatggcgcgcattgcctgggccgtgctcagacagggcgggacgtatcaaaagcctgcaaccgctgcagcagcttgaggcacgcacagacaaagcagctaaggagtttggcggggtgaacgtgaggtaatgcaaaatcggtcgaaccgagggtcgggaaaacccgtttgggtcagggcgcatcaagcgcgtgctaatgattgggacccgatccagcggatcgcattagggccagcggtcatggaaaccgcatcaacaggccggacacatgactgcacccgaccagtttgtaccaacctcaaaataacccttgtcaaaatggagccgtccacaca

SEQ ID NO: 2623 - DNA, 1357 bp, unidentified
  source 1..1357: mol_type = unassigned DNA; note = element_3bafea8
  misc_feature 1: note = core
  misc_feature 2..135: note = LE
  misc_feature 136..1146: note = CDS
  misc_feature 1147..1357: note = RE
  misc_feature 1127..1351: note = bridgeRNA
taatgggatgacccgccccgtcctctcgcccagaatgtggcatctacagaaaggagcaagcaatgaagttacgcaacgcaccccgaccggcaacggcatttggagtagatatcggaaagaacctttttccacgttgtggggctcgaccccgctgggacgccgatccagaaggcgacgtttcggcgcgacacgctcttgcagttcttcgaacgcgcggcacctaccctggtagggatggaggcctgccccggctcgcaatggttggcacgcaagattgcagcgatggggcacaccgtccgcattattccagctcaattcgtgaagcctttcgtgaagtctaacaagaatgacatcatcgatgcagcggcaatcgcggaggctgtgacgcgaccgacgatgcgattcgtcgatatgaggtcgcctgaacaggttgacttgcaggccgtgcatcgtgttcgcgacaggatgatttcgcagcggacgtgcctgatcaaccagatgcgtgctttttgcttggaatatgggatcgctattcatcagggcgccggaaagttcaaagctgatctgcctaggatcttggcagatgagtccaatgatctaacgtcggccatgcgtcgcatcctcgcatcaacatttgacgaactgaagcaacttgagcttcgtattgcagaaatcaatcgtgagattgaggcgattgccgctcaatgtgataccgcacgtcgactgatgaccatcccgggcattggtccactcgcggcgacggcgcttttagcagcagctggatccgcccgacagttcagaaaggcgcgcgatatggctgcttggctcggtcttgttcctagagaatactccacaggcggtaaaacgaaactgctcgggataagcaagcgcggcaaccgatatctgcgccgaatgatcatccacggtgcccgctcgtgcgttacacatcttgatcggtcgcgataccgccttggagcatggctcgatggtcttgaggcacgaatgcacaccaacaaggtcaccgtcgccctggcggcgaagatcgcccgtatcgtatgggtggtgatgaccacgcccggtgcaacctatgacgaagggatccagcctttagctgattcccttcgttccagactgcgaggttcgtgagaatgatgacgagaaagtcgatcggcgtgccgtaaaccctgttcaaaaaagcgggctttgtgcccgaaccatttatctgggaacggcacgcgcggatctcatcatggcctggctgcaacagcagcccacttgcaagaggccggatatatttgtgcagactgcatcgtctttagtcgaaacggacccttgcacggccggggcgggtcataca

SEQ ID NO: 2624 - DNA, 1636 bp, unidentified
  source 1..1636: mol_type = unassigned DNA; note = element_3bb72b0
  misc_feature 1..2: note = core
  misc_feature 3..294: note = LE
  misc_feature 295..1470: note = CDS
  misc_feature 1471..1636: note = RE
  misc_feature 62..270: note = bridgeRNA
ctcgtattatatagtagtagtttttagagaccatctctaaggtctttataactattaaatcatagtctttttctttacctcttctgtaggttagactatgatatataagatgctgtgggttggtgaataaactcctaccattagatagttttaataaggatacaaccacagtctctttgttcatttgttaatcagttagataccgcatgacggtttatttagaacgaggttacaattacaaggagtaccctgtggttctaaaacagcattaatatatgtcaaaggagatttattatgatttatgtaggaattgatgttgcaaaggataagcatgattgctttatcgtaaactctggtggtacagtattatttaaagtgttcaccattactaacaacttggatggtttcaataatctttatcaaaagattgaatccgttatgaaagatgtaacaaaagtaaaagtagggcttgaagccaacggacactatagttacaatcttttaggatatctcattgataaaggtctgactacctttgttatcaatccgttacatacaaatctgtacagaaaaagtctaagccttagacagacgaaaacagataaagtagatgcccgtacaattgcttctatgttgatgtcggatgtaaacttaaagtcctactcaaatatatcctaccacaatgaagagctaaagtcattaactcgttatcgttttaataaagtagaagaacgctccaagcttaaatcttctgtttcaaggctggtatgtatactatttcctgaattagaaaagttagtacctaaacttcacatggcatctgtttatgcaatgctttctgaatttcccagtgctaaacatttagccgatgctcatcttaccagacttaccggtcttctttctgtatcttcaatggggcgatatggtaaggaaaaggcaattactttcagagaggctgccagaacctctataggctcaaatatgccggcgaaatcattggaattgaaacatacaataaaactcatccaagaacttactaccgaaattgatgaaattgaaaaagaaataaagattatcatggataaaatcaatccttcaatccttagtattctgggcattaactaccgcatgggagccatgatcattgctgagatcggtgatttcagtcgttttgattctcctgataaaatcttagcttactctggcttttctccatctacatatcagtcaggacagcttgatggagcttgttctcatatcgaaaaacgaggttcaaggtatttacgatatgctttatataatgctgccaagtatgtctgccactgggatccgacttttgcagaatacctagctaagaaacgagctgaaggaaagcattacaatgttgctatatctcatgctgtaaaaaagctggttcgagttatttattatcttgaaaaaacaaagcaacgatatgtcaaagcggcttaagtttttctaattatatactccttttttgagcacctgtaacgatgctttttttgtcatgcagttttcaaggttcaaagaactctaaccgagctcaaaatatatctaaaatacatttctgtaatttattcaaaaattttatttttctacttgacttttaatagttagt

SEQ ID NO: 2625 - DNA, 1364 bp, unidentified
  source 1..1364: mol_type = unassigned DNA; note = element_3bbb621
  misc_feature 1..2: note = core
  misc_feature 3..79: note = LE
  misc_feature 80..1105: note = CDS
  misc_feature 1106..1364: note = RE
  misc_feature 1081..1355: note = bridgeRNA
tgatgatgtagacgcccgcgacgatcccagtgtgtggcaaggtgagtttgtttgaagccaccattggaggatgggcatcatgattgaagttcgtacgattggtctggatctggccaagacggtatttcaggtccatggcgcggatgcatctggggtaactgtgcttcgcaagcagttgcggcgcggacaggttttgaaattctttggtggcctgccacggtgcctggttgcgatggaagcctgcggaagttctcatttctgggctcgcgagatcggccgtctgggacacgaggtccggatgatccctccggcctacgtgaagccgtttgtgaagcgtcaaaagaacgacatggccgatgccgaggcgatctgcgaggcagcgcaacgaccaacgatgcgctttgttgccgtgaagagcgaagagacacaaggagcagcagtggtattacgcacccgcgatctgctgattcggcaacgaacgcagaccatcaatgcgctgcgtggccatctggcagaattcggcgaggtggcaccgcagggcttgggctacggtccgaaactgttcgcgatggtcgaggatccgcaaacagcgcttccggaaacggcacggactgctctgcggtttctgacggcgaccttgtcgcaattgaatgaccagatccgggcgctggatgcgcagatcgtgcgccgggcccgtgaagatgagacagcgcgtcggttgatgacaattcccggaattgggccgctgattgccagcgcactggtggcgcttgcaccatcgccggaaactttcaaacgtggacgggactttgccgcatggcttgggctcgtgccgcgacaacattcgacaggcggcaagcaacgtctcggctccacgacgaagatgggggaacgatctctgcggcgtctcctgatcatgggagccaatagcgaggtcgtgtggcgcgcccgcaagggagcagcgcctggatcatggctggccaggatactggcgcgcaaaccgccgatgctggtgagagtggcgcttgccaataagatggcgcgcatcgtctgggcgatcatgtccaggggaggaatatacagagctccggttgctgcggcttaacgccaacgtaaccgagggggacgtcgcggcgagagaggtcattggaagtatggcgcaacggtcgtgagacgggatcaggaaaaccagtgcgcaccaaagtgtctcaagagcacgcggcgttgatttggacctgacctgcgaacaccatacgggccagcggcatatgagaaagccgcacaacaggccggacacatgtcagcacccgacaacgcgcaaatgccgacccaaagattcctcttgccaaccgggcgtctacaca

SEQ ID NO: 2626 - DNA, 1413 bp, unidentified
  source 1..1413: mol_type = unassigned DNA; note = element_3bc48dc
  misc_feature 1..2: note = core
  misc_feature 3..86: note = LE
  misc_feature 87..1133: note = CDS
  misc_feature 1134..1413: note = RE
  misc_feature 1157..1399: note = bridgeRNA
tgatgaggtggacagcccctttcatgcggcatcgaagtgccataggggttggttagcaaaaaccaccaacggagaaggagccgtccatgaaagagattagcacaatcgggttggatatcgccaagcgcgtttttcaggttcacgggatcgacgaccgcgggcgggttgtcgtacggaagaagctttcgagaaacgagcttctcgaatggttcggtaaaatcgccccctgtcttgtcggcatcgaatcctgcgcgacctcgacttattgggcgcgtgagatcggcgcgctggggcataacgtcaaactcattcctccatcctatgtaaaaccctatgtccggcgtcagaagaacgatcgcgtggatgccgaggcgatttgcgaggccgttggaaggccatccatgcgcttcgtcacgcttaaaacgatagagcaacaggctatccaggttttgcatcgcagccggtccttgctgatcacgcagcggattcaactcgtcaatgcactccgggcgcacatggcggagttcggcgtcatctttccccaagggcttgccggggccgctttggcgataaagacgcttaaagaagggaaggacaaaagcataccggcctttgctcaaaacgttctcctttcacttgtcagccagcttgaacatctcaggcaagaaatcaaaaaattggatcaacagatgatggcttggcacaaaaccaatgccgacagtcaacgcctcgcaaccgtccctggcataggtcatgtaaccgcctcggcagttttggcggctattggcgatggcaagcagtttaactcggcgcgagagtttgcggcatggcttggcctcgtccctcgccaaaactccagcggcggcaaggattgtttggggcgtatatccaagaagggcgatccgtatctccgccggttgttcgttacgggcgccacaacgcaactgcgcggaagtcaccgggacaagacggtcggcggcgcttggttttcttctttgctccggcgcaaagcggctcgcgtggcatcggtcgccctggccaacaaaatggcgcgggtcgcttgggcgcttctgaccaaaggccaggcttatcggcctgcgccgctcccgcgttcgatcgaggccgccgcatagcgtttcgcagaagccgtcgccgacattcgacgctttctgcagcaggagtgccataggagttgatgacaaggaataaagcacaggttgttaccgcttgttggatcacgccgccgttgatggccgctctcctaagagcgttatcttgattggcaaccaatacgcggacttcatcagggccagttgcctcaaaccttaacggcaacacaaacaggccggacacatgaccgcaacacctgctttcccttcattctcttcttgacataaaggggctgtccacaca

SEQ ID NO: 2627 - DNA, 1452 bp, unidentified
  source 1..1452: mol_type = unassigned DNA; note = element_3bc8a96
  misc_feature 1: note = core
  misc_feature 2..236: note = LE
  misc_feature 237..1436: note = CDS
  misc_feature 1437..1452: note = RE
  misc_feature 24..203: note = bridgeRNA
ccttacctttctttcagggtgttcgaactgggcgacggccgtaggcttcgaatcacccagggacgtcgggcatggctttcgtttgttcgccgttttcgatggctggaggagattggccacctgacgtcccgcgacgactcgaccgctgattgagagacgcgatgtgatcgctgtgtaaggacgtgacggcgtggtcgtcggctgggctcgaaccggatccgaccagggagccgaacatggaacaacacgtgtgggccggcatcgacgccggcaagtccgagcatcactgcgtggccatcgacaccgacggacaccgactgctctcccaccgggtggccaacgacgaaaccgccctgtgcgagctgctcgaccaggttctctctctgaccggacacgggaaggtcagctgggcgatcgatctgaaccacggcggcgccgcgctgctgatcaccttgctgctcgaccgcgatcagcaactgctctacatccccggccggaccgtgcatcacgcggcgggttcgtaccgcggcgaggggaaatccgacgccaaggacgcggcgatcatcgccgaccaggcccgcatgcgccgtgatctgcaccccgtccgcgtcggcgatgagaccgcggtggatctgcgcctgctcaccgcccaccgcaccgacctggtgtgcgaccgcacccgggcgatcaaccggctgcgtgccctgctgctcgagtactttcccgccctcgagcgagcgttcgactactccacctgcaaggcggcgctggtgctgctcaccggttatcagacccccgaccgaatccgtcgcgtcggcgccaggcgactcgaagagtggttgcagaagaaccgtgtccgcaccgcatctcgagttgcgcacactgcggtcgaggcggcccgggcgcagcacacgcgagtgcccggccagcaggtcgccgccgagatggtcgcacggttggcgaaggaggtgatcgccctcgacacgcagatcggtgagaccgaaacgcagatcgaggcccgatttcgcggccatcggcacgcaccgatcatcctgagcatgcccagattcgggtcgatcctcggcgcggagttcctcgcggccaccggcggggacatgaccctgttcgacagtgcggaccggctcgccggtgtcgcaggactcgctccggttccccgggactccggacgggtacgcggcaatctgcaccgccccagacgctacgaccggcggctgctgcgcgcctgttacctgtcggccatggtcagcatccgcagctgccccgaatcgagggcctactacgaccgcaaacgcactgaaggcaagcgccacacccaagccgtcctcgccctggcccgcagacgcctgaacgtgctgtgggccatgctccgcgacggtgcggtctaccgacccacacctaccgccgcggcggcttgacaacttcattgaggat

SEQ ID NO: 2628 - DNA, 1366 bp, unidentified
  source 1..1366: mol_type = unassigned DNA; note = element_3bcc335
  misc_feature 1..2: note = core
  misc_feature 3..228: note = LE
  misc_feature 229..1101: note = CDS
  misc_feature 1102..1366: note = RE
  misc_feature 1077..1354: note = bridgeRNA
tgatggggtggacgccccctacggcatctatgtgccaagatggtggtgttaccaaccatctgagaggaggcgcccgtggcagaagttagcacgatcggtctggatatcgcaaagcaggttttccatgcgcatggcgcggatgcgtcgagtgcgacggtgttcagtcggcggatcacttgagcaaagctgatccagttctttgcctcgcagccgcgctgcgtggtggcgatggaggcgtgtgctggatcccatcactggggccgtgaactgaccaggctgggtcacgaggtgcggctgatcgcgccggcctacgtgaagccgttcgtcaagcggcagaagaacgatgccgccgatgctgaggcgatctgcgaggcagcgcagcgaccgaccatgcggttcgtgccggtgaagagcgagcagcagcaggcgagcgccgcggtgttccgcgcacgcgatctgttcgttcgtcagcgcacccagctcatcgacgcgcttcggggccttttagccgagcatggctgggtctcgcccaaggggctgttccatgcccgggcgatgatggcgaagatcgaggatccctcgtgctcgctgccgcgaggcgcgcgcgatgcgttcctggcgttgattggaagcgtcaaggtgctggatgaacagatcatcgtgctcgatcgcgagatcgctcagcgtgccaaggaggatccggcggcgcggcggctgatgaccatccccggcattggaccgatcaccgccaccgcgatcctcgcgcttgcaccgccgccggagagcttccgcaagggccgcgactttgccgcttggcttggcctcacgccgttgcagcgctcgaccggcggcaagcagaagctcggccaaatcacgaagatgggcgaacgaacgctacggcgcctgttgatcatcggcagtgcggccgtcgtgcttcacgcggccaggcgcggtgcaccaaaaggatcctggctcgaacagatgatggcgcgaaagccgcgcatgctggtcaccgtcgcgctcgccaacaagacggctcggatcgtctgggcggtgctcgccagcggagaggattacagagctccagtcgcggcagcctgaacctgctgcgacatgtcagggtgccacggcacaagtgatcgaaggagagtatggcacgacagtcggtgagacggggccggaagaaccagggctttccaccgtgcttcacaagcacgctcagggtgatttggatccggtccagcgaactcccatacaggctcgcagcacatcacaacgctgcatcagaagccggacagatggcagcatccgaccaccgtgtcagaccatccaaaatatcacttgcgccgtagggggcgtccacaga

SEQ ID NO: 2629 - DNA, 1413 bp, unidentified
  source 1..1413: mol_type = unassigned DNA; note = element_3bce2bc
  misc_feature 1..3: note = core
  misc_feature 4..90: note = LE
  misc_feature 91..1131: note = CDS
  misc_feature 1132..1413: note = RE
  misc_feature 1146..1400: note = bridgeRNA
tgatggtgtggacgacgcccgcgcggcatctggctcaatgaagagccgtgccagaaggttgtcgttagggcaaccgaaaggagcgcgtccatgggaaagtctatcactgatttgtctgctgtcacgaccgttgggctcgatctggccaagcacgtctttcaagtccatggcgttgatgcttgggggcgcgttgtggtcgccaaatcgatccggcgcaacaagcttttgcagtttttcgcttcgttgccgtcgtctgtcgtcgggctcgaggcctgcagttcggcgcatcattgggcgcgcgagctcatcacgcttggccatgacgcccgaatgatgccgcctgcttacgtgaagccctacattcgccgacagaagaatgacgcggcggacgcggcggcgatttgcgaagcggcgacccggccttcgatgcggtttgtcggcgtgcgctcgctggagaaccaagcggcttcgatgcgtcacaagacgcgggagatgctggtctcgcaacgcacgcaattgctgaacgccttgcgcggccacttgaccgaggtcggcgtgatcgctccgcaggggctgcgttatgcccgcggactggccgagctgatcgaagcctgcgacgagacaatcccgtttgaagtgtgcgaggcgctcgcgccgctcgtcgtgcaactgcggaacctcgatgaagcgattgcgcgactcgatcgaacgatcgcaaagatggcgcagaaggatgaaacggcgcgtcggctgatgagcattcccggcttcggaccgatcaccgcctcggcgatggcggcgaccatcccggatacgtccagtttcgccggcccgcgcgagttcgccgcttttctcgggctgacgcccaaacagaactcttcgggcggcaagccgaagctcgggcgcatttcaaagatgggcaaccgatatttgcgcaaattgctcgtcgtgggggcgcatgcggtgctgtttcatcgtaagccccacacggatcccctgcgcatgtgggccaagaagctgatcgagaagaaacccttcaagctggtcgccgtggcgctcgccaacaagatggcgcgcatcgctttcgcgatcttgcgcggcaagacggtctatcgggaaattccggcgtagcgaacgccggctgggttcgcagccgaggttcaccaagagccaaggcggcacagaagtcgagggtgacaaagaggtgatgcgcagggaagcagattgatcctgaagcccgtggcgttgtctgcgcagtgaaagcgcgctcgcgtgataggggcaacggatcagcggacaacatcagggccggcggatccaattctccgcgcaaaagaggccgaagacatgaccgcactcccgatcagcgcaacgccaaaaaatagcccttgatcagcgggcggcgtccagaca

SEQ ID NO: 2630 - DNA, 1467 bp, unidentified
  source 1..1467: mol_type = unassigned DNA; note = element_3bcf72e
  misc_feature 1..2: note = core
  misc_feature 3..230: note = LE
  misc_feature 231..1451: note = CDS
  misc_feature 1452..1467: note = RE
  misc_feature 3..230: note = bridgeRNA
ccttaccttgttcgtgggctccggtcaacgagactggggtgggttgctcggcagtgcgggcagggctttgtgcccctgtcacgttgatggcctggggggtgttgccacccgtgctgtccgggcgtggctgacctctgacagggacatgctcttcggggctgattcgtaaggtggttgatggcggccgcgccgctcgagcatctcgtgaccgctggcagaagggggaacggatgggactcgatcatcggagcatcgaggtcttcgtgggcgtcgatatggccagggaggatcactacgcgcaggcgatcaccggcgctggcgtcgaggtgttccaccgaccggtgctcaacgacgaagcagcgatcaccgagctgattgccgacgcggccaagcacggccgggtggcgttggtgatcgacatgccgtcttccgcggcgcagctgctggtggaggtcgcccgggcccaaggcgtggccgtcgcctacgtgacggggttgcagatgcgtcgcgcagcagagctctacgcgggagcagcgaagaccgacccgcgtgacgcgtgggtgctcgccgatttcgcccgccgccacgcggatcggctggtgtggctcgatgtcaacaacgatgcgttgctccacaagctgcggatcctcaacgggcgcgatgtcgaccttgcgtcggacctgaatcgggccatcaaccgatgccgagatgccctggtcagcgtgtctcctgcgctggaaagggtgctcggcgcacagctcctcgccggcggcgttcgtgacctgctgcgagcggcaccgacgccgtccgctctgcgcgagctcgacaccgagacgctcgcctcgcagctccgggcgcgctcgccgcggttggcgagcaagctcgccgccagtgtgcgcaaggcgctcgacgcacagagcgtcacgctgcccggtgaggcgacctggggggagatcatcgccggtctgctcgatgacatcgaccggctcgtcgcccaacgcgtccagctcggcaagcagatcgaagaagcattccttgcgcaccctctcggagcggtcctggtgaccctgtgtgggttcgggcccaggaccggcgcaagaaccctcgccgagatcggtgacccccgacggttcgcgaccggcagccgcctcgccgcgtacgccgggctcgctcccgtcgatcggcgctccggcaagagcatcaacaacgccgctgcgtcgcggcgcgggaaccaccggctgaagaacgcgatgttcctcgccgcgttcgtcgcgacccgccacgacccctctgccaaggcgtactacgaacgcaaacgcgccgaaggcaagaaccacaacgctgccgtcatctgcgtcgtccgacgccgctgcgacctcatcttggcgatgctcaccaccggccacgcctacgacccccaacgccacgaaaaacccgccctcgccgcttgacaacaagacagggaca

SEQ ID NO: 2631 - DNA, 1477 bp, unidentified
  source 1..1477: mol_type = unassigned DNA; note = element_3bcfd97
  misc_feature 1..2: note = core
  misc_feature 3..238: note = LE
  misc_feature 239..1258: note = CDS
  misc_feature 1259..1477: note = RE
  misc_feature 14..188: note = bridgeRNA
cttgtatcttgcggattgaggcgtgaagatagcatcacgtttcggcggagaggccgaccccatccttaggccagcgcgagctgagcctgctgcgaagattggccgccgtccccctgtctatacgccgtggagaatcggaggccttttgagcctgcatgttcaaggtcggcggggacagtgagtccgttagcgcggacggggatggcagccgaagctcatcctaacgccggaggagccgatgagcaagtcaaccaacccccaacagacgactgtgttttgcggcatcgatgtaagcgccgccacactggccgtagccgtaatcgagcaagatcaaccccttcaacagcgtgagttcgccaaccgggccagcggtcacaaggcgctgatcggctggctgggcaagggtaaagccagagcgcgcgtgtcgctggaagccaccggcatctactctctggatttggcgctggccctcgatgcggccccgcacatcgagctggcggtgctgaatccgaagatggtcaaccgttttgcccagacgctgcgccgctccaagaccgacgcggccgacgcggctgtgctggccgagtacagccggcgcatgcctttccttgcctggacgccgcccagcctgaacgggcttcgtttgcgcgcgctgggccgccatatcgccgccctggttgctcaacacacgcgagaacagaaccgcctgcatgcggccaggagttctcgcaccgtgccgggctgcgtgctccaggacctgaagcgctcgctggcctcgctcacccggcgcatcgcgaaaatgcgccgtgcggccatggagctgatccgagccgatgccgagatcgagcagcgcttccggctgctgaccggcatgcccggcatcgctcagaccagcgctgtgcagatcctgggcgaactggcgttgttgtctccgcacctgacagtgcgccagtgggtcgcccatagcgggcttgacccggtgcaccaggactcgggaacctcggtgcataagcgctcccgcatcagccgtgccggcaaccgccacctgcgccgcgctctctatatgccggccctgtctgcggtccgctgggacccgcacatgaaggctttctacgaagctctccaggcacgccacaaaaccaagctccaggccatcatcgccgtggcccgaaaactgcttcacgccatctacggcatcttccgcacccgaactccctacgacggaagcaagctctttccgcagctggggatcgcataaacgctacaatcgcctcaccaggtgaaacggaagcgggctctgctgggaaggtcgccgcggcgacccgagggataacttggtgggctcatcctgacgatggaccaacggccgggcggcaatatcctcgcccggcctcgacaagcatcggagggatagacccgccatgccttgaaaatccaacccttcttcaccgaaaatgcttgacgcgcaagagagaat

SEQ ID NO: 2632 - DNA, 1465 bp, unidentified
  source 1..1465: mol_type = unassigned DNA; note = element_3bd568b
  misc_feature 1: note = core
  misc_feature 2..235: note = LE
  misc_feature 236..1450: note = CDS
  misc_feature 1451..1465: note = RE
  misc_feature 12..226: note = bridgeRNA
cgttaccttgttggtggtcctgggaccagcccgggaccgggccagtctgggccggcatgatggtttgcccctgtccgtagatgatccggggggtgttgtcaccggcctgggccggtggacgatgaccgctgatgaggggaacgacctgctgtcacagtaaggcctttcgtaacgtgggtgcggggtcggccgccgaacggctggcccttgacctgacacgcgaggggagctcctcatgacgatatcgatcagtgatattgatgtcttcatcggcatcgacgtgggcaaggccgagcactgggccaccgccctggacagcgccggtaagacgctgttcgacaaggtcctgcccaacaatgagtcccggctgcgggacctgtacaagcgcctgggagagcacggccgtctgctggtggtcgtggaccagcccgcgaccatcggggccctggccgtggcggttgccagagacacgggcatcgcggtgggctacctgccgggactgtcgatgcggcgcatcgccgacctgaccccagggagcgccaagaccgacaggcgtgacgcggccgtcatcgcccaggccgcccgcaccatgccccacaccctgcgcgatgtcaccgctgccgacgaggaggcggcgtccctgacgatgctgaccggtttcgacctggacctggcgcgccaggtcaaccagaccgccaaccgcatccggggcctgtacacccagatccaccccgccctcgaggccgtcctgggaccccacctggagcacgacgcggtcctggaggccatagcggcctggcccacccccaccgcactgaggaaggccggcaaggcacgtatcgatgccaggctgaagaagcacggagcccggcgccatgccgcctgggcccagcaggtctgcgaggccctgaagaagcagaccgtgacggtggccggcaccgacgcggccggggcggtcctgccccacctggcccgccagctcatctccctgcacgctcagagggccgatatcgccgaccgtgtcgagaccctggtggaggcccaccctctttacccggtcctgacctccatgcccgggatcggggtcaggaccgccgccgtcttcctggccgagacactgggcaggaccttcaccaccggagcccagctggcctcctacgccggcctggcgccggtgaccaggaggtcggggtcctcgatcaggggcgagcacgtctcccacgcaggcaacaagcggctcaagagagccatgttcctgtctgccttcgcctccctgcgctccgaccccgtcagccgcgcctactaccagcgcaaacgtgaccagggaaaacgccacaaccaagccgtaatcgccctggcccaccgccgcgtcctgaccctgcacgccatgatccgaaacggcaccctctacgatccacagccagcagcacagctacccaccgccgcttgacacaccacatagggg

SEQ ID NO: 2633 - DNA, 1439 bp, unidentified
  source 1..1439: mol_type = unassigned DNA; note = element_3bd686c
  misc_feature 1..2: note = core
  misc_feature 3..364: note = LE
  misc_feature 365..1156: note = CDS
  misc_feature 1157..1439: note = RE
  misc_feature 1192..1392: note = bridgeRNA
agatggggtaatcggccggcccagcttgtggatagctgaagaattttgggtgctgcgcttcaggctgatggtgaaacgaggtccgtggttacggcctcaagcatcagaaggagaagcgcagcatggaccattttgctggattggacgtatcggtcaaggagaccagcatctgcattgtggatgacacgggcaggatcgtgcgggaagtgaaggtagcgagcgagcctgaagccctgctgaaggttctggggagccaggcctaccgcttcaagcggattggattggaagccggaccgctgtcgcaatggctgttcagcgctctggccgaagcagagttaccagtggtctgtgtcgaaaccggcacatgcaggcggtgctaaaggcgcagatcaacaagacggaccgcaacgatgcgcgcggcatcgcccagatgatgcgggtggggctttaccgtccggtgcatgtgaagacgctccgcagtcagaaactgcggatgctactgacccatcgcaagcttctgcagtcgaaggcgattgccatcgagaacgatctgcgcgggactttacgcaacttcggcctcaaggtcggaatggtcggaacggtgaaattcgaggcgcgcatcaaggagcttgtcgagaacttctccgacttggctgtactggtagaaccgctgctcatggtccggcgggtactgcgcgagcagttcagtgtcctgcaccgccgtttgctggccatcgtgcgagatgatgaggtgtgtcggcgcctgatgaccaccccgggtgtcggccccgtggtggcgctgacctatcgcgccaccgtcgacgtgcccgctcgcttccgtaaatccaaggcagtcggggcggtatttggactgacgtgctccaggtatcaatcgggcgagatcgattggagcggcagaatatcgcgctgtggagatgaaatgatgcgggtgatgctctacgaagccgcgcagagcatgctgcgttcgaagaaatggtcctggctcaaggcctgggccatgcagatcgccaggcgccgcgggatgaaaaaggcgatcgtggccctggcacgccggctggccgtgatcatgcaccgcatatgggttgacggcactgagttccgctggacccgggagcaagccgtggcagccacatgaaaaccgttcgggatcaaacccgataggagaaaactcgagatccaccgagcagtggaaggatgtccctcgcgggacgatggatgaggtgagttcgcatgtctgcttggtcctgccgttcgattgacggcaaggccgaccaaaagattgttccgcctcgtcttcgaatcccatgatggaagggccttggtgccgattccgaagagaagcacgagcccgcgagcgacatcgacactgtggtggtggatagtctgaaagcgcttgaccccaaacggccgattagaga

SEQ ID NO: 2634 - DNA, 1536 bp, unidentified
  source 1..1536: mol_type = unassigned DNA; note = element_3bd99c9
  misc_feature 1..3: note = core
  misc_feature 4..241: note = LE
  misc_feature 242..1420: note = CDS
  misc_feature 1421..1536: note = RE
  misc_feature 8..220: note = bridgeRNA
tttcgtattattaggtcaaccagagatttctggttggccttttttcttaggcgtcatatgatggcggtagccgagagaacgtggactttattggggtcaaccccgtcgtgaaaacagttctctcactgcccccaatgaccatgtttgagctggttgagacagggatctcgtatcacaagcgaagctatgggtttggaaccatcgcgggagtgacggcaactttaaaattagggagtgtgttatggagccggttgtaggattagatgtggctaaaggagccagcgtcgttcaggcttttctaggaaggaatgaaccttacggaatattggagagtattacgcacgaggagagcggttttgaacgattgggagaattgcttgatgaattgaaggtactctcgggcagggagcccgttattattttggaagcaaccggccattaccatcgaggattagtttcctatttaatacgtgaggagtacaagtattttataatcaatccacttcaatctaaacgtgcgagaaacacgcaactgcgaaaagtaaaaaccgacgctgcagatgcatggcacttggccgacatgtactatcggggtgatgtaacgccacatcgtacatgggacgagttgtacaccgagctacagcatgtgacgagacaacatgagtttataacctcgatgtatgttcaggcaaagctaaactcgagagctttactggatcaggtatttcccgcgtttgagaaggtgttcagtaatctcttctcagctactgcacttagagtgctgcagagttgtctgaacgacgagtttgaaaaggtagaatctatcattcaggaacaaaccgggaagtctcattcgaaagattgggtaggagagaaggcaaatcagttgagacaagcattacttgaatgggccaataataaaaggagcataacgcaaagcatggcccttgtagggatggtatccctcctacttgagttccagaagcaattaagtaggctggaagaaaccctggaggaaatttccgcgacattaccagaagtggaacttttaaagaccattccgggaataggcgacaaacttgcttcggcgatcatagcggagatcggagatgcccgtcaatttaggagtgctaaacagcttgttgcctacgcaggtcttgatccaagtgtctacagttcgggtaagtatacggcctctagaaatcggataacgaagcgaggatccaaaagacttcgaagagctctatatttagccgttcaatgcggactacgtggtggaagaaatagcagattaaaggattattatgatatgaaaagaaaagagggcaagccctacaaggtggttgtgattgcttgcgccaacaagctactccatcacgtttacgccatccttaataaagaccaaccctaccacatttaattcccacaattatccacaacccttcacgccaatgaaggattatttgttgtgctcaaaaaaaagtatatcagtttttaaaatattttccacactgtagcttgacaactattagctgg

SEQ ID NO: 2635 - DNA, 1396 bp, unidentified
  source 1..1396: mol_type = unassigned DNA; note = element_3bdaba8
  misc_feature 1: note = core
  misc_feature 2..88: note = LE
  misc_feature 89..1111: note = CDS
  misc_feature 1112..1396: note = RE
  misc_feature 1168..1388: note = bridgeRNA
caatgggatggacgcccccactcgtaacggcatcaatgtgccaaagtggaagtgtcgagcaaccacttgaaccgaggggagcgtcatcatgcagattacgacgataggcatcgatctggcaaagaacgtattccaagttcacggcgtagatgttcgaggcaaggcggtgctgaagaggcagctcaagcgcagtcaaatggtgaccttcttcgcgaatctgcctgcgtgcctgatcggtatggaagcgtgtggcagcgcccactactgggcgcgcaagctccagacgctcgggcacaccgtgaagttgatggctccccaattcgtgaagccgtatgtaaagaccaacaagcacgatgcggctgacgcggaagccatctgcgaagcggtcagccggccgaacatgcgattcgtaccgctcaagcatgtcgagcaacaagcggtgctcgcgcagcatcgtgttcggcaagggttcgtcaaggctcggaccgcgcaggccaatcagattcgggggctattgggcgagtttggcttggtcgtgccgcaaggcatcgtgcgcctcttcgagcttgtgccggcgttgctggaacaggagacggaccagttgccaggcacgtttcgcgaattgatccatcgcttgctcgaccatctgaaggagttggaccggcaggtcggcgagttggaggcccagattcaagcatggcaccgtgccaatgcgctgtcgcggaagttggagcgcattccaggcattgggccgattacggcgagcgcgctggtggcatcgatcggtgatgccaagaactttacaaacggcaggcaattggcagcgtggctcgggctggtgcccaaacagcactcgagcggcggcaagacgaacctgcagggcattagcaagcgaggggacacgtatttgcgcacgttgctcattcatggagcgcgggcggtgatccgacatgcggagcacaagctgcaggcgcaccagtggctgcacaaactcatcgcccgacgtaacaagaatgtggcagtcgttgcactggccaacaagaacgcccgtatcgtatgggcgctgttggcacgcgatagtgaattccgatccgatcacgccgcagcgtgatcggatcagcttgcaggaagagcaacagaaggcttcatggcagcaggcagaactccaccgattgcacgagcgatcaggcagtgatggcaaacaggttagaccgtggttggctaagcccgcgtctccccaggcacttcgagtgcgattacccgattgcggcgccaaccagcacatcccatcagggaccgtggccgaaggccacaatcagagtccgaatgtacgggtgcaatctttacctcgcgtcgtcacgtactgagagcttggcaagccgggggcgtccatgta

SEQ ID NO: 2636 - DNA, 1341 bp, unidentified
  source 1..1341: mol_type = unassigned DNA; note = element_3be780c
  misc_feature 1..2: note = core
  misc_feature 3..65: note = LE
  misc_feature 66..1094: note = CDS
  misc_feature 1095..1341: note = RE
  misc_feature 1108..1327: note = bridgeRNA
tgatgctgtggacggctcttcaccaccccgccagcctgtaagggttggcagaatggaggagagccatggagtctgcggtgaccatcggattggatcttgggaagtcggtttttcaggtgcatggcgtcgatgccggcggggcggtcgttatccagcgccgattgacgcggggccggctgctggcattttttgcgaagcagccagcgtgccttgtggggatggaagcctgtgcagccgcccatcattggggacgagagcttcagaagctagggcacaaagtgcgcctgatgccaccccggtacgtgaaaccgtatgtgaagcggcagaagaacgacgcggccgatgccgaggcgatctgcgaggccgtgacgcgcccgaacatgcgctttgtcgagatcaagacctgcgagcagcaagggatcctggtccttcaccgggtgcggctgatgctgacgcgccagcgtgtccagctgtcgaacgcaatccgaggccacatggcagaatacggcttggttgcaccggttggccgcaatgggctgcagcggctcatcgcaatcatcgaagatccggatgatggccgtgtgccagcagtggcacgtgcttcactggtaccgttggtacgtcagctcgggatggtgaatgaccaggtactggagaacgaccggctagttcgggcgagcgccaggtctacagagctgggccaccggctaatggaggtacctggcgttggccctgtcctggccagtgccatggttgccacggtgcccgaccccacagccttcaagtcgggtagagatctgggggcttggattgggcttgtaccgcgccagaactctagcgggggcaaggaaaagctgggcggcatcaccaagcagggcgaccgctatctgcggcagcttctggtggctggggctctggctgtcatccgctatgcccaaaggcacggcacgaggcgcccctggctgatgcacctgttggctcgccgcacgcccaagatcgcggcagtcgcgctggccaacaagatggccagggtgatctgggcgatgatggtgactggggagcgatacaaagaacccagggcagctgcgacttaggcagcggccccggcaaggtttgggatgggcaatcgcgatgtaatgcaccatcggtcgaaaccgggagcgggaaaacccatttgcgccatagcgcttcgagcgcgtgcttttggtcgggacctgtcttagcggaaggcattatggccagcggcccaccatgtgccgcattaacaggccgcacacatggccgcaccgaccgaaggacagaacatcaaaatatccttgccaacggagcgccgtccacaca

SEQ ID NO: 2637 - DNA, 1290 bp, unidentified
  source 1..1290: mol_type = unassigned DNA; note = element_3bee175
  misc_feature 1..3: note = core
  misc_feature 4..221: note = LE
  misc_feature 222..1025: note = CDS
  misc_feature 1026..1290: note = RE
  misc_feature 1024..1277: note = bridgeRNA
tgatggggtggacggcccctgtttccggcgtcgatgcgccataggatggtcgttgttgaagcggccacaaagacaggaaccgtccacatgcaagttaccacgatcgggctggatctcgccaagaacgtctttcagatccatgcggttgacgccggcgggcctgcgccacggcccacttctgggcgcgggagatcggcgcgctcggccacgatgtgcggctgatgccgccggcgtatgtgaaggcctatgtccgtcgccagaagaatgacgctgcagacgctgaggccatctgcgaggcggtgacccggccgacgatgcggtttgtgccggtgaagagcgctgagcggcagagcgtgctggtgctgcaccggacgcgagagctgctggtgcgacagcgcaccatgctggtcaacgccatccgcgggcactgcgccgagttcgggttgatcgcgccccagggcgtgcgctgcgccgcggatctggtcgagcaggtccgtcgagccgaggcgtcgcgactccccgaaatagcccgctcagcccttctgatgctcgccgaccagcttgatgcgctggcggttcagatcaaccatctcgagcgacggctgctcgtctggcatcgccaggatcaggccagccagcgtctggccaccatccccggcgtcggcatcatcactgcgacagccctggccgccaccatcactgatcccagcgctttccgctccggccgggagttctcagccttcctgggtctggtcccccgccagaactcctccggtggaaaagagcggctcgggcgcatctccaagatgggagatggctacctgcgcaagctgctggtcgtcggcgccacctccgtcatccgacgggcgcgcaccagcacctcgccatcggcggcgtggatccaaagcttgcttgaacgccggccggcccgcctggtcaccgtggcgcaggccaacaagaccgcccgcatcgcctgggcggtgctggcgcggggcgaggtctaccgcacgacggtcgccatctgaacaagatcgccgcggccacacggccgcagctccagactgtaagggtgcacgagggttgatgaggatctgaacgcggccgcagaccaggaaaacccgaggagctgtcggagccccgagctcgatagtctgagagggacctgactagcggattccatcagggccagcggtcaatgcaccgcgccaacaggccggaaagatgaccgcaccccgacagatcgtcacctcagcccaacttcactcttgcagagcaggggccgtccaaaga

SEQ ID NO: 2638 - DNA, 1189 bp, unidentified
  source 1..1189: mol_type = unassigned DNA; note = element_3bee4fd
  misc_feature 1..2: note = core
  misc_feature 3..209: note = LE
  misc_feature 210..1175: note = CDS
  misc_feature 1176..1189: note = RE
  misc_feature 6..214: note = bridgeRNA
cttgtatgtttcaaaccagaccatcgcggtagagtctgagcgccgatgaggcggccagaccggaccgtgcagcctagtgcctgctggggcgttgaagcccgtttctgagtagatggcgcacggccaccgcgctggtcaacccgaagcccgaacggttacgcgcaccggagagtccgagagcgcatgcacaagcaagggatctgttgatcatgtctgcttcttcttcagtggtggtgggcatcgacgtcgccaagggacatgttgatgtggcggtgctgggcgcgaagttcgatgcccagcggttcgacaacaaggctgagggccatacggcgctggcggtggccttgacgccgctgggcgtggcgctggtggtgatggaggccaccggtggctacgaggccgcgctggcgtgcgcgttgcaggcggccgggctgtccgtggcggtggtcaacccgcgtcaggcacgcgatttcgccaaatccatgggacgcctggccaagaccgacgccatcgatgcgcgcatgctcgccgagttcgccagcgtgctggtgcgccgcgacgacctggcgcacctgctgcgcccactgaccgatcccgatcagcaggcactggcggccatggtcacgcgcaggcgtcagttgctggcgatgctgctttccgagcgtcagcggttgcaactggccatggccgtggtgcgcccgagcatcgaggccatgatcgaggcgatcaagaagcagctcgacgatgtcgaagcgcagatggtcgcccatgtgcaggtgcacttcgcggcattggacacgctcctgcgctcgaccagcggcattggcccggtctccagtgcctcgctgatcgccgagttgcccgagctgggcaagctcaaccgccgcgagatcgccgccctggtgggcgtggcgcccatggccaatgactccggcaaggcccgtggcaggcgaagggtgcagggcgggcgcttcgagatacgccgtgtgctctacatggccacgctgacggcggcacgccataaccccgccatcaaggccttctacgaccggctcaaggccgccggcaagcttcccaaggtcgccttggtcgcctgcatgcgcaagctcctcaccatgctcaacgccatggtcaaaaccaacaaaccttgggacatatcgcttcacggcgcttgactcgacagaggtta

SEQ ID NO: 2639 - DNA, 1452 bp, unidentified
  source 1..1452: mol_type = unassigned DNA; note = element_3bf6717
  misc_feature 1..2: note = core
  misc_feature 3..242: note = LE
  misc_feature 243..1445: note = CDS
  misc_feature 1446..1452: note = RE
ctcctaccatgaattcgtgtatagaataatgtataattgattatagagatattagttttataataacaggaaggcaggaggacttctttcttcctgggcattagagccctcatttcagtatgtcccaagcctctgagaaccataataggttggttgggtcatagaatccttgtaacgctggaggattggtctggaggctgcgacacctgcttttcatttacttcttatcgggaggtgatgtgatgtcaggattaaaaggcaactttggttgtattgtcgggattgatgtttccaaggataagtttgacgcctgtggaataacgggtgaagaggtcaagctttttcagctttcagtggccatggatcggaagggttttgagaaactgaagaaacaactttcatctttttcagtgtcatccgtattaatcggaatggagtctacggcatcttaccatgtcaatcttttctcataccttgttgctgcgggttataaagtcattttaattaatcccttgcagatttccaattacgtgaaaatggagttaagaaagacaaagacggacaagaaagacgctgttgttattgcacggtttcttctggctaatggagataccctaatgcagagggctactccgtctttgatatcggatcttcgggatctttcgcgtcagcgggaaagcctggttgacgagatgacctctttgaagatagagatcaagcagcttttgaatataacctttccggaactggagcacatggtcgggatatttacgaagtccattctcaaactcttacagcaatatccttccgcagttgctttaagagaagcggatattgatcaattgtctcagagcttgattacagattcctatggtcataaaagagaggcatttgccaaagcactgatcaaagcagcccgttcttcgattggcaccaacagtcccgccaaagagataattataaagcagaagataaggtttcttctgcaccaggaagaagctcttcaagagattacggacatgctgatggaaatggcccggaaactgatggaagaagatataaacattattacttctatcaaaggtatcggagataaaaccgccgccaattttcttgcggagatgggtggcgacatccataagtttgaatgttccggtaaaatcattgccatggcgggattggaccccgctgtttaccagtccggcaaacatgaaggaaaaggcaggattacgaaacgaggcaaccgacacctgcgaagaatcatctggatgatgacaaccagcgtaatccaatacaccgatatttttcatacttactatctcaaacgaagaaaggagggattgccctataagaaggctgtgcttgctacggctcataagttgatccgtgtcatctatgctatgctgacgcaacgggaaactttttgtccacaggggaattcatgatagttga

SEQ ID NO: 2640 - DNA, 1530 bp, unidentified
  source 1..1530: mol_type = unassigned DNA; note = element_3c0b885
  misc_feature 1..2: note = core
  misc_feature 3..244: note = LE
  misc_feature 245..1351: note = CDS
  misc_feature 1352..1530: note = RE
  misc_feature 7..223: note = bridgeRNA
ctcgtatgttaaattattattagttccccattctgttcttgaatgagtatactgtttatagacactgtggattagttgaactttcctaacgctttgacgtttgagcataggctctaaccacggttgtctgctttaatgttaatcagttagataacgcatgacgttttatttcgcacgaggctacatagcaggcagttctgtgggttctccatacagtgtcaatacattgcaaaggagcattactatgatctgcattggtatcgatatttccaaagataagcatgactgccttatctctaattctgatggtgatattctatttgataactttaccttttctaactctctggagggatttgaattacttttttctcgtatccaatcctgctctgacaatttctcccaaatgaaaatagggctggaagcaaccggtcattatagcaacaacattacagagtttctcgttaacaaaaatcttcctattttcattatcaatccgttacataccagtctttacagaaaaagtctaagctttagaaagactaagacggataaggccgatgttcactctatcgtatcaatgcttatgacgcagaagcttacgccctacgtacctgtatcataccatagaaaagaactcaagtcactaaccagataccgtttcaatctggtgcaggattgttctgtcttaaaagtctctttttcaagacttatgaatattatctttcctgagttagaaaagattgttcaccaattacaggtgaattctgtgtatcagcttatgtctgcatatcctgatgctgctgctgtttcaaatgctaatctgacacatcttacaaatcttctccggaaatactccaaaggacactatggccgggagaaagctattgaaatacgcaatgccgcaatgcagtccattggaaccagtgatggaatactcaagcttgaaatgcagcagacgattgcccgtatcagactcctccgcgagcaaatcagcattgttgaagtaagaatcaaggatatcatcaaggaaagtgattctccattcattacaatacctggcatttcctacattactgcggctatgatccatgctgaagttggtgatttctctaatttttcatcggccgaaaaaatacttgcctttgctggaatggagccctccatttatcaatcaggccaatatacttcgactcatgcaaaaatggtgaaacgaggttccaaatacctgcggtatgcactctttactgccgctaaaaatgttggcaaatgggacaatacgttcaaggagtttcttcagaaaaaaaactctctgagggaaagcactacaatgtggcagtatctcatgtagccaagaagctggtcagaactctatacagtatggaaatacatcatactgcatacagcaagtaattttttcttataacatacttctcaaagcagctgtataggtgctttatttgtcatgcaattatcaaggttcaaaaaacatatttaactaactttcaaaaaacacttgacatagttagt

SEQ ID NO: 2641 - DNA, 1468 bp, unidentified
  source 1..1468: mol_type = unassigned DNA; note = element_3c144c4
  misc_feature 1..3: note = core
  misc_feature 4..224: note = LE
  misc_feature 225..1448: note = CDS
  misc_feature 1449..1468: note = RE
  misc_feature 7..221: note = bridgeRNA
tctaatgggatgggacttcgtcgtttaggcgatgatgtcaccaagccgctggtcggtgagcactgcaacaatctgagcgaagagctctagtcggagaacgtgccccggtcagttggtgaggacggcggagaaggctggaggggtgtcgtgccatgagcactggtccattaggtcgccaccgctgcctcgaggcttgacatagtcaacgagatggaggtcaccagatgatatttgttggagtggattgggccgaggcccaccacgacgtgtgtgttctgaacaccgaaggcaaggtgctcggacgaaaacgaatcgcggacacgctggcgggtgtcggcgagttacacgcgctcgtggctgacttcctcgatgatgatgacgacgcccagaacgtggtcgtgggcatcgagaaggaccgcggtcttatcgtgaccgctctcatcgcggcgaactatcaggtcatcgcgatcaacccgttggccgccgctcgttaccgcgaacgtcaccacgtctcgggagcgaagtccgaccccggcgacgccaagatgctggccgatctcgttcgaaccgacgcgcacaaccaccgcgtcgtggcgggcgatagttcactcgtggaggccgtcaagttactcgctagagcccaccagaacgccatctggagccgtcaacgtcaggtcaacgcgctgcgttcgtccctgaaggactactttcccggcgcgctcgaggccttcggcacggacctcgccagtgtcgacgcggtcgcggtgctcggagtcgcatccacgccgtcactcgcgcgcacgctctcgcgcgcgaagatcgtgagtgccctgaaacgcgccggacgacagcgcaaccttgaagcccgagccgaggcaatccagagtgtgctgcgcaaagaacagttggctcagcccacggtcttagagaacgcctacggcatcaccaccaaagcatcagtcgcggtcattgtccagatgaacgcgacggtggccgagctcgaagcggcgctggcggagcattttgaacagcacccggacgccaagatcatccactctcttccaggaatggggacggtcctgggcgcccgggtgctgggtgagttcggcgacgactcgaaccgctacgccgatgccaagtctcgcaggaactacgccggcacgtcgcccgtcaccaaggcctcggggaggtcgcgagtggtgctcgcacgccacagtcggaacaagcgactcgcggacgccctcgatcagtgggcgttttgttcgacgaactggtcacccggcgcccgggcttactacgacgaactacgcgctcgaaacaaacaccaccgcaaagccatccgacaactcgcgaatcgctgggtcgggatcttgcatacgtgtctcgaacgcggctgcctttacgacgaagaaatcgcttggccgacgaaaaaagaaattgccgcttgacaagttaggcgcaaggggtg

SEQ ID NO: 2642 - DNA, 1429 bp, unidentified
  source 1..1429: mol_type = unassigned DNA; note = element_3c1781f
  misc_feature 1..3: note = core
  misc_feature 4..118: note = LE
  misc_feature 119..1156: note = CDS
  misc_feature 1157..1429: note = RE
  misc_feature 1181..1381: note = bridgeRNA
agatggggtattcggcttgagcccctcgcggagggatgcaggaggtgctgcgcttcgagctgatgatagaacgtggtctgtttggaacagccacaagcatcaggaaaggaagcgcagcatgaaatattatgccggactggacgtctcggtgaaagagacgtcggtgtgtatcgtggacgaaacgggcgcgatctgccgcgagatcaaagtcctcagccacccggaggacctcgtccaggctttgaaaagttcctcgtggcagttcgttcggatcgggctcgaagccggcccgttatcgcaatggctgttcagcggattggcggaggcgggtttgcccgcgatctgcatcgagacccggcatgcgaaagcattcctgaaagctcaggtgaacaagaccgaccgcaacgacgcccgcggcatcgcgcagatgatgcgggtcaatctgttccggcccgtgcatgtcaagacattggccagccagcgtcgccgcgccctgttgaccgcccgcaagctgttgcaggaaaaagcgatcgacatcgagaacgacatccgcggactgctgcgcaatttcggactcaaggtcggcatcgttggaacggccgggttcgacgatcgcatccgcgagcttgtcgatggcatgccggacctcggcgagattatgaagcccttgctggcggcgcggcaaaagctgcgagagacgttcatggagctccaccgcaagctgctatcgatcgtccgtggtgacgagacctgccgacgattgatgacgatccccggcgtcggtcctgtcacctcgctagccttcaccagcaccatcgatgttccggcccgcttcagcaactcccgttccgtcggtccggcgctgggattgacccccgtgctcaatcaatcgggggaaagccatcgcgtcggccgcgtgtccctgtgcggtgacggcatgatgcggaccctgctttacgaggcggcccaggttttgttgagccgggtgaagaaatggtcctggctgaaagcctgggcgatgaacgtggccaggcgccgcggacggcaaaaggccattgtcgcgcttgcacgccggctggcggtgatcatgcatcgcatgtggagcgacggcgccgaattccgttggacaagggaaagcatgcccgccgccgcctgaaacagacgccgggaagaagaagtccaagttccgctcgccggtggagagacgtccttcgcgggacgatggatgaggtaagctcgcttggggtcttgtgccgttcgcgccatcgcgatcaggacgcgagtcagattgggccgcctcattctactgatcccatgctgggagggccaaagagccgatcccgaagagaagcgcggccccgcgaatgacgtcaaataccggtgcagcgggaagctcgaaagcgcttgacctcaacacgccgaatagaga

SEQ ID NO: 2643 - DNA, 1579 bp, unidentified
  source 1..1579: mol_type = unassigned DNA; note = element_3c17f00
  misc_feature 1..3: note = core
  misc_feature 4..246: note = LE
  misc_feature 247..1413: note = CDS
  misc_feature 1414..1579: note = RE
  misc_feature 10..232: note = bridgeRNA
tcttgtatgatacaaacgtaccttgttgtaacacttgtatcacttttcctttccagcctttaaaatgtaagtagaaccttaatactcttatttgatcatgtggtatatctacttaagggagagtgaatctataggatcttattacatctgtttatagctggataggttttgatatctttatgtcacgcaagtttacactggtaagaccgctatagaatgacaaggttctagaaaggcggtctttttatgactaaactgttttgtggcattgacgttgccaaatatgaacacgtcgcaagtatctataatccatctacaggtgaaataatacttgattcactacatttcactaatgatgataaaggctttaaaacattattagcgaatcttaggaagaataaggataatgagataatgattggttttgaatctacaggtcactatcatcaaaccttattcaattatctaacttctaagaaatataagtgttatttaatcaacccttatatgactagtaagtttagatctatttctttacgtgatgccaagaatgataatatcgattccaaggctatcgcacagtttttatcgtttgaacatttaaatctaaataatgaagaatttttgaataatgaacttaaagagttagcttttcaaagacagttcttgatgactgatgtatctaaaatgaagatcaaacttaagtcttatcttgatagagtattccctgaacttgaatctcttgtagatatcaataccgctggtattagagctattttaaaggaatatccaactgctaaagatatttctgaagtaagaatagataagctcaaaaacttagttaaaacagcttccatggggaaatatcctgtatctaaaattgaagctgttaagaaagcagctaaaacttctattggtattcactctttaagtattggtttaaatatcactcaatgtattgaaaccttagacctaaaagaaaagcagattgatagaatcgaaaaggaaatcaagaaacatcccactgtacttaattctccattacatcagttaatcggaattaacgatatagaaatcggttatatcatgtctgccataattaatataacacgatttgattctccaaaaaagctagttgcttatgcaggacttgatccaaaggtaagacaatcggggacatggagtgcaaatagaaccagaatgtctaaaagaggaagtaaacttttaagatacgctcttatatggtcagcatacaatatgaccagaagacccggatctatgaaagactattttgaattaaagaaatttcaaggaaagtctcattacaatgcattagggcattgtgctgccaaactttgtcgatatatcttttggatcttaaatcatcctaacgaagaatttaaataccaataatttcaaacgataatttttcaaagaactaatattttggcatatacatatcatctatttcagtgcgttatttaacatgacttaaataaatgagtttttgtatacccaaaatttaatttaaagaaaatgtacaaatctattcatttttacttgacagattcatagctgg

SEQ ID NO: 2644 - DNA, 1789 bp, unidentified
  source 1..1789: mol_type = unassigned DNA; note = element_3c199c2
  misc_feature 1..2: note = core
  misc_feature 3..275: note = LE
  misc_feature 276..1484: note = CDS
  misc_feature 1485..1789: note = RE
  misc_feature 13..295: note = bridgeRNA
ctactataataaaattagtcgttaaaaccatgacaagccagccatggtttacacgcactcgttatttaagttataataaaggcagtgattggaataacgtgggtcaccttgggacactgcgcccgtaaaagagaccgttatccatgcttttgttatagcgttcgattttgcaggtagagccgttcgtatgcgctcgcatcactcagtaggcagaataggtaacgaggaaagtgtggatttatcgatcacaaattctatcagtaggagagatgaatatgaacgcagtcagaattgacgtatccaaaggaaaaagcacagtagctgtaatccagccctttggagtggtcatagctgaaccttttgatgtgcttcacacggaaagtggtttgaaagagcttgtggcatttatcaaatcactttccggtgaaacaaaagttgttatggagtacaccgggacatattatgaacccatcgccaacgcaatacataacgcaggtatatttgtatccgtagtcaatcctttgctgattgatgactacgacacaaaccgtgtcagaaaagtcaagaccgacagaattgatgcattcaaaatcgcatcgttcgctcttgacaagtggataaaacttcgggaatatacgcctgccgaaacaatccgcaaaacgctgaaaatcatgaatcggcaatgcatcaagctgaacaagatacttgtgatgcaaaagaacagcttcatcgcattactggactgctgctttccgaatgcaaatacactttttacatcgccgcgccgagagtcagacgggcatgagaaatgggtggactttgtgctgatattccctcattcagattctgtcgcaaaactctccttatcgtcattcgagaccaagtatcaaagctggtgcaagaagaaccattacaattacaacaagtcaaaagccgctgaaattcatgcttgtgcaagaactttagtcagcactctgcccatgacagaagcagctaatacgatcgtttacgagtcagccaaagcacttaattccacacttgaaacccttgcaaagtttcatgccgaaatgaatgctcttgcttctcagcttcctgagtatgaaaccgtcatgagtatgttaggtgttggtaaggtaatatgctcgcagcttatttctgaaatcggagatatcatgcagttgaaaagcggaaaatcacttgtagccttggcaggtatcgatccccctccaaatcaatcgggaaaggatgatccgaaatccagaagcatttcaaaacgaggatctccggcattgcgaaaaacgctgttcctgattatgacgatctatctccaacaacaacccactgatgaacctgtatatcaatttcttgataagaaacgttccgaaggaaaaccatacaaagtgtacatgatcgccgctgcacacaagtttctgcgaatttattatgccagagtcaaagaagcaatgaatgctcaaagcacgtagcatctattcatagattccgaacccgagacaaaaatcaggcacagcgcagccgcttgactttgacaggttatcatcaaaatgctataatggcttgcccgacggcgactgaattcatctattcatgatttcctcaccgtcggcacgacactcacagcatttttatgatgttctgtcaaggttgccggtcgggtacaactaaacttctttttcagactgcttcggcgatcttattgtcgtgcgcatttttttcttctgtgaaagttttgtgaaactttcattttaccccttgacttttatttgcaggt

SEQ ID NO: 2645 - DNA, 1358 bp, unidentified
  source 1..1358: mol_type = unassigned DNA; note = element_3c1e80a
  misc_feature 1..2: note = core
  misc_feature 3..83: note = LE
  misc_feature 84..1109: note = CDS
  misc_feature 1110..1358: note = RE
  misc_feature 1126..1345: note = bridgeRNA
tgatgtggtggacggtctccgctcccggcatcgcagtgtgccaaagtgtggctgtcgaaagtccacatgagggagagccgtccatggaacaggttagcacaatcggattggatatcgccaagcacgtctttcaggtgcatggcgtagacgcggtgggcgcggtagtggtccggcgaaagctgcgacgtgaggatgtcgccgctttcttcaggaaattgccgccgtgcctgatcggaatcgaggcgtgtgcgaccgggcaccactgggctcgggtcctcctggcgctgggtcacgaggttcggctaatgccggcgtcttacgtcaagccatacgtgaagcggcaaaagaatgacgcgacggatgccgaagcgatctgcgaggcggtggcgcgaccgacgatgcgcttcgtcccggtgaagagcgaggagcaacagagtgtcctgatgctgcatcgcgtccgtgaacttttgatccggcagcggacaatgctggtgaacgccttgcgcggccacctggcggagttcggcatcgtaacgcgtcagggcattgtcggcgtcggaatgctgatcgcattggtagaagacgatggccagaatctcatccctccgcttgcgcgttccgcgcttctttcgctgatcgggcagttgcgggaggtgcacgagagggtcggcgagatggattgccaaattcatgcttggcatcgctccaacgagctgagccgtcgccttgagacaatacctggaattggcccgatcactgccagcgcaatcgccgcgaccgtgacagacgcgtcgctcttcaaatccggccgacaactggcggcatggataggcttggtacctcggcagaattcatcgggtggcaaagaccggctcgggaggataagcaaacaaggcgatccctatctccgtaggcttcttgtcgttggggcgcatgcggtacttcgcttcagccgcaaggccagagttccaccgacgcagtgggcggccgagcttttggcgaagaagccgtacaacgtcgtcgctgttgctctggccaacaagatggcgcggatcgtctgggcgttgatgacgacaggcaggcgatttgaggccgccgccaatctttgacaagtcacgaggctgctggaattggtgaggtgcaaatggtgtgatggcgaacggtcgagccgggatcggacaaacccgatcagtgggtgccgcttgaaagcgcgttgacctgtctgggatccgatcagcggactacatcagggccagcggcatgaacaagccgcaatcaaaggccgaatacatgcctgcacccgaccaatctgccggaaacagtaaattgccccttgccacgcggaggccgtccataca

SEQ ID NO: 2646 - DNA, 1296 bp, unidentified
  source 1..1296: mol_type = unassigned DNA; note = element_3c241f5
  misc_feature 1..3: note = core
  misc_feature 4..224: note = LE
  misc_feature 225..1211: note = CDS
  misc_feature 1212..1296: note = RE
  misc_feature 36..196: note = bridgeRNA
gtcgtacgtttgcatcttgaaaaataaattgtaattttacatttaaataagcacggagaaagaccgagactttgttagtgaaaaactgcctttgacgttcagtccccgtgctttcacatctgtaaaactggatagttcgttaggttttaagcctgtgtttacgacgatagattatcagatgttatttaaacaaagttatttttaatctttttaatttattcattatgagttatgtaggtattgatattagcaaggatagctttgtagtagctttctcttctgcttctaaaagtaaaactatcacttatcaaaacgacgacaaaggtattgaaaaatttataaatacccttgataaagagcaacatcattgtgtgatggaagctactggtaactatggtgttaatctactttatcacctttgtgaacaagaaataaaggttagtttaattaaccctaagcaaagtaatttcctttcaaaaatgaaactatctactgctaaaactgacaataaagatgctcgtttgttagtagaatatggagaaaaaataaatcctgaagtttataaaatgccttcagataagattattctccttaaacagaaacaaacagtacttactcacttaataaagcaacgtacagcaagtaaaaatcagctaaaatctttagagttactcaataaaaaagataatttagctattgatatgctcaaaaacaacatagacaacttagataaactcatcgataatctagaaaaagacattgtttctatcactgaggaagagtttgaaaaacaagttcaactacttacttccattaaaggaataggcaaaaaagttgctactactttagtgattattactaatggtttttctttctttgaaaatcctaagcaattatctcgttatataggtatttgtcctacctaccaacagtcgggtaaatcgttgaattacaacggacatattaatagaaatggacatagcaccttacgcggtcagttgtttatagcatcgtggtcagcaactaagtataattcctcttgtaaggctctttttgaaaggcttagagaggaaggaaaaccttggaaattagcacagatagcggtctgtaacaagcttattaggcaagcttttgcagttattaagtcaggagttgcttacatagacggacacattcctactttatctgcaccaatgcaaacagctatatgagtcactactttcgccgtaggcgaactaaaagaaattcctttttagaaaaaaaagttactaaaaaatttgcatattaacatagttc

SEQ ID NO: 2647 - DNA, 1462 bp, unidentified
  source 1..1462: mol_type = unassigned DNA; note = element_3c28aa5
  misc_feature 1..3: note = core
  misc_feature 4..141: note = LE
  misc_feature 142..1188: note = CDS
  misc_feature 1189..1462: note = RE
  misc_feature 1225..1458: note = bridgeRNA
agatggcatggacgtctccacctacaccgccgttgatggcgtaggcccataacccgatacggggtggggcctcgcggcaacggcatcaaaagtgccaaagtggaagctcgtcgcaaccacttgtgaaccggaggccccaccatgcaatctaccgcaacgctgccagtcatcggaatggatattgccaagaacgtgtttcagcttcacgtggtggacgccgagacgggcgagcttgaacgacacaagctcaggcgtgaccgggtgaccactttctttgccaatcgtcaaaggtcactggtcgcgctggaggcctgtggcggtgcgcaccactgggcccgaacgctgcaggcgttggggcatgaggtgaagctgctgccagcaaagcatgtccgtccctttgtcctgcgcgacaagaccgatgcccgcgatgcccaggccatttgggtggcagcccagcaacttcacatcaaggccgtgccggtcaagaatgagcagcaacaggcatgtctgactcttcaccggatgcgtgctcagctcatgaaggtgcgcatcatgcaaaccaatgcgttgcgtggcttgctctacgagttcggcatcgtgctgccagaagggcatcgtgtgctgctcaaacgcgttcaggacgaactggccaaggcgcaggagcaggcgcgactgccaggggtggtggtcgccagcgttcaagatcaactgcgtcgcatcgacagtctgcaggacgatattgaccaactggacaaacggctggcctcgatggtcaagcagaaccagcacatgcaggcactgcaagccataccgggcatcggtccgttgacggcgacagccttggtgtctaccgcgacagacctgtccagctttgagtcgggcaggcagtttgccgcctggttgggactgacgccccgacagactggcaccggggggaagactcggcagttggggatctccaaacgcggcgacccttatgtgaggaccatgttgatgcacggcgcccgcgcagtcattgccaggcgccagcgcagcagctggatcgagaggctgttactgcgccgaccatacagcgtggtggtcgcggcgctggccaacaagctggcccgaacagtctgggcagtcctggtcaaaggcaaagcctttgaccaggtcaaatggaatccggttgacctcgctgcagtctgagaccatcaagatgaattgaatacaccaaactccaagaaaccgttttgaaggagagcacgcaggaagcgatgtgatgggtcaacaggtcaaaccggggtgggggcaatccgattaggaagaagggcatcaagcccgatgtgcagacaggagcctcacccgcgaatgccatcagggccagcaggacaacaccctgcaccgacaggccgaatgtaagactgcaaacccttcagaccttctcgccgccgaatcttgctcttctggagacgtccatgta

SEQ ID NO: 2648 - DNA, 1198 bp, unidentified
  source 1..1198: mol_type = unassigned DNA; note = element_3c30fe3
  misc_feature 1..2: note = core
  misc_feature 3..217: note = LE
  misc_feature 218..1195: note = CDS
  misc_feature 1196..1198: note = RE
  misc_feature 40..197: note = bridgeRNA
tcctttagacttgtaaaataaatatgtagtagatttatgatgagagagaaaaggagaagtgcactatgacatacgctctaagcaatacttattcctcgatttagacttctcctttttgatcaagtactcaaatagaaattagggattcaaggcccattattaaggagttgagtttctcttgatcatctctcaatttattcacctaaaaacttattcaatgaaacaagtctttattggaatcgacgtaagtgcagccacactcgacatctgtatcaaagttaatgattcttttacttctgtagtaatcaacaatcaaattaaggatatcaggaagttcctgcaaccctttcagcaacagtcggtaatgatcggcatggaaaatacgggaaggtataactgggccttttacgaagcactgtcaggatttgagttcaccacctatgtgatctctcccctccacctcaagaagagcatgggattggtcagggggaagaacgacaagatagatgctgagcgtatcgtacatttcctggtaaagaattataccgagctaaggccatgggtatgccccggttcaacgatccagaaactcaaagtattgattaccgagcgcaattaccgcattaagagcaaaagacaactgagtaccatggacaaggactatgcaaagatgaggacgctgggactggaaaaacccctggcaaggatgaacaaaaggctcaaggctgcattagatgcacagatacttgaaatagaaaaggagatagagcaattgttaaaaggggatcctgaaataaagaaacaggtcgcattgatacggtcggtacctggtgtagggaaagtgctgagctgggtgatcatagcaaagaccaatggattcagctctattagaaccccaagggagatggcctgttactgtggagtagcaccttttgaataccaatctggaacatccatatataggagacctgcagtatcccacctggcagataaaacactcaaaagcttactccatatgggggcgatgagtgcgatcaggttgcaaaatgatctaggggaatactacagaaggaaagtagcagaagggaaaaataaaatgagtgtaatcaacgctgtaagaaacaaaattattcatcgaatttatgcagtgataaaaaaccaaattatttatcagaataatttggttttatcatagaaa

SEQ ID NO: 2649 - DNA, 1578 bp, unidentified
  source 1..1578: mol_type = unassigned DNA; note = element_3c31514
  misc_feature 1: note = core
  misc_feature 2..91: note = LE
  misc_feature 92..1135: note = CDS
  misc_feature 1136..1578: note = RE
  misc_feature 1344..1570: note = bridgeRNA
taatggtatggacgcccccctacccgaaacggcatcgtgtgtgccaaagtggaagtgtgttgtatccactaactgagagggagcgtccgagatgaagattactgcggttggaattgatttggctaaatccgtctttcagattcacggtgtcgacgaacgggggaaggtgatggtgcgcaaacagctcaagcgagctgaggtcgcaaagttctttgccaatctcccgccctgcttgatcgggatggaagcgtgcgcgagtgcgcattactgggcacgtaagctgatggcgtttgggcataccgtgaagctgatggcgccgcaatttgtgaagccgtatgtaaaaacgaacaagagcgatgcgcgcgatgcggaggcgatctgcgaggcggtgcagcgacccaatatgaggttcgtgccggtgaaaacgccagagcagcaggcggtgctggccttgcatcgggcgcgccagggttttgtgaaggcgcgcaccgcgcaggcgaatcagatccggggattgctggcggagttcgggatcgtgatacccaagggtattgctcacttggcgaagcgcataccggagattctcgaggacggggagaatgggttgccaggcaacgcgcggcagctgttcgcaggattgttggagcactttcaggagttgcatcaacggatggcggagttagagaagcagatcgtgctgtggcatcgtagtaacgagcagagctgcaagctcgagaagattcatgtcattgggcccatcacggcgagcgccctggtggcgagtatcggagatgcgaagagcttcaagaatgctcgacaggcggctgcctgggtggggctggtaccgcgacaacattccacgggtggcaaggatcggctactcggcataagcaagcgcggggatgtgtatctgcgcaccctgctcattcacggagcacgttccgtggtaaggcaggcggagtcacatgcggatcgggcgacgagctggctcaaaggggtgctggaccggcgccacaagaatgtagcggcggttgccctcgccaacaagaacatgcgcatcgcctgggcgttgctggccaaggagcgcgattacgagtccaactatgcagcggctccgaatgtggcccaggcatgagcaacaatcaaacgacccctcgaggggcgctgcccctcgagctccccgcactcgccgtgagcaggatggcaggcagaaacacctccctgccaccctgccgggaagtgtatgaaattctgggccgtcaagggaagctgcgccgggcggcaagccgcccgcccttgacggaatgagcgcagcggtaattgggacgttgaaggagaaccctatcgattgctcaggcaagctcaaagtgatggcgaaacaggtaagaccgtggttgactcaaccttccggatccatgggactgatccacaagtccgttcaagtgataaggcgtcaaccagcgcatcccatcagggccggcgactcaaagtcgcgcacgaaggccgaatatatggcggcaatcttaaacctgcgaaccaaaactaagagagtgcttgacaaaccggggcgtccatata

SEQ ID NO: 2650 - DNA, 1377 bp, unidentified
  source 1..1377: mol_type = unassigned DNA; note = element_3c36848
  misc_feature 1..3: note = core
  misc_feature 4..86: note = LE
  misc_feature 87..1109: note = CDS
  misc_feature 1110..1377: note = RE
  misc_feature 1110..1364: note = bridgeRNA
tgatggggtggacggccccgacctacggcatcgcaatgtgccatgctggagctgttagacagcagcaacggaaggaaccgtccacgatgactcttacaacaatcggcattgatctggccaaatctgtttttcagcttcacggcgttgacgcgcatggtgaagtcctgttccgcaagaaactgcgccggaatggcgttctggatttcctgcgcgacctgccaccctgcctggtcgggctggaagcttgcgccacagcccatttctgggcccgcgagatcggcgcattgggccataaggtgaagatgatcccgccggcctatgtgaagccctacgtcaagcgtcagaagaatgatgtggctgatgctgaggcgatctgcgaggcggtgacgcggcccaccatgcgatttgttccggtcaagagtgcgcagcgccagggtgtgatgatgctgcaccggacgcgcgatctcctgatgcgccaacgcaccatggtgctcaatgcgatccgcggccatctggccgagttcggcatcatcacagcgcagggtccacacaagctggccgctctgctcgaagcgatgcgcgatgaggagatgcccggcttgccagacatcgctcgctcggccctgagcagcctgatggcccagctcgataatctggcggctgagatccgtgcactggagcgtcggctcatggcctggcaccgcgaagatgaaaccagtcagcgactggagaccatacctggcgtaggcctgatcacggcgaccgcactgtccgcgagcatacccgacccatcggtgttcaagtccggacgccagttcgccgccttccttgggctggtgccacgccagaactcgtcgggtggtaaggaccgtctggggtgcatatcaaagatgggcgatggatatctgcgcaggcttcttgtggtgggggcgacctcggtcatccggcgcgttggcaccaacacgtcggcaacgggcaactgggtcaggcgtctgctggagcgcaagccggcacgcgtagccactgtggcgatggccaacaagaccgcgcgcatcgcctgggcggtgctggcacgcggcgagacctatcgggcacctgcaatggtgtgaaacagagcatgcggtagcccacacggcaccgctgaagagatgcgagggcagatgtaagtgatgatgatcaaacggggccgcagctgaggaaaacccgaggcgttgtcagggcgtaagagctcgatcctctgagagggatctcagcacgcggacttcatcagggccagcggtcatcgctaccgcgtcaataggccggacacatgaccgcaacccgcaatgatcaaaagtcacccaaatcaacccttgctaaacgggggccgtccacaca

SEQ ID NO: 2651 - DNA, 1151 bp, unidentified
  source 1..1151: mol_type = unassigned DNA; note = element_3c3a454
  misc_feature 1..2: note = core
  misc_feature 3..194: note = LE
  misc_feature 195..1145: note = CDS
  misc_feature 1146..1151: note = RE
  misc_feature 13..209: note = bridgeRNA
cttgtcttatggaaagggtggcttttgagctatcagaagccgctgcctgccacgccatttatggctggcagcggcgacggctggtccgccccgttcgtggtcttcgggaccgtttctgagtctggtcagccgtcgctttcgccttgggcctgaacggatacgcgtgtttgcatcacgcatgacaaggataggacatggagaagatgactgattgcaacgtagggatcgacgtttcgaaatcctgcctagacgcctatcggctggaagacgaagccgcggcacggttcgacaactcgccaagcggttttcgggcgctgatgaggtggctggggaaaaggccagtggcaaggatcgtgtatgagccggcggggccctaccaccgggcgctggaacaagctttgggcgggaaatttccgcttgtaaaggtcaacccgctgcaggctaggcgctttgctcaggcatccggtacgcgcaccaaaacagacgaactggatgctcgcgcgctcgcacggatgggggcagtgctgtcattggcaccggacgatccccaatcagcgaatctacacgaactcaaggatttacatgtcgcacggcttggcattgtcaaagagcggacgcgattgcggaaccgggggcagacccagaccaacccggtattgaagcgccagacagccgagcggttgcgcatggtcgagcgtcagatcaaagagctggacaaggaaatcgacaaattgatttccgatgaccaagctcacgcccgaaaacgcgacattctcagctccattcccgggctcggtccggttgccaccgggatgatcctgaccttcctgccagagatcggtgcgctcgaacgaaaacaggcaggaagcctggcggggctcgtaccccacaatcgccaatccgggcagtggcgaggaaagtcatttatcagcggcggccgaaaggtcctgcgagatgccctctacatgccagccctcgttgccgcgcgtttcaatcctgatctcaggaaaaagtacgcgcagctccgagccgatggcaaacctgcgaaggtcgccatcgcggctgtcatgcgcaagctgatcgagaccgcgaatgctttggtcaaagccgatcgcttttgggtcccaaaagaggcttgcgcatgacggata

SEQ ID NO: 2652 - DNA, 1359 bp, unidentified
  source 1..1359: mol_type = unassigned DNA; note = element_3c3e5f0
  misc_feature 1..2: note = core
  misc_feature 3..80: note = LE
  misc_feature 81..1097: note = CDS
  misc_feature 1098..1359: note = RE
  misc_feature 1107..1346: note = bridgeRNA
tgatgtggtggacggccccacccctgagttttgtggcaaagtgtggtcgttttgaaacgctcacatgaggagagccgtccatggaaccgattgctacgatagggcttgatttggcgaagaacgtttttcaggtgcactgcgtcgatggtgtcgggaatgtcgtcattaaacgtcagcttcggcgaagcgaagttttgaagtttttcacaaaagttccggcatgcctggttggtatcgaggcatgtggcactgcccattattggggccgtgagctgttaaagcttggtcacaatgtgaagctcatgccccctgcctatgttaagccgtatgtcaaacgcgggaaaacggatgcagctgatgcggaggctatcgcggaagcagtgacgcgcccaacgatgcggtttgttgcggttaaatccgttgagcaacaagctgttctgatgctccataaggcccgcgacctgttggtgcgccagaagacgatgcttatcaatgctttgcgagcacatcttgctgagtttggaattatagctgtgcgtggtcccgcaggcgtgaacacggtgctcgacatattgcacgcgacgcagggcgaactgccgcgtgctgctgtacaagctctcaacggcctggctgatcaactcaacagcgtaaggattgagatcgataagatcgaaaccgagatcaaagactggcaccgcgcaaatgaagtcagccagcgtcttgcgacaatcccgggtatcggacccataactgccagtgcgattgttgcagcggttccggatgcaacactattcaagtcatcgcgccaatttgcagcttggcttggcttaacgccaaaatcgcatagcagcggcgggaaggaacggcttgtaggaattagcaagcagggggacggatatattcggcgacttctggtccttggggcgactgcagtcacccggttcactcgccagggtcacggcatcaaaatctgggcatcccaattgctcgaccgcaaaccgagcagactggtaacggtggctttagcgaataaattggcacgcatcgtctgggccttgctgatccggaagcaatcctacgcagcgacggttgcgtaacacctatccacattcgaggcatatcttctcgaagtggtttgcatgaggactgagtattgatgacgaaccggtcgaaccggggattgggacaacccttccgagccaagcgcttggtgcgcgtagaggtgattgggatccaatctgcggacttcatcaaggcccgcggccatatgtgcgccgcacatcgaggccggacacatggctgcacccgaccgcaccgaaacttactttttccacttgcaaaaacggggccgtccacaca

SEQ ID NO: 2653 - DNA, 1351 bp, unidentified
  source 1..1351: mol_type = unassigned DNA; note = element_3c3f83f
  misc_feature 1..2: note = core
  misc_feature 3..71: note = LE
  misc_feature 72..1097: note = CDS
  misc_feature 1098..1351: note = RE
  misc_feature 1122..1347: note = bridgeRNA
ttaatgagatggtcatccccaccctccgagggcacactttcgcagggtgttttatttcggaggccatcatcatgagcacagctgcactggtaggtattgacctgggcaagcacagctttcatctgcatggacaaggttgctctggccgagaggtctttcgcacgagagcgacacgccagcaaatgatgcgattgcttggcaacttgccggcttgcacggtggtgatggaagcctgcgccggagcgcactttatggcgcgccaactgacggcgctcgggcatgaagtgaaattgatctcgccgcagttcgtgcgtcctttcgtcaagggcaacaagaacgacttcattgatgccgaagcgatctgcgaagccgcctcgcggcccagcatgcgcttcgtctcgcccaagaccgaggcccggcaaacgttttcggtattgcaccggatgcgtgattcgctggtgcgtgatcgtaccaagacggccaaccaggcccacggtttcctgctggagttcggcatcagcctgcccaagggactatcgctggtcagacggctgccgagcacgttggatgagcatgagctgccgcctcgcctggtcacactcttaacgcggctgcatcagcatttctgctatctggacggacagatcaaggcgctggacaaggaaatgaccacccaacttgaggaagatgacctggggagtcgcttgcggacgattccctgtgtcggcccgatcacggccagcctgttatcggccgaaatgggcgatggcaagcagtatggcggcagccgtgatttcgcggcatcggtagggctggtgccccgccagcacagcaccggcggtcgagccaatttgctggggatcagcaaacgaggggacaagaatctgcggcgacttctagtgcaatgcgcccgggtctacctgcagcgcctagagcatcagcagggtgccctggccgactgggtccgctcactacgccagcgacgccactcgaatgtggtggtgtgcgccctggccaacaagttcgctcgaatcgcctgggcgatcgcagccaaccactcggaattcgaagcagagccagtcgtctgcgccgcctgactctgccattacagctgtaccacgaaacaccctttcaggttttgcgatgctgaacaaccgatgacgtgaacggcccaccggcttggtgaagaacctgacataaaaatcggcttttgaagccgccgggtttttcaggatcaccaggcgcgactctcatcgtggcgcggggcatgcccaaacgagacgccggatagatttacgcaagccatagaatcatcgctggtcagtattgcagaaacggggtgaccataaat

SEQ ID NO: 2654 - DNA, 1619 bp, unidentified
  source 1..1619: mol_type = unassigned DNA; note = element_3c47d23
  misc_feature 1..2: note = core
  misc_feature 3..286: note = LE
  misc_feature 287..1498: note = CDS
  misc_feature 1499..1619: note = RE
  misc_feature 19..306: note = bridgeRNA
ctactacaataattttataggttatggtacatgacaaaccagccatgtccatattccttcttgttgcttaagctgttagaatgtagagagcaattggtccggcggtcacctccttgggcttcacgtccgtaatttagtctgccaaccagctcctcattcgcagcgttcgttttatgcaggttgaactgctttcccagcacgttcgtgtcacaccacagtagattgaatcggcaatgagtaaacctggatccattgctactatcattttttaaggagtgacatatttatgaatgctgtcggtgttgatgtttccaaaggtaagagtatgattgccatccttcgccccttcggtgaaattgtttccagtccctttgaggtcctgcatacatccagtgggattaatgaacttatctcccatatcctgtccctggacggtgacaccagaatcgttatggagcacaccggacgctactatgagccaatggctcactggctttccggtgccggactgtttgtcagtgctgttaatccaaaactcatcaaagattttggcaacaactctctccgtaaagtcaagacggataaagcagatgctataaaaattgcccgttatactcttgacaactggaccgatttgaaacagtatagtcttatggatgaaatacgcactcaactcaaaaccatgaatcggcagtttgatttctacatgaagcagaagacctccttcaaaaacaacttaatctctttacttgatcagacctatcctggtgccaatgatttttttgacagccctgttcgcagtgacggcagccagaaatgggttgattttgcatctgcttattggcatgtagactgtgttcgcaagatgtccctccctgcgtttacagagcattatcagaaatggtgtaggcgcaaaggctataacttccagcctgataaaccaggagaaatttacactgcttcagaaaaccttatagcagttctttcaaaagatccaatgaccaaaatgctcataaaacaggcgatagaccaactagacactgcctccaaaatcgtagaagaacttcgcagcaagatgaaccagactgcggccaaacttccggaatacccgattgttatggctatgaaaggtgtcggcccatctcttggtccccagctcatggctgaaatcggcgatgtagcccgtttttctcaccggggagcgattacagcatttgccggagttgatccaggggcaaaccagtcaggggcttacgagcagcaaagtgtccgcacttcaaaacgtggctctgcccaactccgcaagactttatttcaggtcatggacgtattaattaagacatccccagcagatgatccagtctacgagtttatgtcaaaaaaacgctctcaggggaaatcctactatgtctacatgactgccggtgccaacaagtttctgcgaatctactacggacgggtgaaagaatacttagattcccttccccagtcagaataactctggcttcatagctttttcagaccagcgtttagcggtggtctgtttgtgatacaaaaaacactgcataaaactttttctgcaaatcttattaatttcctattgactttttatttgcagg

SEQ ID NO: 2655 - DNA, 1316 bp, unidentified
  source 1..1316: mol_type = unassigned DNA; note = element_3c56249
  misc_feature 1: note = core
  misc_feature 2..253: note = LE
  misc_feature 254..1300: note = CDS
  misc_feature 1301..1316: note = RE
  misc_feature 11..243: note = bridgeRNA
ctgtgaggatggtgaagctggctcagtgacagtgggctggtgatgacagcagcaggtgtggctcttcgcctgactggcgtgatgcccttgatccgacttgtccgcctgttgctgtcggcaccggcccggccggagtagctggcttgatcaggagcatgaccgccagtagccgctggcgtgtcccgtcacagtcctgccgactccgatccggaccggacctcacgtccctccaggtcaggagaacgcgttgtccatgctcgcagaactggtcgagctcgtcatcggggtcgacacccacaccgacacccacaccgcggccgtggtcgcgaccgatacccgcgccgtgctggccaccgccacggtgagcgccgacgaagacggatacgccgaactcgtcgcgctggccgaggcccacggcgggctgcgcggctgggcgatcgagggcaccggcggctacggcgccggcctggcccgacacctcgaccagctcggtgagctggtcgtcgaacttgaccggccggtccgccccgcccgccgagccggggcaaagtctgacccgatcgacgccgaacgcgccgcccgcgacgcgctcgcccgcacacgactggcacagcccaagaccggacccgaacgggccggcctgcagatcctgctcaccgcacgccgggccgcggtcgccgcggccagcaccgcccaacgccagctgcgcgcactggtgatcaccgccccggaaccggtccgggcccggttccgcggccagaccacccgcgacatgctcaccaccgccgcgcggctgcgaccggccacggccagcgccgacgtgcacaccttcaccgccctgtccacactgcgggcactcgcccgccgggtccgcgccctggaaaccgaggccaacgagcacgaacgggcgatccgagcaatcgtgcgcgcgtggcgaccggatctactcacgctgtccggggtcggcccgatcaacgccgcgaccgtgctgaccgcctggtcgcattcccggcggtgccgcaacgatgccgcgttcgcgatgctcgccggcgccgccccgatcccagcctcctcgggtaaaacggtgcgctatcggctcaaccgctccggcaaccgccaactcaaccgggccctgcacaacatcgcgctgtcccggctgcgctacgaccccgacacccgcgcctacgccgaccgtcgccgagcccagggcaagaccgaccgcgacatcaagcggtgcctcaagcgctacatcgcccgccagctctaccggcagctcgaatcaggcgccgcaacggcttgacgaaccataggagcgt

SEQ ID NO: 2656 - DNA, 1338 bp, unidentified
  source 1..1338: mol_type = unassigned DNA; note = element_3c57d67
  misc_feature 1..3: note = core
  misc_feature 4..83: note = LE
  misc_feature 84..1097: note = CDS
  misc_feature 1098..1338: note = RE
  misc_feature 1106..1336: note = bridgeRNA
tgatgtgatggtctcctcccaatacggcatcgatgtgccatgattgaagttgttacacacaatcaaaatgggaggagaccaaaatgaagattacaacaatagggcttgatattgcaaaaagattttttcatgttgtttgctgtaataagcagggttggttaattaacaagaaaatgttaacaagagcgcaagtattagctttctttcaaacacacccatcctgtttagttgctttagaagcctgtgcaacgtctcattattgggcaagagaaatacaacagtgtgggcaccaggtaaaacttattccacctcaacatgtaaaagcctttttaattggcaacaaaaatgactataacgacgccttagccattgctgtcgcggctaaccagccacatattaaaagtgtgggaataaagtcgatagagcaacaagataatcaagcacagcataaagcacgcgagttggcggttaggcaaagaacggcattatgcaaccaaataagaggattaatcgctgaatacggtattgcgttaacccaaggtgtaaacaatatacgtaaaagtatccctctcatgctagatgatgaggcctcgccattatcaggggcgtttaaagccatacttaggcagctacaaagccaattaactgcattagatacgtgtatcgaagcctatagccaattgattgttgaagcagtaaagcgcaatgatatttgtcagcgagttcaaaccataccaggatttggccctatggtatcgagtgcttattttaatgaagtgggtaatggcagtcactatcgacgaggcagggatgtttctgcttccttaggtatcgttccccgccagcacagtagtgggggtaaagagacgttgctaggcataagtaagcgagggaatagttacttacggtgtctgttaatccaaggagcaaaggctgtggtatcaagagctggaacgaaaaaggataaattaagtcaatggataaaccggcttgttcaaactcgggggcataaccgagcctgcgttgcttatgccaacaaaatggcgagaatggcttgggctattaccgtctcaggagaagattattcagcagaataagtaaaccgctcttcaaagaattgcgtgggtagagcaaaacgatgacataacaggtaaaacctgcatattgaaaacctgataacctcaaagagcgaaaagcccgacgagctgataaggacgatatgcgcgtaatacatcgaggtcagaagccaatagcttcattaaaagaccgtatatatgacagcaatcctgtccctgttatcgatgagttataccttgcaatacgggaggagaccatata

SEQ ID NO: 2657 - DNA, 1388 bp, unidentified
  source 1..1388: mol_type = unassigned DNA; note = element_3c58194
  misc_feature 1: note = core
  misc_feature 2..79: note = LE
  misc_feature 80..1129: note = CDS
  misc_feature 1130..1388: note = RE
  misc_feature 1149..1379: note = bridgeRNA
taatgggatggtccggccgtgctccggccccgccagcaagggaacctggcaaggggcgccaaagacgaggagcacgccaatgccacacaagctcaattctggaatcgccgtgatcggcatcgatatcggcaagaactcgtttcacgtggtggggcacgataaacgtggcgcaatcgtgctgcggcagaagtggtcacgcgggcaggtggaaacacggctggccaacctgcggccgtgtctaatcggcatggaagcttgcgtgggtgcgcatcatctccgccgcaagctgcagatgctcggacacgacgctcggctgatgccggcgaagtacgtgcgcccgtattcgaagggacaaaagaatgacttccgggacgccgaagcgatcgccgaggcggtacagcgcccgactatgaagttcgtcgcgacaaagaccgccgagcagctcgatttgcaggcgatgcaccgggtgcgtgagcggttggtcagtcagcgcactggcatcatcaatcagatccgtgcttttttgttggagcgcggcgttgccgtgcgtcaaggcttgcgcttcttgcgcaccgagttaccgcgcattctcgccgcgccttgcgacgctctgtcacctcgcatgttgcgtgttatcgaggacctggcaggcgattggcggcggctcgatgagcgtatcgagggtctgtcgagtgagatcgaggttcttgcgcgccgagatgtgggctgcgaacgcttgatgaccgttccggggattgggccaatcatctctagcgcgatggtggccgcagtcggcaccggggatgcgttcacgaaaggccgcgactttgctgcttggctgggcctggtccccaagcaaatctcaaccggcgaccgcaccatcctcggcaagatatcgaaacgtgggaatcgctacctgcgcgttctgttcgttcaggccgcgtgggtcgtattgatcaagccgaagagctgggatcgtcacgggctcaagccttggctcgaaacggccaagaagcggctacatcacaatgttctcgctatcgcgctcgccaacaagctcgcccgcattgcttggagcgtcctggctcacggtcgagcattcgaggcgagcaagctgcaagtcgggtgatcagtcaccgacacgtcttacctgccgaggtctgcgagagaacgaaaacgagatggaggatcggtcttcccggcgcttgcgaacactggtgacccaaatggcccgttgaggcctgaccgctaacgagatcgcacgcgcgctgatatccatgatggcccggagcacaaaaggttccaatcaaaggccggatacattgatgcaagaccgtacatccgccaactcgaagaacttctcttgcaacgcacggccggaccataca

SEQ ID NO: 2658 - DNA, 1377 bp, unidentified
  source 1..1377: mol_type = unassigned DNA; note = element_3c5b3b7
  misc_feature 1: note = core
  misc_feature 2..73: note = LE
  misc_feature 74..1120: note = CDS
  misc_feature 1121..1377: note = RE
  misc_feature 1148..1372: note = bridgeRNA
atgctgtaatggactctccttgcaccacacttgccgataccgagtcgttcgggtgatcgctgggagagtcgctatgcacaagcgtattgcagttgatttggccaagtccgtttaccaggttgccgagagtgtccgtgtcggtcaggtgagtcagcgccggcggctgaatcgtgaggcgttccggcgatatatacaggagcagggcgagccggtcgagtgggtcatggaagcgtgcggcacggcgcattactggggccgggtggcgcaggcgctgggccatcgggtgatcttgctgcatccgcgctatgtgcggccctaccggcggcgcaacaagaccgaccgcaacgactgcgacgccatcctcgaagcggcgcgttgtcagggcattcatccggtgccggtgaagagctccgcgcagcaacaggtgcaacaactgcatggcctgcgcgaaacctggaagaaaagccgcatccaacgcatcaacctgttgcgcggcatcctgcgcgaagccggtatcgaagccccggtgacgacagccgcgttcttgcgtcaggccaccgaactggtcgagcatcccgaactggcccgcctgagtggcctgctgcatatcgttctgtccgagataaacctctacgaacaatgcatgagcgaatgcgagcagcaactcaaacgctggcatgccgacgacgaggtcgtgcgcaagctggacgaagtcagcggcattggcgtgttgacggccagtgccttcaaggccgtcgtaggccaacccgagcgctttgccaacggccggcaactgagtgcctggctgggcatgaccccgcgcgaatttagtagcggcaacagccgcaaactgggacatatcagccggcagggcaacgtctacctgcgtaccttgttgatccatggcgcccgcgccgccttattggcggcccaacgttgccaggccaacacgcccgaacggatgaccgcgctacagcgctgggccacgcaaacggtggcgcgcatcggtcacaacaaggcggcggtggccttggccaacaaactggtgcggatctgctgggcggtgtggtgccatgagcggcgcttcagcggcaactggcaaagcatcgcgcccgcgtagcgggcagggtaagcagaaagtagtttttacgtggttgtggtgagaccaagagcactgtcggaacaggcgagtcctgcgacggagcaaggccgataacaagtttgatcctagtgatcgattgaacgcttggcccccgttgcgcgaactacagagtggccagggcggcaacgcccagcacaggccggatatacgaatgcaaccgcactgacgacagagcagaaaaagcgttactcaccgcttgcggggagagtccatat

SEQ ID NO: 2659 - DNA, 1418 bp, unidentified
  source 1..1418: mol_type = unassigned DNA; note = element_3c68266
  misc_feature 1: note = core
  misc_feature 2..226: note = LE
  misc_feature 227..1405: note = CDS
  misc_feature 1406..1418: note = RE
  misc_feature 16..238: note = bridgeRNA
ctactaagagacttccggtcaggatcggtgtctggccagactcggtctaggtgcccggcgggacggctctctttgcggctgcccaccagagggtgtggctctcttctggtctgctgcccgccgggtcaccgttgacgaggcgtggctcaagaagggactgcccagctcgtagtagcactgcccacctcgccgtttcagttcaatcgaatcgaagcgaggaaacgtgatggatgcagtgaacattggggtcgatccccacaaactctcggccacgatcgaggtcgtcgaccaccacggtcaccgacttggcggcggccgatatgccaccgacaccgacgggtaccggctgatgcggaagtacgtggcgcagtggcctgatcgggtgtgggcggttgagggtgccaacggtgccggccgaccgctggcccaacggttgctcgccgctggcgagtccgtggtcgatgttccggccaagctcgccgcccgggtgaggttgttcgataccggccacaaccggaagaccgacgcgaccgatgcgcattcgatcgccgcggtcgcagtccacaccaaaggtctacgtgtgctggcggtcgatgagggactggaggtgatccggatgctcgccgatcgtcgtgatgagctttcgcatctgcgggttcagaccgtgaaccggatccaacgcctgctcagtgaattgctgcctggccagcgcaaacgtgacctgtcagccgatcaagccaaggccctgctcgcgacagtgaagccccgggatctggctgggaggatgcgtcgccggatcaccgctgaggagatcgccgaccttgtcgtcctggaccggaagttgaagaagatcaacaccgagctgaaagttgcagtcctcgaacgcggatcgcacctgatggacattcacggcatcggcccagcgggcgcagccaggatcttggccgatgtcggcgatgttgtccggttcgctgaccggaacaggttcgcctcctggaccggcaccgcaccgttggatgcctcatctggtgagcagatccgacaccggttatcgcgggccgggaaccggcggatgaaccacgtcatccacatcgccgcgatcgtccagatccggcgtgacaccgaaggccgggcctactaccgacgcaaactcgcggccgggaagaccccgatggaagcactgcggtgtttgaagcgacgcatctcggatgtgatctatcgccaactcgtggccgacgcacgtgaagcgggtccgggagggcactgcggggcgtctgacatatccagcgcggtcgacctgcccccgcacatcgacacttcggatcagccacttcccggacccgtgcccaccacgctacgccccgctggcgccgtcgaacagaggcaccatccagccgcctcttgacacagaagggagc

SEQ ID NO: 2660 - DNA, 1617 bp, unidentified
  source 1..1617: mol_type = unassigned DNA; note = element_3c6bd47
  misc_feature 1..2: note = core
  misc_feature 3..248: note = LE
  misc_feature 249..1484: note = CDS
  misc_feature 1485..1617: note = RE
  misc_feature 7..224: note = bridgeRNA
ttcgtattataaggtcagccagatatttctggttgaccattttttatatcgatatatgattgcggtagccggggtagaacggaagcccccgtgggacttgatcccgtccactaaactgttcgccccctacttgtagaaatatgattgaggctggttgagacaatgatctcgtataacaagcgaagctataacactgcaaggaggatttaggggttaccggcaaatgaactagaggaggagatttcagaatgaatccagtcgttggtctggatgtatcaaaaggtgaaagccaggtccaagcatttttagaaaaaggaaagccgcatcgtaaaagtttcagtgtttctcacactatcgaagggctcaattgcctcattgactatctggaggagattcgagacctaacaggcaagaaacctcctgttgtgatggaatccaccggacactttcacctaccagttgttcactatttagaggaacgtgattatctgcttattatcgtgaaccctctcgtgtcttataaagcgagaagctcgagtctgcgaaaggtcaaaacagatgccattgatgcctatcacctttgtgagttgtactataaagaagaattagagccttataaaaagcgaggcatacagctcttaaacctgaggaaccttacacgacaacacgaaaatataactgacttacaagtacaggctaagctgcaattccaagctcttttagatcaattattccctgagtataaaggggttttcggcagtctatactccgttgtctctcttctcacattacgaagattctcctcttcggaagagatcttaaatacagatgatgaagatctggcaagtagtatagctgaattctgtaaaagtcggtctgaaaagtgggcgaaagaaaaagctgcacaacttaaagaagctgcaacccggaatccgtttcagaaaaccttatatcacagtcacattctaagcctgcatatgtacattgatatgcttcttcaatacaaagagcatctatcaaagttggcaactgaaatagacgctctagcaaaagaagttgaagaatatgaaatcattcaatcgatccctggaatcggagaaaaaatcgcggcaacgattatctctgaaatcggggaaattgaacgatttagtcacccaaaaaaacttgtggctttcgctggagttgatcctagtgtctttgaatctggtaaattcagagccactatgaatcgcattaccaaaagaggatccagcagacttcgtcaggctttatttatggctgttaaatgtgccattcgcgattgtcggaagcagaaaacgagtgatgaaattatccctcgtaacaaacggttacgagcgttctatgacaaaaagcgagaagaaggcaaaccatataaagtggccgtaattgcctgtgtaaacaagcttcttagatggatatttgcgttgttaacaaataaagtagatttccaagatatagagtaaaatccacacaaaaccaaaacatacaaaaccttccataaagtgtagattggaaggttatttggcgtccatatcattagtttaacatatttaatttaacgtttttattgataattcttgacaaactattagctgg

SEQ ID NO: 2661 - DNA, 1589 bp, unidentified
  source 1..1589: mol_type = unassigned DNA; note = element_3c6eb7e
  misc_feature 1..2: note = core
  misc_feature 3..330: note = LE
  misc_feature 331..1470: note = CDS
  misc_feature 1471..1589: note = RE
  misc_feature 10..254: note = bridgeRNA
gtatactatatttaggttaataaaggcaacctataatcctttattagctgaaagattatacaaaaaagagtataatcaaaatattagatagagtgatgtcgtagtctccttgaggtaagacctcgtacttgaaagactgacacctctgtctgataaacagattacgaataagttggatgttgactaataagtttagtacttcgaatatgcaacaaggcggtaacgtttatcagattagaggaactatctaaaataaatttatagtggtgatggaaatgttttatttaggtattgatattggaaaaaacaatcatgtagcttcgctaataaatgaaaaaaaggaaaaaaattatttttaaggctttttccttttcaaatactacaaatggtggtgaaagcttaattactaagttaaacaatttcattagatctgttaatgatgttgaaataggtatggaagctactggtcactattggttatccatttactcatttcttgtggaaaaaggttttgtcattcatgttgtaaaccctatccaaactgatggttggcgtaaaggtattgaaatcagaaagcgtaaaacagatatcattgattctgttttaattgcagatcttattcgttatggtgattttctggaaacttccttagccgatgaaaataccatatcacttcgcaacctttctcgctttagaaactatctcatcagttctataggtgaccttaaacgtaaaaccatttgtgtcttagaccaagtttttcctgaatatcaatctatcttttctgatatttttggacaaacatcaaaggaaattttgcttcatttcagctctccaagtgatttcgaaaatatttcatctgaaaagttagacaaagttttatctgaaatcactatgaaaaaatttgctactaataaaatcaaacaactttctcgtgtagctaaaaattcttttggtataagcttttgtttagatagctttgctcttcaattaaaactattaattgagcagattaactttattgaaagtcaggtcaaagatatagaaaagcaaataaacactttacttgataaaatcaattctcctattactacaatacctggtattggcaacgtaacagctgcaactatacttggcgaaataggtgatatctcaagattttcaaacccttcaaagcttgttgcttatgctggaattgatgcttctgtttcacaatctggtgaatatcaaagtacaaataacaaaatgagtaaacgtggatcgccctatcttagaaaggctctctttagtgctgctttagttacctctaactgtgaccctgtttttaaagctttttaccagaagaaacgttcagaaggaaaacatcacctaacggctattggagctgtcgctcgtaaactttgctacacaattcatgctattttaaaaaataattgtccttatgaggtgagactacctaataacgagtaattgatattatttcccatatttttacttatacttgcctcacgcaggtctttttgtcatgcatttttattcaccaatttaattaaaattttttcttttttactattgactttttatagttg

SEQ ID NO: 2662 - DNA, 1214 bp, unidentified
  source 1..1214: mol_type = unassigned DNA; note = element_3c70c80
  misc_feature 1: note = core
  misc_feature 2..212: note = LE
  misc_feature 213..1184: note = CDS
  misc_feature 1185..1214: note = RE
  misc_feature 35..201: note = bridgeRNA
tcttaacttagctattcattaaattagatatataaacataaagaaccaaagagaagaataaggttatgatatacgcagagactttgatctcgtcaacattgataatcccttctcttttctaagttaaattcgttcagttctatgaagcttcagacttcgattttaagttgtagaattcacattagataggctctttacaatccttttttcttatgactaaagatataaaatattttggtatagacattagtaaagatgtctttgatgtatgggataataatgctaaatattatcaatttaaaaacagtgtttctggctttaaaaagttagttaaattgttagatttaaatagcgtttgtgtaatggaagctacaggttattatcattcccgattagcgtactttttattggagtctggatttggagtaagtgttgtaaatccattaaagattaaacgctatatccaaatggatttatcaaaaataaagaccgataagagtgacgcaaaaatgattcagctttacggaaaagaccgtgaaccaaagttgtggacaggacaatcaaaaacacaacaagaaagcttacagttgtctcgaacgttaagtatttacagtaaacaaagcacacagcttaaaaataaaatacacggcgaagatgttttagggaatccatctaaaattgttgtaagctcattaaaaaggagtttaaagtatctaaaaaaagagatggatactttggaaaaagcattagataaaaatgtaaaaaaagaataccaagagtcgctgactttattaaaaagtattccaggaataggcgataaaacggctttaatgttattggtttttacagatggttttcagcgttttgaaagctcaaaggagttatgtagttatgctggaataactccaataataagacagagtggaagtagtgtaaaaggacgaccacgaataagtaaaatggggaatccaaaactaagaaatttactgtttatgtgcagttttaatgcttgtaaatataaccgtgcttgtaaagcactttttgatagaatagtagcgaaaggtaaaagtaaaaaactcgctttaatagctgtgtgtaataagctattaaaacaagctttttctattgtaaaaaatggagtgccttataatgatgagtatagaagtactttggttaaaaattagtgaaaaccacttgttttttacctcagttct

SEQ ID NO: 2663 - DNA, 1502 bp, unidentified
  source 1..1502: mol_type = unassigned DNA; note = element_3c7118f
  misc_feature 1..4: note = core
  misc_feature 5..268: note = LE
  misc_feature 269..1477: note = CDS
  misc_feature 1478..1502: note = RE
ctcactggactaccctccgacgaaagtcggacggtctggaaccatcgagagacgagagtggggcgaggcgatcagcgttcggggagagccacggtcgctcgccgcgcgacggccaccatgagacccgctcccccgaacaaaacgaagagaggcccagaccggccacaggatgacgcgccacgtgcctcggcaggccagagcgccaatcagtgagcgaccggcagaacctctccccgtgcagtgtctcgccgtccccggaggcgatgcaatgagattctctgtcgggatcgactgggcgagtgcggcccatgccgtctgcatcctcgatcagaccggccgcgtccattggcagggcgcggtgccgcacaccgccgatggcctcgcggaccttctcgcccgcctgcgccgcttccgccggcgtggttccctccgcgttgccctcgaacgcccctcggggctgctcgtcgacacgctgctcgacgccggcctcgaggtcgtgcccatccaccccaacgccctcaaggccagtcgtccgcgttactccgcggcgggcgccaagagtgacccgggagatgccttcatcctcgccgacctgcttcgcacggacggccatcgcttccggcctttgcacccgccgtccgatgacacccgcgcgctgcgcgccctcgtgcgcggccgcgacgatctcgtcgcccagcgcatcgccctcgccaatcagctccgcgcgctcctcgagcgcttctggcccggcgccgccgccatctttgccgacgtcgactcgccgatcgcgctggccttcctcgcgcgctatcccacccccgacagcgccgcccgcctgggcgaacagcgtctcgcccagttcctcggccaacacgcgtactgtgggcgccgccccgtggccgagctgctcgcccgccttcgccgggcgccgacgagccaggtcggcgcggcggaagccgacgccagcggcgacgtggtgcgcgccctcatcgctgtcctcagcccgctcgtggcgcacctccagcaactctccgccgccattgccgccgcgctggctcagcatcccgatggcccgctcgtgcagagcctgccccgcagcggcgctgtcaacgcggcgcagatcctggccgagctcggggatgatcgcgcgcgcttccccaccgacgaacagttcgcggccgaggccggcttggcgcccgtcacgcatgcctccggccagcaccgcgccgtcgtgtttcgctgggcgtgcaacaagcgcctgcgccgtgccgtcacgaccttcgccgataattcccgccacgcctcgcggtgggcggccctcgtgtatcagcgcgcgcgtgcgcgtgggtgtcgccatcagcacgcgatccggatcctcgctcgcgcgtgggcccgcattctctggcgctgctggcaggaccgcaccccataccacgtcggccgacatcgcgccgcgcaggcgctcgccgccgcctgagcgcgcgatggttgacacaggatgt

SEQ ID NO: 2664 - DNA, 1166 bp, unidentified
  source 1..1166: mol_type = unassigned DNA; note = element_3c72d27
  misc_feature 1..3: note = core
  misc_feature 4..179: note = LE
  misc_feature 180..1142: note = CDS
  misc_feature 1143..1166: note = RE
  misc_feature 11..153: note = bridgeRNA
cttgtatcttaagagcagagagatagaccgttaccccttggatgctcgacatggtggagaagctagggtcgactctctgattgaaaaggtcaaactcgaatcatcggtagggacagtagatcccgaatgacgcaaggtcgagtcgaagacctccgctcacattcaaaccggagtcatgaatgcaagtcgttgaacaatggattggaatcgatgtgtgtaagcaatggctagatgtgcatcttcgccctcagagcaagagctttcgagttgcgaatactgagaaaggcatcggtgagttgctgagtcagttgattgagcctgagcaggtgggacggattgttttagaatccacgggtaggtatgagcgccaagccgctttagtgctgtcgaaattggcgtatccggtcgtggtgattaatgcccgacaagcccgcaacttcgccaaagccgcacatcaacttgccaaaaccgaccgcgtgggcgcggcgatgttggcgtggttcggtgaagcgatgaaaccgccgctgcggtcgtttgcgagtgaagctcaatccgaacttcaggatttagtgacgcgacgacgacaactcgtggacatcctcacggctgaacaaaatcggttgtccggtctgcgaggaacagcccagtccgatgtggaagcgcatctcgattggctcagaaagcggattgtgcaactagacaagcagattgagtcccaaattgctcagtgtcagtcgtggcaaactaagcccactcgactcaggggcgttccaggggtcggtaaggtcgttgccgcaacgctgttggccctcttaccggaactcggtcagctctcgacccagaagatcagtgtggctccgctcaatcgggatagtggacaaatgcaaggtaaacgcacaatctttggcggtcgagccgccgtgcgacaaatgctgtacatggcaacgctggtggcagtgagacataatcccgtccctcaggcgttctacgaccagttgctccagcggggtaagcccaccaaagtcgcgctcgttgcgtgtatgcacaagctgctcacgattttgaatgccatgatcaaaaacggcacagactggcggcttcctgctccggttgtcctggaggtggctcctgaatctgcatgatttgcttgatattcaagatcatcg

SEQ ID NO: 2665 - DNA, 1484 bp, unidentified
  source 1..1484: mol_type = unassigned DNA; note = element_3c7d404
  misc_feature 1..2: note = core
  misc_feature 3..321: note = LE
  misc_feature 322..1440: note = CDS
  misc_feature 1441..1484: note = RE
  misc_feature 5..218: note = bridgeRNA
cttgtatgatacagttaagagttttgacaatttaaaaagaagcttctattcttaattcaaaggatagaggtttcggcaaatcccttgagcataatggctcgtacatggagtttgcttcctctgtctttttgtttagatccgaataagttagttgagcattatggctcgtatcaaaaacaaggctggatcgcaaaaggattaggaggaataaaatctattctcaattaattcttaattccaaccaaaatgggaaactattacctcggcattgatgtgtgaaagtttgaacatcaagccacgctcgtcaatgagcaaaaagaaatggtcggtcagtcgataagatttagcaacaatcttaattcgtttagtgattttctcagtcaaattaaaaaaggaattcctgagaaatcaaacattcaagccggcatggaatctaccggacactactggctcaatcttaatgattttctaaaaaacagcgggattgaaaatattcaaatcatcaatccaattgaaacccaaaagatttccaaaaccagaatcagaaaagttaaaaatgataaagtcgatagctttgaaattgctaagattgtctgtgataagaaaaatatctctgttgctatgcaaaatgaaaaaataatcaaacttaaaaggcttactaggttttgtgataaaatgaaaaggcaggaaaaattcttgaaacgtgaaattgtaaatctcttagaggtagtttgtcctgaattcgagggattattcaagaatatttttcttaagactccacttttaatcttagaaaagtacagtgatttgagaaaactggagcatattaaaaaagactcatttatcgagcttttgagaaaaaattcacacggtagaattgaaaaaactaaagcagaattgattttacaaactatcaataattctgttggtaaaaattattgggatgagttttcggtgatgcagattgaaatgcttttggataatttccatttgattcaaaagcaagtaaaccaactaaaaaaagaaattgagaaattcagcgatcaatttaaggaaaaggtttatgtaaattctgttgtaggcgtatcttctttttctgccgctgtgtatttagcagagctgggagatattgaaagatttaaaagtaaacatcaattgactgcctttgccggcatcgatgcttctgtttttgagtcaggagaatacaaaagaaaacaaggcaacagaatatccaaaagaggttcgaagtatctgagaaagcaactatactacgccgctaagaccgccattatttttgatcctgagctgaagaaattctatgagaaaaagaaaaaagaaggtaaacattacaatgtaattatgattgctatagctagaaaaattttgatacgcatttacactgttttgaaacaaaaaagactttacgaagtcagatcataaagtcttgtttgttcaaaaatggacttgactgtatcatagttagt

SEQ ID NO: 2666 - DNA, 1422 bp, unidentified
  source 1..1422: mol_type = unassigned DNA; note = element_3c8a225
  misc_feature 1..4: note = core
  misc_feature 5..199: note = LE
  misc_feature 200..1408: note = CDS
  misc_feature 1409..1422: note = RE
  misc_feature 1..187: note = bridgeRNA
ttccctaagaatgtgaggcggtccgggaggaccgggtgtggctgatgaggtgttgcccttgatggctcgggaggaatggccgcccggttctccaggacgctccgaccactgattgagaactgcggtcatcgctggttagggacctgtcggcggggtgttcttcgggccacgaagtgctggtcacgaggcatacggagcgatggacttgagcacgtctcacaagcgggtatgggtcggcatcgacgccggcaaggggcatcactgggcggttgggatcgacgctgacggcgagaccctgttttcgacgaaggtgatcaacgacgaggcccagatcctcacgctcatcagcaccgcccgtgagcgggctgatgaggtgcggtgggcggtggacatctccggccgggcctccaccctgctggtcgcgctgctggtcgcgcatggccagcaggtggtctacgtccccggccggacggtcaaccgcatgaccggggcctaccgcggcgagggcaaaaccgatgccaaggacgcccgggtcattgccgatcaggcccgcatgcgccgggacttcgccccgctcggcacgacgcccgagctggtgtccaccctccagctgctgacaaatcaccgggccgacctgatcgccgaccgggtccggctgatcaaccggctccgcgacctgctcgtgggaatctgtcctgccctggagcgggccttcgactactccgcggccaagggcccggtcgtcatgctgaccgagtaccagaccccggccgtcctgcgccgcatcggcgtcaagcggctgacgacctggttggaacgccgcaaggtccgtggcgccgacaccgtcgcggccaaggccgtcgaggccgctcaggcccagcaggtcgcgctgcccggcgagaagcgggcggcgaagctggtctgcgacctcgcccaccagctcctggccctggacgagcggatcaaggacaacgaccgggagatccgcgaggcgtttcgctccgacgaccgcgcggagatcatcgagtccatgcccggcatggggcccgtcctcggcgccgagttcgtcgccatcgtcggcgacctgtccggctatcgcgacgcgggccgactggcttcgcatgccggcctggccccggtcgcccgtgattccggccgccgcaccggcaactatcaccggcccaagcgatacaaccggcgcctgcggcacattttctacatggccgcacagaccgcgatgatgcggcccggtccctcgcgggactactacctgaagaagcgggccgagggccttctgcacacccaggcgctgctgtcgctggccagacgccgggtcgacgtgctgtgggcaatgttgcgtgacggaaggctgttcacctccgccccgccggtcacgcaggcggcttgacacggtcattgaga

SEQ ID NO: 2667 - DNA, 1365 bp, unidentified
  source 1..1365: mol_type = unassigned DNA; note = element_3c9e871
  misc_feature 1..2: note = core
  misc_feature 3..310: note = LE
  misc_feature 311..1105: note = CDS
  misc_feature 1106..1365: note = RE
  misc_feature 1078..1353: note = bridgeRNA
tgatggggtggacgcccccgacggcatcattgtgccagaatgggtgtttacaaccatccacaggaggcgtccgtgtccgaggttaccacgatcggcctggatatcgcgaagaccgtgttccacgcccatggcgccgacgagcgcggccggggtgtgttctcaaagcgcctgacgcgggccaagctgttgacctttttcgccgcgcagccacgctgcactgtggcgttggaggcgtgcggggggagcccatcactgggctcgcgagctgacagcgctgggccatgaggttcggctgatcccgccagcctacgtgaagccgttcgtgaagcgtcacaagaacgacgcggtggatgccgaggcgatctgcgaggcagcccagcgtccgaccatgcgctttgtggctgtgaagagtgaggagcagcaggcgtcggcgctcgtgttccggaccagggacctcctcgttcgccagcgcacccagctcatcaatgccattcgcgggcatctgacagaatatggttgggttgcgcccaaaggcgtgtcctacgtctcgatgctcggcgacatgcttgaggaggagatggccgcctcgctgccgccggcggcagtcgcgatgttcaaggtgatgctggacctcatggccgatctcgacgagcggatcgcttatcttgaccgtgaggtcgagcgccgcgcccgcgaggacgagacggcgcgcaggctgacgaccattcccgggatcggaccgatcaccgccacggctctgacggcccttgcgccggccgccgagacattcgccaagggccgggattttgccgcctggctgggactgaccccattgcaacattcgacgggcggcaagcagaagctcggcgcgacctcgaagatgggcgagcgaacgctacggcgccttctgatcatcggagcaagcgccgtgatgaagcaagtcgcccgacgcggaccggtgaagggatcgtggctcgaacagatgctggcgcgcaagccgcgcatgctggtgacggtggcgctcgccaataagatggcgaggatcgtctgggcccttctggcgaagggcggaacttaccgagctccgatggcgattgcggcttaaggccgaggtcgtcgtcagaggccgtcgggacgcgaggtcggtcgaaggaggggtatggcgcaacagtcggcgagacggggctggaagaaccagggaatggcagagcgtgcccgagcgcgaaaagctgttttggatccagtccgcgaactatcatacgggcccgcagcctgatggctgcatcaggaggccggacagatggcagcatccgacatcgtgccaacccgacaaaaaccacttgcatcccagggggcgtccacaga

SEQ ID NO: 2668 - DNA, 1351 bp, unidentified
  source 1..1351: mol_type = unassigned DNA; note = element_3ca74c8
  misc_feature 1..2: note = core
  misc_feature 3..79: note = LE
  misc_feature 80..1114: note = CDS
  misc_feature 1115..1351: note = RE
  misc_feature 1143..1346: note = bridgeRNA
tgatgtgatggacgcacctcccttctaacattgttgtaccacactagaggtacagccattaaaagtaggagcaacaaccatgtctatcaaagttgtcggtatcgatttagctaagaactactttcaagtatgcgtattgaacattgacggtactatctcgtcaaaccgtaaggttcatcgagacagattgctccatacaatccgtcaacttccaggtaataccccactggctatggagtcatgtgcatcatcacattattgggggcgagtctttttagggcttggttttaaggtatcacttataccagcacaacatgttaagccattcgtcggtcggcaaaagaacgatgctaatgatgcaagagctatctgtgaagcttattcgcgacctgatattcattttgtacctgttaaatctatcgaacaacaagatctgaaagctttgcgcagtgttcgctctcgtttagtagagcaaagaacaggtcttgctaaccaaatcagaggactaacggctgaatatgggatagttttcccaacctcaataagagcattgcgtaaccacttaccgctcatcattgaagatgcagagaatgagttatcccatgtaatgcgaaacttactgcaaaccttatactgtgattttattaacattagcggcaagattgatgatgtaactcaggacataattacactgagtcaacaaagtccacgttacaaggcgatcaagaatatccctggctgtggcccaattttaactgctgcaattgttagtgaagttggctcaggtcaacaatttcagaatggtagacagttttctgcatggtgtggactagttcccaaacagaatagtacaggtggaaagaatagccttggagccttatcaaagagtgggaatcgagatctaaggacattacttattcatggtgctagggctgtactacgttgtagaacttcaagcatggatcctatgggagcttggttacgaggcttaattgagcgacgtggtaaggctaaagctatcgttgctttagcaaataagcttgggcgtatagtctggcgtgttttgactactgattgtgagtacgacgttaatcgtgctttcaagcctgcgtaattgaaaaggaaattattcaataagcaactgagtttgcaatagctgatgaaaaacggtgaaccatccttactacactctgattacgcaacaggtttattgaaaccgtggctttgaatagacagtaaggagcggaatacatcatggcgcaggtcgcacagatgacctagatagacgtcggatatatgttagcgaccgtacccttcaattagccattgcatactgaggtgcgtccatata

SEQ ID NO: 2669 - DNA, 1346 bp, unidentified
  source 1..1346: mol_type = unassigned DNA; note = element_3caa3e9
  misc_feature 1: note = core
  misc_feature 2..70: note = LE
  misc_feature 71..1096: note = CDS
  misc_feature 1097..1346: note = RE
  misc_feature 1112..1343: note = bridgeRNA
taatgacatggtccgccccgcctcacgcggcaggttacgctaggagcgctcactcgtaacggagaccatcatggaccacgcgacgctcgttgggattgatcttggcaagcatagctttcaccttcacggtcaggaccgcaacggcaaggcagtgtttcgcaagaagctggggcgtaaacaactgatcgaattcttcgcaatgtacgaggtctgcaccgtcgtcatggaagcgtgtgccggctctcatcacatggcgcgcaagctggccaatttcggccacgaggtgaagctgatttcacctcagttcgtacggccattcgtgaaatcgaacaagaacgactttgtcgacgcagaagcgatctgcgaagccgcagcgcgtccagcaatgcgttttctgacgcccaagaccgagtcgcaacagacactttcagttctgcaccgcgtgcgtgaatcgatggtccgggaccgcacgagaacgaccaaccagatggatgccttcctgcttgagtcaggcgtgaggctgccggtcggcaagaccgccgttgcgcgacggccggaatttctcgatgcgcaagcattgccgccccggctcatagcgattctcgaacgcctccatgaacacctcaagtaccttgaaaagcagatcggtgagattgaacgggagcgggcgcaccaactcgccgatgacgacgttgggcaacggctcatgagcattcctgggatcggtccgattaccgcgcgcgtgcttgccgcagaaatgggcgatggcaggcagtacggttgcagtcgcgactttgccgcgtcagttggacttgttccgcgccaatacagcaccggcggcaggtccaacctcctcgggatcagccgtcgaggtgacaagcacgtcagatgtcttctggtcctatgcgcccgagcctatctgcgcgggctcgagaaacgaactggccggctcgctgaatgggctcgcgcaatgatgacgcgtcgccactcaaatgttgtggcttgtgcgctggccaacaagcttgcacggaccgcatgggccatcgtcgcacgccatagcacattcgattctgaattcgccaggccctcagcctgaaagcgcacaggcctagcgttacctcctctgcttttgcgacgactgaaacatgatgacgtgaaccgcccaccggcctgtggaataccctggcaactaaagaggcttgccgaagccgcacaactttataggagccacaggcgcgaacttcatcgaggcgcggggagcattccccacaacgacgccggatagatttaggcaagccaacacgacatcgagcatcaggggttgcaaaactggggcggaccataga

SEQ ID NO: 2670 - DNA, 1362 bp, unidentified
  source 1..1362: mol_type = unassigned DNA; note = element_3caba02
  misc_feature 1..2: note = core
  misc_feature 3..77: note = LE
  misc_feature 78..1109: note = CDS
  misc_feature 1110..1362: note = RE
  misc_feature 1082..1350: note = bridgeRNA
tgatggggtggacgcccccgtcggcatctcgatgtgccaaagtggaggtgttgaacacaccacttgaggaggcgcccatgtcggaagttaccacaatcggtttggatattgcgaagaatgtattccacgcccatggcccagatgcgggcggccgagctctgttcagccgtaagatcagccgcaccagggtgctggagttcttcgctaaacagccaatttgcctggtagcgctggaggcttgcggcggtgcgcatcattgggcccgcgaactgacattgttgggtcacgaggtcaagctgatcccgccggcctatgtgaagccgttcgtgaagcggcataagaacgatgcagtcggttccgaggccatctgcgaggcagtgcagcgcccaaatatgcggtttgtggcgatcaagagcgaggagcagcaggcctcggctctggtgttccgaaccagagacctgctggtgcggcagcggacccagttgatcaatgccatccgcggtcacctgaccgagtatggctgggtggcacccaaaggtccctcgcatgtcgccatgctaagcgacctgcttgatgcggagatggggtcatcgcttccagaggctgccaggccgatgttccgaacgatgctcgatttgcttacagtgctgaacagcaagatcagcgagttggacaaggagattgcgcggcgggcccgtgaggatgtgatcgcaaggcggcttatgaccatacctggcgtcggtccgatcaccgccacggcaattgccgccctcgccccaccgcccgagaccttcaccaaaggacgggacgttgccgcctggttaggtctggcgccacgccagctctcgacaggaggcaagcaaaagctgggatcaattacgaagatgggcgagcgaacgctgaggcgtctcatcatcattggctgtagcgcagtcgtcctgcaggcgagcaagcgcggggcacctgttggctcttggcttgagcagatgatggcccggaagccacgcatgctggtgacggtcgctctcgccaacaagacggcgcgcatcatctgggcgctgctcatgaagcaagaggaatacaaagctccggtcgcagctgcggcgtaagccaaggcgggccagaggtcgtcggggacgtagtcggtccaaggaaggtatggcacaacagtcggtcagacggggtcggaaaaccagggcaatccacggtgccgtgagcacgctgtgggtgatatggatccggtccgcgaactcccatacgggcccgcagcctctggtgctgcatcagaggccggacagatggcagcatccgactacgtgcaatcttcaagaaaccgcttgcgtcttacggggcgtccacaga

SEQ ID NO: 2671 - DNA, 1578 bp, unidentified
  source 1..1578: mol_type = unassigned DNA; note = element_3caec02
  misc_feature 1..2: note = core
  misc_feature 3..281: note = LE
  misc_feature 282..1448: note = CDS
  misc_feature 1449..1578: note = RE
  misc_feature 14..257: note = bridgeRNA
tcatatagtcacttgtatgatgtttatagaagcgaaaacatctactttcctttcgttttaatatcgtggtttaatacattcagatactgtggacttttgattttttcctgtagccttgactactcaacaggagtgtattgccgctgcctttatctgaattgtttattagctggatgtaccggagcgtctgttccaatgagtacttatttcaatcaagtctacgatgataatcactggtggatatcacggtatcagactttttgaaagggaggtataacctcatgatttatgtaggcattgatattgccaaactcaaccattttgccgctgctgtttcttcggaaggcgagatactcatcgagccgtttcaattctcaaatgactatgatggcttctatctgctgctgtctaagctggcaccacttgaccagcacagcatcatcataggtcttgaatctacgacacactacggtgacaaccttgttcgtttcctaatctgcaaggattttaaagtgtgtgttctcaaccctatcatgacttcgtccatgcgtaaaaacaatgtacgcaagacgaagatcgataaagtcgacactttggtgattgctaaaacccttatgatgcaggactctctcaggttttctaccctgaaagatctggattacattgaactgaaggaactcggcaggttccgacagaagaccatgaaacagcgtacccgtttgaaaattcaactgacttcctatatggatcaggtctttccggaacttcagtattttttcaaatccggtctgcatcagaaagctgtctatgcactcttaaaagaggctcctatgccaaaagacattgcttacctgcacctgactcatctctccaatctccttgtcaaatcctcccatggacacttcacaaaagatatggccagagaattaagagttctcgcacagaggtctgtcggcttaaatgacagctctttatctatccagataactcagaccattgcacagatcgagttattggattcacagttattcgagacagagcttgaactggcgaatcttgtcacctgcctgcactctgtactcatgaccattcccggcattggaaccgtaaatggcgggatgatactgggtgagatcggtgatattcaccgtttctcaacactaggtaaactgcttgcattcgctggactggatccaactgtataccagtctggaaactttcaggctaaaagaacccatatgtccaagcgggggtcacgtgtacttcgttacgcccttatgaacgcagctcataatgttgtaaagaacaatgcgactttcaaggcttattacgacaccaagagagccgaaggccggacacactacaatgcccttggacattgcgccggaaaacttgtcagggtcatctggaagatgctcactgatgaagtagaattcaacctcgaatagaggcctgtatactaatatcgatagattttgaaaaagcacctttagggagtttctattaaagttacccttttttaccatcgatatagaaacggaattttttgctgatttatacttgacttttcatagctgg

SEQ ID NO: 2672 - DNA, 1503 bp, unidentified
  source 1..1503: mol_type = unassigned DNA; note = element_3cb9e22
  misc_feature 1: note = core
  misc_feature 2..226: note = LE
  misc_feature 227..1483: note = CDS
  misc_feature 1484..1503: note = RE
  misc_feature 12..238: note = bridgeRNA
ctaattgaaccccgagggcgctgcggtctgccgtagcgttcgggaggcccggtgggctggctcccgaaccgcctgccggtcacgctggtgacttggctttataacgaggtgccagcctgccgggccgtgccgcggtgtggctcgaaagaggcgcgagcgccagcactgtaattaggcatgcccgccgtggacccgtggtttggtgcgaatggccgggagggtgctgatggtggacgtgatgatcgggatcgatccgcacaagagctcgcataccgcggtggcgatcggcgcaggtgaggagccgctgggtgagctgcgggtagatgcttgcctgtcccaggcggaacagttgctggcgtgggcggcggggtggccgcagcgggcctgggcagtggagggcgccgccgggctggggcatctgctcgcgcagcagctggtcgccgccggggagcaggtgctggacgtgccgcccaagctggccgcccgggtgcggctgttgcaggccggagacaccaataagaacgacccgaacgacgccttctcggtggcggtcgcggcgctgcggtccccggcccggcgcccggtgctcgccgaggaccacgccgtggtcctcaagatctgggccaagcggcatcgtgacctggcccggatccgcaaccaggccgcctgccgactgcatgcggtgctgtgcggcctggtgcccggcggggtccgcaaggagatcagcgccggccaggccgcccgcatcctcgagcaggtccggccctcggatgcggtcatcaaggcccgctacgagctggccggcgagttcctgtccgacctccgccacctggatgcccagctccgcgacaccaacaagaagctggccgccgccgtccgggcctcgggcaccagcctgaccggcctgttcggcgtcggcccggtcatcgctgggaccgtgatcggcgacgtgcgccaggtgttccggttcggaagccgggaccacttcgccgcctacaacggcaccgccccagccgaggtgtcctccggcggccggaaggtcttccgtctgtcgctgcgcggcaaccgcaggctcaaccacgcgatccacatggccgcggtcacccagatccggcataagcacagcgagggccgggcctactacgacaagaaactggcagaaggcaagacgcacaaggaggcgctgcgggcgctcaagcggcggatcagcgatgcgatctatgcggcgctggtggccgacgcccggcacgccgcggccgcctgcccggagggcccgggagggcaaccggggaaccgctctgtctccagggcggccggctcacaccccgcacgccggctcttcgggcaagccactcccgggcccgccaccacgatacggcccggcaccacggcaggtcccgccccgatccagccgaaccgggcgcatcagcgccgggccaggcattccccgcccgcaccgaagaaaccccggacaaccacttgacagcgacagcaaagaggact

SEQ ID NO: 2673 - DNA, 1354 bp, unidentified
  source 1..1354: mol_type = unassigned DNA; note = element_3cc1e88
  misc_feature 1..2: note = core
  misc_feature 3..77: note = LE
  misc_feature 78..1094: note = CDS
  misc_feature 1095..1354: note = RE
  misc_feature 1074..1341: note = bridgeRNA
cgatggggtggacacctcctaacggcatcgcaatgtgccaatgtagcggtgtcaaaccatgctacgaggagatgtccatgaacgatactatcattattggagttgatctggcgaagaatgtatttgtgctgcatggcatgcggaccgatggatccatagcgttccgccgaaagctgtcgcgggcaaaattcctgtcattcttctccgcccatccaccatgtgtcgtggctatggaagcttgcgccagtgctcattattggggacgagagatcggcaaacttggctttgaagtacgtctgatcgctcctcagtatgtgaagccctttgtgaagcggcaaaagaatgatgctgctgacgcggaggcgatcgccgaggcagcgtcccgcccgaccatgcgctttgtcgcagtcaaaagcgcggaaaagcagagccaggcgatggctttcaaaacacgtgacctgctgatggctcaaagaactcagacgatcaatgcactgcgcggtcaccttgcggaatacggtgtggttgcaccgaaagggccacagaacattggccatctgatcagagcacttgaagatccggatgccgccctgccaattgctgtaattgaccttggcaaagagcttatcaatcatcttgaagtgctggatgaacgcattgccgcgttggatgagcgtgtcaaggaaagtgcgagaacggatgagactgcccgacggcttatgacgatccctggcattggtccgattaccgctgctgcgatggtggcggttgctccagagccctcaaccttcatcaaaggacgtgattttgccgcttggcttgggctcaccccaaagcagaattcgactggcggcaaaacgcggctgggcaagacgtcgaaaatgggacaacgagatctacgacgtctcttgatcattggcgccatggctgtcgtgcggcacgcggctcagcgtactaccaacacctggctcgggcacatgcttgtgcgaaagccgaagatgctggtcgcggtcgcgctggcaaacaagatcgctcgcgtcgcttgggccttgatggcccgcggtggagtataccaatctccagccgccgcctgagaacgttcggctggagcgttgggatgcggtggttctaagcggaggtttatgggcgaaagtcgagaatgacgggatcggaaaaaccagttaaatcgcgggtgcctcgagcacgcctgtccgatttggatcagatccccgaacatccataagggcccgcggcgttgaacgccgcatcagaggccggacacacgacggaactcgaccgcatgctcattgccgaagcgaaagaatttgcttgcattcccggaggtgtccacaca

SEQ ID NO: 2674 - DNA, 1497 bp, unidentified
  source 1..1497: mol_type = unassigned DNA; note = element_3ccac5b
  misc_feature 1..2: note = core
  misc_feature 3..255: note = LE
  misc_feature 256..1476: note = CDS
  misc_feature 1477..1497: note = RE
ctaatgggggctcactcgggtcggctctggggcagactcggggtctgctggtcgccggtgggtgagcactcaagcgccctggacgcgggaggagtccttcgtcaagaccgtgcccttgccggcggttggggaggttgaccgctgatggggtgacgtgcccgacccgctgggacgtgagcactggtccattaggccgcgggtgatcctccctgcaggctggtgcgctggacgtccgggcgagacgggaggtcggggttgctgttcgtgggagacgactgggcggaagaccaccacgacatcgagctgcaagatccggccggccggcggcttggtcgggcgcggctgcccgagggggtggtgggcatcgccaggctgcacgagctggtcgtcgcgcagctgggcgccgatgacgggcccgagcaggtggtggtcggcatcgagaccgaccggggaccgtggatgcaggcgttggtggcggcgggctaccaggtgtttccggtcaaccctcggcaggtggcgcgctaccgggagcgccacggcacctcgggggcgaaaagcgatgccggggacgcgcacacgctggccgacatggtccgcaccgaccgccaccagctgcgcgcggcggccggtgacagcgccctggccgaggcgatcaagctgctggcccgggcgcaccagaggctgatctgggaccggcaccggcacctgctgcggctgcgggcggcgctggtggagttcttcccggccgccttgacggcgttccccgacctggccgccgccgacgccttggagctgcttcaggccgcaccggacccgaccagcgcggcccggctttcccgcccccggatcgcggccgcgctcacccgcgccagccgtcgtggcgtgccggccaaggccacccaggtccagcaggcgttgcgggccgagcagctgccccaaccggagagggtggtcgcggcctacgccgccaccgtgggtgccgcggtggcggtgatcggcaccctgaatgcccagatccaggcgctggccgggcaggtcgacgcacattttggggagcacccggacgctgagatctaccgcagccagccggggctgggcggcgtgctgggtgcccgagtgctcggggagttcggcgacgaccccggccgctatcgcgacgcgcgggctcgccgcaactatgccggcagctccccggtgaccaagcagtccggcaagaagaaggtcgtcgtggctcggttcgtgcgcaacgaccgcctcgccgaccccctccaccagcaggccttttgtgccctgacggcctccccaggggcccgcgcttactacgaccagctccgcgcccgcggcaccggccaccacgccgccctacgccagctgtccaaccggctggtcggcatcctccacggctgcctcaagacccgcacccgctacagcgaagcaaccgcgtggtcacaccgcgcctccaccgccgctgcttgacaccaaagcggcatgggatgt

SEQ ID NO: 2675 - DNA, 1569 bp, unidentified
  source 1..1569: mol_type = unassigned DNA; note = element_3ccda67
  misc_feature 1..2: note = core
  misc_feature 3..245: note = LE
  misc_feature 246..1415: note = CDS
  misc_feature 1416..1569: note = RE
  misc_feature 5..226: note = bridgeRNA
ctactattatattgtcatagtcattctttaccttttccataggttagactatgctattttaagatactgtggattggttcatttctcctaccacctgatggtttatacgaggctccaaccacagtctctttgttcatttgttaatcagttagttaccgcatgacggtttatcaagaagtaggttacaatcacaaggagccctgtggatcttaaaacagtatcaaaacattttaaggaggtcctatatgatttacataggaattgatgttgctaaaaacaaacatgattgtttcatcacaaactcggatggtgagattctttttaaaccattcaccattccaaacaacttagaaggctttgatgacctatatcacaaaattgaatcaactactaacgatccatctcaagtaaaagtaggactagaagccaccggacattacaattacaatcttcttggatatctcattgataaaggtctgaccacctatgttatcaatccgctacatacaaatctattcagaaaaagtcaaagccttagacagacgaaaacggataaagtagatgcccgcacgattgcttccatgctaatgtctgatgtgaacttaaagtcctactcagacacatcttatcacaacgaagaattaaagtcattaactcgttaccgttttgataaagttaaggaacgatctgctctaaaggtttctatttctagactcgtttgtattcttttcccggaattagaaaatctagttccaacactacatatggcttccgtatatgcattattatctgaatttcctagtgctacgcatattgcttcggctcatttaactcgtctcacaaacctcttgaaaacagcttcaaaaggccgctatgataaaaaaacagcaattctcttcagaaacactgcaaggagctcaatcggttcaaatatgcctgctaaggctttagagctaatgcataccatacgacttattcaggaacttaattcagaaatcgctgaaatcgagagtgtaattcagacgataatggacaagctcaatccacctatcctaagtattcctggaattagttatcgtatgggagctatgattcttgctgaaataggtgacttcgatagatttgagtcacctgataaaatcttagcatatgctggattatccccatcaacatatcaatccggacaacttaataattctcattctagaatggaaaaaagaggctccaggtatttgcgatatgccctatataatgcgacaaagtatgtctgtcactgggatcctttatttaatgcttatctttcaaaaaaaatatcagaaggtaagcattacaatgttgctatgtctcatgctacaaagaaacttgtgcgtgtcattttccatttacaaaagacgggtcaattatacgcatcgtaagctcttctttttctaattcatatcttctttttcagagcacctttattgatgctctatttgtcatgcaattttcaaggttctgattgcaatgaaaagtcattgccacttttttcaaaaatttcaacattatacttgacttcttttaatagttagt

SEQ ID NO: 2676 - DNA, 1542 bp, unidentified
  source 1..1542: mol_type = unassigned DNA; note = element_3cd8382
  misc_feature 1..2: note = core
  misc_feature 3..250: note = LE
  misc_feature 251..1414: note = CDS
  misc_feature 1415..1542: note = RE
  misc_feature 3..231: note = bridgeRNA
cttgtatgatgtatttgtaattaaatacatcaatacgctcctttctttttcaactttgttataatcaatagcaacactgtggactttttattttattctatagctctgactatttaaaggagtgtattgccacagttttatctaaattatttatagttggataagtctttgaactttcatgtcacgcaagtttatgatgataaaactaggtggacagacgcagtgattattttacaaaggagttgatcttatgatttacgttggcattgatattgccaagcaaacacactatgcatctattatgaattcagatggtgaaattcttgtggccccgttttcttttacaaatgaccattccggatttcaaaaattattgagccatcttgatccttttcctcaaaaggaaacccttattggtatggaatctactgcccattatgcagaaaatcttacgagctttctttttactagaggctttcaagtttgtattatcaatcctatacaaacctcttctttaagaaaatctaacattcgtaaaaccaaaacagactccatagatacatatcttattatcaaagcacttactttaaaccactatcgtttatttacggaacgtgactttgattctttgcaattaaaaaacctctgccgcttccgtcaaaaacttatgaaggcaaggacaaaggtcaaaattcaacttgtgacttatgtggatttgttattccctgaactccagtatttctttaaatccggcattcatggaaaagcttgttatgctctattaaaagagcaaccaaatcccgacagaattgctaaaatgcatctcacaaggcttaccaaccttttatctaagtcctcgcacggacactttaaacagtctaatgctgtacgtttaaaagagcttgcatcacaatctgtcggtattaagaattctacactatcactacagattttgcaatccatcgagcagattgaaatgtacacagaacaacttgctgaagtcgaagcttccataaacgaaatcatgaataaaatggattctgtcattaaaaccattcctgggattggttctcttaacggtgccatgattattggggagattggtgatattactcgttttgaaaaaccctgtcaacttcttgcgtatgctggcttagacccatccgtatatcaatctggaaactttacagcttcaagaactcgaatgtctaaacggggttcaaaattacttcgatacgcattaattaatgctgcgtggcaagccactttagtaaacaaaaccttcaaggattattatgatttaaaaatctctcaaggtcgccgccattacaatgctttaggacatgtagcccataaactggttcgaattattcataaaatgatgactgatagcgtagctttcaatttagcctagtcttacctattaactatatttaatttttagaaagcacctctttgatgctttattttcctatacacttttttatagttcaaaactatttcaagaattttagatttttctattgactattcatagttggt

SEQ ID NO: 2677 - DNA, 1236 bp, unidentified
  source 1..1236: mol_type = unassigned DNA; note = element_3cdb967
  misc_feature 1..3: note = core
  misc_feature 4..233: note = LE
  misc_feature 234..1214: note = CDS
  misc_feature 1215..1236: note = RE
  misc_feature 20..209: note = bridgeRNA
gctattagattagcattctatatttacaagaagtttaatcatattaaatttctgaaaaaccagaggagtaaggtgaactatttcgactcttaaactattagatttatgctgagcatcagtccttgctcctcttaggttttggtaccatttagaatgtcaagcttaaaggcttattaatagcgttagtacacaaacctattggttattcaggttttaatagctaattcaaagttatgaaaaatttaatttcaggcatcgacatttcaaaagacactttggactattgctccttgagtacagaaaaagttgaggtaattaccaggggcgtattggacaatgagaaaaaggccattgaaaagtggctcaaaagtcatgaccagaaaaatactgtatttgctttggaacatactggtcattacggtgcgaccttgatcaattgtctccataaaaacggttacgttttctatttgatcaaccctttagaacttaaaaagtcactgggtatcgataggggtaaaagtgatgcaaaagatgcttatcgcattgcagaatacgccattacaaacaaacacaagctagagccatatcagctgcctaaagaaaaccttggtaggctcaaagcacttattacagcgagagagcgctacgtaaagatgtctgtgcaggttcaaaacagcttgaaggccaatgagatcctaaaccaatccattgatgttaaagtgttgatcaaagaagaaaagaaacagtataaatccattcaaaaaagcattagaaacattgaaaatgaaatgcaaaaaatcattgaagccgaccaggaattaaaaagtagctacaagaagatgactgcggttattggcgtaggtccggtcattgccataaaatgtatagcagaaacagataattttctcaaattcgatgatcctagaaaattcagctgtcattgtggcctagcacctttcccataccagtccggcactagcataaaaggtagaacaaaaacgcattttttaagagacaaatccttaaaagccgtgttgaccaaaagagctatttctgcaattcaacatgatcctcaattaaaaacgtactataatcgaaagatcaaagaaggaaagcatcatatgagcgtaatcaatgcagttgccaataaactcgtgctaagaatatttgccgttgtaaaaagagatgaaccttttgtgaaattagctgcttaaatatttgtttatatcttagaat

SEQ ID NO: 2678 - DNA, 1570 bp, unidentified
  source 1..1570: mol_type = unassigned DNA; note = element_3cdf184
  misc_feature 1: note = core
  misc_feature 2..247: note = LE
  misc_feature 248..1423: note = CDS
  misc_feature 1424..1570: note = RE
  misc_feature 2..224: note = bridgeRNA
tcgtataatatagtcatagcttaggttgtttttaataaaaatttaagctatattgttttagatactgtggattagttttcaactcctaccactagatggttttttgaaagctctaaccacagtctctttgttaatttgttaatcagttagataccgtatgacggtttatgtagaacgaggctacaattgcaaggagtacccgtggttctaaaacagtatcaaatatttattcaagaggtgttttcaattgactattttagttggtattgacgttgctaaagacaagcacgactgcttcattatgaactccgaaggtgaagttcttgccaaaccttttactattctcaacaacaaagaaggtttcaattttctttacgaaaaaatccaatctgtctcttcttctgacaatataaaagtaggacttgaagctaccggtcattacagctataacatcattgggttcttgttgaacaaaggtctagccacctttattcttaacccactccacacaaatctttacagaaaaagtcttagccttagaaagacgaaaacggataagattgattctaaaaccattgctatgatgttattgtccgatgtaagcttaaaatcctactcggatatatcttaccataacgaagatttaaagtcactaacccgttacaggttttctaaagttgaagaacgcgctaagcttaaaacatctttttcccgcttagcacaaatccttttcccggaacttgaaaaactcgttccaactcttcatatgacctctatttaccaattgctggaagaatttcctagcgcatcagctatagcttctgtacatctgacaaggcttactaatctactctccaaagcttcaaaaggtcactatgaccgtgaaactgctattaagattagagatgctgccaaaaattctgtcggctctaatatgccagctaaatctcttgagctaaagcatactattaagcttatttgcgcactgactattgatattgatgaaatagaagcagagatttctaaaatgatggataagattgcttctcctatcactacaatacctggaatcggacgtaatatgggagctatgattatctcggaaattggcgatttcagccgcttttcttctccagataagattttagcttatgcaggcttttctccctctatctaccaatccggtaaacttgataactgctatgctcatatggaaaaacgtggttcacgctatttgcgttacgcattgtttcatgctgcgaaacttgtatgccattgggacaaaacttttgcagattacttagcgaaaaaacgtgctgaaggtaagcattactatgttgctatatctcatgccgtaaagaaattggttagggtgatcttccacattgagaaaacaaagcaggcttttctgaaagcttcttgactttacttaatttgatactgtctttgaaagcaccgtaaacgatgctttatttgtcatgcgttttttcaactaacctaataaaaattcaatgtatctatttggtttaagttttttatctttaccaccttgactttttatagttagtct

SEQ ID NO: 2679 - DNA, 1452 bp, unidentified
  source 1..1452: mol_type = unassigned DNA; note = element_3ce0556
  misc_feature 1..2: note = core
  misc_feature 3..237: note = LE
  misc_feature 238..1437: note = CDS
  misc_feature 1438..1452: note = RE
  misc_feature 19..201: note = bridgeRNA
tccttacctttcttcttgggtgctggaagctactggctgccataggctttccggcacccaggagcgtcgggtatggctttcatggctgagccgttgatggcccaaggggattggccgcccggcgctccgcgacgactcgaccgctgattgagatatgcgacccgatcgcttcgtaaggacacgacggcgcagtcgtctgcgggatacccgatcaacgcgtagagaacggaagtgcttgtgcaacaacagttgtgggcaggaatcgacgccgggaaagcggcgcgccactgcgtcgtgatcgacaccgacggcaagcggctgctgtcccgccggatcgcgaacgacgagcccgcgctgttggaactgatcaacgccgtcatcggcctgaccagcgacgccgaggtgacatgggccatcgacctcaaccacggtggtgccgcacttctgatcgccttgcttctcagccgggagcagcggctgctgtacattcccggccgcacagtgcactgggcagccggaacctaccgtggcgacgcgaaaacagacgccaaagacgccgccgtcatcgctgaccaggcccgcatgcgtcgcgacctgcagcccttgcgtgtcggtgacgaagccgcggtcgagctgcggatcctgatctcgcggcacaccgatctgggctgcgaccgcacccgcgcgatcaaccgattgcgcgcgcagctgctggactacttcccggctctcgagcgcgcgttcgatctcgcgcacaacaaggcggcgctgatcctgctcaccggcttccagacccccgaccagctccgcaagatcggcgcctcgcgtctggaaacatggctgcgtaaccgcaagacacgcaacagcgcccgcgtcgctgccaccgcactcgaagcagcccggtcgcagcacgtcaccatcgccgggcagcaactcggtgcggcgatggtcgcccgtatggcgcaagaggtcatccagctcgacatcgagatcaccgagatcgaagcgatgatcgagcagcgatttcgccgccaccgccacgctgaaaccatcctgagcatgcccggcttcggtgtcctgctcggcgcggaattcatcgctgcgaccggcggtgacatgaccgctttcgacagcgcgaaccgcctcgccggcgtcgccggcctggccccggtcccccgcgactccggcaaagtcagcggcaacctcaaacggccacgccgctacgaccgacgcctgctgcgagcgtgctacctcgccgcccagatcgccgccatcaacgacaccgcatcccggacctactaccagcgcaagcgatccgaaggaaaaacccacacccaagccgtcatcgcccttgcccgccgccgcatcaacgtcctgtgggcaatgctccgcacaagcacgccctaccagcccatcccaagggccgcagcggcttgacaaggtcattgagaa

SEQ ID NO: 2680 - DNA, 1460 bp, unidentified
  source 1..1460: mol_type = unassigned DNA; note = element_3ce5693
  misc_feature 1..4: note = core
  misc_feature 5..220: note = LE
  misc_feature 221..1444: note = CDS
  misc_feature 1445..1460: note = RE
  misc_feature 1..233: note = bridgeRNA
acccgttacctttttgatcgtccccagccggggactcctcggtcgctcggcccggtatgacttcctgcccctgtcgttcgaatgatccggggggtgttgtcgccgggtcgggtggcgtcggtggaccgctgatagggacacggccacccgtgttcggggtaggtctcttcgtaacgtggctgccggcagtccgacgcctggaccagcggccgaggccacgatgcgatgcgtggaggcgggtgcggtgaacgatagttacggcgtctacctcggcttggacgtcggcaagggtgatcaccacgcggtcgggttggcgcccgatggcaagcggctgcatgacgcggcgttgccgaataccgaggtccggctgcggcagttgttcgacaagctggctcgtcacggccgggtgctggtggtggttgaccagcccgcctcgatcggcgccctgccggtcgcggtggctcgggcgtgtgggcatcaggtggcctacctgcccgggctggcgatgcgccgcatcgctgacctgcacccgggcacggcgaagaccgacgctcgggacgcttacgtcatcgctgacgcggcccgcaccctgccccacacgctgcggcgcgtcgacgtcggcgacgaagccctcgcggagctggaggtgctggtcgggttcgatgacgatctcgcgggtgaagccacccgcgtgtccaaccggatccgtggcctgctcacgcagatccatcccgcgctggaacgggtcctcggcccgaagattcaccacaaggcggtcctggagttgctgtcgcgctgcggcggccccgtcgggctgcgcaaggccggccgccgcaagctggtctcgatcgccgccgtccatgcaccacgcatgggcgaacgcctggtcgagcagatcctgaccgccctcgacgagcagaccgtgaccgtcccgggcacccaggctgcggagacgatcctgcctcggctggctgacagcctccgcgatgtcctgcggcaacgtgaccaggtcgccggcgaggttgagaggatgcttgatgcgcaccctcttgccccggtcctgacctcgatgcccggcatcggtgtcaggaccgccgcccggatcctgctcgaagtcggcgacggcaccgcgttcgccacacccgggcacctcgccgcctacgccgggcttgccccggtcacccgacgatccggaagcagcatccgcggcgagcatccacctcgcggcggcaacaagaacctcaaacgcgcgttcttcctcgccgccttcgcgtccttggccgacccggtcagcagggcctactacgaccgcaaacgcgccgaaggcaaacgccacaacgccgccctcatctgcctcgcccgccgccgctgcgacgtcctatacgccatgctccgcgacaagatcccctaccaaccccgcccagccacaccgatcgccgcttgacgaacgccatagggac

SEQ ID NO: 2681 - DNA, 1414 bp, unidentified
  source 1..1414: mol_type = unassigned DNA; note = element_3cef7cf
  misc_feature 1: note = core
  misc_feature 2..91: note = LE
  misc_feature 92..1132: note = CDS
  misc_feature 1133..1414: note = RE
  misc_feature 1188..1409: note = bridgeRNA
caatgggatggactcctccctcctgatacggcatcaacgtgccagactggaagcgtcaacaaaccagtcaaaacgaaacgaggagtccaccatgaagattatgcgcatcggcatcgatttggccaaaaacgttttccaggttcaaggtgtggatgctcatgagcacccagtgtgtcgccggcagctgcgtcgtcatcagctcttggagttcttccagaaactcgacccctgtctgatcggcatggaagcctgtgccggtgcccatcattgggctcgccagttgcaagcaatgggacacacggtcaggttgattgccccgcaatttgtgaaggcttatgtgaagggcaacaagaacgatgccaacgacgctgaagcgatctgcgaagcagtcagcaggccgggaatgcgttttgtgccgatcaaaactatcgagcagcaggatctgcaggcgctgcaccgcattcggaccgaactgattcaccagcgcaccgccaaggtcaatcagattcgaggcttgctggcagagtatgggatcgtgatcgcggtgaccgtgaaacaattgcgcaaagcattgccgctcatcctggaagatgcggaaaacggcctctcggcgcgcttccgtcatctgctggacgggctgcgcgaagatctggtgtatctggacgaacagattgccatcgtagatcaggacatggtgcgccaagccactgacaatgcgttggccagaaagctgcaacaactacgcggtattggccccattacagccaccgcactggtggccgccattggaaacgccaaggacttcaaacgggggcgggatcttgctgcatggctggggctggtccccggtcagcacagcagtggcggcaaggaccggttgctggggatcagcaagcgagggaatacctatctgcgtacattggtcattcacggggcgcgagctgtagttcgcgccgctgcgacacaaacagaccgactcagttgctggattcaaagcctgtgcgctcgtcgcaacaataatattgccgcggtcgccctggccaacaagacagtacgcctagcctgggcgctgatgacgcgagaggcggattacgacccagattatgggctggccggagatacagcggcctgagcattcaggctggacagggcctcggcaacgagatgatcaacgcttaacccatcttcacgattgcacagcatgaagcagtgatggcgaacaggtcgaaccggcgtcggagtaacccaaaaagtgaccaagtgcaaacagcacgacaaagcaataaggatctggcgcgcggatagcccattatggcccgggcgattaagcccaactcagaggccggatatacgtaagcagtcgatccgaaccccagaactgtgaaatgtgtgcaaaccgggaggagtccatata

SEQ ID NO: 2682 - DNA, 1388 bp, unidentified
  source 1..1388: mol_type = unassigned DNA; note = element_3cfa6d6
  misc_feature 1: note = core
  misc_feature 2..89: note = LE
  misc_feature 90..929: note = CDS
  misc_feature 930..1388: note = RE
  misc_feature 1160..1383: note = bridgeRNA
caatgggatggacccctcctcacgcctaacggcatcgagtgccagactggagctgtatgtcaccagtcgcggaatgaggaggagtcgtcatgaagcttactcgcgtgggtgtggatttggccaagcaggtctttcaggtacacggcgtggatcgcgccgagcgagcggtgtggtgccagcggctgaagcgtaaccgctggatcggcgagctcgagcgtcatgtcgagccggggagtgaaatcggtatggaggcgtgcggcggtgcgcatcactgggcgcggctgctgcagtcgaaggggtacgtggtgaagctgattgcgccgcagttcgtgaagccgtacgtgaagagcaacaagaacgacgccaatgatgcgcaggcgatctgcgaggcgatgagccggccgagcatgcgctacgtggcggtcaagacggtcgagcagcaggacatccaggcggtgcatcggatccgggcgagcctgatcggggagcggaccgcgaaggcgaaccagctacgcgggctggtgtacgagtacggactggtggcaccccgggagatcgcgtcgctgcggcgtgccgtgccagcttggctggaggatgcgacgaacgggctgagtgctcgcttccgagcgctgctagcggggttgtaccgcgacctgcaggggctcgacgagcgcgtacacgagctcgaccggcagatcgcggtgatcgtgcgggagaacgaggccgtcaggcgcatcgagcagctgcgcggtatcggcccgctgaccgcctcagcgctggtcgcgatggtcggtgacggacggcagttcaagaatggccggcacctggcggtagcgctcggtctgacgccgcgccaacacggctccggtggtaaggagaagctgctcgggatcagcaagcgggcgacaaatacctccggacgctgctgatccacggggcacgcccggcgctgcgcacagcaccgggtaagaccgaccggctcagtcgctgggtgctcgcgctcgcgcagcgatcacacccgaatgtcgcagcgaccgcactggcgaacaagatggcacgcgtggcctgggcgatgctgcgacacggaacgaactacgaaccggagcgcatggcggcctgaacaccctgcgtcccgactgaacaagaggaggtcatccaccgcggttgcgagcatcccgagtgatggcgaacaggtcgaaccggcgtcggaatagcctgggaatgtccacgggcgcgaagcccgcgatagcaatgaggagccgacgcgcgaatagcccatcgtggcccgacctcggctgaccgaggtcataccgaggccggatatacgtgagcagtcgtacctcgtcgccagaaagcggagtgctagcaagtggggaggggtccatata

SEQ ID NO: 2683 - DNA, 1386 bp, unidentified
  source 1..1386: mol_type = unassigned DNA; note = element_3cfb0f5
  misc_feature 1..2: note = core
  misc_feature 3..88: note = LE
  misc_feature 89..1114: note = CDS
  misc_feature 1115..1386: note = RE
  misc_feature 1088..1373: note = bridgeRNA
agatggggtggttgccgccctccccagacggcatcgaaatgtgccaaggtcgtggtgctcaacgccacgcgaagaggaggacggcgagatgaatgatatgatgatcggtgtggatctggcaaagcgtgttttccagatccacggggcgcagatgaccggtaaggtgacgttccgtaagaagctgtcgcgcgagcagttccggacattcatggcggcacagcctacctgtctggtggtgtttgaggcctgtgggagcgcgagctactgggcgcaagagatgagggcattcgggcacgaggtgcggctgatcgcgccgcagtatgtccggccattcgtgaaacgacagaagaatgacgcggccgatgccgaagcgatcgttatcgcagcccgacagccagagatgcgcttcgttgagcccaagacagttgagcagcagtctcgtgcggcggttttccgtggtcgagaacgcttggtgcatcagcggactgccgatgtgaacgcgctgcgggcgctactgtatgagcacggccatgtgtttcccgccggtatacgccacctcgagcgcatgacaacgcttgtagaggatgagacctccgacttacccgcactgatccgggaggagtgccaggacctgatggcgcagattgcagagaaaacggagcgcatcaccgagcggaccacgaaactcaaggctctggccgcccagtcagacagggcacgcctactgcagaccatgccaggtgttggccctctgacagccctcgctgtggaagcattcggacctgacatggcccagttcaagaccgggcgtgactttgcggcctggttgggcctggtgcccaggcagcattcttcaggaggaaaggagcgcctcggccgcattaccaaggctggccaggccgatatccgacgcctcctgatcattggggcaatgtcgcggttgggctggcttgggcaacgcacgattgcggagggaagctggctggcgcgcatgttggcgcgcaaacccaggatgctggtcgcaatcgcgctggccaataagatggcccggcagatctgggccatgctgacgaagaacgaagattacaaggatccggcgctggcagcggcatgagcttcatgtcgtagtcacccagcgttggtgccaaggggagtgtgagaagccgacgacctgaatgggcgcaacgatcgaacagatccggattgggaaaaccagtgtttggctgagggctaaaagcccggttcatagatttggacccgatccgcagatcaccataccggccagcggcttctgatagcgccgcattgaaaggccttacagaagaccgcactcgatcacacgccacaaagtcaaaagcttcttgcatcacgggcggcaaccacaga

SEQ ID NO: 2684 - DNA, 1676 bp, unidentified
  source 1..1676: mol_type = unassigned DNA; note = element_3d0b6f8
  misc_feature 1..3: note = core
  misc_feature 4..423: note = LE
  misc_feature 424..1257: note = CDS
  misc_feature 1258..1676: note = RE
  misc_feature 11..224: note = bridgeRNA
aaacatactaacctagtgttggatcatgaatcgacggattcatgatctggcactttttattttgtctaaaataaaaggtgaagataaagcgaataaagtcttgcgttttttagacacttgatgtcggaaaataaacggactgctttaccgcctatttacaagtcttttcgaagtatgtaggcacttagatgccgtgtttagaaaattggaatcaaatgggttgataaagctgtttatctttattcggagattagaattataagtcaaaatattatctttggtattgatgttagcagtagatcgtctactgtttgtgttgtcattgatcgagtaaagcagggcaatccctttactatttctaatgattcatttggttatcaagaactattggatcatttaaaccaatacttaataacccctttagtggtttttgaagccactggcgtatattcattgagtttacaggcatttttagaagatcatcacattaaatatttaagacttaaccctttgcaagctaagaaactaatggataacaatctaagacataataaaactgacaagcttgatgcttatcatttagccttgattcaatttagctcaccacaaaaacttcaagcacctcaaccgagggaatatcacgaacttcaagctgccagccgttattatgaagagcttaccagagctttgatcgttaataagaatcaacttcaccgcaacttgcaatcaacttttcctcaaatagagcacatactgtccaacccttctggaaaaatttactggaccattgttagcttgtttccgcatgctcaatatgtcctggatatgaatgaagatcaagtcaagcaaagattattgtctatatcaggtattggtcgtcaaagagcacagtatcttactgctagactatatgctttcgctagacaagcttatccttacgatagaaaagatggcattacggtgagagctattcaacgcactatctctaatctgttgtctttaagcaatgaaagagatcaggttattaattatatggaaaagctgactaaggttgttaatgcacgcgcgttaacgatttatttaagtatccctggaattgctagaactactgccttaagattaatcgcagaacttggggacttaagacgtttcaatacttcagctcaaattgatgcctttgttggtatgatccaggccgttctcaatctggtgacaaagatagtcgtctgggtattaccaaacatggtaatcacatagccagaaagatactgtatcgcgttattactcaaatggagacagtaaaaaccacttgtccttgtcatattactgattattacgataagaaaaagcaatcttctcatagccgaggctacaaaaagattgccattgcatccgtgcataaactaatacgcacgctatttgctttaataaagcataatcaattatatgactacaacatagccactcaaaaccaaagactttagttgaaatcaaataatcatctttagtatagcaacctatgaagaaactacaatactcataggttcatttatgtaactttctaatattacaatattttctattttgactaatctaactctattcgtaccaatattctaattaaatagagtataaattaattaagaaaattactgataatacttgattttaggtag

SEQ ID NO: 2685 - DNA, 1402 bp, unidentified
  source 1..1402: mol_type = unassigned DNA; note = element_3d0bec0
  misc_feature 1: note = core
  misc_feature 2..89: note = LE
  misc_feature 90..1124: note = CDS
  misc_feature 1125..1402: note = RE
  misc_feature 1172..1394: note = bridgeRNA
caatgggatggacgcccccacccgacagcggcatcgatgtgccaaagtggaagtctgaccaaccacttgaaccgaggggagcgtccaacatgaagattacgacgattggtatcgatttggccaagaacgtgtttcaggtgcatggggtcgatgggcgcggcaagggggtgctgcgcaagcagctcaagcggaaggacgttctgagcttctttgcgaatctggaatcctgcctgatcgggatggaagcctgcggcggcgcgcatcactgggcgcgcaagctgcaggtgatggggcacacggtgaagctgatggcgccgcagttcatcaagccgtacgtcaagagcaacaagaacgatgcggccgacgccgaagcgatctgcgaagcggtctgccgtccaacgatgcgtttcgtgccgatcaagaacatcgagcagcagtcggtgctggcgctgcaccgcgtgcggcagggtttcgtcaaggcgcgcaccgcccaggccaatcagatccgcggtctgctcggcgagtacggcctcatcgtgccgcagggcatcgggtatatcgccagccgcgtgcccgagctcatcgaagatgcccgcattgaactgcccggcactttccggctgctgatcgccaggttgctcgagcatctgaaggagttgcagcgacaggttgaagagatcgaagcgcagatcaaagcgtggcatcgaaccagcgaggcgagccagcgactcgagaaagtgcccggcatcggtccgctcacggcgacggccctggcggcgacggtgggcgacgcgaagaacttcgacaacggtcgtcagctcgctgcgtggctggggctggtgccgcgccagcattccagcggcggcaaacccacgttgctcggcatgagcaagcgaggcgacgcgtacctgcgcacgctgttgatccacggcgcccgatcggtgatctaccgcgccggccagcgggccgatgccgaaagctggctgctaaagctgatcgcacggcgtaacgccaatatcgccgcggtggcgctggccaacaagacggcacgcatcgtctgggcgttgctcgcgcgagagcgcgagttccgatccgactactcggccgtcagggcagtcgcgtagcggggtcggcggatcagaacgacttcaccagcacaggaaatctcaccaccgattgctcaggcgatcacgcagtgatggcaagacaggtcagaccgtggttggcacagcccgcgccggacgaggcacccagagtgcgtgtaagcgatcgaggcgccaaccagcagaacccatcagggacagcgagctcgtctcgcacgcaaagtccggatgtacgggtgcaatctttaccttcgagccgtcacgaactgagagcttggcaaaccgggggcgtccatgta

SEQ ID NO: 2686 - DNA, 1467 bp, unidentified
  source 1..1467: mol_type = unassigned DNA; note = element_3d0e819
  misc_feature 1..2: note = core
  misc_feature 3..87: note = LE
  misc_feature 88..1116: note = CDS
  misc_feature 1117..1467: note = RE
  misc_feature 1234..1454: note = bridgeRNA
tgatggggtggacggcccctgctctccggcatcaaggtgccataacgtggtcgtcgctgaacgccacaacgagaggagccgtccgctatgcaagttaccacgatcggtctagatatcgcgaagagagtgtttcaggtccacggcgtcgacgccgccggtgcggtcgtgtttcgcaaaaagttgcgtcggtcggaattgtcagcgttctttgctggtctttcaccgtgcctcatcgggatcgaggcttgcgcgaccgcgcaccattgggcacgcgagttcatcgcgctcggccaccaagttcggctggtgccaccgagctacgttaaggcctacctcaagcgcggcaagaacgacgcagccgatgccgaagcgatctgcgaggcggtgacgcggccgaacatgcgctttgtgccggtgaagagcaccgagcagcagggcgtgttggtcttgcatcgcgggcgcgaattgctggtgcgccagcgcaccatgctggtcaatggcctgcgcgctcacatggcggagttcggaatcattgtagcgcaaggcatccagcggctgcctgagctcgtggccttgctggaagacgagaagacaagcatcccgcagattgcccgcgaggtgcttgcggccatggtggtgcagatcaacaaccttacgacaagtatccgccggatggacaagtgcatcgtcgcctggtgtcgcgccaacgcagcggcgcgacggctcgcgaccattccgggtgtcggcccgatcaccgcctcggcgctggcggccacgatcaccgacccgacgctgtttcgatccgggcgccatctcgcggcatggctcggcctggtgccgcgtcagcactcgaccggcggcaaggcgaagctcggtcggatcaccaaaatgggtgaccagtacgtgcgcaagctcttgatcgtgggcatgactgcggtgatccgatcggcgcggcgcaccaaggcaccgagcttcgcttgggtcaacgcgctgctcgagcgccgcccggcacgtctggtctcggtagcgctcgccaacaaggcggtgcggatcgcctgggtgatcatgatccgcggcgaaacctatcggccgccaacgatggcggcagcagcatgagaaatatcgaaggtctgcgcttgctgaccgcgaagccgcccgcccgctacggcgctatttgggggcgcgcgtgcgggcggcttcgctccacccagtgaaaaaccaacccaaccctttaccaattgcagggggtgcaatgacgtgatggcgaaccggttgagccggggactgggaaaacccgagtagtgcccagcacttcgagtgcgggaagatgattgggacccgggtccgcgaacacccatcagggccagcggtcatgtgcaccgcgcaaacaggccggacacatgagcgcactcgaccagcttgccgaaacgtcaaaaaacttcttgcaccgcaggggccgtccacaca

SEQ ID NO: 2687 - DNA, 1449 bp, unidentified
  source 1..1449: mol_type = unassigned DNA; note = element_3d10b4b
  misc_feature 1: note = core
  misc_feature 2..62: note = LE
  misc_feature 63..1181: note = CDS
  misc_feature 1182..1449: note = RE
  misc_feature 1230..1440: note = bridgeRNA
taatgagatggtccgccgcggcgtctcgatctgcgcgacgatgcgggcataaggagcctctcatgaacgtcatcggaatcgatctcggcaaaatggtttttcatctggtcacgatggaccaagacggaaagatccttagtcggaagaagttgtcccggccgcagttgctgaagcacattgccacatcgccctgtagcgttgtagggatggaagcgagttgcggagctcatcatctgggccgttccttcagagcttacgggcacgaagtacgcctgatccccgcgcagtttgttcgtccattcgtgaaatctcagaagaacgactacgtcgatgcggaagcgatcgccgaagcggtgcaacggcccacgatgcgcttcgtgccgatcaaaaccgaagatcagctcgatctgcaagcgatacaccgagtacgtgaccggctggtcctgcggcgcacaagtttggtgaaccaactccgggcattcttcctcgaacgtgggatcgcgctacggactggtcgtccccggctgcgccggatgttgccggcactgttggccgacgcggagcaacacctaaccccgcgcatgtatcggttgttatgcctcgttgccgaggaatggcgctctgtggaggaagagatcgagaagcttgatcttgaaatcgcaacgatcgcatcgcaagatgcggcatgccagcggttacttactgttcccggaatcggggtattgatcgccacggccatcgttgccgcgattggaaacggagccgcgttctctcgcggacgggagttcgcagcctggctggggctcattccgaagcaatgctcgacgggaggcaagccgaaactgctcggcattagtaagaacggcaatgagtatctgcggagactgctcattcacggcggccgctccatccagcatcgcgtcgcgcgcgatcaccatgcgttcggatcgtggctgacggatctggaagcaagagcgaatacaaacgtggtcgctgtcgcgatggcgaacaagcttgctcgtatcgcctgggtggtgttgaatcgccaacaggaatatcggcgccaggcaactgctgtcgagaacgccggcttcggcctgtcaactgtagatacgccagcctcagccaccggtcaaggctctccgataaactcgctacgctcggccttgaccggcgcctgagactgccacctgaatctaagatcaggccgaagccagcttgtgaatcccaccttggttttgcgaatgggaagagatgacagaacggtccaacggcgcgtcccaagcctgagcaaaaaaccggtctatccaagaccgtagccgttatgaggacggatgcgcgcgcatactcatcgtggccagggctttttgcccaccaaacaggccggatacatttacgcagaccctcttcatcgaacttcctgcttgcaatcctgcggcggaccataca

SEQ ID NO: 2688 - DNA, 1344 bp, unidentified
  source 1..1344: mol_type = unassigned DNA; note = element_3d11573
  misc_feature 1: note = core
  misc_feature 2..61: note = LE
  misc_feature 62..1093: note = CDS
  misc_feature 1094..1344: note = RE
  misc_feature 1117..1335: note = bridgeRNA
taatgggatcgtccgccgcaggaactgtttagttgtgtagactgcgaggaaggaggatcccatgaaactacgcgtgctcggtattgatttaggcaagactgtttttcatttggtgggactggattcaaccggtagggtggtgatccgcaagaaatgttctcctacacaactgctggccttcaccgcgaatttacaggtgcagttgattggcatggagtcccgcagtgggtcgcactttctggggcgggctctgcgcgagcaagggcatgaagtgcgattgatgccggcgcaatacgtgaagccttatgtgcagaccaacaagagtgactttctggatgcggaagcgatcgccgaagcggtgcaacgaccgagaatgcgttttgtgccgatcaagaccgaggagcagctcgatttgcaagccctgcatcgcgtgcgcgaacgttgggtgatgcggcgtaccgcggtggtgaacccgattcgcagccttctgctggaacgtggactcacgctacccaaaggccgagggtatgtggatcggcaacttcccaggatcttggaagacggcgagttgaggctgtcgggttcgttccgtgttttgctggctcagctcaagatagaactcgaacaactcaccgcacgcattgaggagatggatcgggtcatccagaaaacggcgaaagagaatgaagcctgccaacgactcacggagattcctggagtcggcccggtcaccgcgacggccctgatcgctgcggtgggcaacgggagcacttttcaaaagggacgaaatctggctgcctggatgggaatcgttccgggagagtactccaccgggggcaaacagaaattactgggcatcagtaaacggggcaataagtacttacgaaccttgttcattcaaggtgcacgcagcgtgctgcaacaacgagacaagcaagttcccggtctgagcagttggttgacccaactgctggctcgtgcgcaccagaatgtggtcatcgtggccttggccaacaagatggttcgcatggcctgggcggtcttgtgcaagaacgaacgctatcgcgccctcgttcttgccatgtcagcgtaaattctcggtttaaggaaaacagttcctgccaggtctgctggcggaaaagagagatggcaatgggtctctcccacgctctcgaaacctgatatcggaaaaggtctttacgagaccgtccacattatacggacgagggcgagcggatatccatcatggcccggagtcagtgactccactcaaggccgaatacattggcgcagaccaactgccatgcttcgtttttcgcttgcaactctgcggcggaccataca

SEQ ID NO: 2689 - DNA, 1461 bp, unidentified
  source 1..1461: mol_type = unassigned DNA; note = element_3d15298
  misc_feature 1: note = core
  misc_feature 2..214: note = LE
  misc_feature 215..1444: note = CDS
  misc_feature 1445..1461: note = RE
  misc_feature 7..230: note = bridgeRNA
cgttacctaatgaacgtccccagccggggcctgctcggtcgctcggtccggtatgacttactgcccctgtcgaaccaatgatccggggggtgttgtcgccgggccgggtggcgtcggcggaccgctgatagggacccggccacccccctcgggtaggtctctccgtaacgtggctgccggcagtccgacgctctgaccagcggccgagcccatgatggacttcgtgggagacgaaagcgtgaacgacgagtacggcgtgttcctgggcctggacgtcggcaagaccgaccatcacgcggtcgcactggacccggcgggcaagcggctgcacgacgcggcgctgccgaacaccgaggctgggttgcggaaactgttcgacaagctcgcccgccacggccggatcctggccgtggtcgaccagcccgcctcgatcggcgcgctgcccgtcgcggtcgcccgcgcctgcggacaccaggtcggctaccttcccggtctggtcatgcgccggctcgctgacctgcaccccggcaccgccaagaccgacgcccgtgacgcctacgtcatcgcggacgcggcccggacgctgccgcacacgctgcgccgggtcgacaccggcgacgacaccctggccgagcgggagatgctggtcggctacgacgacgacctcgccggcgaggtcacccggatcgctaaccgcatccgcggcctactcacccagatccccccgcccctggaacgcgtactcgggccgaaggtgcagcatccggccgtcctcgaagcgctgtcacggtgcggcggcccagccgggctgcgcaaggccggccggtcgaaactcgcggaggtcgtcgagccccgggcgccgcgtatgggtgcccgcctggtcgagcaggtcttcaccgcgctcgacgctcagaccgtcgtcgtcccaggcagcaccgcagccgagaccatcctcccgaggctggcagacagcctgcgtgaactgctgaaacaacgcgaccaagtcgcgatgcaggtcgaggagatgctcgatgcgcaccctctttcggaggtcctgacctcgatgccgggcatcggcgtcaggaccgccgcccggatcctgctcgaagtcggcgatggcaacgcctttccgacatccggccacctggccgcctacgccgggctcgcccccgtcacccgccgctcgggcaccagcatctgcggtgagcacccacccaaaggcggcagcaagcagctcaaacgcgcgctcttcctgtccgcgttcgcggccttgtccgatccgctcagccgggcttactacgaccggaagcgcgctgaaggcaagaagcacaacgccgccctcatctgcctggcccgtcgccgcgttgacgtgctccacgccatgctccgaacgcatacgccttaccaacacaaaccggcagaaaagctagccctcgccgcttgacaagaaccatagggaca

SEQ ID NO: 2690 - DNA, 1372 bp, unidentified
  source 1..1372: mol_type = unassigned DNA; note = element_3d162cd
  misc_feature 1: note = core
  misc_feature 2..66: note = LE
  misc_feature 67..1098: note = CDS
  misc_feature 1099..1372: note = RE
  misc_feature 1131..1367: note = bridgeRNA
caatggtatggaccccgccgccttcgggtggcgtatcctgggaagataaacaggagggctcgtgccatggagatcaaaaggatcggccttgatctggccaagtatgtctttgaagttcatgccgtcgatggtgatgaacaggttgtcttgcgaaagacactcaggcgtgaagccgtcgctcaattcttcgctgagctggagccttgccttgtcggaatggaggcgtgttgcggatcacactactgggcacgggtcctaacggaccttgggcacgatgtacgattgatctccccccagttcgtgaaaccctacgtcaagtcaaacaagaatgatcgcaacgacgccgaggcgatctgtgaagcggttggcaggccatcgatgcgcttcgtaccgccgaaatcatccgagcaactggaaatacaggccgttcaccggatccgccagcgagtggtcgcaaaccgcacccggcttgtgaaccaggtccgtggcctgctgggggagcacgggatcgtggtggcccgagatataaaccgtattcggcgtgccctcggcgaaattgcggatcggcaatcgggggatttaggaggacttttcctcgagatggtgggcgacatgcgtgacgaacttgctgagctcgacgcgcgtctggcaacctacaatcgcaggatcagaaacctctttcgttcaaacgagatgtgccaacgtatcggccggatcgaaggtatcggcccaataacagcgacagcattagtggcggccataggagaccgatcgagcttcaagaacggtcgccagttcgcagcttggctcgggctggtcccaaagcagagatccagcggcggcaaggcgcgattgttcggcatcagtaaacgaggtgacagatacctgcgaacgatgctgatccacggagcgcgggcagttctgggtcgatcctcgggaaaaacggacgcgcgcagccaatgggtcaatcgcatgcgcgaaagacgccatccaaacgtagtggcggtggcgctggcaaacaaaaacgcgcggatcgtctggtcgctgctgtcacgggaacagagttactgcccggatcacgtcgtctctttcggatgaccacgaacagttagaggaggaagcgcccaccggaatattgcaacatctgccaagggatggaaaagggtcacgcccgttgcttctcgaacctgatgtgtggatcggcaaggtcaacaccgatgccttaggggcgatgaggtagaagcaagcggaaatccatcggggctcgcggcgttgatccgtcaggccgcccgaagaagccggatatacatcagcaatcgcgaccgccgatccagagccaaacagaccgttgcaatcaggcggggtccatata

SEQ ID NO: 2691 - DNA, 1328 bp, unidentified
  source 1..1328: mol_type = unassigned DNA; note = element_3d1ce4a
  misc_feature 1: note = core
  misc_feature 2..254: note = LE
  misc_feature 255..1313: note = CDS
  misc_feature 1314..1328: note = RE
  misc_feature 23..250: note = bridgeRNA
cagtgaagatgacgcctggctcgttcggtgagaatgggcctgggttcggcggtgggtctgactccgaggttggctgacccattgggtgtcgtttgtgggatgtgtcggctcgccgccgggcccgtcatggtcgtgcacgtgaccggacggacggcgtgacctgatacgagcttgctggtccaagcccatcactggcctgtccgcccgcccggccggcgcgtgcctcgctccggcaggaggaaggcaggtccagcatggcgaaacactcccgggttgtcatcggcggggtcgacacccacggccgcatccaccatggcgccgtcgtcgaccagcacggccggctgctggccgacgccgagttcggcgcccacaccgacggctaccggcagctgctggggtggcttggtcgccacgggcagctccgctcggtcggggtggagggcaccggcacctacggcgccgggctgacacggttcctgctcggccaaggcgtgcaggtgttggaggctgaccgccccgaccgcaccacccgccgccgacgcggcaagagcgacccgatcgatgccgaggcggccgcccgggcggtgctggccggcaccgccaccgcgctgcccaaacgccgcgacgggatcgtggaggcgatccgggcgctacccagcgtgcgggccggagcggtcaaggcgcgcaccgctgccatcaatcaactcaagggtgtcgtggtcacggccccggccatcgtgcgtgaggcgctggacggacggtcgaccacccagcaggtcgcggcctgtgcccggctgcggcccgacccgacccagcttgacgaccccgtccaggcgaccaaggcagcgctgcgcgcggtggcggtgcgcatcctggccttggagcaggagatcaaggtcgccgaccagcggctcggcaagctcgtcgccaaggcggcgccgcggaccctggggttgctggcgattggggtggagcatgccgggcagctgctgaccaccgccggcgacaaccccgagcggctgcgcggtgaggccgccttcgcccacctgtgcggcgccgcgccgatcccggcctccagcggacgaacccagcggcatcggctgcatcgcggcggtgaccgcaacgccaactgcgccctgcacctggccgtggtggtccgcatgcgctactgcccacgcacccgcgcctatgtcgagcggcggaccaaggaagggctgtccaagccggagatcatgcggtgcttgaagcgctacctggcccgcgaggtctaccacgccatcctggccgactaccaagcgctccacgccacttgacatctatacgagcat

SEQ ID NO: 2692 - DNA, 1395 bp, unidentified
  source 1..1395: mol_type = unassigned DNA; note = element_3d203b1
  misc_feature 1..2: note = core
  misc_feature 3..238: note = LE
  misc_feature 239..1312: note = CDS
  misc_feature 1313..1395: note = RE
  misc_feature 36..234: note = bridgeRNA
ctcctatgtttacgaagctaactcagtcggaaggataaaagttagatttgtaatataaagtgataaagggatgagagcagatgtaccacttaataactcatgaagtatattggagattagaaactgcctcatcctttgttatcttttcgagtctgaacagaatgtaaggaattgagatttgctcaagatccagaatatccaaccaggagacaagacgaaccgggagattcatcactttatgctaacaattaacattagtacgatgagggctttaaaacaagtattgggagtagatgttgcccaaaaggaattagtagtgacgctgggccggttactggacgatttaagcatcgagctgtatgcctacaaaattttcagtaacacggagaagggtttttcttcattgctggcatgggctaaaaagttggcagatcctgatatagaacttcggtttgttatggaagccacgggggtatatcatcagaagttcgcttacttcctggatgatcaaggctgcactttaagtattgttttaccaaacaagatcagcaactatatcagaactttggaagcgaagaccattacagataaaagctgttctgaggccatagccaggttcgggttggagcgaaagttggatagctggaagcgccccaaaagcaattacaaatatcttcaacagcttacaagagagcgcgatcaaatagtttcagagcgctcgatagtaaaaaaccagctgcatgcagaaagtcaggaagcagaaccgcatgagcggagtttagagcgtctcaaggagcggattaggtttcttaacaggcaagaacaggaaatcaaggaagatatacaccagcttgtcaatcaagataccgagcttaaaaaagagatagagattatcagcagtattccaggagtcggtcagttgacagctattatcattttggcagaaacaaacggttttgaattgataagaaataagaaacaactttcaagttatgccggctttgacgtaaaagaaaaacaatccggcacatcggtaaaaggcaagccaaggatatcgaaaaaaggaaaccgaagcctcaggaaagccatgtatttccctgcaatgaccgcagtgaaatacgatgacaactttaaaaatatgtatgtgaggatcgtcagtaaacagggtatcaaaatgaaagctttgatagcagcccaaaggaaattgctggaactggcatatatactatataagtctaaaactagctatgacaaatcacacgaaacacaaagggcaggacaaaaaaatagcatgtcagcacaaagtgtataacatgctatactggctggctctgggccgccttcaaaaacaaagatataaaaaattgaaattttaataggttatcaacacagaat

SEQ ID NO: 2693 - DNA, 1584 bp, unidentified
  source 1..1584: mol_type = unassigned DNA; note = element_3d220dd
  misc_feature 1: note = core
  misc_feature 2..79: note = LE
  misc_feature 80..1144: note = CDS
  misc_feature 1145..1584: note = RE
  misc_feature 1346..1575: note = bridgeRNA
taatggaatggtccggccgtgctcctgccccgccagtgtttgaagctggcaaggggcgccaaagacaaggagcaagtccatggctgagaagtgcaagatcgcgatcgccgttatgggcatcgacatcggcaagaactctttgcacgtgattggccttgacgcgcgcggtgcgatcgcgttgcgccagaaatggtcgcgcgggcaggtggcatcgcgactcgcaagcatggcgccgtgcctgatcggcatggaggcctgcgttggtgcgcaccatctgagccggaaactcaaggcgctcgggcacgatgcccggctgatgcccgcgaagtacgtgcgcccctactcgaagggacagaagaacgacttccgcgacgcggaggcgatcgccgaggcggtacagcggccaaccatgaagttcgttgcgaccaagacggccgagcagctggatttgcaagcgttgcatcgcgtgcgcgagcggctcgtctcgcagcggaccgggatcatcaatcagattcgtgccttcatgctggaacgtggcattgcggtgcgccagggcctgcgcttcctgcgtgccgagttgcccggcattctcgcctcgcgcggcgacgtgctctctgcgcgcatggtgcgcgtgatcgaggaactgaccgccgactggcgccgactcgacgagcgcatcgaagggctgtcaactgagatcgaggctctggcccgcaaggacaccggctgtgagcgtctgatgagcgtgcctggcatcggcccgatcatctcgagtgcgacggtcgctgcgatcggcaccggcgacgtgttctcgaaagggcgcgacttcgccgcttggctcgggcttgtgccgcggcagatctccacgggagatcgcacgatcctcggcaagatctcgaagcgcggcaatcgctatctgcgggttctgttcgtgcaggccgcttgggttgtgctgatcaagcctcagagctgggagcgacacggcctcaaatcctggatcgaggccgccaagaagcgcctgcatcgcaatgtgctggcgatcgcgctggctaacaagctcgcccgcatcgcctgggcggtgctggccaagtgtcgcgacttcgagatcaggaggactgatgatgcgctcgtccgacccgcttgatcttcgcgccgtgctcggtgccgtcaaggcacggcctggcagcggcagagcgagaccggaggtcagcgcgacggccggccttgacggcccctgcgcgcgacgcgtcgacgatgtgcaggccgggacgaaggaacggcctcggcacgaacaaaggaactacgcgaaatgagggagcacgcaatgacgtagctacgtccgcttacccgccgaggtctgcgagaggcaacgaagaaatggaggatcggtcttcccggcgcatgcgaacactggtgacccaaatggcccaatcgaggcctgtccgctaatgagatcgcacgcgcgctgatatccatgatggccaggagcgcaaaccgctccaatcagaggccggatacattgatgcaaggccgcacatccgccagatcgccaaaacttcttgcgacgcacggccggatcataca

SEQ ID NO: 2694 - DNA, 1402 bp, unidentified
  source 1..1402: mol_type = unassigned DNA; note = element_3d27722
  misc_feature 1: note = core
  misc_feature 2..92: note = LE
  misc_feature 93..1121: note = CDS
  misc_feature 1122..1402: note = RE
  misc_feature 1173..1394: note = bridgeRNA
caatgggatggacgccccctcctaaaaaggcatcatttatgccaaagtgacgtcggcgtatcaaccaatcagactgaacaggagcgtgcaacatgaaagtgacgactgtaggcattgatctggccaaaacggtgttccagattcacggcgttgacgagcacggtaaagcgatcgttaaaaagcagattaagcgcgaccagatggcggtgttctttgtgaatttgcctccgtgcctcattggcatggaagcttgcggcagtgcccaccactgggcgcgcaagctcactggcatgggccacgtggtcaagctgatggcgccgcaatacgtcaagccctatgtcaagaccaacaagaacgatgcggctgatgccgaagcgatctgcgaagcggtgagccggcccaacatgcgtttcgtgcccgtcaaagataccgggcaacaggccgtgctggccatgcatcgggttcgccaggggtttgtcaaggcacgcacggcgcaggccaaccagatccggggcctgctctcggagttcgggctggtcatcccgcagggcattggccacattgccctgcgcgtgcccgaactgattgaaaatgccagcaacgatctgcctggctcgtttcgcctgcttgtgcagcgtctgctggaccatctgaaggagctcgatcgacaggtcggtgagcttgaagcgcaaattcaagcttggcaccgcaacagcgccatcagctgcaagctcgcacagatcccgggtatcgggccgattaccgcgagtgcgctggtggcttcgattgccgatgcgaagagttttgacagcggccgccaggtggctgcctggctgggcctggtgcccaggcagcactccagtggcggcaggcaaaacctgttgggcatcagcaagcgcggcgatacttacctgcgaacgctgctgatacacggcgctcggtccgtaatctttcacacgcagcacaaggccgattcgtgcacctgggtcaaggcgctggccgagcggcgcaacaagaatgtggcggcggtcgcgctggccaacaaaaacgcgcgcatcgtttgggcgctgctggcgcatgaccgacagtaccaggacaattacacgccggcagcggcatgaaggcagcccgcagtccggtcagtcaataacaagcagcaggataaacacaccaccgattgcgcaagcgatgatgaagtgatggcaaaactggtaagaccgtggttggcaaaacccgaacgttcacccgcacagaaagtgcgctattccgatggaggtgcagaccagcgaatcccatcagggagagtggccaaaagccacatcaaaactccgaatgtacgggtccaatcattaccttcaagctgtcatgaattaaagcttggcataccgggggcgtccatgta

SEQ ID NO: 2695 - DNA, 1363 bp, unidentified
  source 1..1363: mol_type = unassigned DNA; note = element_3d280d4
  misc_feature 1..2: note = core
  misc_feature 3..73: note = LE
  misc_feature 74..1096: note = CDS
  misc_feature 1097..1363: note = RE
  misc_feature 1123..1360: note = bridgeRNA
ttaatgagatggtcagctcgatccccgccagcggtaagctgagcggggatttttccttctggaggccatcatcatgaacacggtaaccctgattggcattgaccttggcaagcattgctttcatttgcatgggcaggatgcccaaggccggatgattttccgcaagaagctctcgcgcagccagatgctgacgcagctggccaatattccggtttgtcgcatcgtgatggaagcctgcgctggagcgcattggattgcccgccgcctatccgcgatggggcacgaagcgaaattgatttcgccccagttcgtgaagccctttgtccaaggcaacaagaacgactttgccgatgcgcaggccatctgcgaagcggcgagccgaccgagcatgcgtttcgtcagtccgcgcaacgaggttcagcagacgatctcggccacccatcgtgtgcgcgaggcactggtccgggatcggacgtccgccaccaaccaaatccatgcttttttgctggagttcggcatcagcctgcccaaagggccggccatcatcaaacgcctgccggccctgttggccgagcgggaagccgatctgccgccgcgtctggtcgcgctacttgagcgtttgcgtgaccaccacaaatatctggacgagcaaatcaaggctgtcgaacgcgaattgacccagcagctggctgaggatgaacgcagccagcgtctgctggagattcccggcattggaccgatcaccgccagcgtactggccgttgaactgggcgatgcgcaccagtttgccaacgcccggcaatttgccgcctcgattggcttggtgccacgtcagtacagcactggcggtaagccaaccttgctcggcatcagcaaacgcggcgacaagaatttacgacgactgcttgttcaaggggctcgggtcatcatgcagcgcattcaggacagaaccgatgccctgggggaatggactcggcacatgatgtgccgacgacactcgaatgtcgtcgcctgtgcactggccaacaaaatggcgaggatcgcctgggccatcctcgccaaaggaacgcactatcaatcacatcaggtagtctgaactacctgacgccctgcatcagcattttgtaacccacctggttttgcgatggtagatcacgggatgaactaaacggcacaacggcctggcaaagaacctgagacgtaaatcagcgatcacacgctgaggcttttttgaggattgccaggcgcggctctcatcgtggcgcgggaaatcaacttcccaattcgacgccggatagatttgcgcaagccaactttagttcagaacaaaaacctgccttgcaaaaatcgggctgaccataga

SEQ ID NO: 2696 - DNA, 1443 bp, unidentified
  source 1..1443: mol_type = unassigned DNA; note = element_3d2a0df
  misc_feature 1..2: note = core
  misc_feature 3..231: note = LE
  misc_feature 232..1425: note = CDS
  misc_feature 1426..1443: note = RE
  misc_feature 9..234: note = bridgeRNA
ccgttatcttttaggtggtccttgaaaccgagggctgcggtcgccagacctggtatgacttcttgcccctgtcatcaatgatccggggggtggtgtcgccgggtgtggtggcatcgatgaaccgctgatagggacagggccgctgatcgtgagtaggtctcttcataacgtgggtgtcgggtatcgatgtcggatcggcgaccggtggtacaccggacgaaggactgcttcatggacacgagttacgccgtgttttgcggcattgacgtgggaaaatccgagcatcacgctgtcggtctcgccgtcgacggcacccgcctcttcgacaaggccctgcccaacgacgaggctcgtctacgcacagttttcgaccgcctcgccgcgtacggacctgtgttgatcgtggtcgatcaacccaacacgatcggtgcgctaccggtcacggtcgcccgctcgtgcggtcaccgagtggcgtaccttccgggcctgtcgatgcgccgaatcgcagatctgtatccagggcaggcgaagaccgacgcgcgcgacgcgttcatcatcgccgacacggccaggaccatgccgcacacgctgcgacgggtcgacacaggcgatgacacactcgccgagctgggtgttctgatcggtttcgacgacgaccttgccggcgaagcgacccgcgtcagcaaccgaatccgaggactgctgaccagcattcaccccgcgctcgaacgagtactcggaccgcgagtcacgcaccccgccgtgctcgaaatcctctcccggtgcggtggccccgccggcatccgcaccgctggcaagcgcaagctgaccgccatcgcagtgaagaacgcgccacgaatgggtgcccgactggtcgcggaaatctacaccgctctcgaggcccagaccgtcgtagtccccgggtccgcggctgccgagactgtcctaccaaaacttgcagattccctcaaagagacactgcaacaacgtaaagcaatcggtctggacgtggagaggatgctcgatgcccaccctctttcctcggtcctgatctcgatgccaggcgtcgggatcaggacagcagcacgcatccttctcgaagtcggtgacggttcggcattcaaatcagcaggacacctggccgcctacgccggcatcgcacccgtgacccaccgatccggcacctcgatccgaggtgagcacccagcgagatcaggaaaccgcaaactcaaacgagcgttgttcctttcggccttcgccgcactgcacgaccccaccagtcgtgcctactacgaccgtaaacgcgccgaaggcaagaaacacaacgcagccctcatctgcctggctcgacgccggtgcgacgtcctgttcgccatgctcaagaacaagaccctttaccaaccgcccgcagctcacgcagcttgacagaaaccatagggacac

SEQ ID NO: 2697 - DNA, 1361 bp, unidentified
  source 1..1361: mol_type = unassigned DNA; note = element_3d2c286
  misc_feature 1..2: note = core
  misc_feature 3..73: note = LE
  misc_feature 74..1099: note = CDS
  misc_feature 1100..1361: note = RE
  misc_feature 1075..1348: note = bridgeRNA
tgatggggtggacgccccccacggcatcgtttgtgccaggacggtggtgttgcgaccatcagaggaggcgtccgtggaacagattatcacagtcgggctggatttggcgaagcacgtattccaggtgcatggcgctgaccgcagtggcgcggtcgtgctccgcaagaagcttcgacgtgatcagcttcttgttttcttcgcagggttgccgcgttgtacggtcgccatggaggcgtgcggcggggcccatcattgggcgcgcgagatcggccagctcgggcacgaggtgcggctgattgcgccggcttatgtaaagccatttgtgaagcggcaaaagaacgatacggcggatgccgaagcaatctgcgaggcggcgcaacggccgaccatgcggttcgtgccggtgaagaccgaggcggctcaagcctccgcgctggtgtttcgtacccgcgatctgctggtccgacagcgaacccagctgatcaacgcggttaggggccacatgaccgagttcggcatggtggtcgcgcagggtccgatgcatgtcggccggcttatcgcgatcatcgaggatccacactccgacctgttggagtcggctcgcaacgttcttggcgttatcatcgccgaacttcgcgcgctcgatgatcgtgtgtcgatgcttgacgctgagatcgtacgccgtgccaaggaggatccggtcgcgaggcggttgatgacgattcctggtatcggaccgatcaccgccaccgctctgatcgcactggcgccatcggctgccaccttccggcgcggacgggacttcgcagcgtggctaggcctcacgccgacacagcactcaagcggcggcaaggaacgactgggacggacttccaggatgggcgagcgaacattgcggcgcctgctcatcatcggggcgagcgcggttgccagctgggcgtcccgcaaaggtccagtcccgggatcgtggctggccagcatgatggcgcgcaagccgccgatgttggtgcgcgtcgcgctcgccaacaaaatggcccgaacagtctgggcgctgctcgcccatggcggggtctaccgagctccggcagtggcggcgtaagccgccaaggtcgcggggtgccgtggagcacagttgaggtcaaaggagagtatggcacaacggtcgtgagacaggatcgggaaaaccagttcatggacaagcgcttcgagcgcgccagattgttttggatccgatctgcgaactcccatacgggcccgcggcatgtcatcgccgcaataaggccggacacatgtcagcacccgatccgcacgccattcacttttccgaagattcagcttgctccaacgggggcgtccacaca

SEQ ID NO: 2698 - DNA, 1876 bp, unidentified
  source 1..1876: mol_type = unassigned DNA; note = element_3d4bc73
  misc_feature 1: note = core
  misc_feature 2..365: note = LE
  misc_feature 366..1355: note = CDS
  misc_feature 1356..1876: note = RE
  misc_feature 177..357: note = bridgeRNA
ctttagttttgttctatagatgaaatctattatgacaatgatgttgaaaagagggggtctgggggagactcataactcacaattttgttgataagtgcaaaggggatggggagaaccaaagcgacggctaggcagtgggccttgatagagtttcggtccccatccctttcattgagggatttatggaaatttatatgagtagattgaaaaaaggacagggtgaactttagcgacggccaggctagtggcctttatagtgtatcagtccctgtcccttataaccaggttgtcagaaccatataggattttagccttagctagtaaaggtcttagtttaaacaacctaattaaaccggagtaaaaatatggaaattaaggaggtcatcggaatcgatgtaagcaagctgacattggattgttgtatccacaaaagccaagagttcaaagtattcaataacgattcgggaggaatcgagaaactgattgaatggtccttgaagaaaagtaaattggataaggaaaacctactctttgtactggaacatacgggcctgtattctgaccacctggttcgattgttggacggcggtgattgtcttatgaacattgtttccggtctcgaggtcaaacgttcgttgggcattacaaggggcaaggatgacagaacggatgccaaacggctggcactttatggttatcgcacgagagaggaattcagtcctaacaaaatccccagttccactttggcaaggctaaaacggctgatgtccatgcgcaggaagttggtcggccaacgagctggccacatggcgaccctaagggagcaaaaaagggtgctggaagaagacccattgttgttctgggtacaggaagatgtgatcaacctattgagctggaggatcagcgaccttgaacgggagatggacaaactcatacaaggggatttggaacttaaacaaatgctggcattattgaccggcatcaagggcatcggcaaggtaacggcccgttttatgattgtgcataccgttgggttcacttcttttgccacatggcgaaagttcgcctcgtattgtggtattgcacccttcccacacacttcgggcacgagtgtaaggggaaggacaagggtaagtcgattggcgaacagggagggcaaggccctattgcaccaatgctcattatcggccgtaaaatgcaatccagagatgaaagcctattacgagcgacgccttgaaattggaaagagtaagatgagtacgttgaacatcatccgaaataaattagtggccagggccttcgcagtcgtgtccaggggtacgccctacgtccaattgatgggacacgcctcttaattcaccgctgcgctttaacaataatcgacggctgcaccttccatattatggaaagcggtcggacgaaacgggattcctttgtccaaattcaaatatcggattatgattcccatccatcgtttttgtatcgccccatagccattgtattctttcaagctaaggtcttgctccactacaacatctccgcccttattcttttttgatagcgaaaaaacaacatcctttcttggacgacggcataaaccaggcgcgttgcgctcttttttatacgccttaccaagccaggatatcgtaagtggatccagcatcaaaaaaggtaacggcgaaggcgctatgggaagtaaatcaagaccggaaatcatgaaagcaaatcaaaaacttaaaaatggaacgatccgaaaagaatcaaaaaaggaaaacgctccagatataataagtaaatcgattcaaggggtttgtgggaagaaagcaagaacaatagataaagtctatggttctggatttggatttatcataggata

SEQ ID NO: 2699 - DNA, 1172 bp, unidentified
  source 1..1172: mol_type = unassigned DNA; note = element_3d517cf
  misc_feature 1..3: note = core
  misc_feature 4..211: note = LE
  misc_feature 212..1141: note = CDS
  misc_feature 1142..1172: note = RE
  misc_feature 27..192: note = bridgeRNA
gcttgtgtctttaggtgagatagattcagaggtgagaggagtggatgacagctgacaagcagcggtgccgttgagcacgagtaggagccaagctgccatccactctttcactctggttccaagctcgaacagttgactgagtccgacctcgaacaacaagcaggagccaggccagagtggcctctcgcccctaagcctagaggtttggctcatgatcgcctatgccggaattgatatttccaaagagtcactgcaagtagcgctgtatcctctgtctgaaaacctttctgttcccaatacggcagaaggcgctgcacggatcctcgattggtttgcaggcatccaggtcgagcgtgtcctagtcgaggccacagggggttatgaaaagcgggtagtcaaggctctggccaaggcaggtttcaaagtcctgcgtatcaacccagttcgtgcccaccaatttgcccgtgccatgggtatgcgggccaagacagatcccatcgatgctcgcatgctggcgatgtttgccgcgtcattggagagggaggtcgctgtcgtacccgatgatgcacgagaggcgctaagcgagttggtcagtcagcgcgaggctttcatccagcagcgagatgacaatcgccgtcgcatccagcaagcgcaattacctgaagttctggatgcctatcgcgggttgaacgacaagctgaacacgatgatcaggtcactcgacaaacagatcacggtgcgaagccaattgatcgatgctccactcatggagcgcctacgcgcagtgaaagggatcggcccggtaacaatcgccagtttgttctgctacctgccagagttgggggatatgagtcgctctcaggtcgccgccttggtcggagtggctccctacaacaacgacagcggcgccaagcgcggcgtacgacggatttacggtggccgcagcaagcttcgccgagtcgtgtatatgtgcgtgctggccatggtacgccacaacgaggatttcaaaactcgctacgcgaatctgcgcgcaagaggtaaatgcgcaaaggtcgctctggtcgcctgcatgcgggtgttgatggtgcgcctgaatgccatggtgcgagacaacactccatggcgtgatcaaccaacctgaccattggtcaggtatggatgaaagacagttg

SEQ ID NO: 2700 - DNA, 1173 bp, unidentified
  source 1..1173: mol_type = unassigned DNA; note = element_3d58024
  misc_feature 1..2: note = core
  misc_feature 3..333: note = LE
  misc_feature 334..1167: note = CDS
  misc_feature 1168..1173: note = RE
  misc_feature 19..218: note = bridgeRNA
cttgtaatagcgaatccgaattatcgtgagcttgttccgaaaggaatgctctgccgcggatggccatccacggcagagcggctggcgatcggatcgaatccgccctgagcagtttgtggctgccccgtagcgtgatcatcgccagcaccttcatcggacccggatggttgccggaacaacttggttcgcttcacaaggcagggtcgacgaagatgacacagacttatcacaacgacggctggaatcgatacgtccaaagccaagcttgacatcgcggttcacggccggactgaacgctggcaggtcgagaacttacgacacggttggcgacgcttggcggcggaactttccaaggccggcgtgacgcgcgtcgggatcgaagcgacaggaggctatgaacgcggcgtggtcggacatctgcgtgcgaagggctttagcgtcgttgtcctgcagccgatccaggtcagagcctatgcccgcgtacatctgcgccgggctaagaacgatgccctcgatgcggttctcatcgctgcttgcgcggccacgatcaatcggccgagcatcgagcctgacgaacgcttggcgaagctcgcggactatctgaccttcgtcgagcaggtcgaagaggacatggtgcgtcttaagacccggctcgaacatatcgacgaacctcggctccgacgcatcgtcacggctgatattgcacgcctcaaggcacgacgtgcggccgagctgctccggatcgtcgaagaactgcgcattcatggcgatctcgcccgccgcctcgatctcgtgctgagcgttcccggcatcggcgagcgcaccgcgctcgcgctcatcatccgcatgcccgagctcggacgcatcagccgcgaggaagccgcagcactcgccgggctggcaccgttcgacgatgacagcggaacccataagggccacaagcacatcgccggcggtcgggggcgcctgcggcgctctctatacgccgcggcgctcccggccgcctttcgatggaacaaagctttgatcgacctccacgctcgcctcattgcgcgaggaaaagcccacaacgccgctcttgtcgcttgcgccagaaagctgttgatctacgccaataccgtcatcgcgcgcggaaccccatggatccaaaatcccgccgcgacttaatggttg

SEQ ID NO: 2701 - DNA, 1436 bp, unidentified
  source 1..1436: mol_type = unassigned DNA; note = element_3d59002
  misc_feature 1..2: note = core
  misc_feature 3..122: note = LE
  misc_feature 123..1154: note = CDS
  misc_feature 1155..1436: note = RE
  misc_feature 1190..1390: note = bridgeRNA
agatggggtaatcggccggcgctattgtggatgactgaagattttgggtgctgcgcttcaggctgatggtgaaacgaagtcaccgtggttacgggcttcaagcatcagaggagaagcgcagcatggagcattttgccggactggacgtgtcagtcaatgagacgagcgtctgcattgtggatggtacgggcaggattattcgcgaagccaaggtagcgagcgaacctgaggctttattggcggtactcaagggcgacgtctatcacttcaaacgcattggactggaagccgggccgctgtcgcaatggctttacagcgcgctcggcgaagcaaacctgccggtcgtttgtgtcgagaccaggcacatgcgggccgttctgaaggcacagatcaacaagaccgaccgcaacgatgcccgcggcatcgcgcagatgatgcgggcggggctttatcgtccggtgcatgtgaagacgttacgcaaccagaagctgcggatgctgctgacgcatcgcaagctgctgcagtcgaaggcgatcgcggtcgataatgacctgcgcggcaccttgcgcaacttcgggctcaaggtgggcctggtcggggcagccaggttcgagacgcgcatcaaggagctggtcgagaaccttcccgatatagccgcactggtcgaaccgctactgatcgtgcgcagagtgctgcgtgagcagatcgccgtgctgcatcgccgcttgctggtaatcgtcaaggacgatgaggtgtgccggcgtctgatgacaatccccggcgtcggcccggttgtcgcactgacctatcgcaccactatcgacgtgccggcacgcttccgcaactcgagagcggtcggcgcggtcttaggcctgacaccttgcaagtatcaatcaggcgagagcgactacaccggcgccatatcaaaatgcggcgacgagatgatgcgggtcatgctctacgaagcggcccagatcctgctgatgcgctcaacacgatggtcctggctcaaggcctgggcgatgcagatcgccagacgccgcggcctgaaaaaggcgatcgtggcactggcgcgccggctggccgtgatcatgcatcgcatctgggttgacggcaccgagttctgctggacccgggaggccgccgtggcatgagaaccgctctggatctaacctgacaggagaaaacgcgagctccaccgtgcggtggcatgatgtccctcgcgggacgatgaatgaggcgagatcgcatgtccgcttggacctgtcgtcagttgacggcaaggccgactaaaagattgttccgcctcgttctcgaaccccatgatggaagggccctggtgccgattccgaagagaagcgcgagcccgtgagcgacatcgacactgaagtggtggacagtccgaaagcgcttgacccaaaccggccgattagaga

SEQ ID NO: 2702 - DNA, 1331 bp, unidentified
  source 1..1331: mol_type = unassigned DNA; note = element_3d5c24a
  misc_feature 1: note = core
  misc_feature 2..303: note = LE
  misc_feature 304..1290: note = CDS
  misc_feature 1291..1331: note = RE
ctattatatttgcaaaaaaaataagagagacaagatctctttaattacataaacgtttgttaaatttgcaaggtgtaagaaaatgtataacaaaagaagaatactccatatccggcattaaccctttcccctacgagtcaacaagacttgaccccgctttgggcaccggatatttctgggttcaagctcgagagtaaatcaatgaagtctcatgactgactgaattcttagtatagttgtagccgcccagacaggagcactcttcttataaaaaattataatatgcaaatatacggaattgatttggcaaaagagaagtttgacgtgagttttttgcgtcagtcagcgaaaagtgcagttggggctcctgtccacaaggttgtcagcaacacggaaagttccatcaggaccttcctcaagagcgtccccgccggctcaatcctggtggcggaacacacaggggtatacggcgagaggcttctcaagatgtgtacggacatgaacgtcaagattgcatatgtgggcggtcacgtgatacatacctacaaggcaggaccagaccgcggcaagaccgacgagctggactgcagcctgctgcgcgagttcggcgagcgcttcaccgacaggctcaggcttgccacgttccctacggaagccatatacgagttgcaacagctgtcgcgccagcgcacgatgctcgtggaggaacgcaagcgcgtggcgacggccgacaaggcggaagaatgccgcccgtaccgcagcgagaccgtcaggcgcagcatgaggaacctcatggatatgctggacgaggagatcagggatattgagaaggccatgcttgacatcataggaaaggacgaaggcctttccaacagctacgacatcataacgagtgtgaacggcgtggggctggtcacagccgtggagctgattgtcaagacaaagaacttcacgacgatcaagacggcgaagcaatacgccgcatatgcggggacggcaccgtacgagaagtcctccgggaaaatgaaccggggtgcgcacatatcgaagtggggcaacaagaggtcgaagacgctgttgtacatatgtgctgaaagcgcaagaaggtacaacaaggaaataaagctctactatgaaaggaggacgatcgttgacaagaaggcccatcactatgtgctcaacgccatagccaacaagctgctgaaacttgtcttcacgctgatagcaaagaacgaaaaatatgacccctgctatatacagcacgacccgagaacctttaacaaaaaataactcgaaaaataacgagagaaacttgtttaattagagtaaag

SEQ ID NO: 2703 - DNA, 1185 bp, unidentified
  source 1..1185: mol_type = unassigned DNA; note = element_3d5cdec
  misc_feature 1..2: note = core
  misc_feature 3..216: note = LE
  misc_feature 217..1170: note = CDS
  misc_feature 1171..1185: note = RE
  misc_feature 3..193: note = bridgeRNA
cttgtatgtttaaggggctggggtggagagacgcgcttcgcgatcggccggaaacggaccgactgttttgagaaatctcccatccccgcctgcttaacgtcgataaggaactgagcgagggcagccaaagctgaccatcgccgatctcaacgcaagccaacgtgagcaagcggctacaccccagcgactttgattgtccaacaacaggagtcgctcatgcaacagcaaagtgtttttatcggcgtcgatgttgccaaggccgaactggtcatttcgatacacggccaagcgcagcatcaaagcattgccaacgatgccaccagcatcacgacctggcttgccagcctgacgccccaggctcacctcgccatggagtccaccggcaagtatcacgggctgctggcccatctggcccagcaagcgggtttgcacgtgtacgtgctcaatgcccgcgatgtctacttctatgccaaggccttgggtttccgtggcaagaccgataggttggactgccaggtcattgcccgctatctggctgagcaccacgccagcctgcacgaacacagctttggcagcaccttgcaaaggcgcctgcatgagcttttgtgccggcgtgcccaggtggctgttcaccagtctgctttgcgccaagtgttgcgcgatttgcctgaactcgatgcagccaagaagtccttgcaggagagcttcaaggcgttcttggaccaggtggacgagcagattgagcgcctgatcagcagtgatgcacagctagagcaaggctgcgcgcggctgcgcacggtcacaggcattggcccacaggcggcagcattgctgggcgccttgttctcaaggatcaactttaccaactccgacgccctggtggcctacagcggccttgatccacgaccacaggactcgggcaccaaacggggcaggcggcggctgtcaaagcgggggccagctctgttgcgccgccagatatggttggtgggctttgccgccagtcatagcacggcattgaagccgctgtaccaatccctgcgcgccaagggcctgagcactaccgccgctatcgtcgtcttggcccgcaagctgttgcgggtggcgtacgcagtctggcgagggagtaaacccttcgatgtcgctctgcttggaccggcaaaggcttgacaaaaaacatagaac

SEQ ID NO: 2704 - DNA, 1499 bp, unidentified
  source 1..1499: mol_type = unassigned DNA; note = element_3d64fec
  misc_feature 1..2: note = core
  misc_feature 3..239: note = LE
  misc_feature 240..1478: note = CDS
  misc_feature 1479..1499: note = RE
  misc_feature 6..232: note = bridgeRNA
ctaatggctttcccgttgctgcttcggcagtctcgggtctggtagcggccggcgggtcagcacttaccggatcggcccgttgaggtctatcggcagaccgtgcgcccgctggtcgtgaggaggcgaaaccgctactgggatgtcgtgcccccaccgtggtgagcactcgaccattagatcgccggctgtctcctccatgctgctgaccagaacccggtcgaagcgggaaggagaggcaaatgttgttcgtcggggatgactgggccgaagaccaccacgacgtcgaggtcgtcgacgaccagggcagcgtgctggcccgccgacgactgcccgaaggtttcgatggcatcgcggccctgcacgcactgatcgccacccacctgcccgaggagtgggctgacctggagcccggacgggcccaagccctggtcaaggtcggcatcgagaccgaccgcggcccgtgggtcgcagccctggtcgcggccggctacgaggtcttcgcgatcaacccgctgtcggtggcccgctaccgcgagcgccattccacttcgggcgcgaagtccgatgccgcggacgcgcacctgctggccgagatcgtccggctcgaccggcaccaccaccggccggtggcaggtgactccgaggacgccgaggcgatcaagctggtggcccgcacccatcagagtctcatctgggaccgcacccgccacctgctccggatgcgcgcggcgctgcgggacttcttccccgcggccctcgaggcgttccccgacctggacgcccccgacgtgctcgagctgttggccaaggcagccgacccgacccgggccgcccggctgactcgcgggcagatcgccggagcactcagacgcgcgcaccggcgcgacgtcgaggccaaggccgaccggatccatcagattctgcacgccgagcagctgcaccgctcggccaccgtggagtccgcctacgcagcgatcgtgaccggacaggtcgcgatcctgcagacactcaacgcgcagatcaccgagctgggggcggtggtggccgaccattttggccggcacccggacgctgagatctacgccagccaacccgggctcggcgtcgtcctcggcgcccgggtcctcggcgagttcggcgatgacccggaccgctacgccgactccaaagcgcggaagaactacgccggcacctccccgatcaccaaggcatccggcaaccggaaggtcgtgctggcccgctacgcccggaaccgacggctcgccgacgccctgcagcaatgggcactcggcgcgatgcgaggctcacctggggcacgcgcctattacctggcactccgcgaccgcggcatcaaccatcacgctgccctgcgccaacttgccaaccgactcgtcggcatcctccacggctgcctcaagacccgaaccagctacaacgagcacaccgcctgggaccaccacatccacaccgctgcttgacacccacagaacctgggatgt

SEQ ID NO: 2705 - DNA, 1531 bp, unidentified
  source 1..1531: mol_type = unassigned DNA; note = element_3d68b05
  misc_feature 1..2: note = core
  misc_feature 3..130: note = LE
  misc_feature 131..1252: note = CDS
  misc_feature 1253..1531: note = RE
  misc_feature 1258..1500: note = bridgeRNA
agacactatgacccaatccaggggcacggaaacgacaggagcccccgctcgtgaccgcgggtcgggactgcgacaatgttgttgaagtgccagaggcgcagccgcgccgcaacgaggttgggaggctcccgtgcctagatattctaccgccttcggaatggacgtacacctcaggtccaccaccgtctgcgcgctcgacgcggagacgggcgaggccgtggcgaggaggttccgcggcaacccgtggggcgagatcgcggagtggatgtcgggcttcccgggcccgtcgctcgccgcctacgagagcggctacctcggcttcgccccgcagagggagctctccgggctcggcgtcgactgcgttgtcgcggccgtctccaaggtcccgaggtcggcggccgacctctcgtccaagaacgaccgcaacgacgcggccaggatggccaaggcgatactgtcgcacgacgtcaccccggtatgggtgccgtcccccgagatcgaggggctcagggacctcgccgccgcccacgacgcggcgaccgccaggctcgcggcggcgaagcagcggctcctggcgttcctggcccgccgtggctacgcctacggcggcacgacgccggccggaaacccccggaggtactggacgtacgacttcctcaggtggctcgacaaggtccggcccgccgacgacggcggcatccgggcgcttgcggcgctgaggaacgaggtcgaggcggccgccgagacgcgcgacgacctcctcgccgagtacagggccgccgtcgcggcgggccccctctcggcggaggtcgaggcgctccagtcgatcaaggggtgcgggttcgcgctcgccgccgccttcgcgtccgaggtcggcgacttctcgaggttccgctccggcaggcaggtgacgtcctacttcggcctcgccccgaagcagaggtcgagcgcggactccgtgcgcctcggcgggatcagcggggccggcgacgccctcgtcaggaggctggctgtcgaggggtcctggagctacgtccaagcgagccaccaaccgaagctgatgcccaagggcagcggcgtcccgctcgaggtaaggatgcacgggaggaagggttccgagcgcctgctccggcgccgcgaggagatgctcgccaggggcatgccccaggcgaaggcgaacgccgccaccgccgccgagctcgtgaggtggctgtgggccctcggcgcgatgtgccgggaggcaaccgaatagacatagcccccgtcccggcgagccgggcagccttcggggatacccccgctttcgctgggcgcgcggcggcggccgcatgcgcgtagtcagacttggggagccccgccgaaggagaggattgcgggccgccggagcggtatccgcggatatgagactgagccgaaggcgtcgacgacatgccgggggcggaccgggacgggttcaacggcagcccccgccgaccgattgcaagcggtcggcggggccattgtggctcttgacagcggattgggtcatatg

SEQ ID NO: 2706 - DNA, 1392 bp, unidentified
  source 1..1392: mol_type = unassigned DNA; note = element_3d6dab1
  misc_feature 1: note = core
  misc_feature 2..91: note = LE
  misc_feature 92..1123: note = CDS
  misc_feature 1124..1392: note = RE
  misc_feature 1159..1384: note = bridgeRNA
caatgggatggactcctcctcacctatcggcatcgatgtgccaaactggttattgcaccaccagttaacggtgtcaacggaggagtccactatgaagattagtcgagtaggtgttgatttggcaaaaaatgttttccaacttcacggagccgatgctcacggcaaggcagtctggaagcgtaagctttcacggcagaaatggatcgcagcgctgtgtaaaacagtgcccgccgattgtgaagtgggcatggaggcttgtgcaggagcccatcactgggcccgggtacttactaagtatggctaccaggtgaagttgatacccccacaattcgtcaagccctacgtcaagagtaataaaaatgacgcgaatgacgcggaggcgatctgcgaggcgatgagccgtccgaatatgcgattcgtcaaaatgaaatccgtcgagcaacaggatatccaggcgattcatcgtgtgcgcagtgagctaatgagtcaccgtacggccaaaattaaccagattcgtggccttgtggccgaatacggattagttgcttccctgcaagtgtcgtctttgcgtacagcattaccactttggttagaagatgccgataatggccttacggaccggtttagatctttgctgaacggtctttggggtgacctacttcacttggacaaccgtattgccgaactgaacggagaaatcgaagtgatcgcgaaaagtgatccagtggcgaagcgcctccagcaactcaggggagtgggtccgctagtggctacggcattaattgcaacagtagggaatggagatcaatttagcaaaggacgccagatggctgcctctattggattgacgccacggcaatgtagttcgggcgggaaagaacgattgcttggtatcagtaaacgaggtgatgcatacctgcgcaccattttgattcatggagcaaggtcgacaattgcccatgccaagctcaaagatgaccgactgagtgtctggattactgatctggcaaagagacgacacccaaacattgcggcagtggcgctggcaaacaaaactgtgcgcatggcttgggcgatgatgcgcagtgagtcggattatgaccctgagatagccgccgcctaaccggttgcggtggattgaagagaaagaagaggaaccttacccacgattgcgaagcaagctgaatgatggtgaacaggtcgaaccgacactggaagaacccgtgagcatccgcgtgcctggagcacgatgagtcgattgggatccggtgtgcgaatagcccattatggcccggcatcaaagtatgccaactatagaggccggatatacgtgtgcagtcgaacccactcatcgccaaacagtctgcttgcaaacgaggaggagtccatata

SEQ ID NO: 2707 - DNA, 1612 bp, unidentified
  source 1..1612: mol_type = unassigned DNA; note = element_3d73f21
  misc_feature 1..3: note = core
  misc_feature 4..248: note = LE
  misc_feature 249..1487: note = CDS
  misc_feature 1488..1612: note = RE
  misc_feature 8..222: note = bridgeRNA
gttcgtattataaggtcagccagataactggttgactattttttattcaatttatagattgatagtagccggggtagaacggaagcactcgtgggacttgatcccgacaactaaacagttcaccctctacttgttaacacatgattaggctggttgggacatgatgatcccgcataacaagcgaagatatgaataacaagctagatagaggttaccggtcaatacactttatgaggaggagataaaatatgaatccagtagtcggtctggatgtcgcaaaaggtgaaagtcaggttcaaatgttcttggataaaaaaatgccctataaaaacagtgtgaagattcaacatacggtggaaggtcttgaagagttacacgcttatttactagatttagagcgcaaaacagggttaaaaccacctgttgttttggaatcaacaggtcactatcatgccccagttgtacagtttttagaggcacaagagtacattgtcataatcgtaaatccactggtatcttatcgagcaaaaagctctaacttacgaaaaactaaaactgatgccattgatgcctatcacttaggtgaactatattacaaagaggatttagagcctcagaaaaagcgtggtattcagctattaaaccttcgacatctcacaagacaacacgaaaatatgacgggaattatggttcaaacaaagctacaatttcaagccatattagatcaagtattcccggagtataaaggagtttatggtgatttatacgctgagatttcattaaggactttacagtcctttcctacatctgaatcagtactaaaagcaggtgtagaagagattgcacaatttattgataagcattgtaaagcacgttcatttaattgggcgtatgaaagagctgaggacttaatcgcagcggcggaacgcaacccatttcagtcaacgctttatcagagccttctcgttagtctgaatatgtatattgatttacttcaagcgtaccgccaacaactttccacgttagagcgtgagatggatcaattggcggcacaactcgaagaatatgaattaatccagtcacttcccggtataggtgaaaaaatcgcggccacgattctttcagaaatcgggaaaattgagcggtttaatcatccgaaaaagttagtagcctttgcgggtctagacccaagtgtgtttgaatcaggtcgctttaaaggcacgaaaaatcacattaccaaacgcggttcagctaggcttcgccacacgctttacacagctgttcgctgttcaatccgagatagccgtaaaaagaaaacaacagatgaaaccattgcacgaaataaacgattacgatccttctacgatttaaaacgcgatgaaggtaagccgtataaggtagccgttatagcttgtgctaataagctcttacactggatttatgcgattttaaaaacgaaaacaccattccaagaaactattaaataacataattttcaaatatatcaaaaaccttccgaattaaatttggagggttatttgtgttgtgcatttttagtataacatgaagtgtttttcgatttaaaatgtttttcttgacattctattagctg

SEQ ID NO: 2708 - DNA, 1455 bp, unidentified
  source 1..1455: mol_type = unassigned DNA; note = element_3d760d4
  misc_feature 1..2: note = core
  misc_feature 3..46: note = LE
  misc_feature 47..1204: note = CDS
  misc_feature 1205..1455: note = RE
  misc_feature 1212..1453: note = bridgeRNA
agatgacatggacgccgccctcttctaactgaggagggacagcgcaatgagtaaggtggtgaagcaaggggaccccctggaacccaaacggcatcactgtgccaaagtggaggtgtctagcaaccactcgagggacaggggatccgccatgaacattacgacttacggtttggacttggcaaaacgagttttccaggtgcattgggttgagccggagacgggcgaggtgaagcgtaaggtgctccgtcgggccgaggtcgcagcgtttttcgcccgccgggcacccggtgtggtcgccatggagtcctgcggatccgcgcatcactggggccgcctgctgagcggattgggtcatcaggtacgcttgattgcggcgcagttcgtcaggccgttcgtaaagaccaacaagaccgacgcagccgatgccgaagcgatctgggaggcggcgcagcggcccgggatgcgcttcgtcgcactgaagagcgaggagcagcaggctgtgctgtcgttgcaccgcatgcgggcgcagctggtgaagatccgaacgatgcaggccttccaggtgcgcagtctgctctacgagtttggcgtggtggggccgaagggttttcgagccctcaaggtggagatcggcgccgtgctggcagaccctgctggctgtccagtgcctgagctggtgcgcgtcgagctgttgagtcaacttcagaacttgagcagcttgagcgaacgcattgacgaactcgaacgtcggattgggggatggcaacgccgggaggtcgagtgcgagcggctcgccaagatacctggcgtgggccgattgacggccacggcggtggtggcgacagttgccgatgcgcgcagctttcgctcggggcgcgagtttgcagcctttctgggtctggtcccacggcagtcgggtactggcggtcgagtgaagctgctcggcatcagcaaacgcggtgatccctatctgcgaacgctgctgattcacggagctcgcagcgtgttgcagatgcagaatcgagtcggccgaataatggacccgtggctccgagacgtactctcgcgacgaccgaagaacgtcgcgatcgtggcactggccaacaaaatggcgcgcacgatttgggctctgatggcccacggtcgaagcttcgatcgcaactgggttactcgcacggcaatggtcgctgcgacaacgtattaactcttcggaggaacaagccaaaagagttgagcaggtggcatcacatgatggcagaacaggtcggaccgtgaggggattaacctgcatgatgtcttggaccccgagtccttgcactagttgaggctcccttcagcggatttcatcggggccacgcagaacaacgctctgcagatgtaggccgtatataagactgcagccgcacttctatgccgaactaacatgtcacttgcccaccgggcggcgtccatata

SEQ ID NO: 2709 - DNA, 1583 bp, unidentified
  source 1..1583: mol_type = unassigned DNA; note = element_3d7fa6e
  misc_feature 1..2: note = core
  misc_feature 3..284: note = LE
  misc_feature 285..1478: note = CDS
  misc_feature 1479..1583: note = RE
  misc_feature 13..261: note = bridgeRNA
ctcgtatgattaagttaggttttttaggaataggattcacctataaacccaagagtatccagctttatgagatacttatatttgtagatagagtgttgccgatcaccaccttgaatccttgtattcgattgaaagattggtacctctgtctaataagtagtttacgaatgagttggatgttgatgaccattggtcattcttcgtatctcttacgaggtagtagcgcttattagttcaggggaggataacactatctaaaaatcatcaaaatatgggtgtatactatgttctacttaggtattgatattgccaaacacaagcactatgcttccatcattgattccactgggaaacctattaccaagccatttcctttccacaatcataaagaaggtggacaagctttattaacttggctttaccgatatattagttctccgacagaactgtcaatcgggatggaggccaccggtcactattggatagctgtctattcttttctactagatcatggtttttctgtgattgtactgaacccactccaaaccaatgcatggcgaaagggaacagaaattagaaagagaaaaacagatgccattgacgccactatgattgccgatgtcatacgatttggccgcttccttgaaactccactcgtagacgagaaaatgttcgctttaaaacaactaagccggtttcgtaattctcttgtacgtaatataagtgatttaaaacgcaaggcgcttgtcgtgttagatcaaacctttccagaatatcaaagtattttctctaatgtctttggcaaaacgtcttcacagctcctaattgactatacatctcctagcgattatgaaaaactgtctattgatgatttgacactaataattgagcaagcaagtcgttgccgacttggaaaaaaaacagccaatcaactgatggaattagcctcaaactcatttggtgtcaccttttgtaaagatgctttctcatttcaattaaaaatgttgatggagcaaatccgctttattgaaactcagttgagagaatgtgagaatcaaatgtctcaactattaagtgacttagatacaccaatcactactattccgggtattggtcctatattaggtgccaccatattaagtgagattggggatataggccgctttgacaagccttctaaacttgtggcttatgccggtattgatgccactatttctcaatcaggtcaatacgaatcaactggtatgtctatgtccaaacgtggctcctcccatctacgtagagcattatttcaagcggctattactgcttataaacatgaccctgtattaaaagctttttatgaaaagaaacgaaatcaaggaaaacactattatgtttgtataggagctgtagctaggaagttgtgttatattgtctatgccattctaaagagtaataaaccctataaaatccctccattcccatgccagagataacttatttattttttgagacttcgcaaggtttatttaagttacccttttttagggtaaacactcttcatttatattgtattccacgcttgacatttcatagttggt

SEQ ID NO: 2710 - DNA, 1527 bp, unidentified
  source 1..1527: mol_type = unassigned DNA; note = element_3d8d715
  misc_feature 1..2: note = core
  misc_feature 3..253: note = LE
  misc_feature 254..1444: note = CDS
  misc_feature 1445..1527: note = RE
  misc_feature 26..273: note = bridgeRNA
ctggtaccatataaatgtaataattaattcaatatgaattgactattacactcttttaaattattatgtaaagtataattggtcaacgtgcatattccttgaactttgcgttcgtgagcaaggacagttgaccatcctttacataatacattcgattaagcaagttgaaatactaatgtactttcgtgtcaaaagccaggatgaaaatatgtaaaagagatggaaccaattattattaagaaggaggtaaaatatgtatgcagtaggaattgatatttcaaaaggaaaaagtacaatttctataataactttaaatggtgaagttattgaagaaccatttgaaattacacatgatcaggaaggtttcaacattctattatcaaaaatcaaaaattatagaaaggatgaaattaaatttgtaatggaagctacaggacattatcatttaccgttgttaaattcattaatagaaaatgattattttgtatgtgttgagaatgcattggtcattaaaaaatattgcgatatagatttaagaaaagttaaaaatgataaaaaagactcattaaaattggctttatattgttgcgaaaaatggtttaaattaaaacaatataaaataaaagatgatctaagacaacaattacaatttttatcaagaagatatgttgaatatataaaaatacaaactgatttaaaaatacaattaaccaatcttatagaccaaactttaccaggtattaaggaaatagttgactcagaaaatcgatatcaactattattagacatatatgaaaaatactctcatccaacactaattatagaaaaaaataaaatagattttattaatgatatagatttaatggcaaaaaaatacggacatagagttggtagaattattggagaaaatttgtatattaaagctccaacaattaaaacttcatgtccgcataatgattcattacaactatcaattaatagttgtatattacttttaaaatccacattaaaagtaactaatgatattataacaaaaatggatgaacttgcaagtcaattggaagaatttaaagttgtaagtaatatgaaaggcgttggattaaagactagatcaaggttaatcgcagaaatcggtgatgttagaaaatataaaaacgccaatgcattaatagctagttgtggtatagatacaccaccatatcaatccggtacatttaatgccacaaacagacatataacaaaacgtggaaataaatatttaagaaaagttgggtatgaaattgttaaaagtattaaaactaataaacctcaaatagataatgcagtatacttattcattataaaaaaagagaatgaaggaaaacctaaaaaagtagctaaaattgcaggtttaaataaatttttaagaatatattatgcgagagtaatggaattatataagtaatttatatttggggggtaagggggcattttgcctttttttatttatttgattattaaaaagagacttgacatatgttagcaagt

SEQ ID NO: 2711 - DNA, 1496 bp, unidentified
  source 1..1496: mol_type = unassigned DNA; note = element_3d93709
  misc_feature 1..2: note = core
  misc_feature 3..205: note = LE
  misc_feature 206..1420: note = CDS
  misc_feature 1421..1496: note = RE
  misc_feature 22..208: note = bridgeRNA
ctgatggcactaccttctttcgtcatcgggaactcccggggaacgcttccggcgcttgtcctttgaggactgatatgagacggcgtccccgggagtgaccggcggaggccggaagccatcgagggtgttgtcccgttgaggactggtccatcagcacggcgcagtgcctccaccgtccgtgaccgcgaacctgaagggggcaggtgtgcttggtgtgggggtggactgggccgaggcgttccacgacgtggcgctcggcaggcccagtgagggtgtcattgcccagttccggatcgaccacagcccggcgggggtggcccggctggtggcccggtgtttggagctggagcccgatccggctgaggtgcgggtggtgctggagacccggcatggcctgctggtcgaggcgctggccgatgcggggttctctgtgctgccggtgaacccggacctggtggcccgccgccgcggcccggcgaagaagaaagacgacgccgaagacgcccggatctgctgcttgatggccttggattcctacctggagctgcgcaagctgatcccgcacggccagatcggcgctgagctgcgcgcgatagcccgcgacgacgagcgggccgcccgcgacgagcggcggatcggtaaccggctgcgcgctgacttgctggccgtcttccccgccgccatcgacatcgccgatggcgacctgggcgcggcggtcttcctcaaactgctgcagcgctggccgtccgcccaggcgcttgcccaggctccccgccaggaactggagaacttcgcccgccaggcccgccacggctggcccggcaagttcgcggacaaggtcatcgccgcgctcgctgagccccggctggcggtacggcccgagctggcgcgcgccaaggccgggaccatcgccctggccgccggccagctgctgctgctgcgcgaccagcgcagagcctgggaacggcggatgggcgagctgctgctcggcgcgccccgcaccggccgggacaagaccccgaaggacccagacccggggaaggcgttcccgggcggcgagatctacctgagcatgcctggcctgggtgatcgtctcgccgcccggatcgccggcgagatcggcgagcacttcgagcagttcaacacgccgaacgccctgcaatgctacggcgggcaagcgcccgtcacccggcgatcgggccgcagcgagttcaccatcgcccgccgcctggcctataaccggcatctcggcacagccgtcagccaatgggccttctgcagcctccagcaatccgcctgggcccgtgagttctacgacgccaagatcgccgccggcgacaaccaccactccgccctgcgcaagctcggcaaccgctggctcgaagtcctgtggcactgcctcgacaaaggcgtcctttaggacgaagccatccacaccgccaaccggcagaaggcacgcaccctcaaacctgccgcatgaggttgacagagggtgt

SEQ ID NO: 2712 - DNA, 1721 bp, unidentified
  source 1..1721: mol_type = unassigned DNA; note = element_3d94e14
  misc_feature 1..2: note = core
  misc_feature 3..351: note = LE
  misc_feature 352..1584: note = CDS
  misc_feature 1585..1721: note = RE
  misc_feature 46..319: note = bridgeRNA
ctcgtattctataaatatatccttacggattttgttacattacaacttgttttctggtcaccgcatgataacctctaattatcattggctttggtcagctggtataggttattttctcctgtagttttaactacttaaaaagtctgccgcccagacaatcaactgattttcgaactcacatgctgtatcgattagaaagtttgctaattcagagtaggattaggtgcagctttgactctctaaccaatgaatactgatacttgcgaggatgtttttagtgattgtaattaagggctatcatgcagtgatcagattaagaccagtaaattttaatgaaaggaggccattccaatgaaactttttgtcggtattgacgttagctcaaaagatttagtcacttcaatgatttctgaagaaacatgtgatgttgtttttcaaggtaactttgttaatgatttgaaaggcgcaaccgaattaaaagccattattattaacacggcgaattcaaatcatctcgaccaagttgtgattggcatggaagctacttccatttacagttttcaccccgcaatgttttttcaagaagacgctgacctcaaaaaacttaatacgcaatcagtagtcatcgatcccaagaaaactaagcggtatcatgatgtcttcgctgaagataaaaatgaccaaattgatgctttttatattgcggacttcttacgtgttggacgttattcaacagggattgttcgccaagaaaactatattgccctgcaacgattaacgcgttcccggtatgagcttgttcaaagcttagttcgcgccaagcaacactttattgagaatttatattataagctcaataaactagtgatttctgatgaacttaatacctcagtctttggttcgacgatgatgagtctgttaaccgaagatatgaccactgatgacttacttaacatttcaattaatgatttagctgattacctgaatgaacacggtcggggtcgcttcgcgaaccctgaagccttggcaaaaacgattcaaaaagcagttcgcacttcttatcgtttagacaaggtaattgctaattcggttgatactgttctctcagtttatgccgaggaaattaaagcttttcagaaaatgattaaagacctcgacaaggcaattgaagaagtaacgaaagtcatcggtaaggaggaagaagttctgcgttcaattcccggaattggaccagtatacgctgctggtatcttagccgaaattggtcaaattgaccgatttgataatgaagctaagctagctaagtacgctgggctttcctggcgagaaaagcagtccggaggttacgctagtgacaacactccactcaaaagaactggcaatgcttatcttagatactatctggttgaagctgccaaccgcgttagaattcaggatccagttttgggcgagtattatcagcgtaaatataaagaagtgaagcatacaccatcaaaacgcgccctcgttcttaccgcacgtaaacttatcagggtgattttcttcctactcaaaaatcatcaaatctatcaggagaagaggtaattggtataggaagataacttgattctcgacgcttaatttttaaaacaccttggtatcaaggcttatttaagtgcgtcaaaaatctggtcaaaacaagttcgtcagtgataatttcatcttgacttattaccacatga

SEQ ID NO: 2713 - DNA, 1211 bp, unidentified
  source 1..1211: mol_type = unassigned DNA; note = element_3da1f90
  misc_feature 1..2: note = core
  misc_feature 3..212: note = LE
  misc_feature 213..1196: note = CDS
  misc_feature 1197..1211: note = RE
  misc_feature 10..191: note = bridgeRNA
cttgtatctttaatcatgatggcaagctaccatcattcaagaaagaatgagcttgatatgttaccaaggtctttagaacttcttaaaaagattaagccttctttcttggctctttagccagctcaaacactgaacggtagcgtagggctttgaccctgaatttacaaggcaagtgggctaagttggcattttatctgaatggagaaatagttatgttttttatcggtattgatgtttccaaatcgaaattagattgctgtttgcttgttgactctaatcacaaacgtaaaacaaaagtagtgataaactctaaaaaaggcattgctgatttattagtttggacagctaagcagcatatctcaaacgaacaactgcacgccatattggaaggaacgggtgtgtatcatgaacaaattgcgcaagcattgtatgattcaggtgctcgtatttctattgtcaatccagctcaaatacgtcattttgctttcgggttagccattcgcaataaaacagatgacatggatagttttgttctagctcgttatggtgcattaattcaacccaaattatggacacccccaagtcaggaagcacaaatattaaaagccctacttaaacgtagagaggctattgtgagagaccttttgcgagaaaataataggctggaaaaagccgatgcaacccacacgccagaagtcattcgccaatcaattacggacggaattacttttctaaagtctcagcttacaaaaattaataacgatattgacgagcatattaataagtacccccactttaaagaagatttaaagcttctcactagtattccttctgttggcccacaagttggcaatcaattgctcgctatcatccataatcatcattttgattctgctgaaaaattagcagcctatcttggcttagtacctgttcagcgtcaatctggaacatctgtatttggtcgaagttgtatttctaaaaacggtccatcaagcatacgagccattctctatatggctgcaatgacagccattcgattcaatccacatattaaaacaatgtatttacgaatcatttcacaaggtaagtccaaacgttcggctttatgtgctgcaatgagaaaactcgttcatttatgttttggagttattaaaacacgtaagccttatcaatcagattatccaatttctgcttgatctttaacacggtat

SEQ ID NO: 2714 - DNA, 1374 bp, unidentified
  source 1..1374: mol_type = unassigned DNA; note = element_3dad120
  misc_feature 1..3: note = core
  misc_feature 4..87: note = LE
  misc_feature 88..1110: note = CDS
  misc_feature 1111..1374: note = RE
  misc_feature 1109..1361: note = bridgeRNA
tgatggggtggacggcccctgtgtccggcgtcgatgcgccatagggtggtcgttgttgaagcaaccgccacagcaggagccgtccacatgaagactatcacgattgggattgatctcgccaagtccgttttccaggttcacggcgttgatgctgttggcgcggtcaccatcaggaagaagctgcgccgcgccgaagtgctgaagttcttcgcgtcgcttggaccctgcctggttggcatggaagcgtgcgcgacggcgcacttctgggcgcgggagttgtcgaggctgggtcacgaagtccggttgatgccgccgagctatgtgaaggcctatctccgccgacagaagaacgatgccgctgacgctgaggcgatctgcgaggctgtaacgcggcccagcatgcgcttcgtgccagtgaagagcgccgaccagcaaagcgtcctggtgctacatcgaacgcgcgatctgctggtgcgccagcgcaccatgttgatcaacgctatccgggggcattgtgcagagttcggcatgatcgctccacaaggcgcccgtcgagctgcggagctcattgagcagatccgtgaggcagaagcgtcagcccttccagatctggcccgctctaccctgctgatgctggccgctcaactcgatgcactcgccatgcagatacacaacctcgagcgtcagctcatgatctggcatcgccaggatgagactagccagcgcctggcgactatccccggcgtcgggattatcacggcgactgcgctcgccgcatccgtgaccgatccgagcctgttccggtccggccgcgagttcgccgccttcctggggctcgttccgcggcagaactcctccggcggcaaggatcgcctcggtcgcatctcaaagatgggtgacggctatctcaggaagttgctcgtggtcggcgcgacatcggtgatccgccgagcggctgacaacgcctcgggcaccggcgtctgggtgagatctctgatggagcgcaagccgagccgggtcgtcaccgtcgccatggccaacaagaccgcccgcatcgcctgggccgtgctcgcccgcggcgaggtctatcgcgcgccagcggtaatctgaccgagattgcagcggcgacagctgctgctccaacctgcgagggtgcaaatgagctgatgaggatcgagaagcggaccgcagaggaagacaacccgtggtgctgtcggagcatgaagctcgatggtctgagagggacttctccagcggactccatcagggccagcggccatcgacgccgcgcaaacaggccggacagatgaccgcacccgacagatcttcagctcggctcaactttccccttgcagctcaggggccgtccacaga

SEQ ID NO: 2715 - DNA, 1531 bp, unidentified
  source 1..1531: mol_type = unassigned DNA; note = element_3db2479
  misc_feature 1..2: note = core
  misc_feature 3..281: note = LE
  misc_feature 282..1511: note = CDS
  misc_feature 1512..1531: note = RE
  misc_feature 16..255: note = bridgeRNA
ctaatgggagctaccgggtctggtcgaggtttgagttgggcagactttggttgtggtggctgctactgggtgagcactccttgctactggactgttcatgagttctgggtcgagaccgtgcccctggtggtaggccgagagggtgtgatcgctgctgggatgttgtgccgactcgttggttggggtgtgagcactgagccattagttcgcgagtaaccctccggccggctgctgctttggaacgatcgagatcgagcgtcggaagctgataggaggcgaaagtggcagtgttgttcgtcggggacgattgggccgaagatcaccacgatgtcgaggtgcaagacgaggacgggcggattctgcgtcgtgcccggctgccggaggggattgctgggatcgcgaagttcggtgagatcgcggccacgttcctcgacgatggagaccagcccgaacaggtgctggtgtgcatcgaggtcgatcgcggcccgtgggtcaacgcgttgatcgctgccgggtaccgggtgttcggagtggacccgaagcaggcgcaccggtatcgggagatcctggccagttcgggcgccaagagcgacaagggcgatgcgcatgcgctggccgagatgatgcggacccgccgccaccagctgcgtgagagcggtggggactccgagatcgctgatgcggtcaaggtggtggcccgggcgcatcaaacgatgatctgggaacggacccgccacctgctgcggttgcgtgcggcgttacgcgagtacttcccggcgatcctgctggtgtgctcggcgttggacctggacttgtccagccgcccgatcctgggattgctggccaaggcgccgaccccggcgcgggcggcgaaactcaccaagagtcagatcatgcccctgctcaagggacgccgcaacaaagaggccaaagccattgagatccaacagatcctacgcgaacaacacctcggccaacccgaccgggtgaccgacgcctacgcggcctcggtgcgcgcttcggtggcggtgctggacgtggtgatcgagcagatcgccgagctcgccaaggaggtcgatgcccatttttcccagcacccggaccatgagatctacctcagtcagcccggcatggggccgaccctgggcccccgggtgctcgccgagttcggagacgatccacaccggttccgccacagcaaggcccgcaaaaactatgccggcaccagtcccatcacgatccagtcgggcaagtcgcggatcgtctcggcgcgcttcgtgcacaacgacagactcgtcgacgcgttgatggcgcaggcccacgcagcgttcatgcacgacgagggtgcccgtgcctactaccgcagacagcgagcacgagaagtcgaacacaacgccgcgctacggcaagtcgccaaccgcctcgtcggcatcctccacggctgcctggcacgcgggatcccctacgaccctgacaccgcctggaaagaccagacacccgccgcggcttgacaaacaaccttcagggatgt

SEQ ID NO: 2716 - DNA, 1357 bp, unidentified
  source 1..1357: mol_type = unassigned DNA; note = element_3db4bb6
  misc_feature 1..2: note = core
  misc_feature 3..72: note = LE
  misc_feature 73..873: note = CDS
  misc_feature 874..1357: note = RE
  misc_feature 1124..1356: note = bridgeRNA
ataatgatatggtcacccccaccttaacagcagtacgctgttaaggtaaatccctttaacggagagaccatcatgcagaacatcacacttattggtatcgatctcggaaagcactccttccacattcattgtcaagacaagtctggtaaggctcttctgcgtaaaaaatttacccgtactaaactgatgcagtttctggcgacatgtccgccctcagttgttgtaatggaagcctgtgcgggtgcacactttatggctcgctgtatctctgattttgggcatgaaactaagctgatttctccacagttcgttcgcccgtttgtcaaaagtaataagaatgattttgttgatgcagaagccatatgcgaagcggcttcacgaccatcaatgcgttttgtccagccaagaactgagacccagcaggccatgagggcgttacaccgggtcagagaatcgctcatcagagataaggtgaaaacaaccaaccagatccacggtttcttgctggaatttggaatcagcctgccgataggtgatgctgtaataaaacggttgtctctcgtgttggctgaacacgaaatccccgaatatctgagccgccttttggtgaggttgcatacccactacttttaccttgttgagcaaatagcagagctggaatcagaattaagtcagtcaatcaacgctgatgataccgctcagcgcattatgacaattcctggtgttggtccgattactgccagcttactatcgtcgcaacttggtgacgggaaacagttctcatgcagcagggattttgcagcttccacaggacttgttccccggcagtatagcactggaggaaaatcgactctgttgggtatcagtaagtgaggtgataaaaatttacgccggttactggttcagtgtgcccgctcattcataatgcgacttgaacgcaagcatggaaaacttgctgagtgggttcgggagcaactcaacaagaagcattcgaatgtggttacctgcgctctggcaaataaactggctcgaattgcctgggcaatcactactcagaaaaaagaatatcaggcctgatatagatgctgatataactcaattagtttattttaaacaataagatacaagttacctttctggttttgcgaagactgattattgatgacatgaacggcaaatcgacctgattaaaaacctaacagatgaaatggctcactgaagccgaggggatttttaggattatcaggtgcggaactcatcggggcgcgggcatccttgcccacagagacgccggatagatttaagcaagccaaccattaatcaaaaatcagtgttgcaaaaacgggggtgaccatag

SEQ ID NO: 2717 - DNA, 1380 bp, unidentified
  source 1..1380: mol_type = unassigned DNA; note = element_3db55d3
  misc_feature 1..2: note = core
  misc_feature 3..80: note = LE
  misc_feature 81..1112: note = CDS
  misc_feature 1113..1380: note = RE
  misc_feature 1152..1366: note = bridgeRNA
gatggggtcgatggctcccgctcccggcgttgcagcgccaaagtggtgctgtcacgcctcacaagcttggagccatcgctatgaagatcacgaccgttggcctcgacctggccaagaatgtctttcaagttcacgcgatcgccagcacgggcgaagtggttgtccggcggtcgctcagacgcgctcaggtgatcccgttctttaccaaactcccgccgtgcctgatcggcatggaggcctgcggcacgagccatcactgggcgcgggagctggttgccctcgggcacgaggttcggctgatgccgccggcttacgtcaagccctatgtgaagcggggcaagtccgacgccggagacgcggaggcgatctgtgaggcggtcactcgcccgacgatgcgcttcgtcccgatcaagtcagtcgaacagcaggctgcgctcgctctccatcggacgcgcgatctcctcgtccgccagcgcacgcagctcgtcaacatgatccgcggccttctggccgagttcggcatcgacatcccaaggggcatcacgcacgccctggcgttcgttcggcgtgcggtggccggtgacgcgcacgaggtcccagatctcgccgccaaggtgatcggcgccttggccggacaggcgattgaggtccagggccgcatccggcagctcgaacgagacctcctggcctggtaccgctcgaatgacctcgcccgacgcatcgcgaccgtgcctggcgtgggcctgctcggagcaaccgcgctggccgccaccgtcaccgacccgacccacttccgatccggacgtcagttcgcggcctggctaggtctcaccccgctcaacaactccagcggcggcaaggagcggctcggccggatctcgaagatgggcgaccagtacctgcgccggctgctggtcaccggcatgacctccctcgttaggagcaaccggcaccgcccgggatcgatcgatcctcgcatgaatgcgctgctcgcccgcaagcctgtccggcttgtaacggtcgcgatggcgaaccgagcagctcgggcgatctgggccatcatggtcagaggcgaggtataccgggcgccggtggtgaacgtggtcgcctgaggacgagcttaccgatcagatctgcgcgagaccgcgcgaaggaggttgcgaggaccctgtgaagtgatggcgcaccggtcagaccggggacgaggacaacccgccgaatgtcgagggcgtcaagcccgcaaagcagaatgggacctcatccgcggaaaccatcagggccagcggtcgatgactgcgcgaacaggccggacacaagacggcacccgaccagcacgccaaacctcataaaccccttgcaacgcgggagccatccacacaa

SEQ ID NO: 2718 - DNA, 1493 bp, unidentified
  source 1..1493: mol_type = unassigned DNA; note = element_3dd0d7d
  misc_feature 1: note = core
  misc_feature 2..251: note = LE
  misc_feature 252..1478: note = CDS
  misc_feature 1479..1493: note = RE
  misc_feature 43..219: note = bridgeRNA
cgttaccttcttcccagctcctccgtccagcaggatggaggggtgctgaccggccggtcctcggcatgatcgtttgcccccagtcgtcgatgatccggggggtgttgtcaccgaggaccggtccggtggtcacggatcgctgatagaggcgggatctcctgtggaggaccttcgtaacgtggatgccgagcgtgaccacctcccggccggccagcacgagcagatgccagtacgggagaagggatgggtccatgtcggagcgaccacggccggcggtgttcgtcggcctcgacgtcggcaagtccgaccatcacgccgtagccgtgaccgcggccgggaagacggtctacgacaaggccttgcccaatgacgaggcccgcctgcggaccatcctcgaggagctggccaccgcgcacgggccggtgctgatggtggtcgatcagccggccacgatcggggcgctgccggtggccgtggcccaggcgatggagtcggtcaccgtggcgtatctgccggggctggcgatgcgccggatcgccgacctgcatccgggcgcggccaagaccgacgcccgggacgcggccatcatcgccgaggccgcccggaccatgccgcacaccctgcggaacatccgggtggacgaggcccagatcgccgagctcgtggtgctggccggcttcgacgacgatctggccgcccagatcaccgccacctccaaccggctgcgcgggatgctcacccagatccatccggccctggagcgggcgctggggccgcgggtcacccacccggcggtggccgacctgctcagccgctacccgaccccggggaagctggccgcggccggtcgcgggcacgtgcgggcccggctcaagaagcacgccccacggctggccgagcccctcacggaggcgatcttcgacgccctctcccagcagaccgtggtcgtggccggcaccgaggccgcgaccacggtgatcccgatcctcgccgggcagctggcctcgctgatccgccagcgggccacggtggccacccaggtcgaggccctcgtggaggcccaccctctttcggcggtcctgacctcgatgcccggcatcggcgtcaggaccgccgcgaggatcctcaccgaagtcgtcggcaaggacttcgccgatgccgggcacctggcctcctacgccgggatcgcccccgtcacgagacgctcggggacctcgatccgcggcgagcacgccccccgcggtgggaacaagaggctcaaacgggcgctgttcctctcggccttcgcctcgttgcaccacggcccgtcacgggcctactacgaccggaaacgcgcccagggcaaacgccacaaccaggcgatcatcgccctggcccgccgacggaccgacgtcctgtacgcgatgttgcgcgacggcaccctctaccaagacccgaccgaccctcagacctcgtcatcagtggccctggctgcttgacgaaaaccatagagg

SEQ ID NO: 2719 - DNA, 1454 bp, unidentified
  source 1..1454: mol_type = unassigned DNA; note = element_3dd808c
  misc_feature 1..2: note = core
  misc_feature 3..115: note = LE
  misc_feature 116..1150: note = CDS
  misc_feature 1151..1454: note = RE
  misc_feature 1177..1405: note = bridgeRNA
agatggcgtaacgggccgtgctgggtagctggtctgggtggccatccctcaaagtggtggtgtcattcaccggagtcaggcgcgagcctgttccaagcatcatcgagggacgaccatggagcactatgcagggatcgacgtgtcgctggaaagttcgagtgtgtgtgtggtggacgcggcgggacgggtggtacgggaagcgaaagttgccagcgagcccgaggcactgattggctggtttcagcggcttgccattgagatggcgaggatcggattggaggctggtccattgtcacaatggctctatgcggggatgcgagacgccgggtttgccgtggagctattggagacgcggcacgtgcgcgatgcgttcaaggcgatgccggtgaagaccgaccgcaaggatgcccgtgggatcgcgcagctgatgcgattgggatggtttcgcccggtgcattgcaagtcgctgccggcgcaagagacacgagcagttctgacgccgcgcaaactggtgcagtcgaagcaccacgacactgagatgagcctgcgtggtatcttacgtggctttgggctgaaggtgggcaagacaagccagcgaacgttcgcgagccgcgtgcgcgaattggtggcgggtcatcccactttgctgttagtggctgaagcgttgctggcggcccgggcggcactgggcgagcaattgagcaagctggagaagcgtgtgcgctcactggcgcgaggcgaccagcgggtacgacggctgatgtcagcaccgggtgtcggtgcgatcgtgggtctcacctttgtggcagcgatcgacgatcccgcacggttccgaacatcaaaagccgtgggagcgcattttggcttgacgccaaagaaataccagtccggcgagaccgacatcaccggacggatctcgaaggtcggtgatgccggtgtgcgcacgatgctttatgaggcagcgaatgtcatcctgaccaagccagtgaagggctcatcgctgaagagctgggcgatgcggctggcgatgcgcgctggaatgcgcagggcgaaggtggcattggcgcgcaagctggcggtcgtcttgcatcggatgctggtagacggcactgacttcctcgcagccaaagccgcgacagcggcggaatagcaaaggaggcattgtcaggcattgtcagttcgggcgaaaggacaccattcgcccggagcaggtcccgtcgccgggacgatggatcaggccagaccgcatcatgctcagtgggccgcatggcaccacgcgtcatcagattggccggccgatcctcattcagacaccatcaggtggcggcttcgcgccgaccccggacagaagagagaaaccggcgacaggatcagctcgaaagggattgacatccaaaggcccgttacagaaggatcagctcgaaagggattgacatccaaaggcccgttacaga

SEQ ID NO: 2720 - DNA, 1433 bp, unidentified
  source 1..1433: mol_type = unassigned DNA; note = element_3dd82b6
  misc_feature 1: note = core
  misc_feature 2..91: note = LE
  misc_feature 92..1120: note = CDS
  misc_feature 1121..1433: note = RE
  misc_feature 1198..1428: note = bridgeRNA
taatgggatggtcgcccctccccaaaacggcatctaacgtgtcaaagtggcgaataagtgttcccacagatggatgagagaggcgaccgctatgaagatcacaactgttggtattgatctggcaaaaaatgtattccaagtgcacggtgtgaatgagcgtggcaagacgatgttgaagaagcaactgaagcgggagcagatgatgctgttcttcactaatcttcccccctgcttgattggaatggaggcttgcggtagcgcccactactgggctaatcagttgcaaagggtgggtcatatcgtgaaattgatggcgccacaattcgttaaaccttatgtgaagactaataagaacgacgcagctgatgccgaggcgctctgcgaagcggtgactaggcctaccatgcgctttgtaccgataaagagtcgcgagcagttagccgtcttggccctgcaccgtgcccggcaagggttcgtcaaggcaagaactgcgcaagccaaccagatccggggcctgttggctgaacaagggatcattatccctaaaggcattgtgcacatcagcctatgcttacctaagatcttggaagaaagcgagaacgacctgccggggacgtttcgccaattgctcaatcgtctgggtgagcatctcaaggaactcgaccggcacaccaaggaactggaagtccaaattcagcgttggcacagagagaatgcagccagtaaaaagctggcgcagatccccggcatcggcccaatcactgccagtgccttggtcgcttctgtcggcaacgcgacgaatttcgagaatagtcggcaactggctgcttggctagggttagtgccacggcaacattccagcggcgggaagcaaaacctgctgggtataagcaaacgcggcgacagctatctgcgaactctgctgatccacggggctcgagcagtgcttcgggttgctgaacgcaaggccgaacatgctggaagttggttagcagggataatggagcgtcgcaatcagaatgtagccgcagtagcactcgctaacaaaaatgcccgcatcgtgtgggcactgcttgcccatgaccgagtatttgaagctaattatggggcgacaacatgaacacgagttctccacggcttaccagtggcggtgatccgactgcgtaacaacgcgatagcagcaattatcaagaagaaccactgattgcacaggcaatcatgacatgatggcgagacaggtcagaccgtgactggcaaaacccggtaccgacactgcacgtttttaagtgcgcttacgtgattgaggagccagtcagcgaattccatcagggatagaggcagtagcctcgatataaatccggatctatggctgcaatctccacctgatccaccgtcattgattgagggcttggcaatccggggacgaccatcta

SEQ ID NO: 2721 - DNA, 1365 bp, unidentified
  source 1..1365: mol_type = unassigned DNA; note = element_3de3629
  misc_feature 1: note = core
  misc_feature 2..76: note = LE
  misc_feature 77..1072: note = CDS
  misc_feature 1073..1365: note = RE
  misc_feature 1131..1359: note = bridgeRNA
taatgggatggtccgctccgctcatatcggtgcagactctacacgtctgttagatccacgaggaggaccaccatccatgaaggcatgcaaaaccgctgcggtctttggggtcgatatcggaaagaatatatttcacgtcgttggggtggacgtagggggcaagcctgtattctgtgggaagttccgccgcgatggcttgcttaaattcttcgtgaatactccgccggtcacgatcggcatggaaagctgtccgggttctcaatggcttgcgagaaagctccagggaatgggccacacagcgaagatcatcccggctcagttcgttaagccgttcgtgaagtcaaataagaacgacacggtcgatgcggaggccattgcagaagctctcacacggccaacgatgaggttcgttcagcttcggaaccctgaacagatttcggtgcaagcgctccaccgcgtgcgggatcgctttatgcgccagcgcaccggtttgatcaatcagatccgcggattcctgctggagttcggcatttctatccgtcaaggcgccggtgttttcaagttggacttcccccgcatcctagaagacaccgaaaacgagctaccgcactcgttgcgttgcctccttgccgatttgtggaacgatctgaaaggtctcgagatccgaatcgaggaaatcacactggcgattcaaagaacagttcagtcgagtgacacagcgcgacgcttgatgaccgtgcccggcatcgggccgctggcggccagcgctctggaagccgccgccggcagaggccaacacttcaagaacgggcggtttttcgcggcttggctgggcttagtcccgcgacagtattccaccggtggcgagcccacgctgctggcgatcagcaagcgaggaaacacctacttgcggcgactactgattcatggtgctcgttcctgtgtgcagacctgcgaccggggaaagcatcctctgggggctggattaccaagctcgaacaacgaatgcatcgcaacaaagttatcgttgcattggccaacaaaatcgctcgagtggcctggaaaattctgactcaccctgaagaaacttaccgctggtcggaggcttgagtcggtgaacgatctttcctcaggtttgcggcagggcttgctgatggcacaacggtcgatcggcgtactgtaaatccgagttgggaaactgatctcgcgagagatcgcaccaagtaaatggaaacggtacgcgcggattctcatcatggcctggtcgccaaaagcggctgactcgcgagaggccggatacatttgagcaaaccgaactgtgtctacaggcaaaactctgcttgcaaatgtggagcggaccataca

SEQ ID NO: 2722 - DNA, 1435 bp, unidentified
  source 1..1435: mol_type = unassigned DNA; note = element_3df0412
  misc_feature 1..2: note = core
  misc_feature 3..228: note = LE
  misc_feature 229..1419: note = CDS
  misc_feature 1420..1435: note = RE
ctgatatacgtccttgctgcggggtcgatgatggcaaccgaccccacggggagaccggcgagtggctatccggcagatgaccgtttcggctagatgccggcccccgtccctcggccgtgaacggtgatcgggatccagcggcacgaacgacgagaccggtgatcggacccatcagctgacgtcgaccgggtggtgcgggcacccctgggtgtcggaaggagacgaccgatgatcacggtgggcatcgacatcggcggcaagcgacacgcggtggcgcgctgccggaccggccaggaccaggccgaccgagaggtcctgcgggtgacccaggaccgggccggcttcgaccgcctcgacgcctggctgaaggggcagcccgagccggtgggacgcatcaccatggagtcgagcggccactactggatgccgctcacgagccacctgcggggtggtccggtgccggtgacggtggtcaacccgctcggggccaagtactttgccaagagccggctgtcccggacgaagtccgacccggccgatgcgaggtgcctcgcgctcatggctcagcacgaccacaccgagccccgcgacccgctcgcgggcgtggagctgcgccaggcctcgcgcttcgcgatgacgctcgtgaccgagcaggcccgcgtctgccagcgcctcgtccgtctcgtcgagctcggcttccccgagctgggcgagctcttcgacgaccccgcctgtcgcaccgcgcgggaggtgctgcgggtggcacccaccgcggccgcggcccggaagcgtcggacgagcaccctcgcggacgccaacgccggccccgggcaccgccgcctcggggaggccaaggccgagcggctgaaggaagccgcagccacgtccatcgcggtggccgagctcgacgaggaggtcgccttcgaggtcgggatgctgctcgaccagtacgacctctacgagggacagatcgccgaggccgaggagcacctggcctcgctgctcgacggcgagctggcccggcggttacggacgatccctggtgtcggtcccgccatcaccgccacgctcatcgccgagatcggcgacatctggcgcttcgacgacgccgaccagctgctggcctatgccggggtccaccccgctgagcgcagctcggggcgcaagggggcggaccccgagaccagctggcacatgagcaaggccggcaacgcccacctgcgcgcagcggcctaccggatggccgtggtgggcatcagccacaacccggtcatcaaggcgcactacgagcgcaagcgaaaggccggcaagagcaagatgaacgccttgggccactgcatgagcaaggccttgaacctcgtctggggtgtctggcgcaacgaggccgactgggaccccgactggggttcacggacttgacaagaccctatgggat

SEQ ID NO: 2723 - DNA, 1388 bp, unidentified
  source 1..1388: mol_type = unassigned DNA; note = element_3dfe5f6
  misc_feature 1..4: note = core
  misc_feature 5..79: note = LE
  misc_feature 80..1102: note = CDS
  misc_feature 1103..1388: note = RE
  misc_feature 1114..1376: note = bridgeRNA
atgatggggtggatggcccccttgcggcatctctgtgccaaagttgggttctcgcaacaccaacggagaggagccatccgtgaaccagattaccaccatcggcctggacctggcgaagaaggtctttcaaatccacggtgttgacgcctccggcgcagtggtgcgccgacgcgccctgcgccgcggcaaggtgctggagttcttcggcaagctgccgccgtgcctgatcggcatggaggcgtgcgcgacggcgcactattgggcgcgtgagctcggcaagctgggccacgaggttcggctgattccaccagcttacgccaaggcctacctgcggcggaacaagaacgacgcggccgatgcggcggccatctgcgaagcggtgagccgaccgagcatgcgttttgtcgttgtgaagacagaagatcagcaagccgcggcgggtgtgcacaaggtgcgggaattgctggtgaagcaacgcaccatggcgatcaatcatctgcgcggcatggtggcggaattcggtatcgtagtggccgacgggccgcagcacgtcgccgagctggtggcgatcgtgctcgacacggcagaggtgcggatcccggctctgctgcgacaaccgctgatggcaatcgccgatctgttgggcagccttgaaagaaagctgcaaggcattgaaaaacagttgctcgcgtgggggcgtaacaatcagacctgccgcaacctgatcaccgtccccggctacgggccgatcctgtccagcgcaatggctgcgatcgtggtcaatccggacggcttcaacagcgggcgggacttcgccgcctcgctcggcctggtgccgcgacacgagggcaccggcggcaaggtcaggctcgggccgatcagcaagcgcggcaacggctacctgcgccgattgctggtgaacggcgccacctcggtgctgaacagcaagcgggcgcaacaggatccgtggctgcgcaagctgctcgaaaccaagccgcgcaagctcgcggcggtggctgtggcgaacaagatggcgcgcatcggctgggcgatcatgacgcgccaggagagcttccgggcagcgccggtgtcggcggcctgaacggggagatgggttttcgaggcattgggaaatctaccgcaatgagttgggcttgcgagggtgaagtagcgtgatggcaatgtcggtcaaccgactgatcgagcgagacctgtcgaccgtcttgggacaacgcgatcccgtggccatgatcagaactcgatcaacggttcccatcagggccagcggtcccaagaccgcgccaacaggccggacacatgaccgcaaggtgatgcccgccatttgcacgcacgcgacaaaacccttgccagctgggggccatccacac

SEQ ID NO: 2724 - DNA, 1400 bp, unidentified
  source 1..1400: mol_type = unassigned DNA; note = element_3e024a1
  misc_feature 1..2: note = core
  misc_feature 3..104: note = LE
  misc_feature 105..1121: note = CDS
  misc_feature 1122..1400: note = RE
  misc_feature 1092..1387: note = bridgeRNA
agatggggtggttgccgccctctctcgacggcatcgcaatgtgccaagctggtggtgtttacagccactgagcagaaaggacggcaaccgtgacgaaggatacgatgatcggagtcgatctggcaaagaacagttttcagatccatgcggcgacactgaatggccaggtcaagttccgtaggaagctggcgcgggcgcagttcctctccttcatggccgcgcaggccccggccgtcgtcgtgatggaggcctgcggcggcgcccaccattgggcgcgggaactgtccgcgctcggtcatgaggtccggctgatcgccccggtttatgttaaacccttcgtgaagcggcagaagaacgatgctgccgacgccgaagccatcgtcgaagcggcgcagcgcccggagatgcggttcgtcgagccaaaaagcaccgaccagcaggcccgcgcgctcctgttccggacacgggaacagctcgtccatcagcgcaccgagctggtgaacgccctgcgatcctacctctacgaatacggtcacgttctgccgatcggtatcgccagcctccggcgcatcgaggcgatcctcgaggacacggacaatgacctcccggaccttgtccgggacatctgcggcgacctgctccagcagatctccgagaagacggcgcggatcgacgcactcatgaagcgcatcaagtccacggcctacgacaccgaaactgcacggcggctgcagacgatgcccggcgtcggccctgtcacggccctcgccatcgaggccttcgcgccgcccctcgaaagtttccgctgcgggcgcgacttcgccgcctggctcggcctcgtgcctcggcagaactcgactggcggcaaacagcgcctcgggagggtcacgaaggcaggccaggccgatatccggcgcctgctgatcgtcggcgcgatgtcgcgcctgacatggctcggccgaaagtcgatccgggagggatcgtggctggcgcgcatgctcgagcgcaagccgaagatgctcgtggccatcgcgctggcgaacaagatggcccgcgccatctgggccatgctgacccgcggcgaggactacaggaatccggcgccggccgctgccgtctgaagctatcaggcggaccgcggcacggcttcggtgtgaaggaggtgcgagaaggcgacgaccagcatgggcaacatgatcgatgagatctggatggggaaaaccagcgatccgctcggggccgacagagttcttagccgagatttggaccctatccgcagatcaccataccggcccgcggcaaatggaaaggccgcaacgatgaggcctgacagaagaccgcgctcgatcacctgttcatctgctcaatttcctccttgcatctcgggcggcaaccacaga

SEQ ID NO: 2725 - DNA, 1425 bp, unidentified
  source 1..1425: mol_type = unassigned DNA; note = element_3e06671
  misc_feature 1: note = core
  misc_feature 2..84: note = LE
  misc_feature 85..1140: note = CDS
  misc_feature 1141..1425: note = RE
  misc_feature 1188..1420: note = bridgeRNA
taatggaatggactctcctacccaaaacggcatcaggccaaagtagtggtgcaatgaccactaaaacagagaggagcgtccgacatgaagattacaacaataggcattgatttggcaaaagaggtgtttcagatccacggtgtagatgagtatggcaaggctgtgctgcgtaagcaattacgccgcggacagatggcggagttctttgccaatctggggccttgcctgattggcttagaagcctgcggtagctcacaccactgggcgagaaagttgggtggatttgggcatactgtcaagctcatgtcgccccagttcgtcaagccctatgtcaagactaacaagcatgatatggccgatgcagaagcgatttgtgaagcagttactcgacccaatatgcgctttgtaccgatcaagactgttgagcaacaggccattctatcagtgcaccgagccagacagggatttgtcaaggcgagaacttcacaggcaaatcagatacgcggtctactctctgagtttggtatcgtcattcctcaggggatccaatcgattggcaaacgcatgcctgacattctggaagatgctgaaaatggtttgccaggaacaatgcgccgattactggaaagactgaatgaccacctgaaggagctggatcggcaggtgaaagagttagagttgcaaatcaagctttggcacaaggagagcgaagccagccaaagactggaagccattccgggtgttggcccgattacagcgagcgccattgtggcaactgtggggaatgctacagagttcaagagcagtagacaattggccgcatggctagggttagtgcccaagcagcattcaagcggtggcaaacagttattgctcggtatcagcaaacgcggggatacttatcttcgcaccctgctgatccatggagcaagagcagtcatccgctttgccgagaagaaggccgagccagaaagctggctgcgcaagctgataacacggcgcaataagaacgttgctgctgttgccctggcaaataagaacgctcgcatcatctgggcattgctcacacccagaaagcgacatttcaccccgatcacactatggcaacaactgctgcggctcattgatcgtgagggttgaatagaagcgtatgggtatgttgcattaaaaacgagtttaaggagaaagattaccaccgattgcacaggcaatcatgacatgatggcgagactggtcagaccgtgagtagctaaacctgagtagggcacagtgcaaaaagcacgtagaggtgataaggagctactcagcaaattccatcagggacagaggcaatgcgcttcacataaagtccggatgtatggctgcaatctttaccttcttgagatcatagattgaaggctttgcaaaaatgtgggcgtccatgta

SEQ ID NO: 2726 - DNA, 1622 bp, unidentified
  source 1..1622: mol_type = unassigned DNA; note = element_3e0667f
  misc_feature 1..3: note = core
  misc_feature 4..254: note = LE
  misc_feature 255..1490: note = CDS
  misc_feature 1491..1622: note = RE
  misc_feature 8..227: note = bridgeRNA
gttcgtaatataaggttagccagattttttactggttgaccttttttaatatggtcttattattaacggtagtcggggtagaacgtagcgcccgtggggctaagatcccgtccgcaaaactgttcaccccctacttgtataaacgtgtttcaggctggttgggacaatgatcccgtttaacaagcgaacctacgacgttacaagaagccttaggggataccgacattacgtacatttaaaggaggagaaatcgtatgaatccagtcattggtctggatgttgccaaaggggaaagtcagattcaagcgtttttagataagggagagccttatcgtaaaagttttagtatcctgcataatgttaaagagcttaataaatttcttgacttcttaaaggagattgagtctctagctgggggaaaaccttcggttattttggaatcgactggacactaccatactcctattattcaatttttagaggaacaacaatatatgtatattattgttaatccattgattgcacatcgagcgaaaagttcaagtttgcgaaaggtgaaaacagatgccatagatgcctacaacctgtgtgagctttattataaagaggaactggaacctagtaagaaaagagggatccgcctcttaaaccttcgtaatctaacaagacagcacgaaactatttcaagtgtagcagcacaaaccaaactacaacttcaatcgatattggaccaagtatttcctgaatatagaggagtatttgggaacctgtattcaaaagtttctttacaggtacttttaatatttccaacatcgaaatcagttttaagtgtcactggtcctgtcttagcagataaaatagcttcactatataagagtcgttcagataaatgggctaaggaaaaggcaaaaaagctacgagatgcagcaattcgtaacccatttcaaaataacttgtatcaaagtcatattattaacctagaaataatgataaatattgttcttcaataccaagagcatctatcaaagttagctgctgaaatagatgcccttgccaaagaagttgaagaatatgaattaatccaatctatcccaggtatcggagaaaaaattgcggcaacgataatttctgaaattggtgagatagaaaggtttaatcatcccaaaaagctcgttgcattcactggagtcgatcctagtgtgtactcctctggtaagtttacagcttccgtaaaccgtattaccaaaagaggatctagcagattaagacaagctctatttatggctgttcaatgcggaatacgagacgctcgtaaaaagaaaacaagcgtggaaatcattccacgtaataaaagattaagagaattttacgataagaaacgcgatgaaggtaaaccttttagagtagcgatcatcgcttgtgttaataagcttttacattggatttttgcaatgcttaaaagtaatacaactttcctagatatagcttaaaaactatattaatcaatttaaatacaaaatcttccaaccagagcataacggaaggttatttggcatgttcatttttagtatagcatggaaaacttaagatttttaatgaaaaatgttgacaactattagctg

SEQ ID NO: 2727 - DNA, 1432 bp, unidentified
  source 1..1432: mol_type = unassigned DNA; note = element_3e075af
  misc_feature 1..3: note = core
  misc_feature 4..137: note = LE
  misc_feature 138..1157: note = CDS
  misc_feature 1158..1432: note = RE
  misc_feature 1195..1432: note = bridgeRNA
aaatgtaatgaacgcgccccattcatttaatctggagcacgacgatgaagggggaggagtgaagcctcacagatttccggcatcattgtgctcaatacgggatgcgtagtgctcccagtgactggagactccacgacatgaaatatacaccgattggcgttgatatcgcaaaacatctgattcagctccacttcatcaatgagcacactggcgaagtgattgataagcaggtacgtagccaggattttctgactttcttcagtaaccgggaaccttgcctgattggtatggaggcctgtggtggctctcagcactgggcacgagaactgacaaaacaggggcataaggtacgactgatgcaggcccggtttgttaaggcgttcctgatgggcaacaaaaatgacgtgatggatgcccgcgctatctggatggcggtacaacagcccggtaaggcgatagccgtcaaaacagaagaacaacagtcagtactggttctgcatcgttcacgcaggcaactggtcaagttcagaaccgcacaaattaatgccctgcacggtacgctcctggaatttggtgaaaccctccacaaaggccgggcagcgttggacaaagagttaccggcagcactggaacgactgaagatacgtcttcctccgtaccttatcaccgtgctggaggaccagtacaacaggctgggtgagttggattcacagataaatagcatcgaaaaacagcttgtcagcgtggccaggcagaatgaaacctgtcagcggctactgaaaatacccggcgtggggccgctaattgccacggctgcggtggccacaatgggagaagcctccgcgtttaaatcgggacgagagttttctgcttatatcggacttgttccgaaacagacaggttcaggcggaaaaatccgcctgctggggataagtaaacgcggagatacctatatgaggaccctgtttatccatggtgctcgtgcggctgcattactgacaaaagaacctttgccctggatcacggaactcaaaaaacgatgcccgaccagtgtggccatcgtggcgatggcgaacaaactggcccggacagtctgggcgatagcggctcaccagtgtgaatacgacaaggcgcacgtcagtgtcaggccagactaaaagcggccactgacaaacattaacttttaacaaaaggatgaatgcagaaaggttactctggcaaccagcgtgatgacaaagacaggtaagaccgggactcactaaacctgaatggttttaagagcttaaagctcgcggaggaaatgaggtgtgagtcggcgaatgacataggggctcgcagctttaaaggctgcaaaaaagccggatataaagctgcaacctatctgtcagagttagaacaatggaagccgttgcaaacgggacgcgttcatata

SEQ ID NO: 2728 - DNA, 1573 bp, unidentified
  source 1..1573: mol_type = unassigned DNA; note = element_3e0d0ba
  misc_feature 1: note = core
  misc_feature 2..347: note = LE
  misc_feature 348..1472: note = CDS
  misc_feature 1473..1573: note = RE
atatttcgtatcataaatttaggtcaggaatttatgatttttcctttcttggcctatgtttgttaagcattcagttggccaaactgatatgcttatttagtactgtggatttgtgtttcatatttacagctgtctcattttgaggcgagactgttcaggagtaggacaccacagtcttttttatttcgagtgttaattagtaagttaaccctttgaggttttatcacaaacgcgtaattactctagaaaagacatgtgtcaatcaaacagtacatatttttaggaggtgtctttatgacctattttattggtataaacaagccaaatataaacatgattgttttatcatggatgaaaatggtgaggctatacgcgattccttctctttcaataatgataaagaaggatttaacacactccttaatgtcttaaacagtttagattcaaaccaagaaaaaaggattggatttgaatcaaccggacattacggatctaatctcaagattttcctagaaagaaacggctattctttcatggaatttaatccactacttgtacatcgtcacttcaagtccgaaacacttagaaggacaaaaaacgacaaggtagatgctcgaaaaatttcctcatacctatacactagggaatacaaacctaatccaaattcatcttatcacttaaattgtcttaagtctttaactagaacaagggaagctctaattaaagatagaactagacatataattcatatgacaaatgtattagataagatgtttcctgaatttaaactccaatttggaaatcaagggttaaacgccgcaagcgccatgtatcttttagaaaattatagttcgccatcaaagatgtctaacatgactagagcctcttacgataagatgaagtctgagttaaggcgcacaatttcatatgccaaattcttaagaattaaagaactagctagaaacacaattggcaacgaagatgaaatacttgttttcgagttaaatacttatcttgagttattcaaagaactagacaagaaaattcttaaagttgaagataaaatcactaaagaattttctatcatgaaatgccatatagcttccattaaaggaataggcatcattactgcagctggcatcttagctgagattgaaagtatcgatagatttgataatccaggacaactatgtgcctttgcaggtatagaaccatcagagaatcaatcaggaacccatgatggtggtggaaaaatggttaaacatggttctcctcacttaagaaactatcttatgcaaagtgctggttacatgttaatccataatcctgttttgtatgaatattaccttaagaaaagaaatgaaggtaaatgtcatactgtagctttatcacatgtagcgaaaagacttacaagaatcatcttctatttagagaagaacgatactgattttaatatcgataaaatgagatagccgctcattttaacaatcaatttttttaagaatcatgaaaattgattctttttgtcatgaagttaacctaattatcaatttttgcttgacttattatagta

SEQ ID NO: 2729 - DNA, 1445 bp, unidentified
  source 1..1445: mol_type = unassigned DNA; note = element_3e10ed5
  misc_feature 1..2: note = core
  misc_feature 3..338: note = LE
  misc_feature 339..1157: note = CDS
  misc_feature 1158..1445: note = RE
  misc_feature 1194..1398: note = bridgeRNA
agatggggtattcggcttgagccagcctccgaacgacggagtgaatgtgctgtcctcgagctgaaggtgtaacgtggccctattggacctaaccacgaacctcacgaaaggacgcgcagcatgaaatattatgccggactcgatgtgtcggtgaaagagacctccatttgcattgttgatcaaacgggcaaaatctgccgcgaggtgaaagtcaccagccatcccgacgatctcatcgtggtactgaaggatcctgcctggaacatggagcggatcgggcttgaggccgggcccctgtcgcaatggctgtttgaaggtctggccagggccggcctaccgtgatctgcatcgagacccgccacaccaaggcgtttctaaaagcgcaaccgaacaagagcgaccgcaacgacgcgcgcggcatcgcgcagatgatgcgcgtgcacttgtatcgggcggtgcatgtgaaggcgctgaccagccagaagcgtcgagcgctgctgacggcgcgcaagctcttgcaggacaaagcaatcgccattgagaacgacctgcgcgggctgctgcgcaactttgggctcaaggtcggcgtggtcggatccgcgaagttcgaggcgcgcattcgcgagctcgtcgcgcgcacccttgacctggtcgagattgtcgagcccttgcttgacgcgcgccggaagctgcgggagcactttgcgaccctgcatcggaagcttttgatgatcgcgcgggacgatgaggtctgccgactgctgatgacgatcccgggtgtaggtcctgttgttgctgtggcctataccgcgacaatcgacatccctcagcggttcaaaaactccaaggcagtgggaccgatcctgggactgacgccagtgctcaaccagtccggtgagagtcaccgcgtcggccgcgtctccctgtgcggcgacggcatgatgcgaaacttgctttacgacgctgcacaggttcttctcaatcgggtggcaaagtggtcgtggctgaaggcatgggcgatgagcgtcgccaaacggcgcggcctgcaaaaagccatggtggcgctggcccgccgtctggcggtaatcatgcatcgcatgtggagcgacggcactgaattctgctggtccagggagaaactcccggccggcgcctgactggcattcgcaatcgagatcgccgccgaggctggacgcatacggtcgccggcggaaagatgtcccttgcgggacggaggataggcgagttcgcaccacaggctgttcccgggccattgtcctggcttgagggacgcgccggagattgttccgcttgttccatctgatcccatcgtggaagggccagcgagtgccgattccggagagaagcgcgagcccgtaaggacacatctgtagatgtcgatgacataagctggaagtgcttgacctcgacacgccgaatagaga

SEQ ID NO: 2730 - DNA, 1157 bp, unidentified
  source 1..1157: mol_type = unassigned DNA; note = element_3e18a84
  misc_feature 1..2: note = core
  misc_feature 3..206: note = LE
  misc_feature 207..1151: note = CDS
  misc_feature 1152..1157: note = RE
  misc_feature 36..212: note = bridgeRNA
cttgtcttatgactttttgcgccgtttgggcgagaaggaaccgctgggagagggttgccgccctctcgtcagcggcgagggacggatcgggataatgctggccgtttaacgggccgagctagagtttgatcgccctcgtcttttccttgtggcctggacggatactcgggcttttggcccgaatgacaagcagaggcgcggaaaagatgaacccttctaccattggcgtcgacgtttcgaaagacgggctcgacgcacatcggctcgccgacggcgcggcccgccgtttcgcgaatgataaagccggctgcaaggccctgatcaaatggctcgccgcaacgccggtggcgcgcgtcgtcttcgaacccaccggcccttaccatcgcctgctcgagcgcgcgctggacgcggccggcgtccccatcgccaaggtcaatccgcgtcaggcccgccgtttcgctgaagccgccggcaagctcgtgaaaaccgatcgcgccgacgccgccatgctcgcgcgcatgggcgaggttctcgatttgcagccgcgtccctgcgtcagccagaccatcgccgagctgaaagaactccatcttgcccgcgccgcgcttgtcaaagaccgcacggccgccaaaaatcgcgccaaagcgatcacgctgcccctgctcgaaaagcagaacaaaaaacgcctcgccgagatcgacgtaaaaatcgaggagatcgacgccgccatcgaaaagcttatcgacgacgacgctcagctcgcccggcgcttcaagattcttctctccatccccggcgtcgcgaaaatcaccgccttcgccctgctcatcgaaatgccagaactcggaacgctcgaaggcaggcaggccgcgagcctcgccggcctcgcgcccatccaaagacaatctggctcatggaaaggccacgccttcatccgcggcggaagagccttcctccgccaagccctttacatgccggcgctcgtcgcctgcagattcaacaaggacagcaggacgctctatcaaaagctcgtcgaggccggaaagccgcccaaagtcgccatcaccgccgtcatgcgcaagctcgtcgtcctcgcaaacgccctcttgcgaaaggacctctcgtgggccgaaaatgccccttgccaataacggata

SEQ ID NO: 2731 - DNA, 1324 bp, unidentified
  source 1..1324: mol_type = unassigned DNA; note = element_3e1fd45
  misc_feature 1..2: note = core
  misc_feature 3..68: note = LE
  misc_feature 69..1106: note = CDS
  misc_feature 1107..1324: note = RE
  misc_feature 1081..1308: note = bridgeRNA
agataattggactccccacacctaaatagataggttaacctgtaaacggttatttaatggagtcagttatgaaaaatactattgtaggtgttgatcttgctaagcacgtaattcaggtttgcttattttcgaacaaaacggtgcaatataacattgatatgacacctgctgaattcgctgagtggcttgcagtcacaaactccgtaaccatagtatttgaagcatgcggcacatctaattattggaagcaaaaagcaattttattcgggcacgatgctcgattgatatcgcccaaactagtttcagctgttcggcaaaatcagaaaacagataagaatgacgccttagccatagtccaggcagcactattacctgatgtttcgtttgttaggggaaaatcgccagaacaacaacagctgcaatcaattcttagactgcgtgagctctgtgttaagcagaaaacagctactggaaatcagttaacggctcttttagctgagtttaacatcaaagcctcaacccgaaatggtggtttaaaaaaggtgattacagcgacactggaagacgctgaaaatggtttgtcttttgagttcagggaagcgctaagcgcagcctggcaacaatacctttcgatattagaatctatttctgtttatgaccgctgtcttgaaaaagcaattgaaaaacatgccgattgtaaaaaactactcaaaatcgaaggggtgggtgtactgaacgctattaatctatatatagcgttaggttgtgcagaactagggactttcagtaaaggcaaagatgctgctgcgtgtattggattaacgccaatgcaacactcgtcaggagggaaagccaaactcggttcgatcggtaaatatgtcaaaaatgggatgctcagaagtcagcttattactggtgcgatgtcagcagtaaaccatgcggtaaataggaaagctaaaacgaaaaaagatatttggatagcagcattggttggccgtcgcggtaaaaaatgtgctgcggttgctttggccaataaaaccgtaagaacggcatttgcaatgctcactcagggcacggaatacaaagctgacttagttgaagcttaaataagagttctaacaataaattgcacaaacgaagataaaaatcagctagctaaggccgccgtcaacacagagtgaaaaaactcgcaggatagatttgccagctagttcgcgtaaatatcatagagccggagatagcttctccaatagagctcgtacataagtacgcaattatttcttcaattgagttgtttgttgttgacacgtggggagtccacata

SEQ ID NO: 2732 - DNA, 1428 bp, unidentified
  source 1..1428: mol_type = unassigned DNA; note = element_3e25e56
  misc_feature 1: note = core
  misc_feature 2..79: note = LE
  misc_feature 80..1111: note = CDS
  misc_feature 1112..1428: note = RE
  misc_feature 1203..1419: note = bridgeRNA
taatgggatggtccgccgcttgattcgcttcctcaacaggagcagtgttttggtatctgattcaaggaggtcgtccatcatgcaggttcgcaccgtcgggatagatcttggcaaaaacaccttccacgtgatcggcctaaacgattctggaacagttgtcgtcaaaaagtgcttcacgcgaaagcaactgctggtcttcacagccaacctgtctgcatctctgatcggaatggaagcatgttgcgggtcgcacatgctcggcacgatcttgagagcacaaggtcatcgggtacgcctcattcctgcccaatttgtaaagccgttcgtaaaaggaaacaagaatgactatttggacgcagaggctatagcggaggccgtacagcgacctcgcatgcgcttcgttgccgtgaagacaggcgatcagctcgatctacaagccttacatcgggtacgcgaccgactcatcagccggcgcaccagcgtgatcaaccagatgcgtgccttcttgctggagcgcggcatcacgtatcgcaaaggccgtgcttatctcaaacgccagagggccgccatattggaagacgccgaagcgaaccttactccccgcatgcgccacctgctcaatcgtctctggcaggagtggaagtctgttgagatcgagatcgaagaactgagcggacaaattgaggcaattgctcaggaagacgcggcttgccaacgattgctgaccatccccggcgtgggttcactcgtttccaccgccatgatcgccgccgttggaaatggctctgcattcaagaagggacgcgagtttgctgcatggctggggcttgttccgaaacaatactccacaggaggcaagagcaagctgctggggatcagcaaacgcggaaatccatatctgcgaaggctcttcatccacggcgcacgctcggcgtttctgcacctgaatcgcaagaaccacagaataggtgcctggatggatcagctggaatcccgagcacatcggaacgtggctatcgttgctctggccaacaaacttgcgcggattgcgtgggcggttctggccaaaggagatgtctattgccccatgtctgctcttctgcagagttgaagtgagcgatggataaggcgcctgtctgcgacaggcttggaaatcgccgcgcgattcccacttatccaccgctccggctgctgctgaccagttcttaccgggtctgcttgggacaaatagatggacaacagtcgaatcgacgcccctgaagtctgattcaaaaaagtggcttgcgaatagccgtacacacttagcaggacagggacgtgcgtatcctcatcgtggcccagagccaagctctggcaaggccggatacattttcgcggactgctcaaccatccactttttccccttgcagtcgtgcggcggaccataca

SEQ ID NO: 2733 - DNA, 1502 bp, unidentified
  source 1..1502: mol_type = unassigned DNA; note = element_3e28e5e
  misc_feature 1..2: note = core
  misc_feature 3..243: note = LE
  misc_feature 244..1482: note = CDS
  misc_feature 1483..1502: note = RE
  misc_feature 6..240: note = bridgeRNA
ctaatgggggctaccgggtcgtcgtagggaaggctcggcgctggtagccgccggcaggtgagcactctcgcggcctggacgctgttggagtcctagtgtcagatcgtgtccctgctggtggtcgggtgattgaaccgctgatgggatgtcgtgcccgccttggcgtgagcacttgtccattaggttgtgggtgatctcccgctggctgctggtcatggtgtcgagtgggtgggaggcgtgtggatggtgttgtttgttggtgacgactgggctgaagatcatcatgatgtggaggtgcaggacgcgacgggtcggcggttgggtaaggcccggttgcccgagggggtggcggggatcgcccggttgcatgcgttgatcggcgagttcaccgatcccaacgacgaggctggggcggggcaggtgctggtcgggatcgagaccgatcgcgggccgtgggtggcggcgttggtcgctgctgggtatcgggtgtttgcggttaatccgatgcaggtggcccgctaccgggagcggcactgcacgtcgggggccaaaagtgatgccggtgatgcgcatgcgctggctgacatggtgcgcactgatgcccaccagttgcgtccggtggcgggggacaccgcgctggccgaggggaccaaggtggtggcccgggcgcaccagtccatgatctgggaccggacccggcatgtgctgcggctgcgcagcgcgctgcgggagttctaccccgctgcgctggaggcctttccggacctggccgcgaccgatgcgctggagctgctcgccgcggcaccggacccagtggcggcggccacgctgtcgcgcagccgcatcgtcggcgccctcacgcgggcccggcgccgtgatgtcgcaggcaaggctgagcggatccaggcggtgttgcgtgccgaggcgctgcgccagcccgcggtccttgccggggcctacgcggtcaccgtccggtccaccgtcgcggtgatcaccgtcctgaacagcgagatcaccaccctgcaaggccaggtcgaggcccattttggccggcacccggatgttgagatctaccgctcccagcccgggcttggcgagatcctcggcgcccgggtgctcggcgagttcggtgacgacccacaccgctaccacgacgcccgggcgcgcaagaactacgccggtagcagcccgatcacccgggcatcaggaaagaagaagatcgtgctggcccgctacgcgtgcaacgaccgcctcgccgacgctgtgcaccaacaagcgttctgcgcgctgaccgcctcacccggcgcgcgcgcctactacgacgccatccggacccgcggcaccggccaccacgccgcactgcgccagctcgccaaccgcctcgtcggcatcctccacggctgcctcaaaaccggcaccctctacgacgagaacatcgcctggtcccaccacacccaacaagatcaacaaactgccgcttgacaactaagcccatgggatgt

SEQ ID NO: 2734 - DNA, 1381 bp, unidentified
  source 1..1381: mol_type = unassigned DNA; note = element_3e29542
  misc_feature 1..2: note = core
  misc_feature 3..86: note = LE
  misc_feature 87..1112: note = CDS
  misc_feature 1113..1381: note = RE
  misc_feature 1086..1367: note = bridgeRNA
agatggggtggttgccgtcctcccctaacagcatgggaactatgccaggatgatgtggcgtagagcaccagcggagaggatggcaaatgaaagacatgatgatcggcgtggacttggcaaaaagtgttttccagcttcacggagcgacaatgacagggcacgtgaaattccgcaagaaactggcgcgagggcagttctaccggttcatggcgacacaagcacctgcacttgtcgttatggaagcctgcggcagcgcgcattactggtcgcgagaacttgtcaaactgggccatgaagtaaagttgatcgcgccgcaatatgtgcggccgttcgtgaagcggcagaaaaacgatgctgctgatgccgaggctatcgttattgcagctcgtcagcccgaaatgcgtttcgtctcacccaaaaccgcggaccagcaagctcaggcgatcctgtttcgagcacgcgagcgtattgtccatcaacgaacggagctgatgaatgctctgcgtgctgttctctacgagtatgggcagactgttccgctcgggattggccgcgtcaagcgcatcgcagtgatagttgaggacgttgatatcgacctgcctgagcttgtgcgagatgaatgccgtgatctgctagcacagatcaacgagaagaccgcacggatcgaggaaaagacgaagcggcttatcgagttgtcacggcagagcgataatgcaaggcggcttcagaccatgccgggcgttgggccgatgattgcaatggctgttgaggccttcgcgccagcgatggaaaacttccaatgtgggcgtaactttgccgcttggcttggccttgttcctcggcagttctcatctggtggaaaggaacggctcgggcgagcttcaaaagccggacaggctgacatacgcaggctgctgataatcggggcgatgacccgtgtcaggtgggcgagtctcaagccacctgtgaagggctcatggttagcgcggatgttgacaagaaagccgcggatgctggtagcgattgcactggcgaacaagatggcccgaagaatatgggcaatgttgatgaagcaggaggattatcgaaaccaggcgttggttgtggcctgacaagaaccggctgcgagtagcagagccggcgatgaggtgtgagaagtcgacgacctgaatgggcgcatgatcgaactgatcgggattgggaaaaccagaacattactcagggtctgtagcccgtgtaggagatttggacccgatccgcagatcaccataccggccagcggtctttcgaagtgccgcaataaaaggcctgacagaagaccgcactcgatcacacgtcagaagggttggaaacttcttgcgcaacggacggcaaccacaga

SEQ ID NO: 2735 - DNA, 1546 bp, unidentified
  source 1..1546: mol_type = unassigned DNA; note = element_3e2e7b9
  misc_feature 1: note = core
  misc_feature 2..267: note = LE
  misc_feature 268..1437: note = CDS
  misc_feature 1438..1546: note = RE
  misc_feature 1..243: note = bridgeRNA
tgtatgataaaagtatagtaaattatttatcatacctcctccttctctagttctttttgatatataattaattattgaaactgtggactttttactatttcttaaagattcttttgaatacttttttaaggagactattgccactgttttttctcaaatacttatagttggttaaaatttttttaattttttatgtttgcaaggatgtattgattaaaactttgtggatgcacagtttcttattttcttttaaaggatgtgatgtttatgttattactaggtgttgatattgctaaattaaatcatgtagcttctcttattgattctgattctggggaacttattttttctaattttaaattccagaataatatgtctggattcttttccctttatgaaaagattattacctcttcaattaaagagattattattggtttagaatcaactgggcattatggagaaaattttattaatttcttcttccaaaagggatttaaaattgctgtgatcaatcctttacaaacttcacatttgcgtaaagctaatattagagatactaaaaatgatcatttagattctgttactattgctaaagcttttctttttgataatcataaatatgtttctcaaaaaaatatttctaattttgcgcttaaaaaacttactcgttttagaaaaaatttagtgaaacaaagaactagaactaaaattcaacttgtttctttacttgatgttatatttccagaactacagtatatttttaaatctggaattcacactaaaactatttattctcttctcaagaagtatccttccacagaaaaaatagctgctttaagagaaaaatcattattttctattctaagtaaaacttctagaggtcattatgacatggaaaatgctttacttttaaaaagtcatgctaaatcttctgtaggtgtcaaggatacatctatatctatacatattccccaattaattcaattaattgagatgttagataagcaaattaaatcaattgaagaagaaattaaatattctcttgataatgaagcgccaatccttactattccaggaattagtgatgtagcagcagctaccatagttggtgaaattaatgatattgataattttgattcaccatctaaattacttgcctatgcaggattggatcctaaagtaagacaatcaggaaatttcaatgcctcttcatgtagaatgtctaaaaaaggttctccatatttgcgctatgcattaatcttcactgcttggaatttagtgaggaatagtaaaagatttaaaaattattatttaagtaaaagagcacagggaaaatcacattacaatgctttaggtcatgtagcacataaattagtaagaacagtttatacattactcaaaaaaaatatttcttaccaagaactcataatttaaaatttttttaaattaattaatttattaagagttttataaactctaattttgtaatgcagaaaaatcaaaatgaaaattatttatttttatattgacttttcatagttgg

SEQ ID NO: 2736 - DNA, 1179 bp, unidentified
  source 1..1179: mol_type = unassigned DNA; note = element_3e30e71
  misc_feature 1..2: note = core
  misc_feature 3..207: note = LE
  misc_feature 208..1155: note = CDS
  misc_feature 1156..1179: note = RE
  misc_feature 3..183: note = bridgeRNA
cttgtatggttagacttgaagggaggaggagggacaaagccagcttctgactgttagcgcagtacagaccgtgggagacctcgcccctcctcccttttcacccaagcgccgataaagaatgcttccgggctcggaccgacgaaagacacaagccagcgcctctgggtgacccttcaagtactccaacactatcgaggagagttgctcatggcaatggtggttgctgattcaaagcggctgattggcgtggatgtggccaaaacagaattggtcatttgggacgatgaatcagcagaactcatagcaatccccaatactaaagcagctatcaagaaatggctcaaaggcctctcgggtgcgatgtccgtcgctatcgaagcgaccaacatctatcacgtcctgtttacggatctggcctttgagttcgggcatacgatttacgtggtagatgggtacgccctgagccattaccgtaaaggtgtcaacgtacgcgctaagacagatgcaattgatgcccagctgttggcccgctatctgaagaacgaagggcaggacctaacgccctgggcgccgccaccggctatctatcgacagcttctgagcttgttccggcgacgtgcaggactggtccaggcacgaaccagcctgactcaggggtgggccaatgaaccgctactcaaagccgccttcaagacgcatctgcgtgcgatgcagcggcttgagctgctggtggagaagatgatcaagggcctgctggaaaaggccgggctgatgcctcaggtaaagcgctgcatgaaggtcgaaggggtgggttttctaactgctgctcgcctgacagcgacgtttcagcgtggcaacttcagcgggggtgatgcgtttatcgcctttttgggtatggatctgaggattgcgcagtcggggcagaaaaaagggcaatccaagctcacgaagcgaggagaccccgaagctcgacgcctccttcacaacgcggctatgtcagcatcccgcacagcagcatggaagtcgtactacgaagagcgcctggcgcgtggtttcagcacgacagcatcgcttgtcatgctcgcacgcaaactggcgcgagtagtatttgccctactgaaaagcggagacgagtatcggtcaaaagccgcttaaaaaacttccctaaaaccatagaat

SEQ ID NO: 2737 - DNA, 1199 bp, unidentified
  source 1..1199: mol_type = unassigned DNA; note = element_3e34f5b
  misc_feature 1: note = core
  misc_feature 2..163: note = LE
  misc_feature 164..1189: note = CDS
  misc_feature 1190..1199: note = RE
  misc_feature 28..198: note = bridgeRNA
ttgtctctcaaatctatgctttactgcaggggaagctggatcgagccccgggatggccatcccggggctcgcgcgacaaagcgcccgtacaggaataggtgtcaacgaccgacctcatgaagggacttttgccgcaccagcttcgcatcgcttgctgacttgaatgggctatccgaaggacacgcccgcagacaatttcgaagcatggagcccaattatgatggcagaatccgatgaaatccagtccatcctcggcctggacgtttcctgcgataccgtgaccctgttcgacagctgcacccgccgctgcctgaccattgccaacgaggccgacgcgctgcgtgccgccttagaaccgtatcaaggcagcgctacgctcgccgtgtgcgaggccaccggcggccatgaagataccgtgctcggcgtgctcctggaattggccatccaggcccatcgcgccgatcccgccaaggtcaaggcctatatcaaatccttcggcaagcgcgccaagaacgacgcgatcgacgcccgctggctgtcccgctatggccgcgaccgggccgcgatgctgctgcgctggcagccgaccgctccgacccagcagaagctcgagctgctcgtcgcccgccgtctcgacctcgtcgccatgcgggtgcaggagcaaaaccgcctgaaagccccgcgcagcagtctgatcgccgataatatccgcgcccatctttgcgaactggagcgccatatcgaagcgctcaacgcagagatcgacaccctgattagcgaaagccgcgatctggaactgcgggctaaatcattgcggtcggtgccgggcatcggaccggttctggtgccgctgctcttggccgtcatgcccgaactcggcaccctcaaccgccgccaggtcgcaagcctcgccggtgtggctccgcatcccaaagacagtggcaaggccagctggcaccgcagcaccaccggcgggcgacgccagatccgtccggcgctcttcatcgctgctctcgccgcctgccgtggcaatagtccgctcgccacagcctatcaggcgctgctcaaggccgcaaaaccaaagcgcgtcgcgctcaccgccatcatgcgcaagatcatcaccatcgcaaacgcccgggtcagagacgccttgcagcagcaaaatgaattaatgctcgcgcccgcataaactgacttgg

SEQ ID NO: 2738 - DNA, 1182 bp, unidentified
  source 1..1182: mol_type = unassigned DNA; note = element_3e3df38
  misc_feature 1..2: note = core
  misc_feature 3..216: note = LE
  misc_feature 217..1167: note = CDS
  misc_feature 1168..1182: note = RE
  misc_feature 45..193: note = bridgeRNA
cttgtatcttcaatttagtgtttcagtatggtcacagttaatacgaacaggacgggacagaccgactgtgccttgatccgaagagatcgtgcaatagcatgggacgtcccgttccggctctccaaaagctcgaacagttgcctgggttattaaagcccgcatcattcgcaaggttgagctgtattggaggaaagtaaaatcaaggaggattgagttttggaaattagccccatctttattggtatcgacgtatccaaagcacgactcgatgtcgcggtacgtccctcgggtgagagtgaatcggtttcgaacgatgaagacggaatcaaggccttggtcaaacggttgggtgagatccagcccgctttgatcgtgctggaagccaccggcggagtcgaacgtcttgtcgctcgtgctctgagcagtgctgaactccccgtcgttgtcgttaaccctcgccaggtcagggactttgccaaagccaccggtcagttggccaagaccgatagcatcgatgctggggtgttggctcgttttggtgaagccgtgcgccccgcactgcgccccttccccgacgaggtcaccttggagttgcgcgcactcattgcccggcgtcgacagatcaccgagatgattgtggccgagagaaaccggctgagcggagcttccaagagtgtcagaaaacgtatcgccgctcacatccgctggttggaagcagaactggtgagagccgacaaagatctggaccaaagcatccgtcaaagcccgatctggcgcgagaacgaagacttgctccgtagcgttccgagtatcggtccggtcgttagccgtacgcttctggccgagctgccagagttgggacgactcaaccgtaaacagatcgctgcgttggtcggcattgccccgcttaatcgcgacagcggtacactgagagggcgtcgcgccatctggggtggtcgcgctagcgtacgggcagcgctctacatggcggccttggtcgccagcagacgtaatgctgcgatccgtgctttctacaaacggctgcgccatgcaggcaaagcacccaaggtggccttggtcgcttgcatgcgcaaactgctgacgattcttaactcgatgatcaaacataaaactcgttggtccgaaattactctccagaccacttgactttgaagacagttg

SEQ ID NO: 2739 - DNA, 1572 bp, unidentified
  source 1..1572: mol_type = unassigned DNA; note = element_3e40b9c
  misc_feature 1..3: note = core
  misc_feature 4..254: note = LE
  misc_feature 255..1364: note = CDS
  misc_feature 1365..1572: note = RE
  misc_feature 8..226: note = bridgeRNA
tttcgtattatgagttcagccagtttttactggttgaactctttttcattaaggggtttagtacgggtagccggggtagaacgtaactgcccgtggggctttgaccccgtgcgctaaactgttcaccccctacttgtagaaacatgtttgaggttggttgagacattgatctcgaataacaagcgaagctatgacactgctagaaggactaggggctgccggcaaatacattcgagcgaagatgatacgatcaaatgaatcctgttatcggcctagatattgcaaaaggagaaagtcagggccgggctttcttggacaaaggccaaccttacggcaaaagctttactgttcatcatactcatgaaggtttggatgcctttcattcgtttttaaagctaattgaggaagagaccggtcagaaaccgatggttatcttagaatctacaggtcattaccacctccccatcactcggttcttggaggatcataactgcctgtttgttgtagttaacccaatcttgtcgtatcaggctaaaaaattatcgagtttacgcaaggtgaagaccgatgcggtagatgcctacgctctctgtgaactcttctacaaagaggactttgagcatcacaagacaagaggagttcagttattaaacctgcgaaatttatctagacagcatgatgcgatcactggctcatacattcaaattaagttacagttccaagccatacttgatcaagtgtttcctgaatttaaaggtgtctttggggatttgcactctgcggtgtctttaaagactttgttggagtttccgacgtctgaagcagttctgagtgccggaaaaacaaaaatatcggagaagattgcatcgttatgtactcggcggtccgatcgttgggcaactgaaaaggctgaagctttgatggccgcagctgaccggaacccctaccgtaaagcaccgttccaaagccatctaatcagccttgagatgtacgtcagcatgctacttcattaccgagaacatctaaccgccctagaaaagcaattagatgccctcgctaatgaaattgaagaatatcagattatccaatcgatccctggtatcggagaaaaaatcgctgcaacgattatttcggaaatcggtgaaatcgatcggtttaatcacccaaagaagctagtagcttttgccggtgtagatccgagtgttcatatctccggtaagtttaccgctacaattaaccggataacgaaacgcggctccagcaggctcagacacaccttgtttttagccgtactttgcggtttgcgacgctcaggaactaaaggcttactacgacaagaaaatcacggaaggaaagcctcataaggtcgcaatgattgcctgtgtgaacaaaatgctccactggatctttcccctgctcaaacgaaaagaaactttcctcgatatggcctagagctaagaacatgaaaaaccttccaattatatattggagggttgtttggtgtgcccagctactagtatagcagcatctttctcgtctttaattgaaaaatcttgacaagatattagctgg

SEQ ID NO: 2740 - DNA, 1290 bp, unidentified
  source 1..1290: mol_type = unassigned DNA; note = element_3e4933d
  misc_feature 1..2: note = core
  misc_feature 3..245: note = LE
  misc_feature 246..1280: note = CDS
  misc_feature 1281..1290: note = RE
  misc_feature 29..237: note = bridgeRNA
ctgagttgtttcaatcggtgccagcacctggtcgtcgtagcgacgtctagcgtgcgaggacggtggccggtcaggctcccacgctccttgtccacccttgtgggtgtggctctctcatagcgtgcccagaccggacactgcccgccgctggcgtggctcgatagaggcgtgatttcgcttcctgaactcaggttgcccgccgcggtgaacaccaccccgacgagcatcctggaagggaagccaccttggtcatcatcggcatcgacccccacaaggcctcgcacaccgctgcggctctcgacgactccgctcagcctctcggccaggtccgggtccaggcgaacagcaagaccctccaacggctcctggagtgggctgagccgtggcccgaacggtcctgggcgatcgaaggagcgaacgggcttggccgtcacctcgcccaacagctcatcggggcgggcgaagttgttgtcgacgtgccggccacgctcgctgctcgagctcgactcctccagaccggacacggccgaaagaccgacagcatcgacgcgctcagcgcagcgacggtcgcccttcaccgcaccgacctcaacgtggtcgccgccgatgaccacaccacgatccttcgcctgctctccgaccgccgagacgagctcaacgaggagcgacgacgcaccatcaaccgtctccaccggatcctccgcgacctcatcgctggcggagcgtccatcgagctgtccgccgacatcgcggccgctttgcttggcaaggtccgggcggtcaccggtgccaacgcgctccgcaaggccatggcccgcgaacttgtcgtcgacgtacgacgcctcgacaaggcactcgcccagaaccgggctcgatgcgcccaagccgtcgccgtcagcggcacgaccctcaccgagatcttcgggatcgctgaagtcgtcgccgcgaaggtcgctggccacaccggcgacatcacacgcttcgcgagcgagaaccacttcgccagctacaccggcaccgcccccatcgaggcgtccagcggtgacgtgaagcgtcaccggctctctcgggccgggaaccgcaaactcaacaacgcgctccacctcgcggctcgaacccagacctgccacccgggcccaggccaggactactaccgccgcaagatcgccgacggaaagagccccaccgaggcgctccgctccctgaaacgacagatctccaaggccgtctaccgccaactcgtcaccgaccaatcgaagaaactcgcactcaccccttgacatagaggcg

SEQ ID NO: 2741 - DNA, 1342 bp, unidentified
  source 1..1342: mol_type = unassigned DNA; note = element_3e590a3
  misc_feature 1: note = core
  misc_feature 2..66: note = LE
  misc_feature 67..1092: note = CDS
  misc_feature 1093..1342: note = RE
  misc_feature 1106..1330: note = bridgeRNA
tgatgctgtggacggctctcatcccaccagccagcctcttagagactggtggacaggaggagagctatggaagcagcggtcacgatcggattggatctggggaagtcggtctttcaagtccatggggttgatcagcaagggacagtcgtggtcgaacggcggttaacccgggcgagattgctcgcgttcttcgcgaagcagcctgcgtgtttggtggggatggaggcttgcgcggcagctcaccattgggggcgggaactgcaaaagctcgggcaccaggtaaagctgatgccgcctcgctacgttaagccctatgtgaagcggcagaagaacgatgcggcggatgccgaggcgatctgcgaggcggttacgcgaccgaccatgcgcttcgtcgagatcaaaagctgcgagcagcagggcgtgctggttcttcactgtgtccggctgatgctgacgcgccagaggaccgctttgtcgaatgcgatccgaggccatatggcggaatacggtctggtggctccggtcggccgcaacgggctacagcgactgatcgcgatcatcgccgatcagcacgatgagcggctgccggcgatggcccgcgcttccctagtcatccttgcttctcagcttcagctggtgaatgagcaggtgctcgataacgaccgccgtgtccgggcgaccgcgcggtcgacagatctcggccggcggctgatggaagtgccaggcgtcagacccgtgctcgcgagtgccctcgtcgcctcggttcccgagcccagagcgttcaaatccgggagggacctggccgcctggatcgggcttgtgccgaagcagaactccagcggcggcaaggagaagctgggcggtatcaccaagcagggcgatcgatatctgcgccagctcctggtggtcggagctctatcggtcatcagatacgcccagcggcacggaacccggcggccttggctcatctatctgcttgcgcgccgagcgcccaaggtcgcggcggtcgccctcgccaacaagatggcaaggatgatctgggcaatgatggtcacgggagaacgctacagggagccacaggtcgcggcgtaaggggcgatcgacaaggagttgggaagggcaacagcgatgtaatgcatctgccggtcgataccgagagcgggagaacccacttgggtcagagcgcttcgagcgcgtgcttttgatcgggacccggctccgcggaaggcattatggccagcggcccatgtgtgccgcatcaacaggccgcacacatggccgcaccgaccaggctgaagcatcgcatcaaaaaaacccttgccaagggagagccgtccacaca

SEQ ID NO: 2742 - DNA, 1540 bp, unidentified
  source 1..1540: mol_type = unassigned DNA; note = element_3e5caee
  misc_feature 1..3: note = core
  misc_feature 4..244: note = LE
  misc_feature 245..1423: note = CDS
  misc_feature 1424..1540: note = RE
  misc_feature 8..224: note = bridgeRNA
tttcgtattattaggtcagccagaaattttctggttggcctatttttatgggtgttttaagatggtggtagccgggagaacgagggcggcttagggacaaagaacccgtacaaaaaactgttctctcactaccttccaacgaccatgtttgagctggttgaggctatgacctcgtatcacaagcgaagctatgggtttggaaaccaggtgggaatgccggtaaatttgaatgagggaggtttttatgcaacccgttgttggaattgatgtggcgaaaggatgtagtgttattcaggccttcaaaaagcgtaacgaaccatatggaaagatggagacccttcagcatggtgaagaaggtttcgagcggttaggggaagtgctcagcatactgaaagagacaagtggtgtggagcctgtcgttgtcttcgaggcaaccggacattaccatcgaggtttggcaggatatctgaaacgtagcggatggattcactacatcatcaatcctttgcaagcgaaacgatccaaaggcacacaacttcgaaaagtgaaaaccgatgcagcagatgcttggcatttggccgagatgtattaccgtggggatgttaaagcgcatcgcgagtgggaagagtcctacagtgagcttcagcacttgaccaggcagcatgagtttgtgaccgctatgtatgtgcaggcgaagctaaacagcagagcattgcttgagcaggtgtttcctgatttcatcggagtcttttgcaacttgtatgcgacaacgtccctaaaagtgctgcaaagatgcttggagaataataccgagaatgtggaaggtctaattcaggaatgtgtgggtagatctcattcgaagcgatggattgcagaaaaaaccgaacgattgagggaacttatgggagggtggaacagacaaagtagaagccgatctcaaaccgtagcactggccagcatggtcgtgttgctgctggagtttgacaaccagttaagccatttggaaaaacagatggaagcactggcgatggaactgcccgaagtaggtttggttaaaagtatcccaggcataggaggcaaactggacgctgccatcgtggcggaactctggaatgcaagtcaattccaggatgcgaagcagctcgtcgcttatgcaggactggatccagggatttacagctcagggaagtttacatcgacaagcagtcggattacgaagcgaggctccaagaggcttcgacgagcgttatatctggccgtacagtgcggaattcgaaaagcagccaaccgcaggttaaaagagtattacgacaagaaaagaaaagagggcaagccttacaaggtggtcgtgatcgcttgtgccaacaagcttctccatcacgtatacgccatcttgaaaaagggcgagccctatacacattaatacctataattatccaaataacctccgcgccaatggaggttatttggggtacagagaaaattatatcagtttcttgtagtccagccaagacaataaggcttgacaaacattagctgg

SEQ ID NO: 2743 - DNA, 1390 bp, unidentified
  source 1..1390: mol_type = unassigned DNA; note = element_3e6096b
  misc_feature 1..3: note = core
  misc_feature 4..88: note = LE
  misc_feature 89..1117: note = CDS
  misc_feature 1118..1390: note = RE
  misc_feature 1088..1377: note = bridgeRNA
agatggagtggttgccgccctccccagacggcatcgatttgtgccaagattgtggtgttgaaagccacacaatggagaggacgacgaaatggaaaatataatgattgggatcgatctggcaaagaatgtttttcaggtccacggcgccttgcggacaggggaggtacagtttcgcaagaagcttacgcgtgcgcaattctctgtatttatggcccagcaagagccctgcttagttatctttgagtcatgcggcagcgcgcaccactgggcgcgggagatggaagcgcttggccacgaagtgaaactgatcgcgccacaatacgttcgcccgttcgtaaagcgtcagaaaaatgatgctgccgatgctgaggcgatcgtgatcgcggctcgacagccggaaatgcgcttcgtggagcccaaaacaattgagcagcaatcccgcgcggccgtgttccgtagccgggagcggctggtgcatcagcggactgcagatgtgaacgccttacgagcactgttgtatgaacatggccacgtgttccccgtaggaacacgttatcttgctcgcatgactgcgcttttggaggatttgacttctgacgtacctgatctgatccgggaggagtgccaggacctgttgacacagattgctgagaaagcggcgcgtattgccgagcgcacggcgaaactcaagacgctggcctcccaatcggatagagtgcgccgtctccaaactatgccgggagttgggcccctgacggctgtcgcagtggaagcgtttggacctgacatgacgcagttcaaagccgggcgcgactttgcggcttggttgggtcttgtgcccaagcagcattcttcgggaggcaaggagcgcttaggacgcatgaccaaggctgggcaggccgatatccgaaggctcctgatcatcggggcaatgtcacgattgacctggctcggacagcgcaccattgtggcgggcagctggctgtcgcgaatgttaacgcgcaaaccaaagatgctcgtcgcagtcgcgttggccaataaaatggctcgtcagatatgggcgatgctgacgaagaatgaggattacagggatccggcgctggcagttgcgacatgataatcatgttaaacaaccagcaatggtgcggagggggagtgtgagaagacgatgacctgaatgggcaaaaagatcgaacagatctggattgggaaaaccagaacgtgtcttcgagcactaagctcgcagctaagatttggacccaattcgctgatcaccatcccggcccgcggcttttggaagtgccgcatcttgaggccttacagaagaccgcattcgatcactcctcaatacaggtcataatattcttgctcgacgggcggcaaccacaga

SEQ ID NO: 2744 - DNA, 1385 bp, unidentified
  source 1..1385: mol_type = unassigned DNA; note = element_3e62eca
  misc_feature 1..2: note = core
  misc_feature 3..78: note = LE
  misc_feature 79..1119: note = CDS
  misc_feature 1120..1385: note = RE
  misc_feature 1119..1372: note = bridgeRNA
tgatggggtggacggccccctacggcatcagttgtgccagaatgaggttgttgcaaatctcagacaagggagccgtccgtgaaccagattatccgcattggaatggatacgtcgaagcatttttttcagctgcacggggtggatgccgacgagcggcctgttctgcgcaggaaactgcagcgcaaggaggttttggcgttttttgccaggctggcgccgaccgtgatcggaatggaggcctgcggcgcggggcattactgggcgcgggagctacgcaagctcggccacgaggtgaggctgatggcgccgcagcacgtgaaggcctacgtcaaacgcaacaagaacgacgggcgcgatgccgagggattgtgcgaggcgatgagccggccgacgatgcaattcgtgccggtgaagagcgaagagcagcaggcggcgctgatgctggcgggggttcgccagcagctgatcacaaggcgtacccagcttggcaacgcgatccgcggctatgcgacggagttcggtctgatcaccgccaagggtctcgacaagctcgaaccgctattggtgcggatcacgcaagacgagagcttaccggagctggcgcgcgagatgtttgcgctgcagggccgcgcctacgcgcggctgcaggtcgaactgaagacgatcgaggccaggttaatggcctggcaccgcgctaatgccgacagccggcgtctggcgcagattccgggaatcgggccgatcggggctacggcgctggtcatgaaggcgcccgatcctcgcctgttccggtccggccggcacttcgcggcctggatcgggctgacaccgaaagaccattccaccgccggcaagaccaggctcggcaagatcacccgcgccggagatgagatgctgcgcagcgtgctggtggcgggagcgaccgccgtgatccagcaggcgaggcgaggccgcggccgtgcgtccccctggctgctcgacttgctgaagcgcaagccgccaaaactcgcggcggtggcgctcgccaacaagatcgcccgcatcgcctggaagctgatgacgacgggcgagagttacgacggcgcgcggatgcctggcgcatcggcgctcgccgcttaagagatcagccgctcggcgggttcgccgcaccggctgagccggagctgcaagaggagaacagatggtaggatcgatcgatccgaggtgcgagacagtccgtgggacccactggccgaaagcaggtcgtcggtgtgtttggaactcgcgtcgcggaaaaccatcttggccagcggtaaaacgcaaccgcatcaacaggccggacatatggatgcaagcgatccgatcaaaccagaaaaaactcttgtggcatgggggccgtccacata

SEQ ID NO: 2745 - DNA, 1421 bp, unidentified
  source 1..1421: mol_type = unassigned DNA; note = element_3e66f2e
  misc_feature 1..2: note = core
  misc_feature 3..203: note = LE
  misc_feature 204..1406: note = CDS
  misc_feature 1407..1421: note = RE
  misc_feature 3..170: note = bridgeRNA
tccttaagaatgttggcggtccggaaggaccgggtgtggctgatgcagggttgccgctgatggctcaaggagaatggccgcccggtccttcgggacgctccgaccactgattgagaactgcggtcatcgctgcttaaggacctgtcggcggggtgttcttcgggccacggaaacgctggtcccgacggaacggaacgacaggcttgagcacgcctcacacgcggatatgggtcggcgtcgacgccggcaaggggcaccactgggcggtggcggtggatgccgatggcgaaacgctgttctcgacgaaggtgatcaacgacgaaacccagatcctcacgctgatcgagaccgctggcgagcgggctgacgaggtgcggtgggcggtggacatctccggccgcgcttccacgctgctgctggccctgctcgtcgcccacggccagcaggtcgtctacgtgcccggccgtaccgtcaaccgcatgtccggtgcctaccgcggggaggccaagaccgacgccaaggacgcgaaggtcatcgccgatcaggcccgtatgcgccgggacttcgctccgctggacacacccccggagctggtgtccacccttcagttgctgaccaaccaccgggccgacctgatcgccgaccgcgtccggctgatcaaccggctccgcgacctgctggtcggcgtctgccccgccctggaacgggccttcgactactccgcagcaaaagggccggtggtgatgctgaccgagtaccagatcccggccgcccttcgtcggatcggcgtcaagcgcctgacggcctggctggaacggcgcaaggtccgcggggcctcggacgtcgcggccagagcggtggaggccgcccagtcccagcagactgccctgcccggcgagaagcgggccgccagactggtctgcgacctcgcccaccagctcctggccctcgacgagcggatcaaggacaacgaccgggagatccgcgagaccttccgcaccgacgatcgcgccgaaatcatcgaatccatgcccggcatgggaccgaccctgggcgccgagttcgtcgccatcgtcggcgacctgggcggttacaaggacgccggccgccttgcctcccatgccggcctggctccagtcgcccgggactccggccgccgcaccggcaactaccaccggcccaaacgctacaaccggcgcctgcgacacatcttctacatgtcggcgcagaccgccatgatgcgtcccggcccatctcgggactactacctcaagaagcgatccgagggcctgcggcacacccaagccctgctctcgctcgcccgacgccgagtggacgtcttgtgggcgatgctgcgtgacaagaggctcttcacctccagcccgccggtcacgcaggcggcttgacacgatcattgagat

SEQ ID NO: 2746 - DNA, 1394 bp, unidentified
  source 1..1394: mol_type = unassigned DNA; note = element_3e7da1f
  misc_feature 1: note = core
  misc_feature 2..87: note = LE
  misc_feature 88..1104: note = CDS
  misc_feature 1105..1394: note = RE
  misc_feature 1150..1392: note = bridgeRNA
taatggaatggactcctcccctttaaaatcggcatcttgagtgccagagtggtttccaccacttctactaaaggaaaggagcccaaagtgaaggttacaacagtcggcttggagttggcaaaaaacgtatttcagctgtatgcggttgataagaagggcaagtgtgtatttaacaaacggctcaagcgcaagtcgcttctacccttctttgccaacttggattcctgcctggtgggcatggaggccaccggttccgctcaccactgggctagggagttaagccggctgggccatacggtcaggttaatgggcccacagtttgtaaagccctaccgcaagggcagcaaaaatgacagcaacgacgccgtcgctatctgcgaggcagttggtagacctgacatgcactttgtagcagtaaagacaaaggagcagcaggacatacaggcgatccaccgcatcagacaaagactggtagcggaaagaaccgccaaggccaatcagacccgggggctgctcgccgagtatggcattatcgttccttatggcataaacaggctgaggaaggcgttgccgtttatcctggaggacgctgaaaacggtttttcgccgctggcccgcgagctcttcggcgatctttaccgccagcttcttgagctggatgacaaaatatcgttctatgaccgaaagatcgggcagatattcatgagcagccctgtctgccaaaggctggcccaggttgagggggtcggtcccatgacagccaccgccctggtcgccgccatcggcgacgcaaaaaactttaaaaatggcaggcagctcgccgcctggctggggcttgtacccagacagcactccagtggtgacagatataagctgctctccatcaccaaacgcggtgaccgctacctgaggaccttgctcatacacggtgccaggtcggtggtcagaagggcggaggggaaaagtgatagccgcagcctctggctaaacgagatcaaagagcggcgcaacaaaaacatagctgcggttgccttggctaacaaaaacgcccgcattatctgggcgctccttgcccgtgatgaagattaccgagctgcagcttaaaagggattagcccatattgctttagttccgtggcaaaaaggaggttttccttccagcgattgcttcgaggttatagttgatggcaagacaggtcggaccggcgtcttcaaaacctgattaaatcagaggccgtaaagtggccgccaagctgttgaggagaaggcgcgcagattccatcagggccagaagaggaaaaaaatctctcttcaatgacaggccggatatatgtatgcaatcgatccccgcttgccttctacgaaatcctcttgcaatagggaggagtccatata

SEQ ID NO: 2747 - DNA, 1232 bp, unidentified
  source 1..1232: mol_type = unassigned DNA; note = element_3e80b5b
  misc_feature 1..2: note = core
  misc_feature 3..224: note = LE
  misc_feature 225..1217: note = CDS
  misc_feature 1218..1232: note = RE
  misc_feature 12..204: note = bridgeRNA
cttgtatcttatcgaatgtgatggttagctaccattacacggagccgggtgagcttgggcgcaccctaagaacgggtgattctgagacgtagattaagcccccggctccacttcctcgccacgctggagactgaacggtagccaagcgccccgcattagacggtgagcctgcatgcacaaggtaagtcggcgttgaaggcgactatgtaaagaggtgattgaagatgttttttgtgggttgtgacgtatcgaagaagaagctggatgttggactgttgttgagcgtagagccgctgaaggtgcgcagcaaagtcgtgcaaaaccatcagcctggatggatgacgctggtcgattgggcgtgccggcaggccaagtgcacgcctggcgagttgcacgtggtgctggaggccacgggtgtgtatcacgaggctgccgcctatgcgctgatgcaggtgggggtgaaagtttcggtggtgaacccggcgcgcgtgcgtgatttcgccaagggcttagccaagcacagcaagactgacgccactgacagcgtggtgctcgcccgttacggcgaggtcacgaaaccgccgctgtggcaaccgcccgcagccgagatcgtggagctcaaaggcctgctcggtcgtttgcaggtcatcgagcaagaactggcccgcgagactaaccgcctggagaaggcgcaagtgtctgtcacagcgcagctggtgctcgactcgctgcataaaagccgcgcctttcttgagcaggagaagcgcgatctggagcgacgcatcgacgatcacattgatgctcatccgcagctcaagcgcgatcgcgagctgctcgagtcgattcccgccatcggccgtaaaaccgcgtgccgcatgctttgcgtgctgcgctcccggccgttccgcgaggccgcttcggttgctgcattcctgggactggttccagtgcaacaccagtccggcagctctgtttataagtctccacacctgtccaaagccggcagcggggcggtgcgcgccgcgctttacatgcccgcagtggtggcaacccgagccaatcctgacgttcgtgcgcactacaagcgattggtcgcacaaggaaaatcgaagatgagcgcattaggcgcggccatgcgtaaactggtgcacatttgcttcggtgtgattaaaaaccagcaaccttaccggccaaacgtttctgttcaaaacgcttgacgcgcaagacggtat

SEQ ID NO: 2748 - DNA, 1353 bp, unidentified
  source 1..1353: mol_type = unassigned DNA; note = element_3e8ad33
  misc_feature 1..2: note = core
  misc_feature 3..71: note = LE
  misc_feature 72..1100: note = CDS
  misc_feature 1101..1353: note = RE
  misc_feature 1104..1343: note = bridgeRNA
ttatggatggcccgcccctcctgccggcgcccgtgtagggtgtcggtgttcaagagaggaaggagcgaaccatgagtatagtgatcctcggcatcgacctgggcaagaacagctgcagcatcgtcggccttgacgcgaacggtgcggtaatcgtgcggcggcggatgcgacgcgacggggtgatcgcgtttgccgcaaagctgcgtccatgcaccatggcgatggaagcgtgctgcggagcccatcacatgggccgggcgctggcggagctggggcatgaggttcgattgatgtcgccggagtatgtgcgaccttatgtcaaagcgcagaagaacgatgaccgcgatgctgaagcgatcgcagaggcggcgacccggccgaccatgcgctttgtcgaactcaagagcgaagagcaacttgacgtacagacgcttcatcgggtgcgcgaccgtttggtcggcgatcgcacctccctgaccaaccagatcaggagtcttctgctggagcgtggtcacgtagtggcgcaaagccatgcccggctacgcctcctactcgccgagctgctgaattgtgaagcaggctcgctaagcccgcgcatggtgttcctgctgggagatatgcgggcgcgttgggaggagctggatcgtcgcattggcgccttcgacgccgagttcgcagcgatggcccgaaccgacgatcgggcgcgccgactgacaagcattcctggcatcggtgcgctgaacgccaccgcattggtcgccgcagtcggtgacgcagcaacttttgacaagggacgcgacctcgctgcctggttgggtctggtgccccgccaggcttccactgggggcagaccgaaacttttggggatcacgaagcgtggaagtcgatatcttcgcaagatgctgattcagggtgcgcgatcggccatgccgtcgctggccaaaagcgacacggcagttggagcctggctgcgtgggcttctcgcccgcgcgcatccgaatgtcgcggtcgtggcattggccgcgaagatggcccgtactgtctgggcgctcctgcgccacggacagacctacaactcagcgccgcgagcgacgatctgaagaacacgcgtcgggcccggacagctcccgacgtgatgaactgcgagtggtgaaaggaagatggcctgacagtcgatcggcgtcccgaaaacctccggcgaaaaatggctctcagaagccgacccctttatgaggatcaggacgcgcggatctccatcttggcggcggcaatcatgccgacatgccggatacgtttgtgcagactgattacgccgtcacccaatcgtcgcttgcaaccggggcgggccatacg

SEQ ID NO: 2749 - DNA, 1494 bp, unidentified
  source 1..1494: mol_type = unassigned DNA; note = element_3e8b4d7
  misc_feature 1..3: note = core
  misc_feature 4..242: note = LE
  misc_feature 243..1475: note = CDS
  misc_feature 1476..1494: note = RE
  misc_feature 69..243: note = bridgeRNA
tagttccccaccggcgtttccgacctgcgggagatgaaacgggcgtcaagtctgtagtagattattctagcgccaacggcacagaggtcgttcgatccttggtgcgcatgagcccgtttcctagttggacccggaacccttgagcaccccggattgtcgccacgggcggttcgtagccccggagcacgcttgttagattccacagataggggttccacgccagcggcgcataaggaggagcgatggaacttttacacccgcattgtgccggtctcgatttgcataaggagaccgttgtcgcctgcattcgtcacatggtggatggcaaggtgacaaccgaagtcaagtccttccagaccacgacccagcagctgatggaactgtccgattggctatccactcaaggcgtgacgcatatcgccatggaggcgaccggcgtctactggaagccggtctggcacatcctctccgatggcgaatttgtcctcgtgcttgccaatgccgcgcacgtcaagaacgtgccgggccgcaagaccgatgtgaacgacgccgcctggctggccgatctgatggcgcatgggctgattagagccagctttgttcccggcgaaccaacccagcagatgcgggatctgctgcgtacccgcaagcagtttgtacgcgaacgcagcagccatacacagcgcatccagaagacgctggaggatgccaacattaagctcgattcggtcatcagcgacatcgttggcctctccggccgccgcatgatcgaggccttgatcgctggtgagaccgatccgggaactttggcggccctggctcaccggcgcatccacgcctccgccgaagaactggaggcggcactgcgcggacgggttacaccccatcaccgcttcatgctgcaactccatctggaccatctcgatgctgtcaatgcggccattgcccgcatcgacaaggaggtcgacgccaacgtcgaaccctttcgtgcagccatcgaaatgctgaccaccatccccggtgtcagctcgctcgcggccgaggtgatcgccgccgagatcggcatcgacatgagccgcttcgagaccgaaggtcatctgatctcctgggccggactctgtccgaaaaacgacgagagcgctggaaaacgccgatccaatcgcatgaagaagggcgcgccctggctcaagacaacgctgattcaatgcgcctgggcagcctcacgaaccaagcgaagctacctccaggcccaatacctgcgcatccgttccaggcgtggccccaagaaggccattggagccgtcgccgcgtccatccttaccgccgcctaccacatgctcaaaaacggcaccctctaccaggacctcggcgcaaaccacttcgacaaccgcgacaaaggaaagcaggcgctacgactcctcaaccggctccagagcctcggattcgccgtccagatcacgtccatggccgcttaatggagggtttgtttcctgt

SEQ ID NO: 2750 - DNA, 1321 bp, unidentified
  source 1..1321: mol_type = unassigned DNA; note = element_3e9fd00
  misc_feature 1..2: note = core
  misc_feature 3..66: note = LE
  misc_feature 67..1086: note = CDS
  misc_feature 1087..1321: note = RE
  misc_feature 1079..1311: note = bridgeRNA
ttatggaatggctcgcccaccgaacatccggcacaatgccgcaggtcactaggaaagggatcggtcatggaaatcgctttgatgggtgttgatctcggtaaaaatagttgcagcatcactgggctcgacgcgaccgggcaagtggtgtttcgacgaagagtccatcgtgacggcgttgtgaagctggcggacaaatatcctaactgtatcgttgctatggaagcatgttgtggagcccatttcctcggtcgtctccttcgagctgggggccatgaggttcgcttgatgtcgccggaatacgtgcgtccatatgtgaaggcgcaaaagaacgatgatcgagactccgaggctattgcggaagcggcgacacgcccgacaatgcgctttgtagagctgaagtctgaggagcaactcgacatgcaaatattacatcgggccagagaccgtctcgtggccgaacgcacagcgttagccaatcaaatcagggcaattctgttggagcgtgggatcacgatacctcagggtaggcagaaactcgaaagcggactgcccaaggtcctcgaaacgcatgaccttatgctcagcgatagaattcgaaccctgcttcaggagttgaacgaagagttgcagaatctaacgcggcgcataactcagtttgataaggagttcgagatgtttagcaaaagcaacgatgcctgccgcaggctgtctacgatacctgggatcggagcactgaacgccacggcctttgtcgccgcaatcgacaatgctcaaacttttgctagaggccgagatctggcagcatggcttggcttggtcccacgacagatgacgacgggcggcaaacctaaactcctcggcatcagtaagcgaggaaactcctacttgaggcgaatgctaattcatggcgctcgtgcagcgatgccccatattgcgcgattggaaactccaaccggagcttggctacgaagattgctggctcgggctaatccaaatgtcgtcgtcgtcgctttggccgccaaaatggcccgtgtgatatgggcagtgttgcagcggcgaacgacttaccagcaggccgccgcctgattggcgcgtacgacctgaaagcttctgcgggtggaatgaggaagatggcctgacagttaaacggtgtcttgaaaacctgaccaaaaaaatggcgcgctttcgcacgccgaggtgtttatgaggatcagggcgcgcgaagctccatcttggccaaggtcagccttgagaccggatacgttggtgcagattgttcagccttgtttatttgaccacttgcggaggggcgagccatacg

SEQ ID NO: 2751 - DNA, 1487 bp, unidentified
  source 1..1487: mol_type = unassigned DNA; note = element_3ea6b5d
  misc_feature 1..4: note = core
  misc_feature 5..238: note = LE
  misc_feature 239..1471: note = CDS
  misc_feature 1472..1487: note = RE
gtcactagggcaccattctttctacggacgtccgatgggtgttcgtggaagggactcggcgggagccgaggtgactgctcgtggtggtcgcccttcgagggcctgcatgacaccgcagccctcggctctcccgaggctgcggaccggcttcaggaagacgcgccgtagagcgccagttagtgaccgtccggtggtcggcctcctcgccgagtcgtcgctgccaatctgaggagaaaccatgactgttgaggacggtctgcccgtctatgtcggcctggactgggccgccgagatccatgctgtgtgcgtgttggaccatgccggctatcaactggccgcgttcaccatcaagcactccgcagatgggatcgcaacgctgatcggcaaactcggcagatacggcgacccggccgatgtgcaggtcgggatcgagcgtcccaacgggcggctggtcgacctgctgcttgaggcgggtcacccggtggtgccggtgtccccgaacgcgatcaagacctggcgcgaaggcgaggtgatctccggggcgaagtccgatgtcggggacgctgcggtgatcgcggaatacctgcggctgcgcaaccaccgactccgaccagtgcagccctattcgccgcagaccaaggcgctgcgcaccgtggtccgcagccgcgacgacctggtgcagatgcgggtggcagccaccaaccaactcgacgcgttgctcgatgcccactggcccggcgcccaggcgatcttcgccgacaccgcctccgcgatcagcctggccttcctgcgccgctatcccacggcggccgccgccgcccacctgggccacaagcgcctcgcggcgttcatcaccaagcagggctactccggcagacgccccgccaacgtgctgctggcccggctccgcggcgccccggccggcaccaccgaccccgcactgagcaccgcagtcggcgacgcggtcctggccttcgtcgaggtcgtggccgcgctcaacatcgcgatcaagcaactggacacctcgctcaccgcccggctcggggagcacccggacagcaaaatcttcacgtcgctgccaaggtcgggtcagatcaacgcagcccaggtgctcgccgagtggggcgacgtcaggcaagcctacgacggtcccgacgcgatcgccgccctggccggcgtcacccctgtcaccaaggagtcgggcaaacgccagcacgcggttcacttccgatgggcctgcaacaaacgcttccgcctcgccttgaccactttcgccgataacagccgacacgccagcccttgggccgccgacacctacaaccgcgcccgagcacgaggacacgaccacccgcacgccgtacgcatcctggcccgagcctgggtccgggtgatataccgctgctggcacaccgatcagccctacaacgccaacctccacggcggagcactgaggttgccgatcgcggcctgaggttgactcaggaagt

SEQ ID NO: 2752 - DNA, 1444 bp, unidentified
  source 1..1444: mol_type = unassigned DNA; note = element_3ea79c8
  misc_feature 1: note = core
  misc_feature 2..60: note = LE
  misc_feature 61..1104: note = CDS
  misc_feature 1105..1444: note = RE
  misc_feature 1221..1438: note = bridgeRNA
taattggaatggtccgccccctgccccaccggaggatgatagggacagaggaggacgttcatggagattcatacagtcggcatcgatcttggcaagtcggtattccatcttgttggtgtcgatgcagcaggtgaggttgttgtgcgaaaaaagttttcgcgtgaaaaattgctgcacttcacagtcaatctgcgcgtggagcggatcggcatggaagcctgcccaggcgctcacttccttggccgcgcactccgtgcgcagggtcatgatgtccggttgatgccggcacagtatgtcaagccgtacgtgatgacgaacaagaacgactacatcgatgcagaggccattgccgaagcggtatggcgcccgaagacgcgtttcgtgccaatcaagactgacgatcagctggatatgcaatcactacaccgcgctcgggagggatgggtgcatcgccgcacatctctgatcaaccagatacgcgggcttctgcttgagcgtggcatcacaatacgaaaaggccgccaacatgcagaagaggctctgccccgcatcctcgaagacccggataggaatctgtcgtggcctttgcggatgttgcttgcgcaactccagcaggagttgaagcagttacagcgccagatcgaagaagctgatgctgtgattttcaaggcagccagtgagcacgaggcctgccagcgattgatggcgattcccggcatcggaccggtcacggccacggcgattattgcggccatcggtaatggaggaaatttcgagaagggccggagctttgccgcctggctcggcttggttccgaggcaatactcaaccgggggccaacagaagctattgggcatcagcaaacgtggaaattgctatcttcgatgccttctcgtccatggtgcgcgctcggtgctccagttcaaggaaaaacaatctcccggtcttagcgcatggctcgacaagctcacaacccgcgcccaccacaatttggctgtggttgccttggccaacaaactggctcgcatggcatgggcagtactggccaggggagaggcctatcggcctctgctgttggcagtgactaaacccgaggcggcctgaggcaaccggcctgcaattgccgcctggcgacgccaggcgtggaaatcgcatacgcgattcccacaattgcagtccgacggctactgctgaatgatctaagtttttggcattacccgccaggtctgctggcgaacaaatgagatggcacaacggtcgaacccggcgttttcgaaacctgttgaagtgaacaaggctaccaagcctgtgtacttagttaggacgagagcgcagcgcattccatcaaggtccggagcctaaaactccaacaagaccggatacatttgcgtagacctcactgcaatccacatttttcgcttgcaacaaggcggcggaccataca

SEQ ID NO: 2753 - DNA, 1472 bp, unidentified
  source 1..1472: mol_type = unassigned DNA; note = element_3eabde9
  misc_feature 1..2: note = core
  misc_feature 3..233: note = LE
  misc_feature 234..1451: note = CDS
  misc_feature 1452..1472: note = RE
  misc_feature 7..232: note = bridgeRNA
ctaatgggtctcgatcattcggctctcgatgagagagcagaatggttccgagccgccggtcgggtcagcactctcttggacagggtcttgagctctacgtctagatcgtgcgcctgaccggttggtgaggttggccgtgatggctggtgggatgacgtgccacgagcactgaaccattagtgagctgctggtcgcctcggggctcaactgacagacacgactaggaggtgcaaatgggaaaagtgttcgttggccatgactgggctgaggaccatcacgacgtgttcatcgaggatgacaccggtcgacgactcggcggtgggcgagtcccggagggcgtcgatggaatcggtcgcttccatgcgatgcttgctgggttggtcgctgaccccgccgaggtagtgatcgcaaccgaaaccgaccgcggtctgttcgtgaacacgctcgtcgctgctggttacacagtgatcgcggtgaacccgatgtcgacctcgcgttatcgggaacggcactcgacatcaggagcgaagtccgacccgggagacgcgaagatcttggccgatctcgctcgcaccgacgctcacaaccaccgtcagatcgctggcgacagcgagctcggtgaggcgatcaaggtgctcgctcgggcgcatcagtcgatgatctggacccgacagcgtcagacgaaccagctgcgctcgacgttgcgtgagttctacccggctgcgctcgaagcgttcgatgagctcgccggacgcgacgcgttggcggtcttgtcgattgctgcgaccccaacgcagggtcggcatctgtcgctctccaggatccaagccgcactgcgacgcgggggccggcaacgacgcatcgagcaacgagccgtcgagatccaaacggcgttacgcgccgagcagctgacagcaccggatctgatcgctgacgccatgggcgccgccgtcgccgcgttggtggcggtgatcgtcgagctgaacacccagatcgatgggctcgaagcaaagctggccgaccgttttgaacagcacccggacgccaagatcttccgatccctgccaggactagggatgacactcggcgcccgggtgctcgcagagttcggggacgccccgaaccgctacgcagatgccaagtctcgcaagaactactcgggcatgtcacccatcacccgctcatcaggcaaacaccatgttgtgctcgcccgctacgcccgcaacaagcgactctccgacgcctgctacctgtgggcattcgccacgctcacagctagccccggcgctcgagcgttctacgacgaacaccgcgcccgcggcgacacccacaaccgggcgctccgcgcgcttgcaaaccggctcgtcggcatccttcacggctgcctgcgccaccaagcccgctacgacgaacacaccgcctgggcccaccgacaacaacaagccgcttgacaccaaccacccgtgggatgt

SEQ ID NO: 2754 - DNA, 1362 bp, unidentified
  source 1..1362: mol_type = unassigned DNA; note = element_3eace41
  misc_feature 1: note = core
  misc_feature 2..330: note = LE
  misc_feature 331..1353: note = CDS
  misc_feature 1354..1362: note = RE
ttgtatgttatcctctgttgttatttctgcaactttccttttccgagaatgggtttgatcgctcgtcggaggaaaaggaaaaagttgcagagacatgacagatgtgttacggtaaaaaggttggattcggcaaccagtcgatgaaaatcgcggaagcatcatctcgaggtcgttttcgatccttgagagatcgttaaaaagcaggagagatgcttccgctaccgtgctttgccgaaagaccgtacagctatccaggccaaaaccgaataatcaaaatgggtcatggcaagccgcactgttaatgtaacacagaaacaggaggatgcaagtatggaaagcagggagagtttctgggtgggatttgatgttggcaagaacagtttttccgccgcgttagactgtcacgggaagaacatccgggctaagataacctcattaccgtgtcgtgacttcaaacgaactccggagggcgtcgaacagttctttctatgggcaaagaaaaccattccgggacacgatatccggattgtaatggaaacgaccggttgctattcacagcatttgactgactggatcaatcagcttcatccagaaatcagcgtgaccattgaaaatgctcgaaacattcatgctttcattcaaagcctgaacctgccacacaaaaccgataaactggatgctcaagccattgcccgatttggcacagaacgtcaccccaagccaaccaatcgtccatcgaagacgattctgagcattcgcgaactttcccgtgaacgaacagctttaatcaaagctcgtgtcaacctggaaaatcgcagggatacgctgacctctccggtcgtgcgtaaaatcaatgctcaaactctggcaacactaaccactcagatcgagaaaattgatagagaaattaaagcctgcgttgttcaagatgaagaattgctttctgaagttcacatcatgacaacgatgccgggcgtaagttttatttccgcatacagtatccttgctgaaattggttcattaaaacaatattctgcgaaggaattgtccgccttatccggattggctccgcgaattatagagtcaggttcgagtgtacattcatcttatttaagccgaagatcatctggacggcttcggcaaattctttatctggattctgttcccggagtcccgaaaattccggttcttcaggaatttcatcaacgcttaattggaaaaggtaagaaaaagatgacagctcggtgcgcttgcatgcggaaaatgtttctgatccttcgctccatggtcgttcataatacccctttcaatggcaaatttccaaataatcagcgaaaggggcttgacttttgacacactatc

SEQ ID NO: 2755 - DNA, 1566 bp, unidentified
  source 1..1566: mol_type = unassigned DNA; note = element_3eadc2c
  misc_feature 1..2: note = core
  misc_feature 3..268: note = LE
  misc_feature 269..1435: note = CDS
  misc_feature 1436..1566: note = RE
  misc_feature 3..244: note = bridgeRNA
cttgtatgatgttgttagaagcaaaaacaacatacttcctttctttttttgtttcgtggtttaatacattcagatactgtgacttttgattttttcctgtagctttgactacttaacaggagtatattgccatctcttttatctgaattgtttattagctggatgtttccggagcgtttgctctgagtacttatttcactcaagtctacgatgataattgctgatgaataccacggtatcagactttatgaaagggaggcacaacctcatgatttacgtcggcattgatattgccaaacttaatcatttcgacgctgcgagttcttccaacggcgagatactcattgagccgttcaaattcacaaatgactatgatggcttctatctgctgctttctaatctggcgccacttgaccagaacagcagcatcataggtcttgagtcaacggcacactacggtgacaaccttgttcgttttcttatcagcaagggctttaaagtgtgtgctctaaaccctattcagacttcttctatgcgtataaataatgtacgcaagaccaagactaataaagtcgacacgtttgttattgctaaaacccttataatgcaggactccttacgattcatgcccctgaaagatctggattatattgacctcaaagagctcagcagattccgacagaaactggtgaagcagtgtacccgtttaaaaatacagctgacttcttatgtggatcaggttttccctgaactacagtatttcttcaaatctggcctgcatcagaattctgtctatgccctccttaaggaggctccgacaccagctgtcattgcttctatgcatatgacccatcttgctcaccttctcgaagttgcttcccacggccatttcggtaaggagaaagccagagaattaagagttctcgcacagaagtctgtcggtgtcaatgacagttctttatctattcagataactcacaccattgaacagattgagttactggatagccagttgtttcactcagagcttgaaatggcaaatcttgtcacctgtctgcactctgtgattatgaccattcccggaattggtttcatcaatggcgggatgatccttggtaagattggtgatatacaccgtttctcagaaccaaaaaaactgcttgcgttcgcccgactggatccatcggttcatcagtctggtaatttccaggcacagagaacaaaaatgtccaagagaggttccagggtattacgctatgcccttatgaatgcagctcacaatgttgttaaaaacaatgctactttcaaggcttattatgatgccaagagagctgaaggccgaacccactacactgcccttggacactgtgccggcaagcttgtcagagtcatctggaagatgatcactgacgaagtcgaatttaacctcgaataagaggtctgtataccataatcgatagattttgaaaaagagcttttagggcgctttgttcaagttacccttttttacccgaaacagaaaaaatgaatttctggctaatttatacttgacttttcatagctggt

SEQ ID NO: 2756 - DNA, 1574 bp, unidentified
  source 1..1574: mol_type = unassigned DNA; note = element_3eaf365
  misc_feature 1..5: note = core
  misc_feature 6..279: note = LE
  misc_feature 280..1455: note = CDS
  misc_feature 1456..1574: note = RE
  misc_feature 40..259: note = bridgeRNA
gtcacgtataatccaatcatattagatagtgattggattttctcctttctcccaggttctactgggtaattcaatcctaatctgatatatttacttaagcactgtggatctgtatctgtttttttacagcttcgactgttccgaggtgactcagaccacagcttttcgtctattactgttaatcagtttgttaacgcttgacgtttctatttacgtgattacacagtcgaattccctgtggaagacaacagtgctaaatacagatcaggaggtatttttatgtccatgtactttgttggaattgatatttccaagtacaagcacgattgctgcatcctctccgcagctgatcaaaatgttgtttcaaagtttactatcaaaaatgatatgtctggatttgaacagcttattacgactttacattctctctccaatcccgaagatataaaaatagggtttgaatctactgctcattatgccctcaatctggaacttttccttgagaatgcccatcacagcttcatggaaatcaatccagtccttatcaaggaatataagaaatccacttctctcaggcgtaccaaaaccgactctgttgactgcgaatcaatcgcccgctggttaatgacagtagagtacaaaccccatccaaaaggattttaccatgcttattctttaaagtcactaactcgtttaagagacaagttggttcggcaacgctctttctatcttgtaaaaatcacaaatgttctggatcacacatttcctgaatttaagccattctttcatgaacgcttatctaaaactgcgctgtatctgcttgaaaactatagttctgctgaaaaaatggctcgaatgaactccgcttcttatgagaaactccgttctttatcaagaggaaagttctctcctcaacaattccttcggctaaaagaacttgcttccaatacggttggcataaataactctatctttgatgtggaactgaactgccttcttacactatacaaatctcttgtaaaggagattggcgcactggaaacagaaatcaacaagttgatcgaggaggtccatcctcactatatgtccgttccaggaatcggtcccatatctgccgctgtcatctactctgaatacggggatctgtcgaatttttctaccccggctcagatgctcgcctttgccggtattgaacctggcataaacgaatcaggaacagaatcacacggaggacgaatggtaaaacacggctcatcacagctccggtatgtcctcatcaactgctgtcttccattaattcgttttgatatgacattcgcagcttactatgccaaaaaacgtgcagaaggcaaaccacacagagtagcgatcactcatgttgccaaaaagcttgttagagtcatctatgcattggagaggcagggaacagactttaacgcccagaagctcagatagctgtttaaatcactaaactttgtcccatctgaaatacgatgtgttcagatggtctgttaaagttacccttttttatagaaataaaaaagttccaaaaatctcttgactatttatagttt

SEQ ID NO: 2757 - DNA, 1369 bp, unidentified
  source 1..1369: mol_type = unassigned DNA; note = element_3eb1f2f
  misc_feature 1..2: note = core
  misc_feature 3..75: note = LE
  misc_feature 76..1101: note = CDS
  misc_feature 1102..1369: note = RE
  misc_feature 1077..1356: note = bridgeRNA
tgatggggtggacgccccccgacggcaccgacgtgccaaagtgatggtgttgcggaccaccagagggaggcgtctatggaggaagttagcacaatcggcttggatctcgccaagcacgtgttccaggctcatggggcgagcgcatcgggcgctgtcgtgttccgcaagaagctccggcgcgagcaggtgctatctttctttgcaagtcagccccgctgccgggtcgcgatggaagcctgcgcgagcgcgcactactgggctagggctatcggcgatctcggccacgaagtgaggctgatcccacctgcctacgtgaagcccttcgtgaagcgccagaagaacgacatggccgatgcggaggccatctgtgaggcagcccagcgtccgaccatgcgcttcgtggccgtgaagagcgaagccaagcaggcctcgacggtgatctttcgaacccgtgatctgctcgtcggccagcgaacgcaaatcatcaatgcccttcgcggacacatggccgagtttggcttcatcgctccccaaggcgcttcccacatggggcggctcatggctcaggtggaggatcccagcttcacccttccggaaggcgcgcgctcctgtctgatgcggcttgtcacgatgttgcgtgacctccaggaggaggttgaagccctcgatcgagagattgcggcccgagccaagagcgacgatgtagctcgtcgcctcatgaccgttccaggaataggcccgctgatcgcgacagccatcgaggcactcgcacctccccccgagaccttccgctcgggccgggatttcgccgcatgggtcggtctcacgcctgtgcagaagtcaaccggcggcaaacagcggctcggccgcacatcccgcatgggcgagcggaccctccggcgcctgctcatcatcgcagccagtggtgtggtgcgctgggccaagcgcaaaggcgcaccagccggatcctggctcgctcgtatgcttgcgcgtaagccgccgatgctggtgatcgtggctctggccaacaagaacgctcgcgtggcctgggcgctgatcgccaaaggagggatctatcgagctccagccgttgctgcatgagccagcgacgggtgtgaggctgtcggcggggtgaggaggtcaaaggacaggtatggcgcaacgtcggtgaggcgggatcaggagaaccaggcgcacggggagtgcttcgagcacgttccagtgatgtggacctgatccccgaacttgaactcccatccgggcccgcggccatgatcgtgccgcacgagaggccgaacacatggcagcacccgatcacgcgcaacgcttgcctcgagattcttcttgcaccgaagggggcgtccacaca

SEQ ID NO: 2758 - DNA, 1805 bp, unidentified
  source 1..1805: mol_type = unassigned DNA; note = element_3eb2ae9
  misc_feature 1..2: note = core
  misc_feature 3..282: note = LE
  misc_feature 283..1500: note = CDS
  misc_feature 1501..1805: note = RE
  misc_feature 12..302: note = bridgeRNA
ctgttacaataaaattggtcgtataaatcccttacaaccagcaagggtttacacggacttattacctaagctataatggaagcagtaattggactgatgtattcctccgtgggacaaagcgcccgtaatttagacagtcatccatgctttcattatagcattcggtttatgcaggttgtgccacagggaactgtgcgttcgtgtcacccaacagattggatcggtaatgagtaaaagtgtggtttatccgattacaaaaaacaatgtcaggagcgataaaatatgaacgcagtaggtatcgatgtttccaaacgaaagagtacagttgccattcttcagcccttcggagttgttgtggcatctccccacgatgtgccgcacacaggcagttccttgaaggagcttgcggcttcaatcaaaaaactgcgcggtgagacacgagttgtcatggaggcaaccggaaattactatgagccgatcgctcgatttctccatgaacaaggtatatttgtttccgtagtcaatccgatgcttatcagtgacttcggtggaaacacattgcgtaagcctaagaccgataagaaagattctctgaaaatcgcgtcctatgcacttacttattgggtcgatttacagcagtatcacccgcaggaggatctgcgcaaatccctcaaaatgctgaacagacaatatcagcagtctgtaaaagtacaaactatgctgaaaaataatctgatctcacagcttgaccttacctttccgggcatcaacaaactgtttacttctccggtacgtgattcggacggtcatctgaaatgggtggactttgtactggaatttccgcatcgtgacatagttgccaagcttacactgagcgccttcaaaaagaaatatcagcattggtgtgataagaaaggttactattaccgaaatgggaaggctgagaagatccacgcatttgcacgtgaaagcgtcagtgcagtgtcggctgacgaatctattttactgattgtcaagcaagcagcagaaatgttaaacggtgcactgaaatattcccattcattgcgtacggaaatgcatagaattgctgctgcgctgccggagtacgaaactgtaatgaacctttatggtgttggtgatacagttggacctcagcttatggctgagatcggagacacccgccgttttcacagccgcaaggcaattactgcatattttggatatgacagtgaaaacgacgattcgggaacaaaggtctccaaatcaaatccgatgaccaagaaaggcgcttctgcactgcggcgaacgttattcacgattatgatcacgctcattaagactcaaccggctgataatcccgtttatcaatttcttgacaagaaacgatctgaaggaaagcattactattgctacatgaatgccgctgcaaacaagtttctccgcatctactacgctaaagtaaacgaagcgctgaactcacgagagcattcatcaggctgaaatatctattcatagattccaatcccgaggcatgatccaggcacggcgtaagccgcttgaccttgacaggttatcataaaaatgctaaaatgctgctgcgacggtgactgccttcatctattcatgagttcctcaccgtcggcacgactctcttggcatttttatgatgttctgtcaaggttgccgttcgctgcaactgcattttctttttcaggctgctccggcggtctttttgtcgtgcactcttttaaattatgaattatttgtaaactttctccttcggggcttgacttttatttgcaggt

SEQ ID NO: 2759 - DNA, 1140 bp, unidentified
  source 1..1140: mol_type = unassigned DNA; note = element_3eb3463
  misc_feature 1..2: note = core
  misc_feature 3..168: note = LE
  misc_feature 169..1125: note = CDS
  misc_feature 1126..1140: note = RE
  misc_feature 10..183: note = bridgeRNA
cttgtatctttaggcctcggaccggcccgggcagcccgagcggcctctgggccagttgttcaagcccgtttctgagcactgggcacccgagccggaccgtccttctctgcagcccgaacggttgtatgaacttgaagttcgcatagacaaggatgggagtgagaggacgtgtccgactctgtttttgtaggaaccgacgtatcgagccagaccctggaggtggccagcacggtcgcggccaagacctggcaagtcagcaatgacgctgcagggatcgagcagttggcctgccagttgacggccctggggcccgaactggtggtgctcgaagccaccggcggctacgagttcgaggccgcgtgttcgctgcaggcggccggcctggcggtggcggtggtcaatccgcgcacggcgcgcgacttcgcccgcgcgatgggtgcgttggccaagaccgacgcgctggacgcacgcatgctggcgctgttcgcccgcacgctgcaccagcgcccggaccgcgagcgtttcgtcaaaccgctggccgacgctgagttgcagcgcctgcaagcgctggtgctgcgcaggcgccaattggtgcagatgctcaccgcggagcgccagcgcatgcggctgtcgcacgctgcggccaagcccagcatcgagcgcgtcatcgagttcttgaagtgtgagctcggcgacagcgacgccgatgtggctgcccatgttcggcgccaccacgccgagctggctggcgcactgagcagcgtgccgggcatcggcgcggccagcgtcgcggtgctgctggccgagttgcccgagcttggcaccctcgaccggcgtcgcgcggctgcgctggtgggtgtcgccccgctgaaccgcgactccggccagatgcgcggccagcgcgccatctggggcgggcgcgccgaagtgcgccgcaccctctacatggctacgctcgtcgcggtgcgtcactgttcggccttccgcgtgttctacgaacgcctgctggccaacggcaagcgcaagaaggtcgccctggtcgccaccatgcgcaagctcgtcggcgtactcaacgccatcgccaaacagcgttccaggtggattccgatgcttcacgacgcttgaccttcaagacggttg

SEQ ID NO: 2760 - DNA, 1653 bp, unidentified
  source 1..1653: mol_type = unassigned DNA; note = element_3eb48cf
  misc_feature 1: note = core
  misc_feature 2..269: note = LE
  misc_feature 270..1520: note = CDS
  misc_feature 1521..1653: note = RE
  misc_feature 13..289: note = bridgeRNA
cctgttactatatatttgccccttgatttatggcagccagccataggcatgggacatctcgttgcctaaactgttagaataggagggtaatggtctgaccttttgctccaagggcttttacgtccgtgagaaagtcagtcagccatcctcctattcgcagtgttcgatttgtgcaggtagagccaatgcgttcgtgtcagcaaacagatagaatcggcaatgggtaagatggctttgtccattgcaatttctaaacaggagtgatacttatgaacgcagcaggcattgatgtttccagcagaaagagtatggtagctatactccgtccttttggcgaagtcgtaaaacttccctttgaggtatgccacagtgcagaggatttgtccgcattggcgcaacagctgaaatccatcgagggtgaaactcgagtggtcatggaacatacagggcgttactatgagtccatagccaaagttctccatgaagccggcctttatgtcagtgtagtgaatccactgctcattaaagagtatggagccaattctctgcgcagagtgaaaaccgacaaagccgatgctatgaagattgctcggtatgctcttgacaactgggcagatttgcgagactatactcctatggatacgattcgctataatctcaaaaccctcaaccgccagtttcagcttgcctccaagcagcgaactgcaagctccaacaatcttattgcgcttttggagcagtcctttcctggagcccgcaaatgctttgacagccctgttcgcagtgacggcacgcagaagtgggtggattttgcacacgctttttggcatgtggattgtgtgcgcaaacaaagccttaacgctttttcagagcgttatcggaaatggtgtaaacgacacggttatttctttaagcaggcaaatgcagaggaggtatatacgcttgcaaagaatgccgttgtgctggttccaaaatccgatgtgaccaaggtgctcatccaggaggcggcaaaccagctcacaagcatttcgcgctccgtagaaacttaccggacagaaatggagcgccttgcgtccatgctgccggagtatccggtggtcatgcaaatgtacggcgttggcaagtcttttggaccgcaactcatggccgagattggagatgtgcgccggtttgaacgcaaacaggctttggttgcctttgccggtatcgatcctatgcccaaccagtccggtgagaagaatatacgcagcaacaaatcctcgaaacgaggctctccgtaccttcgtaaaaccttgttcaatatcatgagcatctacttgaaatgtgctccccaggaagaacctatattccagttccttgaccgtaagcgaactgagggaaaaccctactacgtttacatgacggcggccggaaacaagttcctgcggcgatactacgcccaggtgcgggactatcttgccacgctggagaatctaccgcccgtagacatggaatccacgggattgcagcacaccacctaagccccccatattgattgctttttaagccggcgctctgcggtggcttatttgtgttgccctttttgctctacctgctgtctgtaaaattctcttctgtcaagtccaattttgggcttgactttttatttgcagg

SEQ ID NO: 2761 - DNA, 1318 bp, unidentified
  source 1..1318: mol_type = unassigned DNA; note = element_3eb6d87
  misc_feature 1..3: note = core
  misc_feature 4..235: note = LE
  misc_feature 236..1111: note = CDS
  misc_feature 1112..1318: note = RE
  misc_feature 1110..1306: note = bridgeRNA
agatgtatggactcccacttccatcagaagtaacgtaataagtgttcaaacttttactaaggagcccatacatgttgaattgtaatgtgatagcgattgatttagcaaaaaatttatttcaagtttgcaaaacgcaaagcaatgggcaaagttatttataacaaaacaataagcagagccaagcttaaagagttattaattaaagaacagcaatctttagttgctatggaatcatgtggtggtacgcattattgggcgcaatttgctaaacagggcagggcaccagatcaaagcgatcaacgcgcgacaggtaaaagcgtttcgtcaagggcagaaaaccgatgcaaatgatgcgctggctatttcagttgcagcgagacagcctcatataaaaggaagtcgtttactttcagtgcaagagcaatgcttacaaggcattgaatgtatgcgtgatttattagtcaaacaaaaagtcagcttaggtaatcaactaagagctttattgttagagtttggttacccaattgctcaaggggatacgaagttgacccaagcgatacctgagatattagaagatgctgaaaacagcctaacaggcgcttttcgcttcacaattaaccgagtttatcagcgttttactgaggcggtcgaagaggtgaagctgattgaaaaacaattgcatgaagtaattaaagaagatcaaacctgtatacgcttgcaagcattagaaggcgtgggaccggtctgtgcaatactgattaaaatagcactaggtaatacaacccattttaaaaatggtcgagaagctgcggcctgctttggtctaacaccagtacagcatagtagcgggggaaaacaaaagataggctcgatatctaaagtaataggaaataagaagctgcgtagtgctttgtataaaggcgcattagctgttgtttcacaactagaaaaaagagaagttcgtagccaaaaagatatatggttaaaagaattaagtgtacgtcgaggcaaaaaagtagccgcaatagcgttagcaaataaaacaatcagaacggcttttgcaatgcaaaagcataacaaagattatcagccacaattacttgtggcttaaaaacttgtcagaaagatcgattgaaataggtaagaccgaccttcaatagactgttagggtctgaagtttgaaaaactgctcaacagaaaagtcatgaaggtgcgaatacatttgaggccaggggtagctcctcaatttgagcccgtatataagctagcatctaatttatttcaattttatttttgacattaatagggagtccatata

SEQ ID NO: 2762 - DNA, 1393 bp, unidentified
  source 1..1393: mol_type = unassigned DNA; note = element_3ec40e4
  misc_feature 1..2: note = core
  misc_feature 3..84: note = LE
  misc_feature 85..1110: note = CDS
  misc_feature 1111..1393: note = RE
  misc_feature 1156..1380: note = bridgeRNA
tgatgtggtggacggcgcccgctcccggcgacgaatcgccttagggtgatcgttgcgacgaatcacatgaggggagccgtccacatgcaagttaccacgatcggtttggatatcgccaagaacgtgttccaggtccacggaatagatggcgacgagaaggttgttgtccgcaagcaactgaggcgcggccaggtgctgcgattttttcaggagctatccccctgccttgtcggcctagaagcctgtgccacggcgcattattgggcgcgcgaactcgcgaagctcggtcatgaggtgcggctgatgccggcgagggacgtgaaggcctatgtcaagcgcaacaagaatgacgcggctgatgccgaagcgatctgcgaggcggtacgtcgcccgaccatgcgctttgtgcgggtgaagtcagccgagcagcaggcgcagttgatgcagcatcgagcccgcgatcttttgctgcgccaacgcacgcagctgatcaatgccatgcgcgcccacatggccgagctcggcattgcagcgccacaggggcgggaggggatcaagcagttgctggcgattattgcgaatgatgaggatgcgcgcctgccggtcgatgcgcgcgcgagccttatcgtgctggcggtgcagcttgaggccatgcacacgatgatcggatcgcttgagagacggatcgtggcgaggcatcgctcgagcccggacagccagcgacttcagacaatcccaggggtgggggtcattggcgccacggcgattgcggccaccgtcacggaccccgcggcattccagtcggggcgcgattttgcggcttggattgggctggtcccgcgacaagattcaactgggggaaagccgagactggggccgatctccaagcagggggaccggtacttgcggcggatccttgttgtcggcgcggtttctatcttgcgccgcgccaagttaaatccagagagatatccgtgggtcacacggctgctagcgcggcgaccattcaaggtcgtcgccattgcgctcgccaacaagatggcgcgcgttgcctgggcactgttggcaaggggtggggcctatcgggcgccgcagctcgtggcggcgtgagaaaggggctatccgatgggaggatgaggttgcgtccgtgcgttccatgaaccgcaaggggtgatgacgacattgatgcgaaacggtcgagaccgtcgatcgggaaagcccgttaagtgccacgcgaggaaagagcgcgtgcttttggttgggacccgatcagcggatcacatcagggccagcggccacagcggccgtattcaaaggccgcatacatggctgcacccgaacgtttcgctgagatgtccaatttttcccttgcaccgcgggcgccgtccataca

SEQ ID NO: 2763 - DNA, 1447 bp, unidentified
  source 1..1447: mol_type = unassigned DNA; note = element_3ec8eb0
  misc_feature 1: note = core
  misc_feature 2..141: note = LE
  misc_feature 142..1161: note = CDS
  misc_feature 1162..1447: note = RE
  misc_feature 1212..1447: note = bridgeRNA
aaatgtaatgaacgcctcccacccgagtggcatggaagccacgaaaaacgtcgattctcgcgaggtaacaggggccatcgggtatcccccgtccggaggatcatgagggccataggccaaccaaccggaggaggattcaaaatgaaactcacgccagtgggagtcgacattgccaagaacgtattccagattcattacgtgaatgcggaaactggcgagatcgtgaacaggcagatcaagcgagccaggtttctggagtactttgcgaacctggccccctgcctgatcggcatggaagcctgcggcgggtcgcagcactgggcgcggcggctgctcgaaatggggcatcaggtgaagctgatgccggcaaaattcgtcaaggccttcaacatcggcaacaagaacgacccggctgatgcgcgcgcaatctggctggcggtgcagcaacccggcaaagcggtggcggtgaagaccgaagcgcagcaggccgtgctggcgctccaccgcatgcggcagcaactggtgaagttccgcacaatgcaaatcaacagcctgcgaggtttgctggccgagtacggtgaggtgatgggtaaaggccggtccaggttggataaggcaatagcaggcgtacttgagaagttgaccgagcggttgcccacggtactcattgaaacgctacgcgagcagtggaatgggctggaaatgctggaccggcagattgccgagatagagcgacgccttcaggagtggatgaaacaggacaaagcatgcaagagcatcgccgcggtacccggcgtaggtctgctgacggcgacggcagcagttgcgacgatgggtgatcccaagtcgttcagatcggggcgcgagtttgccgcctggctcggtttggtaccccgacaaacgggttccggcggcaaggtgctcttgctggggatcagcaaacggggagatacgtatctgcgcaccctcttgattcacggcgcccgcagtgtgctgtacaacgcgaaggatcccgggacatgggttgagcgcatcggaaagcggcgaccaccaaacgtggtactcgtagccctggctaacaagatggctcggacaatctgggcgatccttgcccatgatcggccgtacgagaagggtttcataagcgcgaaacccgcatgaactatgtaccctgcgcagaacgtatttaccatctggtaaggacccacatctcgaagaggttgcgtcggcgattgagtgcgatgacgaatcaggtcggaccgtgactcgctaaacctgcatatgacagggggctccgagctcttacggaaaatgaggtgcgagtcagcggatttcatcggggcccgcagccactatcaggctgcaacaaggccggatataaagctgcagcccaacctaagttacgtcaaagcgcacaaatgcctcgcaaacgggaggcgttcatata

SEQ ID NO: 2764 - DNA, 1171 bp, unidentified
  source 1..1171: mol_type = unassigned DNA; note = element_3ecf8cc
  misc_feature 1..3: note = core
  misc_feature 4..205: note = LE
  misc_feature 206..1168: note = CDS
  misc_feature 1169..1171: note = RE
  misc_feature 7..181: note = bridgeRNA
ctcgcttgtatgtttagacttgaaggggtgggtgggactaaagctcgtcatctgactctagccagtacagaccgtgggagacatcgtcccaccccttcacctaatgcgccgataaggaatgcatcggctcggaccgacgatagcgacaagccagcgcaacggtgaaccccgacaagtttctaaaccctagctcggagggtgggccatgacaatccttgattcgcaggtggtcgttggtgtggatgtggcgaaggatgagatcgttgtctatcgatgcgacgaagagagcactttgatcgtcgccaatgaacgatcagcactgaaaaagtggcttaagttattgccagacaactgtgcactggcgcttgaagcgaccaacacctaccacctcgacacgacggaaatcgctcatgaactgggtcatgacgtttacgtcattgatggcagccgccttaataaataccgcgatgggataggtgtccgggcaaaaacagatgctctggacgcggtcttgctggcgcgttatttgggcaaggagtccgacaagctcagggtctggagtccgcctcccaaggcttacacgcagctcaaaagcttgctgcgacgccgggctgagcttgttcgacatcgggtggcaatcaagcaaagttggagggacgaacccttgctcgaagaggcgctgggtgaatacctgcgctgtgtagagcagattgaaaaaggcattcagaaggcgctgaagaacatcgttagcgaagcgggtatggacgctcaggtaaaacgctgccaagccgttgaaggcataggcgtcctgacggccacagcggcggtaacagctttcatgcgcggagagttttccgacagcgatggcttcatcgccttcctgggaatggatccgcgagtgagacaatcaggcaagaaagatcagagacgctacttgtccaaacggggcgattcggagttccggcgcttatttcacaacagcgcaatggctgccagccgctcaccaacctggagaccgttctatcagcgttacctggaccgaggcctcaaaggtacccaggccttggtgattctggctcgcaaactggccagagtggtgtttgccttgatgaaaaaccaaagtgagtaccaaccaaattctatgtttgggggttccccccaaacatagaat

SEQ ID NO: 2765 - DNA, 1371 bp, unidentified
  source 1..1371: mol_type = unassigned DNA; note = element_3ed031c
  misc_feature 1..2: note = core
  misc_feature 3..86: note = LE
  misc_feature 87..908: note = CDS
  misc_feature 909..1371: note = RE
  misc_feature 1093..1358: note = bridgeRNA
tgatggtgtggatgccccaccccggaaccagcatcaaactgagccatagtggtgatgttgaaagcaccaaattggaggaggcatccatgaacgaagttacaatgataggcgtcgacttagcaaagtcggttttccaagcgcatggcgcgacggcggcaggtgaacctgtgttccgcaagaagttgtcgcgcgggcagttcctaaagttcttgggagagcagccctcttgcgtggtcgcaatggaggcatgtgcctcgtcgcattactggggacgtgagatcatgaagctcggccaggaggtccgtttgatcccgccgatttatgtgaagccctttgtgaagcggcagaagaacgatgctaatgatgcagaggctatcgccgaagcagcagtccggcccacaatgcggtttgtgcctgttaaatcggctgagcaacaatcccgatcgatgatctttaagacgcgtgatctatttgtccgacaacgcaatgcgatcatcaacgcgctgcgcgaccatttgatggaatatggtatcatcgccccaccgggtctaacttttgtgaaaaaactggccgaacagatcgatgacccggaaagcgatttaccacctatcgtcattgaactcagtcgcgtgcatctggatcaactcagtatcatcacggataaggttgtagcgatagagaggcgtctaaaagaggagtcgaaatctgactctgagacggtccgtttacagactgcaccgggtattggtccaatcagtgccatggctattaaggcatttcccccaccgctggagggctttaagcgaggacgcgattatgccgcgtggctcgggttggtccctgtccagaagtccaccgggggcaggcaaataaatattgggcaagacatcaaagatggggcaacgtgacatccgtcgattgttgatcatcggcgctatgacccgggtcagatgggcgatcaagaatggaccgcctaaaggctcatggcttgagcagatgttggagcgcaggccgcgcatgctggtggcgattgcgctcgccaacaaaacagcgcgcatcatctgggcaatgatgacgaagcatgaagattatcgagatccgatcgcggcagtttaaaactgcaacgttcggtataatgtgagaaggacattgagacagtaaggacaaaatgatcgactagatcgaggttaggaaaaccaggccttcccagagagcttagtgctcgtgccattgatttggacctaaccttcgcatcgccataccggcccgcggcatgtgaaacgccgcaatctgaggcctgacacatgaccgtacccgatcacacgttcgaaccgttgaaaaatctcttgcatcaaagcgggcatccacaca

SEQ ID NO: 2766 - DNA, 1215 bp, unidentified
  source 1..1215: mol_type = unassigned DNA; note = element_3ed8126
  misc_feature 1..2: note = core
  misc_feature 3..213: note = LE
  misc_feature 214..1200: note = CDS
  misc_feature 1201..1215: note = RE
  misc_feature 12..188: note = bridgeRNA
cttgtatcattctttctgtgatggttagctaccatcgcatgaggtgaagagagctttttagtgcgactaaggcttagaccttgcagcaaagattaagcccttcacctcttcctctcaccagcaaaacactgcacggtagccaagggttagaccctgtatgtacaagttaagtgagtgagttggtattcacctattaaaattgaaagggcaaagatgttttatctcggtattgatgttgctaaagccaagctagattgttcgctgctgctagatgagagtggccttaaacgtaaatccaagaaagtcgccaacaatcaaacaggattagcggagctattgacgtggcttgctaaacaagcagttacacttgctgatcttcacgtcacaatggaggccacaggagtctatcacgagcaagctgcgcagaccttatacgacgctggcgtcactgtttccattgcaaatccagctcaagtcaagtctcttggaaataccctggctatccgcaccaaaaccgatggcattgacagttttttgattgcgcgttttggtctgatgtgtaagcctgcggcatggattccgcctacaccagaagctagagtccttaaggctttgttagcccgtcaagaagctatcgctgaagacttacagcgcgaacttaaccgtcaggaaaagattcagatcgctgctgctcctgaacgcgttcaaaaatcactcgacgacagtattactttcttgcagacgcagttaaagcaacttcaacaagaaatcgatgatcatatcgatcgacatcccacgttgaaggaagacctagatctgttgaagagcattcgcgccattggcccgcaagtgggcaaagcgatgctttccgtaatgcaaactcattcatttaaaacggctgaacaactcgctgcctatcttggcttagtacccgtggagaggcaatccggttcctcagtatttggtcgtgcccgactttctaaagccggctctccagaaatccgcgccaagctttatatggcagccattgttgctatacgttataacgcccatgtcaaagcactttatgaacgattacgcgcccggggtaaatcggctatgtctgctctcggtgcttgcatgcgcaaacttgtgcatctttgtttcggcgtacttaaaactcgtgtgccttacgatgaaaattatggaaatattgcttgacatggaagacggtat

SEQ ID NO: 2767 - DNA, 1545 bp, unidentified
  source 1..1545: mol_type = unassigned DNA; note = element_3edb1fc
  misc_feature 1..3: note = core
  misc_feature 4..240: note = LE
  misc_feature 241..1434: note = CDS
  misc_feature 1435..1545: note = RE
  misc_feature 7..260: note = bridgeRNA
attggtaatatataagcgagggtttaacagccttcgcttttcttatatgatgaaagggaccggtctgacggaatttggaattgggacaccacgcccgcagttaaatgtgtcagccacccttcatcattctgcgttcgatttagctagttgggacagaatcctgctcccgttttacgcaccaatctgaatgaattttgaagcgctggaaccgatcaatatcattcaaaaaggaggatcaccatgattgctgttggaatcgatgtttctaaatccaagagcaccgttgccattctggattcctgtggaaccgtcctggcaactccattcaacatggcacatactcaacctgaaatgaatgccctcgtttcccggttaaaggcatttgacgagcctgtaaccattttgttggagtataccggacactaccattatcctgttctgaaaaagcttcaggaagaaggctttccggtgtgcgttgtcaatccgtaccagatgaagaagtacggcgatgttgagattcgtaaagcaaaaacagataagaaggacgctcttcgtatagccacttttgctctggagaagtcttacaagcttgttccctacagttctatggaacagaaatacgaggatcttaaattcctgtccaggcagtaccagcagcggatttcttttgtttccactctcaaggtgcagcttattaacatgctggaccagaccatgcccggtattacgaaaattctggcactaaaaagccgagatccggaaaaatgtgccttactgctctttattaagcggtataagtcttttgacgagattcagcgcattggcaaaactcgatttctctctacttacgcaacacttatgaagaaaacaccggacagatacgccccaaagaagggattggaaatctacgagctggcccgggacagtattactacccgcggagaagatccttacatttggtcggcccaggatcagtgcgtcggtctgttggcaaccgctcagaatgcagcggatgaaatcattacgcagatgcagaacattgcggaaaccatccctgaatacacggtgcttcgcgcaatgaacggtgtcggcgaccgactagggcctgttatcctggctgagattggagatatacgacgctttcatagtggcaaggctctgaactcttttgcaggcaacgatgcaccgccataccagtctggacagtttgagagcagaaaccgccatatctccaaacgtggcagttcttctctccggaaagcttgttttgaggtcatgcaggcccttaaactgacaaaacctcaggacgatcccgtataccaattcattctcaaaaaagaacaggaaggaaagccctacaacgtcgccaagatggctggtgtaaacaagttcctccgaatctactacgcaagagcgatggaactctaccggtagatctctttcattatacacgaattttttaagcccgcaatctggtgggttaactttctgcgccctttttcaggaacagtagcacgaaatttagacttgacaaacattagctag

SEQ ID NO: 2768 - DNA, 1606 bp, unidentified
  source 1..1606: mol_type = unassigned DNA; note = element_3ee33d4
  misc_feature 1: note = core
  misc_feature 2..283: note = LE
  misc_feature 284..1486: note = CDS
  misc_feature 1487..1606: note = RE
  misc_feature 14..303: note = bridgeRNA
cctattacaatgtatttatggctatagtccctagcaaccagttaggactttaccatcttatagtttaagctgtagaattaaggtacaaaggtatagcggaactctccttggacttcgcgtccgtaaataagtctgctaaccagttccttattcgcagcgttcgttttatgcaggttgaactgctgttcctacagtgcgttcgtgtcacaccccaatagattgaataggcaataagtaaagctggtactttaccattgtaataatataaaggagtgactattttatgaatgctgtaggtattgatgtttctaaaggcaaaagcatggttgcgattcttcgcccttttggtgaaattgtttcttcaccatttgaaattcaccatacatccggtgatatccgtttactcatcaaacagattaaatccattgccggtgaaacaaggattgttatggaacataccggtcattattatgaacccttggcccatgaactctcaaatgctaatctctttgtgagtactgttaatccaaaactaattaaggattttgggaacaatactctccgcaaagttaaaaccgacaaagcagatgctctcaaaatagctcgttacacacttgacaattggaccgacttgaaagaatatagtcttatggatgaaattcgtaatcaacttaaaactatgaatcgccagtttagtttttacatgaagcataaatcggctatgaaaaacaactttatcaagattcttgatcagacctaccctggtgttaacacctactttgacggccctgctcgtgatgatggtagtcaaaaatgggttgatttcgccaccacatattggcatgtggattgtgttcgtaaaatgtctcttagcacttttactgaccattatcaaaaatggtgtaaaaggaagaagtataacttcagcaaatataaagctgaagaaatctatggaacagctaaggaactcgttcctgtacttccaaaagattcgcttacgaagctcattgtaaaacaggcttctgatcaactgaactcaacttctaaaacagtagaagaacttcgtacacttatgaacgaaacagcctcacatcttcctgaatatcctattgtcatggctatgcagggcgttgggccttcattaggacctcaactcatggctgagataggtgatgttactcgattcaatcacaagggtgctctcgctgcttttgcaggtgtagatcctggagttaatgattcaggttcacgtcatcagaaaagtgttaaaacaacgaaacgtggttctgcaaacttgcgtaaaacattattccaagtgatggatggtcttattaaaaccaagcccattaacgatcctgtgtatctttttatggataaaaaacgtgcacaaggaaaaccatactatgtttacatgaccgcaggtgctaacaagtttcttcgcatctattatggtcgacttaaagaatacttaaatactcttacctaaacatttctaaaattattcgttaaggtcagcttaaaaggtgacctatttgtcgtgttaacttttatcaaagaaactatctatataatatttctatttttctattgactttttctttgcagg

SEQ ID NO: 2769 - DNA, 1680 bp, unidentified
  source 1..1680: mol_type = unassigned DNA; note = element_3ee6fea
  misc_feature 1..4: note = core
  misc_feature 5..388: note = LE
  misc_feature 389..1552: note = CDS
  misc_feature 1553..1680: note = RE
tcacgtataatcaatcttaaggaattattaatttcattagattgatttttcctttctcatatctttattacttatttaagattttatatattggatttataaatccaatatataaaatcgcggctccgccgatatgtaacgaagtattttattattataattttttgttataatattttatgcactgtggatttgttactattttattacagccactttgtggactggttcgaggtgactcaaaccacagatttttaatttaattgttaattagttagttaacacgttagtttttactaatcgatgttttattaagttacgtgattacatgattagaaaccctgtggcaaacatatcagtgcaaaaactaattaaggaggtgcttacaatgatatattatgttggtattgatatatcaaagtataaacacgatttctgtattatcgcaaatacaggtgaagtaattgttgaaaattcatcttttgaaaacaacaaaaaaggatttcaatatttattggaccaattgaaaccctataataaatccgatgtccatattgccttcgaagcgacaggacattattctttgaatttggaactttatttaattgatcaaggtttttcatttatgaaaatgaatcctcttgtcattcatcagtttttaaaagctcgaagcttacgaagaactaagactgataaagcagatagtttaactatagctagctatctaatgtcagtcccatataaaccaaattcatctttattatacaacatttatacattaaagtcactatgtagagcaagagaacaattaattaaagaaaaaagtaaatttcaagtattattaactaatgagctagataagacctttccagaattaaaacctttctttaataataatatatcatcaacactactttatattttagaaaaatataaaaatacggaacatatatcattaatgagagattatgaatctttaagaaaaatatcacatggaaaatttacatatgcaaaattcgctcaattaaaggaacttgctaaaaattcaataggtcgtcatgacgaaaatactgatttactaatttctacttatgtctctattattaataactttaatgaaaaaatcgatccaatagataaacaaattttaacaattatcaaagaactaaatcctagaatgctatccattcctggattgggtgaaatatctgctgctaccattttatctgaatatggagatatcaaaaatttttcttctccaaataagatgcttgcatttgcaggtcttgaaccaagtgtcattgaatctggtacattacaatcaaatggtaaaatggttaaacatggttcaggtcatttaagatactcaattatgaatatttcaatgactatattaagatactcaccaacattttatgattattacctaaagaaacgttctgaaggtaaatgtcatagagttgctttatctcatgttagtaaaaaacttataagagttatttattcgcttgagaaatacaacaatgattttgatccgtctttattaaaataatatttttattgttttaatattatctaccttcaaaaattttaaaaaaacatgattttgaaggcttttggcatgggataaattccaattataaactttctattaaaaagtgcttgacttttaatagttag

SEQ ID NO: 2770 - DNA, 1398 bp, unidentified
  source 1..1398: mol_type = unassigned DNA; note = element_3ee7637
  misc_feature 1..3: note = core
  misc_feature 4..240: note = LE
  misc_feature 241..1395: note = CDS
  misc_feature 1396..1398: note = RE
  misc_feature 23..232: note = bridgeRNA
tccttaagttcgtaggtgcagttacttcgtgttgttgcggtgtgctgtgacccgggtgggtcgggtgtggcggtggttggtttgccggcccggtggtgcggcttgaagggactggccgcccggcctgcctggacttcctcgggccgctgattgagatctgcgatgagatcgcttggttaaggaaatgctggcggggttgtccgtggggttgatgttggccaacaagtgaaaaggggttcgatggaatctgaccagtggttgtgggcgggtgttgatgtcggcaaggagcatcactgggtttgcgtggtcgacgacacgggtgcggtggtgctctcgcgcaaggtggccaacgacgagcagcagatccgcaggctgttggctgaaggcgacgggctcagtgggcaggtgtcgtggacggtggatctgactacggtgtatgccacgttgctgttgacctaccgcggcggtgaagccaaaaccgacgccaaagacgcccgggtgatcgccgatcagtcgcggatgcgtggccaggatctgccggtgttgcatcccgacgacgagctgatcaccgaattgcggatgctcgccggacatcgcgctgatctggtcgccgatcgcacccgcaccatcaaccggctccggcaacagctggtcgcggtgtgtccggctttggagcgggccgcccagctgagctccgaccgcggctgggtggtgctgctggcgcgctaccaacgcccgaaggctattcgccaaagcggcattacgcggctgacccggatactggccgacgccggagtgcgtaacgcacccacgatcgctcaagccgccgtcgctgccgccagggcccagacggtcgggttgcctggcgaacaggtcgccgcggggctggtcgcacagttggcgcagggggtgattgccctcgatgaacgcatcaagaccaccgacgctgacatcgaggaccgatttcgccgccatccactcgccgaggtgaccaccagcatgcccggcatcggtttccggctcggcgccgaattcctggccgctgtcggtgatcccgcgttgatcggttcggccgaccaactcgccgcctgggccgcactggcgccggtcccgcgagactcggggaagcgaaccggacgactgcgcacccccaagcgctacagtcgcagactgcgccgggtgatgtacatgtcggccctgaccgcgatccgctgtgacccgcagtcccggacctactaccaacgcaaacgtgatcagggaaagcggccgaccccggccaccatctgcctggccagacggcgcactaacgtcctcttcgcgcttatccgtgacaaccgcacctggcaacccgactcacccccgatcgctacgacggcggctcgacatcctcattgagag

SEQ ID NO: 2771 - DNA, 1506 bp, unidentified
  source 1..1506: mol_type = unassigned DNA; note = element_3eeb818
  misc_feature 1..2: note = core
  misc_feature 3..235: note = LE
  misc_feature 236..1486: note = CDS
  misc_feature 1487..1506: note = RE
  misc_feature 5..229: note = bridgeRNA
ctaatgagatgggccgggcgtccatgggaggctcagccgcagcagcggccggcgggtcagcactcacggtatccggccccttcggaggcctattgacagaccgtgcgcccaccggttgccggtgactagaactgctgatgagatgtcgtgcccgcctcggcgtgagcacttgatcattaggttgcagctgtctccgggtgctgtgtcttgttgggctatcgggagggagtttcgggtgctgttcattggagacgactgggctgaggatcaccacgatctcgagatcgagaaccaggacggtcaccggctcgcccggtcccggctgccggagggtttggagggcatcacccggctgcacgcgctggtagccgaacacgccccaccggagtgggccgacctgccaccggagcagattgccggtcaggtgatcgtcggtatcgagaccgaccgaggcccgtgggtcaccgcgttgcgcgcagccggctaccaggtgttcgcgatcaacccactctcggcggcccgttaccggcagcggcactccacttcgggggcaaagagcgacgccggtgacgctcacgtgctggccgagatcgtccgcctcgatcgtgctcaccaccgcgcagtagctggcgacagcgacttggctgacgcgatcaagctgctggcccgggcccatcagagcgcggtgtgggaacggactcgtcaggtgctgcggatgcgatccaccctgctggagtactttcctgttgcggtgcaagcgtttacggacttggcggcgccggacgcgctggcgctgctgggccgggcaccggacccggaccgggccgcgaaactgacccgtagccaactcgtgtcggctctgcgcgccgctcgccgtcatcacgtcgaggccaaggccgacgtgctgctggcggtgctacgagcggcggcgttgcgccaaccagcaacgctgcagggcgcgtacgcgaccgtcgtgagcgggcaggtcgggatcatcgccgcgctcaacgagcagatcgcaggactgaacgaggtgatggccgagcattttgggcggcacccggacgctgacatctacctcagccagccgggcttcgcggtcgtcctcgcggcgcgcacgctgggcgagttcggcgacgacgaggacaggttcgccagctcgcgtgcccgcaagaactactccggtcaaagcccgatcacccgcgcctcgggtaagaagagcgtggtgctggcccgctatgccaccaaccgccgcctcggcgccgcgctgcatttgcaggccttcgccgccctcggcgcatcaccgggtgcgcgggcctactacgacgcgctccgcgcccgcgacatcaaccatcacgcagccttgcggcaactcgcgaaccgacttgtcggcatcctgcacggctgcctgaagaccggcgccgtctacgacgagaacatcgcctggcagcaccgccagatcaccacccaaaccgtcgccgcttgacaaaattcaggatgggatgt

SEQ ID NO: 2772 - DNA, 1502 bp, unidentified
  source 1..1502: mol_type = unassigned DNA; note = element_3eed674
  misc_feature 1..2: note = core
  misc_feature 3..258: note = LE
  misc_feature 259..1482: note = CDS
  misc_feature 1483..1502: note = RE
  misc_feature 48..254: note = bridgeRNA
ctaatgagacctagccgggccgccatacggcagactcggtgcctggtagccgccggcaggtgagcacttgctcctccccgggcaccttcgggagccctgaagacagatagtgcccctgccggctggccgggagaattgatcgctgctgggatgtcgtgcccgcccgcctggtgcggggcgtgagcactgtttcattagggcgctgattgttctcccgcaggctgctggccagatccggaacctgggacgggagaacagatgcgattgttcgtcggcgatgactgggctgaagaccatcacgacgtggagctgatggacgcggcaggccgggtgctggcccgcgggcggctgccggaaggcgtggccgggatggcccggctgcacgagctgatcgggcagcagctgggcgaggacggcgaggatgcggaggtggtgatcgggatcgagaccgaccacggcccgtgggcgtccgcgctggtcgccgccgggtatgtggtgtacgcggtgaacccgctgcaggcctcgagataccgcgaacgtcacggcgtgtccggcgctaagagcgatcgcggcgacgcgcacatgctgaccgacatggtgcgcaccgactcccaccagctgcgcgtggtggcgggggacagcccggacgccagcgcggtcaaggtggtggcccggacccataagacgctgatctgggaacgcacccggcaggtccagcggctgcggcaccagctgcgggagtacttcccggccgcgctggcggcttttgaggacctggacgcggccgatgcgctggagctgctgggcaaggcaccggacccggcccgggccgccaggctgacccgcgcgcaggtcagcgccgcgctcaagcgcgcccgccgccgcgacatccccgccaaggcgaccgcgatcctcgcggcgctgcgcagcccgcagctgggccagcccgaggctgtcaccgccgcctacgcggtcactgtccggtccctgatcgcggtgatcaccgtcctcaacgagcaggtcaagaccctgcaagggcaggtggaggcggattttggccggcacccggacgctgagatctaccggtcccagcccggcctgggaaccatcctcggcgcccgggtcctcggcgagttcggcgacgacccgcaccgctacgccaccggcaaagcccgcaagaactacgccgccaccagccccctcacccgcgcctcgggcaagaagaaaaccgtcatggcccggttcatccgcaacgaccggctcaccgacgcactcatggcccaggccttcaccgccctcagcacctcgcccggcgcccgggccctctacgacgccgaacgcgcccgcggtaccgagcacaacgccgccctgcgcaaggtcgccaaccggctcgtcggcatcctgcacggatgtctgaagacccgcaccctctacgacgagaaaaccgcctggccccaccacgaaaacaagctcgccgcttgacatctcagctcctgggatgt

SEQ ID NO: 2773 - DNA, 1185 bp, unidentified
  source 1..1185: mol_type = unassigned DNA; note = element_3ef40b8
  misc_feature 1..2: note = core
  misc_feature 3..219: note = LE
  misc_feature 220..1170: note = CDS
  misc_feature 1171..1185: note = RE
  misc_feature 24..197: note = bridgeRNA
cttgtatctttattttgaagtatatggatgaaaacatagttaatacgaaacaggacgggacagatcgtttagccctgggccgttggaggccgtggattagcatgggtcgtcccgttctgcccggccccaagctcgaacagttgcctgggttagtaaagcccgcatcatttgcaaggttgagccgtgctggaggaagctaaaatcaaggaggaatgaatcgtggaagggactcccatttttgtcgggatcgatgtgtccaaagcagggctcgatgttgctgtgcgacccatgggtagcagagagtttgttgccaacgatgcggccggaatcgaaatcttggtcgaacgattgcgtgaacttcaaccagcgttgatcgtgttggaagccaccggcggagtcgaacgtgctgtgactcgtgctctggcgagtgccgaatttcccgtggtggttattaaccctcggcaggtcagagacttcgccaaagccaccggacagttggccaagaccgatacgatcgatgccgcagtattggcccgctttggagaagcggtacgcccggcgctgcgccccttgcccgacgaagtgacttgggagttgcgagcggtcgttacccgcagacggcagctcaccgagatgatcgtggccgaaacaaaccgactcagtggagcttcgaaagctgtgagaaaacgaatcaacgctcatcttcgatggttggagacggagctgaaacgtgccgacaaagatctcgatcaaagcatccgtcaaagccccatctggcgagagaacgaagacctgctcaggagtgtccccggtatgggtcccgtcattagccgaacgctgcttgcagagctccccgaactgggaagactcaaccgtaagcagatcgccgcgctggtgggcgtagcacccctcaatcgcgacagtggcacactgagaggccggcgctctatctggggtgggagagccaccgtccgcgcggctctttacatgggcgccttggtcgccagcagacgtaatgcggtgattcaaacgttttaccgcagactgcgcaatgccggcaaagctccaaagatcgcactcgtcgcttgcatgcgaaaactgctgacgattctcaatgcgatgataaaacataaaactcactggtctgaaattatttctcagaccacttgacattgaagacagttg

SEQ ID NO: 2774 - DNA, 1453 bp, unidentified
  source 1..1453: mol_type = unassigned DNA; note = element_3ef46d8
  misc_feature 1..2: note = core
  misc_feature 3..42: note = LE
  misc_feature 43..1197: note = CDS
  misc_feature 1198..1453: note = RE
  misc_feature 1209..1451: note = bridgeRNA
agatgagatggacgccgcccgtctttagccgaggaggcaagtatgacaggcggatggagaagcgaggaccccctggagcccggacggcatcaatgtgccagagtggagatgttgcgtaaccacttaagggacaggggatccaccatgaacattacgatgtatgggctcgatttggcaaagagggtttttcaggtgcactgggtcgatccggagacgggtgaggtgaagcgcaaggcgctgtccagggccgaggtcagtgccttctttgccctccgggcacccgggctcgttgcgatggaggcctgcggctcggcgcatcactggggcaggctgctgaagggtctgggtcatgaggttcggctcattgcgacccagtttgtgcggccgtttgtgaagagcaacaagacggatgctgcagatgccgaagcgatctgggaggctgcgcagcgccccgggatgcggttcgtggcgctcaagagtgaagagcagcaggccgtgttgtcgctgcaccgcatacgccagcagtttgtgaagatccgcacgatgcaggcgcaccaggtgcggagtcttctgtacgagtttggggtcgtagcaccgaagggctggcgagcgctcctggcccaggccggcccggtcctggcggacgagacgagttgcccggtgccacagctggtgcggcgcgagctgttgacacagcttgaggccttgcgcgccctgacgacccgtaccgtagagatcgagcgacagatcgggtcctggcagcgccgggagtcggagtgtaagcggattgcggcgatccccggtgttggtcccttgagtgcaacggcggtggtggcgacggtgggcgatgcccacagcttccgatcgggtcgggagtttgccgccttcctgggtctggtgccgcgacagtctgggacgggcggccggatcaagctgctcggtatcagtaaacgcggtgatccgtacctgcgaacgctgctgattcacggtgctcgtacggtgttggctgctcagagtggagcggatcgcgagctcgacccgtggcttaaagggctgctatcgcgacgcccgaagaacgtcgccattgtggcgcttgcgaacaatatggcacgcacgatctgggcgctcatggcacacggtcgggcgtttgatcggagttggaaccgggctgcgatgcccgttccggcattgtcttaaacaaccaactggatggatatccaaacgagttgagcaggtggcgtattcgtgatggcagaacaggtcggaccgtgagggaattaacctgcatgatgtctcggactttgagtcctttccctagattaggcttctctcagcgcatttcatcagggccacgcagagtgaagctctgcagatgtaggccggatataagactgcaaccgcacctcgatgccggaatgaagctgtcgcttgcccatagggcggcgtccatata

SEQ ID NO: 2775 - DNA, 1348 bp, unidentified
  source 1..1348: mol_type = unassigned DNA; note = element_3ef6b89
  misc_feature 1..3: note = core
  misc_feature 4..79: note = LE
  misc_feature 80..1102: note = CDS
  misc_feature 1103..1348: note = RE
  misc_feature 1081..1335: note = bridgeRNA
tgatggggtggatggcccccttccggcatcagagtgccaagatggtggttgtcgagatcaccaacttagggagccatccatggagaagattacaacaatcgggctggatctggccaagcacgtctttcaagtgcacggcgtcgacgactcggacggcgtcgtggtgcgcaagcagcttcgccgcggtcagatgctgatgttctttgccggactgccgccatgcctgatcggtatggaggcctgtgcgacggcgcattactgggcgcgcgagctgacggcgctgggccacgacgtacgtctgatgccgccgcagtacgtgaaggcctatgtgaagcgcaacaagaacgacgcggccgacgccgaggcgatctgcgaggcggtccgacggccctcgatgcggttcgtgccagtcaagaccgtcgagcagcaggcgacgttgatgctgcacagggggcgagagctgatggtccgccagcgcaccatgacggtcaacgcgttgcgcggccacctggcggagctgggggtgattgcaccgcaggggctgaacaaggtcgcggagctgatcgccatcgtccgggacagcagcgacaagcgtgtgcccgaggaagcgcgtcccgtgttgttgacgctggccgcgcagatcgagggactcaaggtacagatcgacggcctggagctgcgcatcaaggcctggcacaagagcaacccggtgagccagcgcctggccagcatcccgggggttgggccgatcatcgccagtgccatcgcgacaacggtcgcagatcctggtgtgttccgcagtggccgtgagttcgcggcgtggctgggcctggtgccgcggcagaactcgacgggcggcaaagcccgactgggcgcgatcagcaaacgcggcgatggctatctgcggcacctgttggtgaccggcgcgcacgccgtgctgctgcgctacaagccggcacggctcgatccctggctgattagcctgcttcggcgcaggcctcgcatggtggtcgccgtggcagtggccaacaagatggcgcgcatcgcctgggcgatcatgagccggaacgagagctatcggtcagcgaccgtcgcagcctagcggcggcaatgtaacttgcgagggtaatgaagcgtgatgggtaaatcggtcaatcgacggatcggcaaaagcctgggctgactcagcgggatctcaatcccgacgtactgataaggctacgatccgcgcattccatcagggccagcggtcaatgttcgaaccgcacacacaggccggacacatgactgcaagcgaccgaccgacaccacgccacaaaactcttgcaagccgggggccatccacaca

SEQ ID NO: 2776 - DNA, 1401 bp, unidentified
  source 1..1401: mol_type = unassigned DNA; note = element_3eff622
  misc_feature 1..2: note = core
  misc_feature 3..115: note = LE
  misc_feature 116..1147: note = CDS
  misc_feature 1148..1401: note = RE
  misc_feature 1166..1396: note = bridgeRNA
agatggggtaacgggccggcgccaggttagctggtttgagtggccgtccctcagagtgatggtgtcactggcggagtcaggatgtccctgctccgaacatcatcgagggacgaccatggagcagtatgcggggatcgatgtgtcgctggaaagcgcgagcatttgtgtcgtggatgcgaatggacggattgtgcgcgaggtgaaggtcgcgagtgagcctgaggccttgattgcttggttccgtatgttgcaggtcaccccgacacggatcggcctggaggcaggccctctctcgcaatggttgtatgcgggcatgcgggaggcggggcttccggttgagctgctggaaacacggcacgtacgtgatgcgttcaaggcgatgccggtgaagacggatcgcactgatgcgcggggtattgcgcaactgatgcggctgggttggttccggtctgtgcattgcaaatcgctgccggcccaggaactccgtgcgatactgacggcccgcaagctgatgcagagcaagcgccatgatctggagatgagccttcggggcatcctgcggggcttcgggttgaaggtggggcagaccacgccgcgcagcttcgaagcccgtgtccgtgagttgaccgatgggcatgtcacgctgctcgcggtggccgacgccctgctgtcggctcgtgcggtactcgccgagcaactgggcaggttgcagaagcgcctggtgtcgcttgctcgccaggacactcgggcacggctgctgatgtcgacgccgggggtgggcgtgcttgtcgcgctgacctatgtcgccgcgatcgacgaccccgcacggttcaaaagctcgaaagccgcgggcgcacatttcggactgacgccaaggaaatatcagtcaggagagacggacgtcaccggccggatctccaagatcggagatgcaagcgtgcgcactgtgctttacgaggcagccaacgtcattctgaccaggccggtcaaaggttcatcgctgaagagctgggcgatgcgggtggccaagcgtgccggcatgcgcaaggcaaaggtggcgctcgcccggaagctcgccgtggttttgcaccggatgctggtcgacggaaccgagttcgtcgctgccagggcggccgccagagtatagacaaggagaaagatcacgagttcgggcggacacgcaccaaacgcccggagcaggtcccgtcgccgggacgatggatcaggtcaggccgcacctgccggagcagctcgcaagaggactgcgcgttttagagattggtcgaccgatcctcatcagaccccatcaggtggcggccgcgcgccgaccccggacagaagcaagacaccggcgacaggatcacactcgaaagggattgacacaggagggcccgttacaga

SEQ ID NO: 2777 - DNA, 1343 bp, unidentified
  source 1..1343: mol_type = unassigned DNA; note = element_3eff7af
  misc_feature 1..2: note = core
  misc_feature 3..81: note = LE
  misc_feature 82..1104: note = CDS
  misc_feature 1105..1343: note = RE
  misc_feature 1111..1339: note = bridgeRNA
ttaatgacatggtcagcccgcagcgggacacccggaaagtctagacttaccgggtgcccctcttaacgacgaggatctgccatgaacactgtttcgctcttggggatcgaccaaggcaaaaataggcatcacctcattggccatgataggagcggccatcggactctgcaaaagcaattcaatcgaagccgactactggagttcgcagctaagctcccggcctgcacgattgccatggagtcttgcggcggctcgcactgcttggcccgaaaactagcttcattcggtcatacggtaaggctcatcgctccccagcatgtgaagccctatgtgtcgggcaacaagaatgacttcattgacgcagaagcaatctgcgaagcagcttcccgccccagaacccgatacgtaacgatcaagacagttgagcagcaagtactgtcaactgagcaccgactgcgggaagcattggttcaccagcgaactcaggcgatcaaccgtattcatggatttctcctggagttcggcatcagtctggcacctacgaaagcagccatcgcacacgctcatgagtacttggatgacccggcgactgacctaccggttcgcttcaagatcgtcattgaatacttgcttaaagacatccagcggttgagtgcagagatcaaaaccctcgaaatgcacctgcgcgaggagctagcggcgagtgatgttgggacccgactgttgagcatccccggcatcggccccatcaccgctagcgcgctggtggccgatgtcggcgacgcttcgagttttcattgtggccgtgatttcgccgcatccctaggtcttgtgcccaggcagtactcgaccggaggcaggaacaacttgcttggcatcagtaagcgcggtgacaagcacatacgaacgttactgctacagggcgcgcgagccatgatgatacgaatcggcaagcgcaaggaccctctgggcgcgtgggtgagagatctgctgacgcgtaaacaccctaataaggtcgcctgcgccctggcgaacaaaatcgccagaattatctgggcggtactagctcgcggcggtagctactcaacgcttgaacctgtgtgacaacccgatcactaccagcttttgcgacgacgagatgatgacgataatcagcccaaatcctgactgaaaacctggtaaccaaaagagctttcgaagctgtcggtttggtaaggacagacaggagcgactattcatcaggggccaggcagctgcaccgcctatcagtgcccggatacattagagcaagcctgatttaccgcccgtcttttcggagttgcagaaggtgggctgaccataca

SEQ ID NO: 2778 - DNA, 1573 bp, unidentified
  source 1..1573: mol_type = unassigned DNA; note = element_3f09baa
  misc_feature 1..2: note = core
  misc_feature 3..251: note = LE
  misc_feature 252..1427: note = CDS
  misc_feature 1428..1573: note = RE
  misc_feature 2..227: note = bridgeRNA
tcgtattatatagtagtagtgtttatagtccctctccaaggactgtatgttatactattggggatactgtggattgtttattttctcctaccacttgatggttttagagaggctacaaccacagtctctttgtatatttgttaatcagttagataccgcatgacggtttatttagaacgaggttacaattgcaaagagtaccagtggttctataaacagtatcaaaatatttactcaaaggagatttttttatgatatatgttggaattgatgttgccaaagacaaacacgactgcttcattactaactcagacggtgaggtattatttaaatcctttaccatctctaacaaccgtgatgggtttgaaaccctgtttcaaaaaattgaatccgtatcagatgatttaaccaatgtaaaagtaggactggaagccactggacactatagttacaatcttctgggatttcttctcgataaaggtctgaccacctttgttatcaacccgttatatacaaatctttacagaaaaagtcttagccttagaaagacgaaaacggataaagttgatgcccatacaatcacttctatgattatgtctgacgtgaacttaaagtcctactcagacacatcttaccacaacgaagaattaaagtcattaactcgttatcgttttgataaggtaaaagaacgggcaaaactaaaatcttccgtttccagacttgtgtgtattctttttccagaacttgaaaaacttgttccgacactccatatggcatctgtatatgctttattatctgaatttccatctgctcatgctgtcgcatcggtacatcttacccgccttaccaacttgctctctgaaagttcaaagaacagatacgggaaaaacactgctgtcaggtttcgtgaagctgctagaaactcaatcggttcaaatatgcctgcaaaatccttggaactgaaacacaccattaaacttattcaagaattgacttctgaaattgatgaaatcgaaaccgagagcaaatccataatggatacaatccattctccaatccttacaattcctggtatcagttatcgtatgggagcaatgattcttgcagaaatcggggatttcagccgttttgattctcctaataagatgcttgcttatgcaggaatgtctccatctacttaccagtcaggacaattagataactgttattcccatatggaaaaacgtggttctcgttatcttcgatacgctctttataacgcaacgaaatatgtctgccattgggataaatcctttggaacatatcttgctaagaagcgagctgagggcaggcattataacgttgctttatctcatgctacaaagaaacttgtaagaaccatttatgcaatggaaaaatctggtcaggcatacaacaacgcatcttagttattttttgcaaatatctcctttttttgagtgtcgaaaacgacactctatttgtcatgcagttttcaatgttcaaatatatctgaaatgcatttctgcaattcattcaaaaaatttcattttgagacttgacttttaatagttag

SEQ ID NO: 2779 - DNA, 1535 bp, unidentified
  source 1..1535: mol_type = unassigned DNA; note = element_3f162d7
  misc_feature 1..3: note = core
  misc_feature 4..243: note = LE
  misc_feature 244..1422: note = CDS
  misc_feature 1423..1535: note = RE
  misc_feature 8..224: note = bridgeRNA
tttcgtattatcaggttagccagcaattgctggttggcctatttttgtaggtagaataagatggcggtagccgggagaacgtagggtcttttggggaaggttaccccgtcacaaaaactgttctcctactatcaccaatgaccatgtttgagctggtaggggcaatagaccccgcatcacaagcgaagctatgggtttggaaccatcgtaggagtgccggcaaatacgatttaggaggttgttatggagcctgtagtgggagtggatgtagcaaagggattcagcgtggtacaagcctttttaaagcggaatgagtcttggaggaaggcaataagcgtctcccacgagaaaagtgggttagagcaattgggtcggcttctatccgagttgcaggcacagactgagcaatcgccagtggttaatctggaagcgaccggtcactatcatcgtggacttgtcgcctacttgaaacgcagtggatggacatatttcatcgtcaatcccttacaggctaagcgggcgaagggtactcagttaagaaaggtgaaaacggatgcggcagatgcttggcatttagccgagatgtattaccggggagatgtgactccgcaccggacgtgggaagagggatataccgaacttcagcatgtaacgaggcagcatgagtttgtaacggggatgtttgtacaagcaaaattaaatatgagggccttgctggatcaggttttcccggaatatgagaaggtttttagtaacctattctcggcgacgtctctacacgtgcttactcgttgcttagaagaccaagcagaggatcttcatggagtcatccaaaaaaacgcaggaaaatcacattctaagaagtgggcagaggcgaagacagaacacctcaaggaagtattgtcccgatggaatgaggagctgaggagtcctacacaaacctctgttttaagcagtatggtaagcttagttctagcattcacagaacaattaagtgtaatggagaagcaaatagatgagctggcaacggttcttccagaggttgaattcatgaagagtataccgggaatcggagataagttggcagccgctattgtcgcagaaatcggagatgttcggcaatttaaagaagccaaacaactggtggcttttgcagggttagaccccggcatattcagctccggaaaattcacagcgactagctcccgaataaccaaacgaggctccaaaaggcttcgtagagcgttatatttagccgtacagtgtgggattcgaggaagtactaatctaagaattcgggagtattacgagaaaaaaagaaaagagggcaagccgtacaaggtggtcgtgatcgcctgcgccaacaagctactacatcacgtatacgccatcctcagtaaacagcagcccttcaaactttaacccataattatccagaaccttcatgccaatgagggttctttgttgtgctcaaaaatagtataccaagaagaacatgaatcaccaatacaaaatccttgacaagtattagctgg

SEQ ID NO: 2780 - DNA, 1604 bp, unidentified
  source 1..1604: mol_type = unassigned DNA; note = element_3f23656
  misc_feature 1..2: note = core
  misc_feature 3..276: note = LE
  misc_feature 277..1446: note = CDS
  misc_feature 1447..1604: note = RE
  misc_feature 32..258: note = bridgeRNA
ctcgtataatataaattgttcataaatattttaattgataatgaactaatatcaatttatttcatataaattatgttaaaatattattgataacactgtagactattttcttttcctccttacagcatagactggttaaaaaagggtatagctacagtttttaatttaatatggttataagtaggttacagcatagactggttcatcaataacgaggtaacatgaattaaaaatctgtagatagcaccagtgttaatcaaagaaaggaatgatactatgatttttgtaggtattgacgtggcctctaaaaaacacgactgctttttaatgcaagatgaaacagggatgatttactctaaacctttttcaattgaaaatgatgaagaaggatataaaaaactccacacagccataacaaactttgtggagcaaactaatgattcaaatgttcgtataggattagaatcaactggacattacagtaataacattctaaattacttttataaagctggctaccaagtagctttaattaatccattattaaccaatatggatcgaaaagcaacttcagtcagaaagactaaaaccgataaagttgattctcaagccatttgtatgttcttacagagaaacaaatacgatttccaaccctatacaccttcattataccacattgaagctttaaagtcacttacaagacaaagatttcaacttgttaaagcaaaaagtaaatataaagttattttaaacagacttattacaattgtttttcccgaatatttaaatctattttctgagttatatggagtaagctcactaaatattttattaaactatccaactccaaagaaattatctaaagctaaattatcttccatatctaaacacttacatagtagatgtgcaatttcagcttttgagatccaagaaatagctaaaaaatcagttggacaatcaaatgatttttatgcattccaaattaaacaaacaattgaaactattttattctttgataaacaaattgaagtctatgaaaaagaaatagcatcaattatgaaagaatatggacaagtaattttaagtatttctggtattggagaaattactggcgctatgattctaagtgaaattggaaacattaataaattttcatcagttgataaattattagcattcgcaggattagacccatcagtttatcaatcaggtcaatatgaagcaaatttaaagatttctaaacgaggttctaaatatttacgttgggctattcaccaagcatctttcataatatggcaacatgataaaacttttaatgattactatcacaaaaaaattaatgaaggaaaagtacataacgttattataggacatattgagaaaaaacttgttagagtaatctattcccttttaaagaacaataaatcttttgttccacaaaaataaacatattaaattttcaaagatctatattttttaacatctgaagctattatcgcttcataaactttaagggtgaaaggcccttttttgcgtactataaactttttaaattagctaaccataaagataattatctaattacttgatttatttatagtagg

SEQ ID NO: 2781 - DNA, 1320 bp, unidentified
  source 1..1320: mol_type = unassigned DNA; note = element_3f38005
  misc_feature 1..2: note = core
  misc_feature 3..63: note = LE
  misc_feature 64..1065: note = CDS
  misc_feature 1066..1320: note = RE
  misc_feature 1103..1307: note = bridgeRNA
ttatgggatggacgcctccctcctcgcgctcacagtaagtggcccaacctggaggaggacagcatgacaatgaatttgctggcgatcgatcttggaaagcaatcgttccatctacacgggattgatacaaacggtgtagttgtttcacgaaaggtcagccgcacaaagcttacggaaatcgtgaacgaactggcgccagagacgatcgccatggaagcttgcgccagcgcccaccattggggccggttattcatgacggccgggagagaggtccggttgatcaatcctcgtttcgtaaagcccttcgtgcgcggctctaagaacgacgccgtcgacgcggaagccatttatgaggcggcgacacgcccgacgatgcgctacgttcctgtcaagtcgacggatcaacaggatctgcagtctctgcatcggatccgtgagcggctgatcgtccaacgcacgtcgctcatcaatcacacccgcggcctccttgccgaatatggcatcgtcctgcctcagggagcctggcgcttcgccgcccaggctccgacagcgatcgaacaggctggcctgtcggatcttgggcgcgagctgttcgaggaacttcttgaccagcttcgtgatgcaaatgctcgcctcgcaaagctcgatgcgaggatcatggagatctgccggcagcatgacgattgtcgccgcctagctaccctgcctggcgtcggacccattatcgccacggcgctggtagccagtatcgacgatgcccgacacttccgttctgggcgagagctcgccgcctggattgggttggtgccccgacaatatacgaccggaggtaagccgcgcctgggtggcatcggtcgtgccaatcattatctgcgcaagcagatgatacacggcgcccgagcggttatcagccgtctcgccaaccgggacgacccgaggtcggcatggctgagggccatcgtcgaacgacggggtttcaacaaggcgctcgttgcgcttgccaacaagacggcgcgcattgcctgggcgctgctgaccaagaaggagatttacgcggccgcctgatctgcggcggcacccgggatcgtcgctaaggcggcgatgagagcgaggtggacactgatggcacaacggcacggaccgcagcttcacagcctgatctacgacagggcctttaaggccgctcatgttatgaggccagaagcagcggactcccatcaaggccgggagcgtgatcgctccagtaacaggccggatagattcacgcattccatgccgccggctatcagcattgccccttgcccgggaggcgtccataga

SEQ ID NO: 2782 - DNA, 1367 bp, unidentified
  source 1..1367: mol_type = unassigned DNA; note = element_3f39663
  misc_feature 1..2: note = core
  misc_feature 3..221: note = LE
  misc_feature 222..1124: note = CDS
  misc_feature 1125..1367: note = RE
  misc_feature 1103..1354: note = bridgeRNA
tgttggggtggacggccccgcggcatcttgtgccaaggtttggttgtcaccatccgaacctgaaggaccgtccgcatgaaccttaagcgcattggcctcgacacgtccaaggccgtgttcaccttgcatggcgtggaccaggacgagaaggcggtcctgcgccgcgacatgaggcgggccgagatggaggcgttcttcgccaagctgccgcgccgacgcttgtggcactggaggcgtgcggcggctcgcaccactggggccgcaggctggcggctctgggccacacggtgcagctgatcccgccgcaatacgtcaagccgttcgtccggcgcggcaagaacgaccgcaacgacgccgaggcgattagcgaggcggcggcgcggccggacatgccgagcgtgccggtgaagtcggccgagcagcaggccgaggcgatcgtgctctcggcgcgcgagttgctggtccggcagcggacgcagttggtcaacgccgttcgcgggcacgccgccgagttcggcatcgtggcggccaagaccatcagccagctgccaggtttgctcgaggtcgtggctgctgcggaaaccgtgccggccacggccaaggagatgctggcgttcctgggcgagcaagtggcccagctcgacgagcccattgcggagctggagtgccggatgaagcagcagcacaaggccaacccggtcagccaactgttggccgaggtgcccggcatcggcccggtcagcgccttgagcctggcgctcacgatcgaccccggccggttcacctccgggcggcacttcgcagcctggctcggcctcgtgccgaaggagcactcgaccggcgggcgccagcgcctgggcggcatcagccgggccggcaacgagcggctgcggcagctgctggtggtcggcgccatggcggtgatccgtttcgccaagccggggagcaagagcgcctcggcctggctgctggcattgctggagcgtaagccgcgcaagctcgcggcggtggctctggccaacaagatggcccgcatcgtgtgggccatgatggcgaccgggggaacgtatcggggcagcaagagggtcgtcacgccggcggccgaggctgccgcggccgcctgacccgctcgccagagcctgggtgcaaagaaagctgcaggagatgatgatcggtcgagccgacggacaaggaaccccgcttgttgcacaggcatcccgatgccgcgtccatgtttggggcttgttcgcggaacccatctgggccagcggtcaccgtgccgcgtcaaaggccggacacatgaccgccatcgcaccgcttgtcagatcatgcagcttaccccttgcacccaaggggccgtccacaca

SEQ ID NO: 2783 - DNA, 1235 bp, unidentified
  source 1..1235: mol_type = unassigned DNA; note = element_3f42f19
  misc_feature 1..2: note = core
  misc_feature 3..221: note = LE
  misc_feature 222..1211: note = CDS
  misc_feature 1212..1235: note = RE
  misc_feature 52..214: note = bridgeRNA
atggtaagtttgtattaagaaaaataattaataatttggttaataatattaaccaaagagtaaaagcagcaggataaaggccgacgcttcgttgatacatagatatcgcccctgattttattcccctgctgctgttttcttccaaatccggatagaacattgttggtaagaacttttaccatggtggatcagaagaaaacctctttttaaaaaaaaattgtatgtcaaatttattaaaaaaagtgattggtgtcgatgttggtgcaaagtttttaacggtaagttttaatgatgacagtaatcagaatcaagtgcaaaatattgaaaacaatcaacgttcgatattagcttttctaaagaagatctctagagaagattattgtttcgtgattgaagcgacaggtaattacagcagtcgcctgcttcatctttctttgtccaaaggttttgaatccagtctgattaactgcatgtctgtgaaacatttttcgagaatgaaaaacatcattatcaaaaccgatgcggaggatgcaaaactcatcaaactttatggcgagatgtttcgtccagagatttatgtacctaagagtatccaaattgaacatctggatcaggaaataaaactgttgaatgatcttgaggaagagaagcggcgttacgctgtaaagctcaaggcacttcgttataatcctcatctcaatcctaatacagaaaagcattatgaaaaaagacttaaacagttggaaaaagaggttcaagaagtagagttgcgccttccacaactacaagacgaggaatttaaagaaataaaaaatttaatacaaagtgtgtcgggaattggggagaaaacttctcttcagctgatgacagcaacttctggttttaaaaattttgattccgcaaaatcattagttaaatactttggactcgctcctcgaatttaccaatcaggtaaaaaatcctactctcccggtaaatgcagaacttccaaaactcatattagagggatgctgtatgtttgttcatggacggctatgaaacataatataccttgcaaagaactttatctgcgactactggcaaaaggaaaaccaaaaaaagtagcactgatcgcagtttgtaataaactcctgagaatttgctttggtgtggtgaaaaacaaaattgcatatcaacaagattatcagaaaaacttaaaaattttaacctaaataatttgcaaaataacatagaac

SEQ ID NO: 2784 - DNA, 1322 bp, unidentified
  source 1..1322: mol_type = unassigned DNA; note = element_3f44103
  misc_feature 1..2: note = core
  misc_feature 3..73: note = LE
  misc_feature 74..1108: note = CDS
  misc_feature 1109..1322: note = RE
  misc_feature 1094..1316: note = bridgeRNA
ttaatgagatggttcccctcgctttcccagccactagactggggagtgagacctcccaacaaggagaaccatcatgtctactatcaaagtccttggtatcgatttaggcaagtcctctttccatttaattggtcgcaatcatcgtgatcagaacatcctccgcaagaaattctcccgccccaaactgattgaatttatcgctcaattacccaaatgcatgatcgcttttgaagcctgtggtggcgcccattggttggcccaccagtgtttgcagtacggacatcaagtgcgcctgctgccacctcagttcgtcaggccctacgtgaagggcaataaaaacgacttcatcgacgccgatgccatcgcggaagcctgtgggcgaccgggcatgcattttgtaccggttaaatccgaagacgcgcagatgctagcggtctgccaccgcttgcgcgaaggttttatatcggagcgcaccaaggtgatgtgtcgcataggggcgatcttgttggagtttgggctagcactgcctaagggccatgcgaccatgaagggattgtttcagtggttgagcaagcaaaaaggcgagctacccacggcgctgatgctggagctgcaggttgcccaggatcactacaagctgctcaacgaacgcatagcggcacaagatcgtaagatcctaaattcggttaaacaagatgagcgctgccagttgttaaaaaccattccaggggtgggcgatatgatagccagccagctggtaatgacggtgggttcgggtcaggcgtttcgacagggtcgcgatatggcggcttggttggggctggtgccgaggcaatattcgacgggcggcaaaccaaaattgttgggtatcagcaaacggggcaacaagcggctgcgctgcttgatgatccacggggcgcgagcggtgctgtcgcgactgggggatggcaaccggcccttcgatgcttggctgcgaacactgcggtcgagcaagccgttcaatgtggccgtggtggcgctggccaataaactaacaagaatcgcgtgggcggtgctgagcaaaggtcaggccttcgatggaaaagcgttacagccaggtttgcagtgacagagagtgatgacgaaagcgggtcaaccggccagatggagaacctgacacaaaaaacagtcatttaagactgtcgcctttttgaggaccatccggcgcggatactcattgtggagcgggaagcgaaagcctcccttttaagactccgaatacattagcgcagaccaaccccgccatcgcacgctgttgttgcaatcgcgaggggaaccataca

SEQ ID NO: 2785 - DNA, 1545 bp, unidentified
  source 1..1545: mol_type = unassigned DNA; note = element_3f4b536
  misc_feature 1..4: note = core
  misc_feature 5..257: note = LE
  misc_feature 258..1535: note = CDS
  misc_feature 1536..1545: note = RE
ctcactggtgcacccttgtcgtgtcggtggttgaaggactgccgatgcacctgtggtgccgccgggtcatcgccctgctcgcttgacgcttcgatgtccggcatgagttctgcgagactcggcggtcgcccgggggggtgccgaccgtcgacagggctgagcgcggtcgagcgccgatcagtgagcgaaccggcagccgcgtcccggcaccgtaagacaggtgcctccccaccgggactagcagcgaggaggctgtgatgaagcatgccccggacaactcgaacagaaccaccctgccgccgaacccggcccgcgggctgaccgccggactggactgggtcaaggacgaccacgtcgtgtgcgttgtcgacggcgctggccgggcggtcgaccggttcacggtcacccacaccggttccgggctcgccgagctcctccagcgcctgaggaagaccggctgccaggagatcgcgatcgagcgacccgatggtccggtcgtcgcggcgctgctcgaggccgacctgaccgtcgtggtgatcagcccgaaccagctcaagaacctgcgctcgcggtacggcagcgccggcaacaaagacgaccggttcgacgcctacgttctcgccgacaccctgcgcaccgaccgtgcccggctccggccgctgctgcccgacagtcccgccaccctcaccctgcgcgcgacctgccgagcccgcaaggacctcatcgggcaccgcgtcgcgctggccaaccagctccgcgcgcacctgcacaccgcgctgcccggcgcggtcgggctgttcgccgaactcgacagcgcgatcagcctgaagttcgtgggccggttcgacacccaggacaagctcgactggctcagcgccaaacgcctggccggctggctgcgaaacgccggctacagcggccgggtcgaccccgccgtcctgcacgcccggctgaccgccgcgccccgcggtctgaccggcccacccggcgccgcccacgcccacaccacccgtgcgctgctcaccgtcctggccagcctcgtcgagcagatccgcgccctgtccgagcagatcggcgagcaactcgacctgcacaccgaccagcacatcttcaccagcctgccccgctcgggcaccgtccgcgccgcccggctcctcgccgagatcggtgactgccgcgcccgcttccccaccccagaagccctcgcctgcctcgccggcgtcgcaccctccacccgccagtccggcaaacaccgcggcgtcagcttccgctggtccgccgacaaacaactccgcgacgccgtctgcgacttcgccggagacagccgccgcgccaacccatgggccgacaagctctaccgcgacgcgatcacccgcggacacgaccacccccacgccgtgcgcatcctcgcccgcgcctggctctacatcatctggcactgctggcaagaccgggtcgcctaccagccggcccgccacggcgccctgcaacgccacctcgcgacacaaaacaagatcaccaaccaggcggcttgacacagggcta

SEQ ID NO: 2786 - DNA, 1508 bp, unidentified
  source 1..1508: mol_type = unassigned DNA; note = element_3f5b11d
  misc_feature 1..3: note = core
  misc_feature 4..231: note = LE
  misc_feature 232..1482: note = CDS
  misc_feature 1483..1508: note = RE
  misc_feature 68..224: note = bridgeRNA
aaacccacatgaacacattgctcatgcaagaattatgaaaacctaatataattgctgagcaattgattcgcttgatatgggcggtgaaggcagtccgcaatttaggggcatagaccccggtagtcaaactggccaaatcccgcggatgcaagaatgcgtcgttagaacgcgaatgcgaatgagcacccatcgaggattaagttatccgcccatatcaggacggggacgaccatggaaccgcagatgaataaggtttgtggcatagatgtacataaacggtttctgatagctactattctttctagaaacggtacaaaggaaatccggcgcttcagcgcaacccttgaagatctcttgactttcagagattggcttatcgaaaatggatgtgagcaagcggccatcgaatcaactggaatctattggcatcccgtacatgctgttttagaaggaaagatcgacttgatagtggcaaatgcctacaagatcaagcacacccctggaaggaagaccgacatcagcgactcagagtggatcgctgaactttgtctcaatggtatgattgagccatcgaggatctttcccaaagatgacagagagctgaggaggttgacaagggcaagagagggctacgtcaaacagatgacccaggaaaagaacaagatccatcattctcttgattcagcatgcatcaagcttgcctcagttgtctctgatatatttggcaaatccgggatgtatctcttgaacagcattctagaaggaaaagacatcgacgagattgttgaaggaattccctctagtcgactcaagaaaaaggcagatcagatcaaagaagcgatcaaaagtcatctggagatctcacagattatcttaattcgtggatctctatgcttgatgagatcaattcaggagaggataaacgaattggatggagagattagcgcgagaatccagagacgcaaaaatgatctggccatcgccatgtccatacctgggatgggttttatttctgcgactgctattctcgcagaaatcggtgactacactgattttgagaattccgaaaagctcgctgcatggtgcgggcttgtcccctctctttatcaatcagcagaaaaggtcgtgctgggaggaataaccaaacaaggttccaagcatattcgaagaatgctgatccagatcgcctatgccatatccagaaccaagaaatccaagttaaagagattcttcttgaggattcaagccaaaaagggatctaaagtagcagcagttgccctggcaagaaaggtcctctgcattcttcatcatctcctcataaatcaagaaatgtatcaggaagatgaagataagaagaacacgcgcagaaaaaccatagtttcgccttcatccattgaaatgccgatccaagagatgattgattgcatcgttagggcaggctatgttgtaacgaaaagtgatagcagagggcgatcaggttgaattggatttccgtgggttttcatgcg

SEQ ID NO: 2787 - DNA, 1351 bp, unidentified
  source 1..1351: mol_type = unassigned DNA; note = element_3f644ed
  misc_feature 1..2: note = core
  misc_feature 3..258: note = LE
  misc_feature 259..1287: note = CDS
  misc_feature 1288..1351: note = RE
  misc_feature 33..207: note = bridgeRNA
cttgtatcttgcttgcatctccccgattcattcgctccgtgctacttggaggcagaatcggatttcggcgggaggccgatcgcagcctaaaggcgctgtcgtttgcagcctggattatagataggccccccgccctccttttctgacgccgtggagaatccgaggcctcatgagcctgcattcacaaggtcggcgagagaagttgtacagggtcggggagccggaaccgagtctaatccaaatctcgaggagttgagaatgccccatcgtcctcagggagatgttgaagttttcgccggcctcgacgtcagtgcacgggagatcagtgtcgctaggcttcgaagcaaagaaggaacgctgacgcttgccagctttgcgaatactgcctctgggcataaggcgctcctggcgtacttgcagcagggaaccgaagatgtacgcgtttgtctggaggccagcggtaactacagtcttgatctagccctggccttgcacgctcaccgtcatgtcgaggtcagcctggtaaatccgcgtcgcgcccgccgcttcgcggaatcactgggggaacgcagcaagacggaccctgtcgatgcccgggtgctttgtgagtacgctgcgcggatgccgtgggtagtctggcgacctccgagcgcgcgggggctgcggttgcgcgccatcacccgtgccatcgaaagcctcggcgttatgcacacccaggaaaagaatcgtgagcatgcgttgaaggcgagcttggccttgccatccttggtgattcgggagatgcgacgtcatcagcgctatctggagaatcgcatggagcagctccgtcgcgaagctcgccgcctcatcgcgaaggatcgcgaactagatcgtcgcttccgcctgatggtgaccgtccccggtatcgccgaaaccagcgcgctgcagatcctcggggagctagccgttttggccgatagcctcgatgctcgccagtgggtggctttcagcggcctcgatccttcccagttcacttctggcacgtccgtgcaaaagcatccccggatcagccgtggaggcagtcgccatctgcgccgcgccctgtacatgccggcactcgtggccctgcggcgcgagcctcatctgcggactttctaccaacgtttagtgaatcgcggcaaggctcggctgcaggcgctggtagctgtaatgagaaagctgctccacgccctttatgcgatgtttcgttccaatcagacctacgacggagctaagctctgctccgcggaactggcgtcatgtgcctgatggcaaaaagagagaggttctccgcacctctccagagagaaaaacttgaaattcaagagagaat

SEQ ID NO: 2788 - DNA, 1390 bp, unidentified
  source 1..1390: mol_type = unassigned DNA; note = element_3f6d465
  misc_feature 1..2: note = core
  misc_feature 3..121: note = LE
  misc_feature 122..1156: note = CDS
  misc_feature 1157..1390: note = RE
  misc_feature 1169..1385: note = bridgeRNA
agatacggtaatgggccgcgcctccaggtgactggaggagtggctgtcccccgatcatgatggagtgacggggttttaggtgtggcgcctcggagccccgctagcctgatggaggacagccgtggagcattatgccggattggacgtgtcactggaactgacgagcgtgtgcattgtcgacacgcagggcgggatggtctgtgaagcgaaggtggcgagcgagcctgaagcgctgatccagttcctcctcgaacaggagctcgagttcggcagggttggactcgaagcgggcccgttgtcgcagtggctgcatacgggactgatcgccgccggctttgacacggtgctgctcgagacacggcacgtgaaggcggcgttgtccgcaatgacggtgaagaccgatcgccgcgatgcccgcggcattgcccagctgttgcggcttggctggtatcggccggtgcacgcgaagtcgataaacgcccaagaggtgcgagcgctgctgaccgcccgcaagctcatccaggccaagctgctcgacgtcgagagtggcatgcgcggggtgctgcgcggcttcggcttgaaggtcggtgcgatcagccgcggtcggttcgagacgcgcatccgcgagctggtggagggcaacgcgaccctcgagaccgtaatcggctcgatgctcgccgccagagcttcactcgcgtgcgagttcaagcgccttcatcgcgaactcctcgcgctcgtgcgtgcagatccggtctgtcgtcagctgatgagcgtgccaggcgtcggcgcgatcgttgcgatcacgttcaagagcggggtcgacgatcccacacgcttcaggcgctcgcgcgatgtcggctcgcactttggcctgacgccgcggaagtaccagtcgggcgagctcgatgtgactggctcgatcaccaaggtcggtgatcgcatggtgcgcaccgcactcttcgaggcggcgagcgtgatgctcacgcgaacggtgcgcttctcaccgctgaagagctgggcgatggccgtcgccaggcgccgcggcacgaagaaagccaaggtcgccctggcgcgcaagctcggcgtcatcctccatcgcatgtgggtcgatggcaccaccttccgctggtccaacgaggagacggcaatcgcgtaagagaagagttcgaagtctgggcagacataggtctgcgctaccgaggtcccgtcgctgggacggtgaagttggtgaagccgaaatggcagcagtagctctagagactacgccccaaagatgggctcaccgcttcctctgaccgtatgatgtggcagctcaagctgaccacggacagaagcaaggaaccagcggcaggataaaccggggcagcttgacacaacgacccattacaga

SEQ ID NO: 2789 - DNA, 1406 bp, unidentified
  source 1..1406: mol_type = unassigned DNA; note = element_3f6fe28
  misc_feature 1: note = core
  misc_feature 2..140: note = LE
  misc_feature 141..1109: note = CDS
  misc_feature 1110..1406: note = RE
  misc_feature 1176..1401: note = bridgeRNA
caatgggatggactcctcctcacctcaccggcatctacgtgccaaaatggtgagtgattagtcaaccatcatgaagatgaggagaagcccaagtaaacattatccgtgtcggtgttgatattgccaaatcagttttccaagtgcacggcgtagaccgtcacggtaagacgcaatggcaggtcaaatactctcggcagaaatggcttgatggcctcagccgtaaagtacccgccggtgccgagatcggcatggaggcttgcgcgtcatcacaccactgggctcgggaactccagaagcgggggtatcatgttcggttgattgccgcccaatttgtcaaaccttacgtcaagagcaacaagaacgaccgggtagacgcggaggcaatctgcgaagccatgagccgcccgaacatgcgatttgtcgctccaaagacggtcgctcagcaggatattcaggctgcacatcggatccgggaagagcttgtggggcagcgcacggccaaggccaaccagatacgaggactggtgggcgagtacggtattattgctccggtaggcatccagcagcttcgtcaggccttgccaggttggctcgaagatgctgagaacgggctgaccgatagttttcgggctcttctgaatgggctggctgaggacctccgatacctggatgaccggattgttgaaagcgtcaggaaaaaccctgttgccaagcgtttgatgacgttatgtggagtggggccgctgacagccagtgccttgtcgggtgcactgggcgatggaaaggcctttcgcagggggcgtgactttgccgcttccctgggcttaacgcccaagcagcacagcactggaggtcgggatcgcttgctgggaatcagcaaacgaggcgacagctacctgcgcaagcagctcgttcacggagcccgggccgtgttgcgtcatgttgatggtaaagacgacggtctcagtcactggctgaaaggccttgcctctcggaagcatttcaatgtggcgacggtggcattggccaacaagacagcccgtatcgcctgggcactggctcatggcgaagaggactatgacgaaaaacttgcagcggctggtgcttgatcgggtagtttgagtgctgagtatgcgggggcaacaactggaaacggtataggaaacgtccaacaccacgattgcgtggcactttgattgatggcgaacaggtcgaaccggcactggaaaaccccgtagtcacgatgagccttaagctcgttgaaacaattgggagccagtgcgcggatagcccatcagggtccgatgcctacaatacggcatcattaaagagaccggatacacgtaggcagtcgtacctcagtcgcgatcaaacaaagtgcttgcaatagaggaggagtccataca

SEQ ID NO: 2790 - DNA, 1561 bp, unidentified
  source 1..1561: mol_type = unassigned DNA; note = element_3f71793
  misc_feature 1: note = core
  misc_feature 2..291: note = LE
  misc_feature 292..1143: note = CDS
  misc_feature 1144..1561: note = RE
  misc_feature 1322..1552: note = bridgeRNA
taatgggatggtccggccgtgctcctgccccgccagcgagtaatgctggcatgggggcgaccagcacaaggagcacgccatgtctcagaaacgcaacactgcgattgccgtgattggcatcgatatcggcaagaactcgttccacgtcgtgggtctcgatcagcggggcgcaatcgtgctgcgccagaagtgctcacgtggccaggtggcaacacggctcggaaatattccgccagcctgatcggcatggaagcctgcgtcggcgctcatcacctcagtcgcaggcttaggatgctcggtcacgatgcccggctgatgccggcgaaatacgtgcgtccgtattccaaggggcagaagaacgacttccgcgacgccgaggcaatcgccgaagccgttcagcgcccgacgatgaagttcgtcgccaccaagacgcccgaacagctcgatttgcaggcgctgcatcgagtgcgcgagcgcctcgtcagccagcgcaccggcatcatcaaccagatccgcgcgttcctgttggagcgcggcattgcaatccgccagggcctgcgtttcctgcgggccgagctcccccaaatcctcgctatgcgcaccgatgtcctctcggcgcgcatgatgcgggtgatcgaggaactggctggcgactggcgccggctggacgagcgcatcgagggcttgtccaccgaaatcgaagcgttggcccgtcaagatacggcatgccagcggctgatgacggtgcccggcatcggaccgatcatctcgagcgcgatggtggccgcgatcggcaatggggccgtgttctcgaagggacgcgacttcggcgcctggcttggactggtgcccaggcagatctcgacgggggaccgcaccatcctcggcaagatatcgaggcgcggcaatcgctacctgcgcgttctgttcgtgcaggcggcctgggtcgtgctgatcagaccgaagacctgggagcgccacgggctcaagccctggatcgaagccgccaagaagcggctgcaccacaacgtgttggcaatcgcgctcgccaacaaacttgcccgtatcgcgtgggccgttctcaacaaggagcgcgacttcgaatgcgtcaggacggatgagacagcgtcccgaccggcttgagggtcgcgccggcgctccaagcacgaggcagggtaagtgcgacggccagccttgacgatcccttgcgcacggcgcctcaggccacgctggccgggacgaagcaacagccggccttaggcacgaacaaaggaactgcgcgagatgaggagccaccgatgacgtagccgcaacacccgttacccgccgaggtctgcgagaggatgagacgagatggaggatcggtcttcccggcgcctgcgaacactggtgacccaaatggcccctcgaggcctgtccggtaatgagatcgcacgcgcgctgatatccatgatggcccggagcacaaacgcgctctaatcagaggccggatacattgatgcaagaccgcacatccgccagatcgacgaaatcctcttgcgacgcacggccggaccataca

SEQ ID NO: 2791 - DNA, 1837 bp, unidentified
  source 1..1837: mol_type = unassigned DNA; note = element_3f76350
  misc_feature 1..2: note = core
  misc_feature 3..349: note = LE
  misc_feature 350..1708: note = CDS
  misc_feature 1709..1837: note = RE
  misc_feature 136..308: note = bridgeRNA
ctagtataataatggtgtagtcaagaacgactactggttaatagttacaaagtccaatctaataaatctatatagatataacggaaggaggagttccccctccatcagaagttataggacatatttaccgtgtctgaggtttccttaatgcaccagacaaaatatagaggtataatcactgaaggcaggatcattgacgtttcctccttgggagccggccttctggctggcgatacctcttagaaagtctgtcaatccattcggtggtgatttatgttttggctggttgggaagcctcaggctatacctgtataagccgctaggttgtgtatccaccctttggaattggatgcctgccggaaaggatattactatgcactatcaaaaagtactcaagatgcctgaaagcatcccctatctctctgtcgggtttgatgtcggcgcagacttcacctggatgtctatcatgctccccaatggcatcctcatcggtaagccttttaagatcattcattctgatccgcagtcccgtgagcttgccatctcaaaaataaaggaagcccaggagatgtattctcttgaaagccgctgcttccttgaatccaccgggatctaccacatcccactcctgtgcttccctcgtgataagggttttgactgcgccgtcattaatcctatcattactaagaatagcacaaatatgaacgtcaggaaactgcataatgataaatttgattcaaaaaaagctgctaaagtcggcctggatgcctcccttaaggcttccattgtcccggatgacgcaatcattgacctgcgcaatctcgtgcgtgactactattatttcaaggacctgcaatccgccatcgtattgaagcttcatgcggaactcaaagtgtccttccccgcatacctgaatgtgttcagcaaggtcacaacgcagacttccttaaagcttctggaagcttacccccttgcagcggacatgcttgccgccccaaaagacgagcttgtggaaatcatccgcagcacggcgcgctttggggaaacgtatgccctcgccaggtatgatgccatatgcaccgctgcaaaggatgccgctgttttcggacgtgcccttccaagcaacgctctgcggatcaggctgtacataaaaatgtacagggaataccaggctcatctggacagcatactggaagaactgcatcaggctgtcggcaaactggaaggaacgccagactatgaccgcatctcctttatccagaccctgcacggtgtcggctttttaagtgccgtcgtcctgatcgcggaaatgggatcctttgacctgttctcctcgcctaagaagctctatgcttactttgggctggatcccggtgtaaacgattccggcaagttccatggagacagggtccacatgtccaagcggggttccagccttgccaggcgtatcctgcatatggtcgccatcaacaacctgaaagtggataaagcaacaaaaacgcccgtgaacccggtcatttacgattattacacccgtaaatgtgccagcaaaaaaaagagcgttgctgtcggggccgtcatgcacaaaatctgcaacatcattttcgctatgctccgggataataagccttttgagctcattacgccggaagaacaccgtgaacgttatgcagcagagcacccggaatctgtgaaccccgctgcctgatggagatttgaattaaattttaaaatcccatggcaataggtttattaaggttacccttttttacatcagctgcttgaaaaaaactttttaaacatttttcattttacctattgacatttcttagctgga

SEQ ID NO: 2792 - DNA, 1376 bp, unidentified
  source 1..1376: mol_type = unassigned DNA; note = element_3f78298
  misc_feature 1: note = core
  misc_feature 2..90: note = LE
  misc_feature 91..1122: note = CDS
  misc_feature 1123..1376: note = RE
  misc_feature 1148..1371: note = bridgeRNA
caatgggatggactcctccccgccctcggcatctaagagtgccagactggagttgcgagacaaccagtccacagcgaggaggagtccgccatgaagcttacgcgcattggggtcgacatcgccaaacaggttttccagttgcatggtaccgaccgttccgaacagacgttatggcgacggcgagtgccacgcgagcgctggctacaagcgttacgcgaggtggccgtacctggctgcgagatcggcatggaggcctgcggtggcgcccatcattgggcacgccaactgcaggcgatgggttatcacgtaaagctgatcgcgccgcagttcgtgaagccgtacgtgaagagcaacaagaacgatgccaatgatgcggaggcgatctgcgaagccatgagtcgcccaggcatgcgtttcgtcaccctgaagtcgacgcggcagcaggatatccaggcgctgcatcgcgtgcgtgccagcttgatggaacaacggacggccaaaggtaatcagatccgtggcttggtcgctgagtacggcttggtggcgcccagagagctgtcgtcgcttcgccgcgcgatgccctgttggttggaagacgccgacaacgggttgagtgcgtgctttcgacaactcctcgatggtctatggcgcgaccttcgtggcgtggatgaccgcatcctcgaactggatcattcgctcgccgacttggcacaagccgatccggatgcgcgtcgtctccagaagctgcgtggcgtcggccccctggttgccacggcgctgatcgctgcggtgggcgatgccaagcaatttgccagcggacgccagatggccgcatcactcgggctcacgccccgacagcacagctcgggcggcaaggatcgtttgctgggcatcagcaagcgtggcgatgcgtatgtgcgcagccttctcgtgcatggcgctcgctcagcgttgagaacagcgcctgcaaaagacgatcgacttagtcagtgggtcgttcgacttgctaaacgagctcatcccaatgtcgcctcggtggcgttggctaacaagaccgcccgcttggcgtgggcactgcttcaccaccaatgcgagtaccaaccggccctcgcggccgcctgaaagagacgtccaaatgtctttcaatcacgattgctaagcccaccgcacgatggcgaaccggtcgaaccgacgccggcagaaccctgaaatgtctgcgtgctcagagcacgaggaagcgattgggagccggagcgcgactagcccatcatggcccagcaccgcacagcggtgccgtagttagaggccggatatacgtgtgcagtcgacacggacgccagaacacggggggcttgcaatggggaggagtccatata

SEQ ID NO: 2793 - DNA, 1461 bp, unidentified
  source 1..1461: mol_type = unassigned DNA; note = element_3f79023
  misc_feature 1..6: note = core
  misc_feature 7..241: note = LE
  misc_feature 242..1447: note = CDS
  misc_feature 1448..1461: note = RE
  misc_feature 24..236: note = bridgeRNA
gtccttaagttcgtaggtgcagttacttcgtgttgttacgttgtgctgtgacccggatgggtcgggtgaggcggcatcgctgttgccggcccgcgtggtgcggcttgaaaggactggccgcccggcctgtctggacttctctgaccgctgattgagatctgcgatgtgatcgcttgtttaaggaaatgctggcggagttgtccgtggggattgtgttggcagacaagtgaaaagaggttcgatggcaacgggccagttgtgggctggtgtggatgtcggtaaagagcatcactgggtgtgtgtggtcgacgacgccggcgtggtggtggtctcgcgcaagctggccaatgatgaaggacagatccgcgcattggtcaccgaggtggacggtttgtctgatcaggtgccgtggacggtggacctgaccacggtgtacgccgctctgctgttggcggtgctggccgaggccggtaagtcggtgcgttacctgaccggccgcgcggtgtggcaggcctcgacggtctaccgcggcggtgaggccaagaccgacgccaaggacgctcgggtgatcgctgatcagtcccggatgcgtggcgacgatcttccggtattgcatcccgacgatgatctggtcaccgagctgcgcatgttgaccgcccatcgagccgatctggtcgctgaccgcactcgcacgatcaaccggctgcgccagcagttgatcgcggtatgcccggcgttggaacgcgccgcccagctcagcgccgaccgcggctgggtggtgttgctgtcgcgctatcagcggcccaaagcgattcgccaaagcggagtttcgcggctcacgaaaaccctcaccgacgctggtgtgcgcaacgcggcggccattgctgcggccgcggtgacggcggcgaaaacgcaaactgtccgcttgcccggcgaagaggtcgccgcgcagctcgtcgccgatttggcgcgggaggtgattgccctcgatgaccgcatcaagaccaccgacgccgacatcgaggaccgatttcgccgccatccactcgccgaggtaatcaccagcatgcccggcatgggattccggctcggtgctgaattcctggccgccgtcggcgatcccacgctgatcgcatcggccgaccacctggccgcctgggccggattggccccagtgcccaaagactccggtaagcgcaccggacgactgcacactccccagcgttacagccgacgactgcgccgagtgatgtacatgtcggccttgaccgcgatccgctgcgaccccacctctcggacctactaccagcgcaaacgcgacgaaggaaaacgacccatcccagccaccatatgcctggcccgacgccgcaccaacgtcctctacgccctcatccgcgacaaccgcacctggcaacccgactcaccgccaatcaaaatcgcggcttgacttcgtcattgaga

SEQ ID NO: 2794 - DNA, 1392 bp, unidentified
  source 1..1392: mol_type = unassigned DNA; note = element_3f7bd52
  misc_feature 1: note = core
  misc_feature 2..88: note = LE
  misc_feature 89..1123: note = CDS
  misc_feature 1124..1392: note = RE
  misc_feature 1166..1384: note = bridgeRNA
caatgggatggacgcccccacccgtaacggcatcaacgtgccaaagtggaagtgtcaccaaccacttgaaccgagaggggcgtccaccatgaagattacgactgttggcatcgacttggcaaagaacgtgtttcaggtccacggcatcgacgagcgcggccaggtcgtgcttaagaagcagttgcggcgcgaccagatggcagcgttcttcgtcaaccttccgcagtgccttgtcggtatggaagcatgcggcggtgcgcaccactgggcgcgcaaacttcaaggcatgggccacaccgtgcgactgatggcaccgcagttcgtcaagccatacgtcaagaccaacaagaacgatgcagccgacgccgaggcgatatgcgaagcggtggcccggccgaacatgcgcttcgtaccggtgaagaatgtcgagcagcaagcggtcctcgcattgcatcgtgtgcgtcagggcttcgtgagagcacgaacagctcaggcgaatcaaattcgcgggctgctcggcgaattcggcatcatcattccgcaaggcatcggctacattgccacgcgcgttcccgagttgatcgaagacggcgccaacgagctacccggtgcgtttcggctgcttgttcaacgcttgctcgaccatctcaaggaactggatcgccaggtcgaggaactcgaggcgaagatccaggcttggcatcgcggcaacgaggtcagtcggaagctcgcccaagtcccgggcatcggtcccatcactgccagtgcgctggtcgcttcgatcggtaacgcgaagaacttcgacagtggccgccaagttgcagcatggctcggcttggttccaagacagcattcttcgggtggcaaagccaacctgctgggcatgagcaagcgcggcgatacgtacctgcgaacgctgctgatacacggcgcgcgctcggtcatctatcgagtgagccagaacgccgatgcatgcagttggatcagcgccgtcgtgaaccgacgcaacaagaacgtggcggcggtggcgttggcgaacaagaacgctcgaatcgtctgggctctactggcgcatgaccggcacttcgacgccgactacgtgcgctcagagtccctggcctagggcagatagcaaacgaccacaacgtagcagggagaacaaaccaccgattgctcaggcgatcatgaagtgatggcaagacaggtcagaccgtggttggcaaagcccgcgccggacgaggcacccagagtgcgtgtatgcgatcgaggcgtcaaccagctcatcccatcagggaccgcagccaaaagctgcaatcaaagtccgaatgtacgggtgcaatctttaccttcgagccgcgcgaattgagaacctggcatgggggcgtccatgta

SEQ ID NO: 2795 - DNA, 1415 bp, unidentified
  source 1..1415: mol_type = unassigned DNA; note = element_3f7ed55
  misc_feature 1: note = core
  misc_feature 2..82: note = LE
  misc_feature 83..1123: note = CDS
  misc_feature 1124..1415: note = RE
  misc_feature 1177..1407: note = bridgeRNA
taatgacatggacgcccctacctgcggcggcatcgaagtgccaaagtggagttgtctagaaaccactgagcggaggggcgtcatggaagagcttaaggtagtcgggctggatctggcaaaggctgtatttcaggtacatggcatcaacagtcagggtcgcaagctgtgcgccaagcgactcaagcgcagcgaggtcatggatttctttgccaatctcccgccggtgctggtcggcatggaagcgtgtggtggcgcgcacgagtgggcacggcggatttccagtctgggtcaccacgtcaagatgatggcgccacagcatgtaaagccgttcgtacaaggcaacaagacagatgcgcgtgatgcagctgcgattgcagaagccgcgggtcgggaatcggtaccttcggtcgccattcgcaacatagaaggtcagcagatgcaggccttgcaccgggtgcgcgagctgtggatgaagcagcgcgtggctgtaagcaatcagattcgcgggctgctggccgagtttggcgaagtgatgccactggggatcaagaagctcaaagaggacgtggcgttgtggcaggcacgggcaacgccagagcttgcggttctcaaggaagtgatcgaacaattggtcagcgcgttacgtcagctcgaagagcggatcagcgtgctggagctcaagatccgggtgttgcacaagggcaatgcggcgagtcggcttattgaaagcattccgggcgtagggctgctcagtgccacggcagcggtcgcgagctttgggcaatgcgaaagcttcgagagcgcgcgcaagtttgcctcctgcctgggcctaaccccgcgcgaacacagcagtggcggcaaacagatgttgttgggtatcaccaaacgaggcaacaaatacgtgcgcaaactgctcatccacggcgcccgagcagtgctcaaagcgcggatgaacaaagaagcttatgcagaagactgggcggtcaaactcgccaaacgacgcgggcataacattgccgcggttgctttggcagcgaagaacgccagaaggatctgggcaatgctcagaacgggtgaagtgttccgggtcgattacgcgcaagcagacggcgcttacgcgtaatcgacccggttggatagaagcagtaccgatcaacgtaacacggaggcagctcactcgattgccaaggcaatctcaacttgatggcacccacaggtcagaccggggttacgacagctctacgagcggactgtgcttcgagcacgatagggtgattgagccgtaaccagcgaatctcatcatgcgtcagcagtcatacaagggctgcaccaaagaccgaatgtatggctgcaatcgactccgtgagtcgtcatcaacgaaaagattggctttgcaaaacgggggcgtccatgta

SEQ ID NO: 2796 - DNA, 1392 bp, unidentified
  source 1..1392: mol_type = unassigned DNA; note = element_3f89c93
  misc_feature 1: note = core
  misc_feature 2..82: note = LE
  misc_feature 83..1132: note = CDS
  misc_feature 1133..1392: note = RE
  misc_feature 1173..1389: note = bridgeRNA
caatgaaagggactcctcccctctcgaagcttcagcgagctacattgatagttgaaccacttcaatgcggaggggaagagtcatgaacaagcataagacaatagggttggatctggcaaagcgtgttttccaagtgtgtgttgtcgacactcgccgcccgcgtgttcaggtcaacaaagagcttaaacggcatcaggtcttggattttatgcgccgccaaccggcctgtcgggtgttcatggaggcgtgcggtggatcgcattattgggcgcgacagctgcaggccctcggccacaccgttgccctcatatcgccccagtttgtaacgccctttcgcaaggggcataagacagatgccaatgacgcgctcgccattgtagaggccgggttgcgccctgatatgcgcttcgtgccgctcaaaagcgtcgagcaacaggatattcagagcctgcaccgcattcgggaaaggtatattcatcaacgcacccagttgatcaatcaggttcatgggttattgcaggaatatggagtgatcagcggtcggggacagaaagcgttaaagcaacgtgtctggctcgccctggaagatgccgataacgagctctcaatgctgatgcgtgacttactcgctgaacaaatgacggagctggatcggctcaatgagcgtattcagtcactggataaacgggtggagcagatgagtcacgccgtggggccttgtcgcgaactcctggcgatagagggtgtggggccggtggtcgccacgcagctctatagcgcactcggtaatggcgaagcctttaagaaaggtcgccaagcgtcagcctatctggggttaacgccgaagcaacacagcagtggtggcaccgcgagcatcaagggcattggccggacgggtcaagtctcactgaaagccgccctggtacgtggcgcgcattcggtcatcaacaccatgggtgacaaacaggatgctaaaagtcgttggctacgatccctggtcgctcgcgctggcaagaacaaagcggctgtcgcgttagcgaacaagacagtacgaaccgcctgggcggttctgcacagcggacagtcctattgtagagagtttaacgacggttccgcgctgatggtgagctaagcggtagcaccatcagcggctaagcgccgacaggcggctaccttgttgccgggcaacgatcgatgaaaaacaggtcagaccgaccttctcaaaacctgctcattgcgatggctgaaaaagcctacgcctcgttgaggagagaaggtgcgcgacgttcatcagggtcaggggatagcgtccccattgagagaccgactatacgcacgcatcggcttatgttgttcatcatcgtcgcttgcaaccggggaggagtccctata

SEQ ID NO: 2797 - DNA, 1269 bp, unidentified
  source 1..1269: mol_type = unassigned DNA; note = element_3f8eafa
  misc_feature 1..2: note = core
  misc_feature 3..258: note = LE
  misc_feature 259..1254: note = CDS
  misc_feature 1255..1269: note = RE
  misc_feature 42..205: note = bridgeRNA
cttgtatgttgtgcctggcctggcgagagaggttattctcgtcaggttcaagaagcacttccggggaggccgatcgctcctgaaggcagggattgcccctgaccttgtatgtagagaggccccccgcctcattgcccactacgaagagtatcgagaagccgacaagtcggacttcgcattacaaggttgcagcggcatgaagttcgaggtcggggaaccggaggccattgtcacctaagttgctgcggagtgggaagaatgagtgtctacgttggcttggatatcggttcgcgcacgtcaaccgcaggggtgcgcaaagatgcgcgcccagccggtctatgggacatcgctcagacgccagccggacgcaaagctgcggttaaaaaactgcaggcgctccaacccaaagccatcgtgatggaagccaccgggatctattacctggacttggccatcgaactgcatgctgccgaccttcctgtctcggtgatcaaccctaaaagcttccataacttcgccaagctgatgctggtcaacagcaagactgacgcgattgatgcccagttactggccgagtacggtgagcgcatgaccccacgcctgtggacacccccaagccctgttcagcttgagcttcgggcgattggccgacatatcaatcgtctggtgggacaccgcacaagggcgaagaatgagctgcatgcattgcgtgcgacccatacgaccatgtccatgttgatcgaagatgaagaagaggctattgcctctttggacaagcgcattgagcgcttccgcaaggctgggcacgacttgatcgctcaatgcccgacgctcagtcgacagttcaaacaactactcgtagcgccaggcatgggggaagtctctgtacttgccgccttggctgaactcacgacgctccccgaaatactcaagtcttctcaggtcagccgccacgcaggtcttgatgttcggcaaactcagtcgggaaccagcatcgacaagcctggaagactcggcaaaagtggaaatgcctatctacgggcagccatgtacatgcctgcattgacggcggttcgctgtgatcgctatgcgaaagccttttacgaatcgctcgtcagtcgtggcaagaagaaaatgcaggccatcgcggcagtcatacgcaaatatttgaccggcgtctgggcatgtatgcgcgggagtgagccgtttgacacggccaagcttttcagcgccaaacacctggcaaaagcttgaccacgaacagagtat

SEQ ID NO: 2798 - DNA, 1393 bp, unidentified
  source 1..1393: mol_type = unassigned DNA; note = element_3f8ed1b
  misc_feature 1: note = core
  misc_feature 2..90: note = LE
  misc_feature 91..1119: note = CDS
  misc_feature 1120..1393: note = RE
  misc_feature 1162..1385: note = bridgeRNA
taatggaatggtcgcccctaccttaaacggcatcactgtgccaaagttgtggtgaattcgaattcccacaatacaatagaggcgacctatatgaagattacaacagtaggtattgatctggcaaagaacgtcatacaggtacatggcatcaacgaacaaggcaataaggtattcaataagcctcttcagcgcaaacatgtgttgacacacttcgcccaactaccgccgtgtttgattggcatggaagcttgcagtagtgcccatttctgggcaaggaaactacagggccaggggcatacagtaaaattgatggcgccgcaatttgtgaaaccctatgtaaaaacgaacaagaatgatgcggctgatgcagaggccatttgcgaagcggtgacgcgacccacaatgaggttcgtgccgattaagaatggtgaacaacaggccgtactctccctgcatcgtgcacgccagggatttgttaaggcaaggactgcccaggcaaaccagatacgtggtttgctaatggaatacggtatcaccatcccgcagggtatcagccatattacgaaacgactacctgaattgttggaggatggcgaaaacgaactgcctggggtatttcgtcaattactccagcgactgggcgatcacttgaaggatcttgaccgccaggcgacagagttagacgagcaaattaaaacctggcatcgagggagtgaagccagcaagacattagcccgtattccgggcatagggccgctcacggcaagtgcattggtcgcttcaattggtgatgcaagcagtttcaagaacggccgacagttagctgcatggttgggactggtcccgcgacaacattccagcgggggcaaaccccggctgcaaggcattagtaagcgaggcgatacttatctgagaacattgctgatccacggtgctcggtcagtgattcgagtcgccacaggcaaaacgacgcccatgcactgctgggcagtcaatttagtggagcgacgtaacaaaaatgttgcggcggtagccttagctaataaaaatgctcgaatcgtttgggcgcttatgacacaaaaccgtgagtaccaatcagacttcgtgcagacagtataaatacaggtttaaaacaatatcaacttcaaaggaggattctccaccccgattgctcaggcaatcatgacatgatggcaagacaggtcagaccggggcaggtaaaacctaattcacacagggagcataaagctcgtcaggctgatcaggtacctgccagcatattccatcagggacagaggcttatggcctcgattaaaaagtccggatctatggctgcaatctctacttcttactatcgttattgaaagcttggcaaacagggggcgaccatcta

SEQ ID NO: 2799 - DNA, 1584 bp, unidentified
  source 1..1584: mol_type = unassigned DNA; note = element_3f8fd4c
  misc_feature 1..3: note = core
  misc_feature 4..264: note = LE
  misc_feature 265..1467: note = CDS
  misc_feature 1468..1584: note = RE
  misc_feature 1..243: note = bridgeRNA
cccattaccatgtttggtaggccccgatggtcggggccgggtcgccggttccggtatgactttcctgccctgtcgtcgatgatccgggggggggtgttgtcgccgagaacggggacgcccgatgaccgctgataggaaccaggccggctacacggacgcttcaggggcgcatggcgcaggtctcgtcgtaatgtgggtgcggcgcgggcgtccggactcctccgagcccgcggcgaccggaaaaccttcatgacgggaggaacgatgatgaccccggacgacatcgacgtgtgggtcggcctggacgtaggcaagagcgcgcaccacgcgcacgccctcgaccatgacgggaacaccctgtacgacaagccgttgaaacaggacgagaaggccatccgcacgatgctgggcaagctctccaagcatggccgtgtgctgctggtcgtggaccagcccaacaccatcggctccctgcccctgacggtggcgcggaacatggggatcgcggttgcctaccttcccggcacggccatgcgcaggaccgcgcagctgctgcccggggacgcgaagaccgaccgcagggacgcgcatgtgatcgcgtgggccgcgctcaagctgcccgagacgctcagggacgcgggcccggatgacgagaccctcgccgccctgaagcttctcgccggccacgccgaggacctctcccacgaatccacccgccacgtcaaccgcctgcggagcctgctgctgcagacccaccccgcgttcgaacgcgcgctcaagggcgagagaatcacgcgcgacgcgacgctcgcgctgctcgaacgatacggcgggcccatgggcgtgaaacgggccgggatcgaggacgtgaaggactgggccaagtccaacgggcttcgcgccggccgcatcatcgacgacatgttcaaggcgatcggcgagcagaccgtcaccgtgcccggcaccctcatggccgagaccatcatcccctccatcgcccacgacatcaagacgatcagggaccggcggcgcgaggtcggccgccaggtcgagaagctcctggaggaccaccctcttctcacggtcctgacgtcgatgcccgggataggcgtcaggaccgcaagcaacatcctgctcggcatcggcggcgacatcgccaacttcaaatcgtccgcccatctggccgcctacgcgggcatatcgcccgtcaccggccaatccggcaccagcatcaaaggcgaacggccctccaggcggggcaacaaacgcctcaagaacgcgctgtggcagaccgcgttcgtcgcatccaccaaacacccgccctccgtggcctattacaagcgcaaacgcgaacagggcaaacaccacaacgccgccatcatctgcctcgcgcgtcggcgctgcgacgtgatctacagcatgctcaaaaacggaaccctctaccaggaaccagccctcgtagcctgaaccgggccacacgggaaaggacgccggacgccaccggcagggcgaagcgcgcccacgacagccaaccggaatcccgacacgtcaactccccaaggagttgacaaaaacataggaaca

SEQ ID NO: 2800 - DNA, 1206 bp, unidentified
  source 1..1206: mol_type = unassigned DNA; note = element_3f90abc
  misc_feature 1..2: note = core
  misc_feature 3..207: note = LE
  misc_feature 208..1191: note = CDS
  misc_feature 1192..1206: note = RE
  misc_feature 12..188: note = bridgeRNA
cttgtatctttttctccgtggtggttagctaccaccacacgaagcagaggcagcttgaacccatccttaaggttcgaccttgtgacgtagatcaggccctctgcttcacctctcgccgacaaagacactgaacggtagccaaggggcaaaccctgaatgcacaaggcaagtgggcgaagttggctaactttttgataggagatcatcatgcgctatctcggtatggatgtcgccaaagccaagttggattgtttgttgctgaatgaagacggcgacaagggcaaatccaagtcggtcgctaacagtcgcaccggcattgccgatttcttggcgtggatcggcaaacaacatatttcagtcaatgaactgcatgtcgtcatggatgccacaggcgtctatcacgaacaagcggcgttggcattagctgatgctggcgttacggtatcgatcgtcaatccggcacaggtcaaagacttcggacgcggactggcggtgcgcaccaagaccgatggcatggacagctatgtcttggcgcgttacggcgcattgctcaaacccgccgcctggacgccgcctgcgccagaggcgcggatactgcaagcgctgatcgcgcggcgcgaggctattgcccaagacctgcaacgcgagcgcaaccggcaggagaaagccgatgccaccgacacgccgacgctgataagaagatcgctgtccgatagcatcgagttcttgtccaaacagctcgtccaattgcagcaggacatcgaccagcatattgatcgtcatcccggcctcaagaacgacctggccttgctccaaagcattccggcggtgggaccgcaggtaggcaacaacatgctcgcggtcatgcatgcccacaacttcggctcagccgaacagcttgcggcctatcttggcttggtgcccgtagagcgacagtcgggtagttcggtgttgggacgagccaagctctccaaggcggggccagccaaggtgcgtgcggtgctatacatggccgcagtcgtggcgacgcgttgcaatccgcatgtcaaaaccctctatgagcgattgctggcacgagggaagtcgaagatgtctgcgctcggcgcagccatgcgcaaactggtgcatctgtgcttcggcgtgcttaaaactcgtcagccatatcagcgtgattatgcaaaaatcggttgacgctgaagacggtat

SEQ ID NO: 2801 - DNA, 1268 bp, unidentified
  source 1..1268: mol_type = unassigned DNA; note = element_3fa6cbd
  misc_feature 1..2: note = core
  misc_feature 3..221: note = LE
  misc_feature 222..1256: note = CDS
  misc_feature 1257..1268: note = RE
  misc_feature 17..233: note = bridgeRNA
ctgacttgttgaatgtgatgaggccgtggggtctgcagccctaacgtgctcagggtgtcggacgggttggctcgcagtgctccttgccaccttcgggttggctcgctgatagcttgccgcgctcgtccgacacctgccggggcgtggctcaacagaggcgtgacaagtcttgaagtcaggctgcccgccgcggaaccctcctcccgaccgaagggccccgtgtgatcaccataggaatcgacccgcacaagagttcactcaccgccgtcgctgtcgaccccgtaggtcgggaactcagcagcatccggctgtccgtcaccggcaccatgggccagcagctgctcgcctgggccgcgccgtggccgacccgaacgtgggccgtggaaggcgctcacgggttgggacacggcgtctcccagctgctcgccgccggcggtgaacacgtcgacgacgtacccgcgaaactcgccgcgcgggcccggctgctcggtggtggcagcgcccgcaagaccgaccacaccgacgccgcctccgtcgccgcggtggcgcaacgctacgaacgactgctggccgtggcggctgagggcgacgacgtgctgctgaggctgctgtccgaccgccgcgacgacttggtcggcgaacgcacccggcacctcaaccgtcttcacgtcctgctgcgcgacctgcaccccggcggtgccaagcgcgacctcagcaccgctcaggccggcaagctcttgtccggcatccggccggtaacggccgccgacgcccaacgcaaggcgttgagccgagacatcctcgccgacatccgccgtctcgacgccaagatcaaagccaacaccgccgagctgacccgagccctggccgagcacggcagcaccctaaccgacatccacggcgtcggacccgtcctggccgcgaagatcgtcgctcacaccggcgacgtacgccggttcccgagccgacaccacttcgccagctattgcgggaccgcacccatcgaagcctccagcggcgacctccgccgccaccgactgtcccgcggcggcaaccgacaactgaacaccgccgtccacgtcgtcgcgctctgccaggcccgcgaccccggacccggccagtctcactaccgacgcaaactcgcagaacgcaaaacccccgcagaggcccgacgcagcctgaaacggcaactgtccaacatcatctacaaacgactactcaccgacgcacaacgccgcctcccgcccgccacttgacacacagaggcg

SEQ ID NO: 2802 - DNA, 1167 bp, unidentified
  source 1..1167: mol_type = unassigned DNA; note = element_3fb7255
  misc_feature 1: note = core
  misc_feature 2..179: note = LE
  misc_feature 180..1148: note = CDS
  misc_feature 1149..1167: note = RE
  misc_feature 36..200: note = bridgeRNA
tccttgtatattgaaaattgtttaaaataactgcgattagatttggcaaggtgtatgcagcccgatttctcctgaggtgcatagcccgccagtaagcgactggcgcatacactgagccactcatctgaaacccgaacagttgttcgtactccataacgtatttgcaaggatgggtaataatgagtcagccaaatcaactctgtgttggtattgatgtttcgaaagcgacgctggacattgctgccaacagcacaattgaacagttttctgtcggtaatgacggtgatggctttgataccatcattgctgagctgaggaagtacaccgttgcgttggttcttatggaggcaacaggaggtcttgaggctgccgtagcctgcgcgcttcaggctgaaggttttgagatagcggtggttaaccccagacaagctcgtgactttgctcgcgctatgggatacctcgcgaagactgatcgcattgatgccagagtgctttccccgatggctgaggttctcaatcgccatccagagcgagaacgttttattcgggcgttgccggatgctgaacgtcaggttcttgctgcaatggtagtgcgcagacggcagttgatcacaatgctggtcgccgagagtaaccgattgcacccagcccaccctcaaagcagaaaaagcattaatatcatcatcaaagcgctggaagatgagcttgcgcgaatcgatgaagatatgagaaaccatatctgtatccacttcaaagagctctctgagcgattgagtagcattaagggcattggcatcatgaccgttgccgcactgttggctgaggttccggaactggggcggctttcgagacgggaaatcagcgcactcgtgggcgttgctccggtaaaccgggattctggcaccatgagaggccgacgaaccatctttggtggccgtgcgggagtgagaacctcgttgtacatggccgcactcgtagcagcccgcttcaacccggttataaaaatgttttatgcccggctgattgcagccggaaaacctaaaaaagtcgcactggtggcctgcacgcgcaagctgttgaccatcctgaatgcgatgctcagaaagaacgaagaatggaatgaatcgtatcatcacgtagctctataattttcacattcaagacagt

SEQ ID NO: 2803 - DNA, 1364 bp, unidentified
  source 1..1364: mol_type = unassigned DNA; note = element_3fbb19e
  misc_feature 1: note = core
  misc_feature 2..74: note = LE
  misc_feature 75..1106: note = CDS
  misc_feature 1107..1364: note = RE
  misc_feature 1110..1354: note = bridgeRNA
tataggatggcccgcccctctcgaagcgatgggttaagattgcagacctttgcgagagggagaggagcggaccgatggatatcgttgttcttgggatcgaccttggcaagaattcctgcagcgttgccgggctgaacgccgccggccaggttgtgcttcgccgccggctgaagcgggagggcattgtcggcctttctcggcagtggcctgggtgcgtggtggcgatggaggcttgctgcggggcgcatcacctgggtcggcagttggcggcgcaggggcatgaggtccggctgatgtcgccggaatatgtgcgtccctacgtgaaggcgcaaaagaacgacgaccgggacgccgaggcgattgcggaggcggcgacgcggccgacgatgcgctttgtcgaggtgaagacccaagcgcagtcggacatgcaatcgctgcacagggcgcgggagcgcctggtgaacgaccggaccgcgctcatcaaccacctgcgggcactcctgctggagcggggcatcaccgtggcgcaggggcggcgcaagctggaaaaggaattgcccggcatcctggccgacgaggcgttgggcttgagcccccgcatccgccagttggtcagcgatttgcgcgaggaatggcaggggctggatcaccggatcgccgcgttcgacaccgagttcgtcgcccaggcccgcaacgacgagacggtccgccgcctgatctcggtgcccggcattggcagcatcaacgcgacggcgctggtggcggccgtcggcgatggtcgcgcgtttgcgcgcggccgggacatggccgcctggctggggctggtgccacgccagatgacgacgggtggcaaacccaagctgctcggcatcagcaagcgcggcaaccgctacttgcgcaagaacctgatccacggcgcccgggcggtgctgccgttgctggtcgagcgcgatacgccgctcggccgctgggtgaaaggcttgctggagcgcgcccacaagaacaccgtggtggtggcggcgctcgccaacaaattggcgcgcatcgcctgggccgtcctgacgggtggacaaggcttcgatgcggcacatgccgtggcggcatgagacgaaattgatcggcgcgcggtcaacgctgcgcacggtcgccggtgtctgcgggcggtaggatgagatggcctggcagtcgaacggcagtacggaaacctgggcgttgtcaacggccttcgaggccgggccgattatgaggaccgggctgcgcggatctccatcttggcagggggcattgccccgaggccggatacgttgaagcagactgatcaaggcgggatcgtcaaaccacctgtggacggggcgggccatacg

SEQ ID NO: 2804 - DNA, 1441 bp, unidentified
  source 1..1441: mol_type = unassigned DNA; note = element_3fc35ad
  misc_feature 1: note = core
  misc_feature 2..45: note = LE
  misc_feature 46..1170: note = CDS
  misc_feature 1171..1441: note = RE
  misc_feature 1207..1441: note = bridgeRNA
aaatgtaatgaacacatcccacttaattaagtgaggtgcactgtgatggatgaaggaaaatacaggaaggtgtggagcctcacagatttccggcatcatagtgcccaatacgggatgcataaagctccctcagactggagactccacagcatgaaatatacaccggttggcgttgctatcgcaaaacatcttattcaggtccatttcatcaatgagcacacaggtgaagtaattgataagcaactgcgtaatcaggatttcctgacgttcttcagtaaccgggaaccctgcctgattggtatggaggcctgtggaggctctcagcactgggcgcgtgaactgaaaaaactgggacatcaggtccggttgttgcaggcccggttcgtgaaagcgttcgtcatgggcaacaagaatgacgtgatggatgcccgggccatctggatggtggtacagcaacccggtaaggaaatcgccgttaaaacagaagaacaacagtcggtgctggttctgcatcgttcacgcagacaactggtgaaattcagaactgcacagattaactccctgcacggaacattgctggagttcggtgaaaatattcacaaaggccgggcagcgatggacagggaactcccggaagcgctggagcggatgaaggcgacgttgccaccgtatctcatcaccgtgccggaagaccagcataacaggctgaaggagctggactcgatgatggatgaccctgaaaaacagcttaacagtatggcgcggcagaatgaaacctgtaagcgactgatggaaatccccgccgtcggaccgttaatagccacggcagcagtcgccaccatgggagaagcagcagcgtttaaatccggacgtgaattcgccgcttacgtgggcctggtacctaaacagacaggctccggaggaaaagtccgtctgccggggataaacaagcgtggtgacacgtatctgcgaaccctgtttatccatggcgcgcgagcagcagcactgctgacaaaagagcccggaccatggataacagaactgaaaaaacgcaggccgactggcgtggcaatagtagccatggcaaataagctggcgcgaacagtgtgggcaatagcagcccacgaccgtaaatacgataaaaatcatgtcagtatcagaccgtattaatcactgataccgataaatacaactcttaactaaagggtgaatgcagaaaggttgctctggcggccagcgtgatgacaaagacaggtaagaccgtgactcactaaacctgaatggaatgtagggcttaaagcccgccggagaaataaggtgtgggtcagcgaattacataggggcttgcagcataatggctgcaataaagcggatataaagctgcaacctactcgtcaatgtcataacaatggatgccttgcaaacgggatgtgttcatata

SEQ ID NO: 2805 - DNA, 1408 bp, unidentified
  source 1..1408: mol_type = unassigned DNA; note = element_3fcabda
  misc_feature 1: note = core
  misc_feature 2..90: note = LE
  misc_feature 91..1149: note = CDS
  misc_feature 1150..1408: note = RE
  misc_feature 1176..1400: note = bridgeRNA
taatgggatggacgcccccactctgagcggcatcgtatgtgccaaagtggaagtgttgagttaccacttaaacaggtaggagcgtccgaaatgaacattacgacgatcggtgttgatttggcaaagaatgtgtttcaagttcacggcgtcgatgagtttggcaaggcggcgctgcgtaagcagcttaaacgtgcgcaagtcctgagcttcttcgtgaatctgccgcggtgcgtgattgggatggaagcgtgtggcagcgcgcacttctgggcccgcaagttcacggagttgggacatacggtcaagctgatggcgccgcaattcgtaaagccctacgtgaagaccaataagaacgatgcggccgatgccgaggcgatctgcgaggcagtcggacgagagagcatgcgctttgtaccgatcaagaacgccgagcagcaggcgttgctagcattgcaccgggcgcgacaagggtttgtcggggctcgtaccgcacaagtcaatcagatccggggtctactggccgaatttggcattgtgattccggcaggcattcgtcgcgtgagggagaatatgcccgagattctgcaggatgctgagagtgagttgccgtgtattagccgcgacctgttcagtcgactatttagccacttcctcgagctcgacagccaggtaagacagttagaggcgcagattcaagcttggcatcgagaagacgcagtcagccggcggctgcagggaattcctggcgtcggaccgattacggcgagcgcgttggtgggtagcatcggggatgccagtacgttcaagaacggtcgacaactggcggcctggttgggcctggtgccgcgccaaaagtcctcgggcggcaaagagcaattgctgggaatcagtaagcgcggcgatacgtatcttcgcactctgctgatccacggagcgcgctcagttgtgcggcaattgaaacttaaggccacgcagccagaaggatggcttgcgcgcctggcgcttcggcgcaacttgaatattgccgccgtcgccttggccaacaagaatgcccgtatcgtatgggcgctgctggtacatggtcgagactaccaagccgggtacgtcgcgcccagaagccgcgggataatggctgtaacagcgcaatagacgaattcctggcacaacttcccaccagcgattgctaaggcgttattcaaagtgatggcatcacaggtcaaaccggggtcgactcaacctgctccattcaggggacttcaacagtccgcactactgatcaggcgtcgaccagcgtattccatcagggacagcggcatcgccgcatcaaagtccggatgtatggctgcactttatccctgtgatcctgaactgcagaacaaatgcttggcgaagcgtgggcgtccatgta

SEQ ID NO: 2806 - DNA, 1387 bp, unidentified
  source 1..1387: mol_type = unassigned DNA; note = element_3fcb386
  misc_feature 1..2: note = core
  misc_feature 3..80: note = LE
  misc_feature 81..1142: note = CDS
  misc_feature 1143..1387: note = RE
  misc_feature 1163..1379: note = bridgeRNA
ataatgagatggtccgctgcctagtaagccaacaagagtaatgatggtgttggcaaaaagccagacggaggatcatcaccatgcaaattaagtcgcagataaaatcacagattaagtccatcggtatcgaccttgggaagacgacctttcacctagtcgcgctgagcacccattctcgggtagtagtacacaagaagttttctcgtcaacaactgttgacctacaccgccaatcttcccgcatgcttgattgggatggaagccggcgtgggatcgcactttctgggacgagccctacgcgcccaaggacaccaggtgcggctgattccggcgcagtttgtgcggccgttcgtgaagtcgaacaagaacgactaccgtgatgcggaagccattgccgaagcggtggagcgggagaacatgcgtttcgtgcccatcaaaaccgaagaccaactggatgtgcaagctctgcatcgggtgcgggagcggctggtgtcgcgccggactagtgtgatcaatcagatccgctctttcctgttggagcgggggatcagcttccgtaaagggccggccagcctgcgtcggcaaatgccggagatcctggagaacgcagaggagaagctcagcactcgcatgcgccgcctgttggattttctttggcaggagtggaaacatctgcagttgcagatcgagagtttgaacgaagatgtggagcagatcgcgagccaggatgaagtctgcgctcgcctacaacagatccctggggtgggccctctggtggctacggccgtcgtctcggccatcggcaacggagctgcctttcacaagggacgagagtttgccgcctggctggggctggtaccgcgacaatggtcgacgggaggcaaggccaagctgctgggaatcagcaagcgggggaatccctatctgcgcaagatgttcatccatggagcccgcgctgcggtgttgcgcgtcaagcgtcaaggatcctgtctggggcagtggatgagtggcttggaaaccagagccgcacgcaacgtagtgatcgtcgctaccgccaacaagctagcccggatcagttgggccgtgctctccagcggggaagattatcacccgatgcacagagccgtttcctctgccagctagacgaagtggcttgagattcgcttctcagaagtctgcagaagaataggaaggacgaaaacacagtcaaacggcgtgcctgagaacctgggtcgaaatgaggtctttcacgaccgcggcgattatcaaggacaggcacgcgcggatcatcatcatgcgcccggagaccattctccactaaaggccggatacattttcgcagactgtttcccgtccgattcctcttgcagttcggcggcggaccatac

SEQ ID NO: 2807 - DNA, 1388 bp, unidentified
  source 1..1388: mol_type = unassigned DNA; note = element_3fcda79
  misc_feature 1..2: note = core
  misc_feature 3..78: note = LE
  misc_feature 79..1125: note = CDS
  misc_feature 1126..1388: note = RE
  misc_feature 1128..1375: note = bridgeRNA
tgatggggtggatggccccctcacggcatccctatgccaaagttgggttgtgacaacaccaacagacgggagccatccatgaaagaggttacaacaatcgggctggatctagccaaagcagtgtttcaggtgcacggagttgatgcggcaggggcagtgacgctgcgtcgggcggtgcggcgaaggcaggttctgtcgttctttaccaagctgccgccctgtctggtcgggatggaggcgtgcgcgacggcgcattactgggcgcgcgagatcgccaagctgggtcacgacgtgcggctgatcccaccggcctatgcgaaggcctatgtacggcgcaacaagaacgacccggcggacgccgaggcgatctgcgaggcggtgagccgcccctcgatgcgctttgtcgcggtcaagaccgaggtgcagcaagcggcggcgggcattcacaaggttcgcgagatgctgatcaagcagcgcaccatgctgatcaacacattgcgcgggctgatgggggagtttggcattgtcgtcgccgaaggtccccgtcacgtcggcgagctcatcgcgatcctggccgatccggcagacaggcgcataccgacaccgctgcacgagggcttgctggcgatcgtggagactttgcgcgggatcgagcgacggatcgagatcgtggaccagcagattgtcggctggggccgcgacaatgcgacctgccgccacctgatcaccattcccggctacgggccgatcctgtccagcgcgatggcagcgatgaccgtcaaccccgcggcctttggcagcgggcggcacttctctgcctcgctcggcctggtgccgcggcaggacggcacgggtggcaaggtcaagctcggcccgatcagcaagcgcggcaacggctatctgcgccggctgctggtcaacggcgcgatgtcggtgctgtgcagcaagcgagccaaggaggatccctggctggtcaaactgctcgagaccaaggagcgcaaggtcgccgcctgcgcgctcgccaacaagatggcgcgcatcggctgggcagtgatgaggcggcaggaggacttccgcggccggcggcacaatcagccgtgccccgacggagaaacggccctctgatcgaacaaagaaacaggacttcagagacacaggacttgcgagggtgaagacgcgtgatggcatcgtcggtcaaccgacggatcgaggggcacctgtccgaggacatggggcactgcgaccccgagagcctgatcagacctcgacccgccgaacccatcagggcctgcggcttgtgccgcgccaacaggccggacacatgactgcaaatggtcttcgatgcagacacgtgaaaaaatccttgcgagccgggggccatccacaca

SEQ ID NO: 2808 - DNA, 1200 bp, unidentified
  source 1..1200: mol_type = unassigned DNA; note = element_3fd1624
  misc_feature 1..2: note = core
  misc_feature 3..222: note = LE
  misc_feature 223..1185: note = CDS
  misc_feature 1186..1200: note = RE
  misc_feature 28..198: note = bridgeRNA
cttgtatgttcctcccggctcctacgaggtatgtaggagccagggtggagggaccgtcaacatgatatctgcgggtaccagccgacagacgagccgagcgatccccatcccgcaccttaacgtcgataagggatctagcggcctttgaggaccgccgatgtaggcaagccaacgtggtgcggtaccaccccagcccctcaacaatagctgggagttgcgcagatgtcagatcgtttggccttcggcatcgatgccgattcaaagacccttgtggtggcccatcacggcaccaagggcagcgcccgcatcaccaattcagcgtcggccatcactaagtgggtgtccgccctgccggccagatctcgcattggagtggaggcaaccaatcgctaccacgagcttgtggttcaggctgcccagaaggccggtcacgccgtctttgtgctcaatccgcgcgacatcaaacattacgccaagggcgtggcctgccgcggcaaaaccgactcaggtgacgcgcaggttatcgcgcgttacatcgctaaggaggccgacaatctgcatgagcatgtcgcccgttcacctgcgcaggagcagctgcatgtgctactccagcaacgcgacagcctggtccggagcaaggcgaagttgaatctctcgctaggcgcgggagcgtcggagtcggccatctttgggcgcatcttcggtggtctgaaagaggccattgccatgctcgaccaacagattcagcaactgtgccgcagcggcgaacagcgcgacctgtatcggcggatcatgaccatcccggggatcggaccgacggttgcggcctttatcacccatcacatcacgcgctggcccttgaccagctcagacgcttggattgcctgcagcggtctggatccgcgacccaacgaatccggtgcgcggatcggcagacggcgcctgtccaagcgtggcaacgccagcctgcgccagatcctctacatggcggccatgggcctgacccgatccaaaggcggtaaagccctttatacggccatccgcgaacgtggtcacagcagtaccgccagctttaacatcctggccagaaagctggccaggatcgcctggggggtctttaaaagcggtcgggactttgaccccgccacgctgaaagtgggtcaagcctgcttccagcaggcttgaccgcgaacataggat

SEQ ID NO: 2809 - DNA, 1470 bp, unidentified
  source 1..1470: mol_type = unassigned DNA; note = element_3fd5a92
  misc_feature 1..2: note = core
  misc_feature 3..211: note = LE
  misc_feature 212..1219: note = CDS
  misc_feature 1220..1470: note = RE
  misc_feature 1237..1465: note = bridgeRNA
agatggggtaacgggcctcggccctgctagcaagcaagatgctcgctcgctacggcgctattgagtagcgcgctcgcttcgcatcttgcttggcggcagggcggtcgtccctcaatctgatggtgtgaacggagtcggaccttttagtccgctccaagcatcaacgagggacgaccatggagcactatgcaggaattgatgtgtctttggaatgctcgagcatttgtgttgtggacgcgaccggcaagatcgttcgcgagggcaagttgcaagcgagccggaagcgctgattgcctggttcggttcgttgggcttcgagctcgtgcggatcggcttggaggcgggaccgctgtcgcaatggctgtatgccgggatggagcaagccggccttgcggtggagttattggagacacgacacgtgcgtgacgcgttcaaggcgatgccggtgaagtcggatcgcaatgacgcgcgggggatcgcgcagctgatgcggctgggctggttccgaccggtgcattgcaagtcgattggggcgcaggaaacgcgcgcggtgctaacggcgcgcaagcttttgcaatcgaagcttctcgatattgagaacagcctgcgtggcatcttgcgtggttttgggctcaagataggcaagacgacggggcgaagttttgctggacgggtccaggagctcgtggccgaccatccgaacctggaggcgatcggccaatcgctgctttcggtgcgcgccgttctgctgcgcgagttcaacacattcgagaagcgcgtgcgttcgatggcacgtgcagatagcaaggccaagctgctgatgtcgacgccggccgtgggtccgatcgtggggctcacctatgcctcggcaatggacgatccggggcggttcaaatcatcaaagcaggcgggagcgcatttcgggctcacgccgaaaaagtatcaatccggccagaccgaccggtccggtcgcatcagcaagatcggcgatgccgcagtgcgcgaggcgctgtatcaggcggctcacgtcgtgctgaccaagccggtcaagggctgtgcgggactcaagagctgggcgatgcggatcgcccggcgcgccggcatgcgtaaggccaaggtggcgctggcgcgcaagctcgccgtgattctgcatcggatgctcgccgacggcgcccctttcaacccaagcaaggcaaccgcattggccgcaaccgcctaataaggagagatcacagatctttcgggcgggtcacgacaccagccttcccgaagcgaagtcccttcgccgggacgatggaccaggtcagaccgtcatccgggatgtggcacacgaccacgcatccgtagattggccgacctgtcctccacgaaccccatcaggcgacggccccgcgccgatcccgtacagaagcacgtccccggcgagtggatgacgcaaaagagggttgacatgtcgacgcccgttacaga

SEQ ID NO: 2810 - DNA, 1410 bp, unidentified
  source 1..1410: mol_type = unassigned DNA; note = element_3fd5e8b
  misc_feature 1: note = core
  misc_feature 2..86: note = LE
  misc_feature 87..1115: note = CDS
  misc_feature 1116..1410: note = RE
  misc_feature 1177..1405: note = bridgeRNA
taatgggatggtcgcccctccccaaaacggcatctgagtgccaaagtggcgaatgtaagttcccactgatgagagaggcgaccaccatgaaggctacgactatcggcatcgatctggcaaaacatctcttccaattacatggcgttgatcaacatggcaagacggtcctcaagcgacagttgaagcggggtcagatgatctcattctttagcaatcttcctcctagcctgatcggcatggaggcatgcggcagtgcccattactgggccaataaattgcaagggctggggcataccgtcaagctgatggcgcctcagttcgttaagccctatgtaaagaccaacaagaacgatgctgcggatgccgaagctatttgtgaagctgtgactcggcccaccatgcggttcgtgccgataaagagcagcgaacaattggccatcctggccttgcatcgtgctcgacaaggcttcatcaaggccaggacagctcaagccaaccagatccggggcctgttagcagaatacgggttcatccttcctcaaggcatcacccacataggcaaacacgttcccgagctgctggaggacagtgaaaacggcttgccaggaacgtttcgccatttgttaatgcgacttcacgagcacctcaaaatgctcgacaagcaggtcaatgaattggaggacgcgatcgttcgctggcataaggacagtgcagccagccaaaccttagcccagctgccaggtatcggtcctatcaccgcaagcgcactggttgcttccatcggcaatgcgaaaaatttcaagaatggccggcaattggccgcgtggctggggttagtgccacggcaacactccagcggtggtaagcagaacctgcttgggatcagcaagcgtggcgacagctatctgcgcaccttgttaattcatggcgctcgggcggtgctacgagtagcagaacgcaaggagtcgttctcgggaagctggttggccggggtgatggcacggcgcaaccctaacgtggcggcggtagcgcaagccaacaagacggctagaatcatctgggcattgctagcacacgacagaaaatatgatgcccactatggcatggccgcatgaaaaacaggtttggcaatgtaagggctagttgacagtcctatgaccaaaaattggtaaggaagcaccgattgcacaggcaatcatgaagtgatggcgagacaggtcagaccgtggctggtaaaacccgagggaaacaaagtacttccaagtacgtggcgttgatagcggagccagccagcgaattccatcagggatagaggcagtagcctcgatcaaaatccggatctatggctgcaatctccacctgactcactttcatggattgagggcttggcaaaccgggggcgaccatcta

SEQ ID NO: 2811 - DNA, 1392 bp, unidentified
  source 1..1392: mol_type = unassigned DNA; note = element_3fde9e0
  misc_feature 1..2: note = core
  misc_feature 3..89: note = LE
  misc_feature 90..1121: note = CDS
  misc_feature 1122..1392: note = RE
  misc_feature 1092..1380: note = bridgeRNA
tgatggagtggacgccccctcccggcggcatcacaatgtgccaagatggtacttcgtacttaccgaccatctgagggaggagacgtcctatggaagaggctagcgtcatcgggatcgatctggcaaagaacaccttccaggtccacggcgcgaaggccgacggatcggtggcgtatcgcaagaagctgggccgggcgaagcttctggggtttctcgccgcccgcccgcgctgtgtggtggcgatggaggcgtgcgccagcgcccactattggggccgggagatcatggcactcggccacgaggtgaggttggttccaccggtctacgtcaagccgttcgtcaagcggcacaagaacgacgcggcggacgcggaggcgatcaccgaagcggcgcagcgtccgaccatgcacttcgtggaggtcaagacggaagggcagcaagcgcgggcgatgctctttcggacgcgcgacctgctggtgcgccagcgcacgcagatcatcaatgcactgcggggtcacctggccgagttcggcatcgtggctcctcagggcaccgcccggaccgggcgactggccggggcgctggaagatggagactccggcctgccggaggcggtcgtcgaactgggcgggctcctgctcgaacggatccacgagctcgacgataggatcgatggactgaacggcgagctgcgcgagtgcgcgcgggaagacaaggaggaggcgcggctgatgacgatcccgggaatcgggccggtcaccgcgctggccatccaggccttcgcgccaccgatggagagcttccgccgcgggcgcgacttctcggcgtggctcggcctggtgccgctacagcacacgaccgggggcaagccgaggcttggcaagatatcgaagatgggtcagcgcgacctcaggcgactgctgatctcgggggcgatggccgtcatccagagcgcgattcgacgtggcgagacggcggatccgtggctggccagcatgttggagcgcaagcccagaacgctggtcgcggtggccctcgccaacaggacggcccgcatcgtatgggcactctcgacgaagaaggaggtctaccgggttcacaccgcagctgccgctgcctgacggagcggcaagtggaagcagctgtcgggaacgtgggcaggacggacgaaacaggtatgggcaaacggtcaacgagacgggatcaggaaaaccagggcgaaaacgcagagcatctcatagcttgcagatgtgatttggactcggtccgcgtatctccatacaggccagcggactatgacatgccgcgcgaacaggccggatagatgaccgcacctgaccgcacgctcgcacccgttctccagaacgctggcgtcacgggggcgtccataga

SEQ ID NO: 2812 - DNA, 1635 bp, unidentified
  source 1..1635: mol_type = unassigned DNA; note = element_3fdeb2c
  misc_feature 1..2: note = core
  misc_feature 3..296: note = LE
  misc_feature 297..1481: note = CDS
  misc_feature 1482..1635: note = RE
  misc_feature 60..274: note = bridgeRNA
ctggtataatgtaattgactcatctaacagtcattttcattatacctttctcctttctatcaacctttttaatccgtggttgattacggttttaaacattggtattatataaataagtgatgtggatttgtataatcaacctgtagctttgactactttaaggaggttctcaccacaccttgtttcttagtaatgattagttagatgagtctttgaattcgtatctcgtaccaggttttacggagcaagtgctgtggataacacattacacatttttacgaaaggaatgtattaccatgattttagtcggaattgacattggtaaaaaccaacacactttttctataattgataaaggaacaggtgaaattcttttaaatccttctgtttttgataataaccagaacggatttctgttactcatcaagcagctaaaggattatgacaaagctgaagttcttatcggcatagaagatacgggacattatcattttgctctgcttaaatatcttcttgacaatcgatatacagttgctctcattaatcctacaacaactgaccttacaaggaagatacaaggcggtatcacaaaaaacgatcctcttgattctatcactatctgtgatgttatttcttctaatcagcgtaagaaaccttatcgtgttacaaaggtaaaccgtttcgacctctatgaacagaagcaattaacccgtcatcatcataatttgaaagaagagttaaacatttacaaaaaccgtcttcagaaatgtattgatattgtatttcctgaatttaactcactattcaattcaaaatacggaattgtctatatgagtattttaaaaaccttttcttccgccgaagctgttgcaaatgctgacattcgcagtgttcgtaaatgttttgaatacaaaggacgaggtggtcgaatttctctttctgcagagcaactaaaaatgactgccaaagcttctatcggcataccttctgctgctgaagaaattcaaatacgtcaccttgtatgccaaattgaattactggaggaacaactttctgaaatagataaaaggatagaagagttctccattcaaaacagctctactatcctttcgataccgggcatatcacatttttccggtacatccattttagcagaattgggagacgtttgcaactaccaaaaatcatctcagataattaaatttgcaggtgttgctccttatcactacgagtccagtcaattcacggcacagcatactgcaattacgaagaaaggctccaaatatttaaggaaaaccttatatcagattattttacccgttatcaacaacaacgaagtatttcatatttattacaacaaaaaattatctgaaggtaaaggtcacagatgtgctcaaggtcattgcatcaggaagctcttacgagttatctatcaccttttaagtacagaacaacaatttaatcctgaacttttggtgtaagcaataactgattatccttttacaaactgccttcttttgaaggtttatttgccatgccacaaaatccacaattatttatatattttcaatgtacagtgtttcgctaactaattttaaatttttttgaaaaactacttgatttttatatagttag

SEQ ID NO: 2813 - DNA, 1533 bp, unidentified
  source 1..1533: mol_type = unassigned DNA; note = element_3fe0d8e
  misc_feature 1..2: note = core
  misc_feature 3..247: note = LE
  misc_feature 248..1426: note = CDS
  misc_feature 1427..1533: note = RE
  misc_feature 3..227: note = bridgeRNA
cttgtataatggagtcatagtaaaaattaattatatttttataagtttttttctatacttaagataagacgctgtggattagtttatgttgcacctatagctagactattggtttgaggatataaccacagctttatgcttacttgttaattagttagataacgcatgacgttttatatagagcaaggatacattcagcataaagcacgtggaacatagcgttctaatttgaaaaggagctgatattatgatttatgttggcattgatgtagccaaagataagcatgattgctgtatagttgattcaaatggaactattcttaaagattctttacgaataccaaatactcgtcaaggttttgaaatactctacacttcaattctttcttttctacctaataaaactatatctaatgtaaaaataggacttgaatcaacaggtcattatagcgctaatatccaaaactatttgtatgctaaaggcttccacctatctgttctaaatcctttagctacaagtcttttccgtaaggctcaaacccttaggaaaactaagaccgataaaacagatgctctagttattgctaaaatgcttttttctgatgatacaaaatcctattcacctgtatcatatcagattcaagaattaaagtcattaaccagacatcattatagattagttggttatagatctaagcttaaagtatctgtaactagacttctagatataattttcccagaactcgcaacttatgtttggtcaattcatcaaccatctgtttacgctctcctatcggaatttccgaacccgaaggaaatctctaattgtcatttaactaagctaaccaatcttttgtataaagcaactaaaggtagatatggcagagagaaagctgatgaaataagaaaggctgctagtagttccattggaactagcactaagtctttatctcttgaacttcaacaaaccattagattaattaaatctgttcaaaacgaaatagtgattttagatgaacaaataaaagaattaatgatagaaatagattcaccaataatgagtattccaggcatttcttataacttagcctcgataattctttcagaaattggagatgtacatagatttacgaatccagcaaagcttttagcttttgcaggacttgatccgtcaacataccaatctggaaaatataatgcgacatatacacctatggtgaaacgtggctccgcctacttacgctgggctatactcatggcatctcgaacagtttcgatgcaagacctaaccttttcaaactatcttgctaagaaacaaggagaaggtaaacactattatattgctatgagccatgtagcaaaaaagcttatacgtgttattttctaccttttaacaactaatactacttttattcctcaaatatagtcattcaattttaacagcaacattgttgctttattagtcatgcacttttttataatatttgtgtttaaaacttttttgaaaatttatattgactccatatagttagt

SEQ ID NO: 2814 - DNA, 1313 bp, unidentified
  source 1..1313: mol_type = unassigned DNA; note = element_3fea323
  misc_feature 1..2: note = core
  misc_feature 3..61: note = LE
  misc_feature 62..1066: note = CDS
  misc_feature 1067..1313: note = RE
  misc_feature 1097..1300: note = bridgeRNA
ttatgggatggacgcctcccgcttcccggcgacgatgcgctcgccaaccaaggagggaagcatgacgttagatttattggcgatcgatctcggcaagcgatcgttccacctttatggcatcgatgccgacggggtgatcctgtcgaggaaggtcagccgggcgaagctggccgaggtggtcggcgacctggcaccgacggcaatcgcgatggaggcatgcgccagcgcgcattattggggacgatgctggctcgctgccggccgcgtggtgcgtctcatcaatccgcgtttcgtcaagcccttcgtcaagggctcgaagaacgatgcgatcgatgcagaggcgatcttcgaggcggcgatgcgtccaacgatgcgtttcgtgccggtgaagtcgagggaccagcaggacctgcaatcgctccaccgcgctcgtgaccgcctgatctgccaacggacggctttgatcaaccacacgcgcggccttcttgccgaatacgggatcgtgttgccgcaagggccgtggcgcttcacggcgcaggcgccggccgccgtcgccgatgccgatttgtctgacctggcgcgcgcgatcttcggcgaactgctcgaccagctgggtgatctcgatcgtcggatcaagaagctcgacgcgacgatggtcaccctctgtcgcacgaatgcgacttgtcggcggctcgcgaagctgcccggcgtcggcccggtcatcgccacggcgatcgtcgccgccgtcaacaatggccggcagtttcgttcgggccgcgagatggcagcgtggatcgggctggtgcctcgacagtatacgacgggcggcaagccacggctcggcggcatcgggcgacgcgccaaccactacctcaggcgccagctgatccacggtgcacgcgccgtcgtcagccggccacccaagcctgacgatcgccgatcggcgtggctgaacgcccttgtcgcccggcgcggcttcaatcggacgatcgtcgcgctcgccaacaaaacggcgcgcatcacatgggcgctgctgaaccgaacggaagaatacgcggtcgcctgaggcgtagaactcccgcaccaggaccgcgaccgaatgcgaggtgaatactgatggcgcgtcggcacggaccgcagcctcaaaacctgatgtacgacaaggccgcagcggccgatcatgttatgaggtcagaggcagcggactcccatcaaggccaggagcgtgatcgctccagcaacaggccggatagattcgtgcatcccgtaccgccgctccacggaatcaccttgcggcgggaggcgtccataga

SEQ ID NO: 2815 - DNA, 1621 bp, unidentified
  source 1..1621: mol_type = unassigned DNA; note = element_3ff0b81
  misc_feature 1..2: note = core
  misc_feature 3..130: note = LE
  misc_feature 131..1225: note = CDS
  misc_feature 1226..1621: note = RE
  misc_feature 1277..1507: note = bridgeRNA
agacaatatggaatgaccggctctccatcgtaacgttgtagtgctcgcagcactcaacacggtggtcagagccaccaagatcgcgggttagcgccatatggcgccagagccgcatcgaagggagccggtcatggagaacgttaccacgtacgtcgggattgacgcgcacaagaaagatctctttatcgcgatgctgatcgggactcaagagaagccggtgacgtggacggttcccaacgagacacaggcggtgcgccgcctggttcgcaaactcgagcgctcggcgccgggacccgtccgatgctattacgaagcggggccgtgcggctatacattgcagcgagagatggcgacggagcgcgtgagttgccaggttgtggcgccggcgctgattccgcggaagccgggcgagaagatcaagacgaatcggcgggacgcgcacaaaatagcggaactcgcgcgggcggagctgctgaccgaggtgcggccgccgaccccggcggaagaagcggtccgtgatttgggccgggcgcgcgacgacgcgcgcgaagatctgcagcgctgccgccatcgcttggggaaattgctgctgcggcgcgggctgcactatcccgggcggaactggacgcaggcgcatcgccactggatcaatgggatcgaatgggggcacgcgtcgacgggcgtggtcgttaacgattacctgctggcgatcgatcagctggaggcgcgcctcaccgagttggatgcggcgctgacgacgatcgcagagaaggggccctacgccgaacccgttggctggttgcgctgttttcggggtatcgacaccttgacggcgatcttgctcttggcggagctgcatgatttccagcgctttcacgacccgcgggcgttgatggcgtatgtggggctggtgccgggcgaaaattcgagtggcgagaagcaccggcgcggtcgcatcacccgcaccgggaatgcgctggttcggcgactgctggtggaaaccgcgtggcactaccagcatcgggcagggatcgggccagcgctcgcgcgccgccgcacagggcaaccgagccgcgtgatcgcgattgcggacagggcacagcagcgattgtgtcgccggttccgacgcttgatggaacaacacaagccggcgccgaagacggcggtggccgtcgcgcgcgagttggcgggctttctgtgggcggcgctccaaccggcgcagtgaagggatgatggtcgagaacaattcacttgaacgaaaggggatgacgcgggtccgtgacggaccgcgaagacggcggatgatcagaggcacgattgcgaggatcggcgacctagacatgcgatacggacgtttgtcccaactcgcgactctagactgcacgtcctcccgacgaagcactgtcatgtgtgctctgccgcgggcaaccggggtaaccaccgaatatcagcgtgactcgtcgtcgaagcgccctcgattgtccgtcgtcttcgcggtccgcgcactgcgccatgcgtcgcggatatcagagaatgctcttatgccagcaagctgacacttgctggccgaggccaagccagtttcgaaaagaacgggcttgacaagaggtcattccatatc

SEQ ID NO: 2816 - DNA, 1226 bp, unidentified
  source 1..1226: mol_type = unassigned DNA; note = element_3ff0c40
  misc_feature 1..2: note = core
  misc_feature 3..104: note = LE
  misc_feature 105..1187: note = CDS
  misc_feature 1188..1226: note = RE
ttctttattttgatttattaatttaatagaagaaaagaggagaactaaaacggtcttcaagttaacgacttattacacgtactagtcctctttcttcttaactgttgcatagaaccaattggaatactaggttaccagaacccgttaaaggaaatagtttatgcgacataattttaatagctaaatataaaagtatgaaaaattatgaagaagtagtaggtatcgatgtatcaaaaaaaacaatagatgcaagttgccacttatcaatgaaacaccgtgttttcactaatgatgttaaggggtttcaatctatgttaaattgggtaacaaagcaaaccaaaggcgtttctgttttttactgttttgagaatacaggaaattattctttaaaactcgcaagttacctaagttataaaggaattgcatatgtggaagaaagccctattaaaattaaacgttcatcaggtttagttagagaaaaaacagataagattgattccgagattatagctagatatgcttggatccatcgagaagaattggtttctagtgaattaaaaagtgttgtttatcaagagttaggtagacttataggcttgcgagatcaattagttagaaatagagcaggattgttaggcactttaaaagagatagagcagcttttaagcagtccatctacagatactagctgtattgttttaagaaggagtatagaaaatttaagcaaacaaattaagagcattgaatctagaatggattctctattaaaagaagatgagtcactttcttcaaactacaaattgttactctctataagaggaataggttttgttgttgcgtgtcaattattatatcatactgaaaacttcaaacgcttttctagctggcgaaaattctcaagctattgcggtttagctccatacgaatatagttcaggaacaagtattcatagacgtaaaaaatgtcattatttaggagataggaaaatgaaaagtttactgagtatggcaagtatatcagcaatacaacatgacccagaattaagattatattataaacggaaagtaaaggaaggaaaaccaaaaatgatagcactaaacaatgttaggaacaaattattagcgagagtgttttcagttgtaaaaagaggcactccatatgttgccctaaatcaatatgcagcttaaaatttaatgagaaattactaggatttgatcttggaatac

SEQ ID NO: 2817 - DNA, 1426 bp, unidentified
  source 1..1426: mol_type = unassigned DNA; note = element_3ff1d88
  misc_feature 1..2: note = core
  misc_feature 3..130: note = LE
  misc_feature 131..1222: note = CDS
  misc_feature 1223..1426: note = RE
  misc_feature 1188..1424: note = bridgeRNA
agatgtaatggatgcctccccctacaggaccggcagcggggcgcttcagaagggagtccccgcttgatccggacggcatcaaggtgccaaggtggaaatttatccacgtaaaggacaagggggactcgtcatgcaggttacaacatacggattggatttggcaaaaagggtcatgcaactgcactgggtaaacctggagaccggcgagattcaccgcaaacagttgaagcgccgtgcactcctggagtttttcgccaaccgccaaccgggtatcgtggcgatggaggcttgcggtagcgcccactattggggacgggaattgcgtaagctggggcatgaggtccgcttgattgctgcccagtttgtgcgtcccttcgtgaagaccaacaagaacgatgcggccgatgcggcagcgatctgggaagccgtacagcggcctgatatgcgcttcgtggcggtcaagagtgaggaacagcaatccgtcctgtcgctgcaccgtatgcgggagcaattgatcaagatgcgcactatgcaggtgaaccagatccggggcctgctctacgaatttggtgctgatctaccgcagggccgccagcggggactgaaagaggttcctgatgctttggccgacctggaaaaatccctatcgcccatgctgcgggacacggttcgtcagcaattaaaacgtcttgaagagatggacaaggatattgcggatatcgaaaagcgtttgacgctgtggaagaaaggccaagaggccgtgactcgattgatggctatccccggcgtggggctacttacggcaactgccattatcgccaccgtgggagatatgaagtcctttcgttcaggacgggagtttgcggcgtttctggggctggttccccgccagagtgggaccggtggcaaggtccggttactggggatcagcaaacgggggggatacctatctccgaacattgctgacccatggagccagggcggtggtgaacttccagatcaagaatcggaacccctggatcgacaaactgctcagccgacggccccacaatgtggtcgtagtggcacaggccaacaagatggccagaacgatttgggcactactggtgaaaaatacagaatacgacgcccatcacgctgcggtaaaagccgctgcgtagtactggataacaaaatttttgaacttcaacaaaaggagttgcgcaggctgatgcacgattgatggcaaaacaggtcagaccacgggaaagagagcctggaaacgcaatgtcctgataaggacgcagtggagatgaggactttcccggcggatttcatcagggtcagcaggaataaacctgcattgaagaccggatataaggcagcaaccagacctcaacatgccagaagtcgaaaatcatcttgcgaacatggaggcatccatata

SEQ ID NO: 2818 - DNA, 1398 bp, unidentified
  source 1..1398: mol_type = unassigned DNA; note = element_3ff94d2
  misc_feature 1: note = core
  misc_feature 2..102: note = LE
  misc_feature 103..1143: note = CDS
  misc_feature 1144..1398: note = RE
  misc_feature 1163..1396: note = bridgeRNA
taatgggatggtccgtcccgctcctcaaacggcatcgcaatgtgccaaaatagagctgtccggtgaggacacagactatttgatcaaggagcggaacgaaccatgagaaattctatcgtaacgaatgagatcaaggtagttggcattgatttggcgaaggagtcatttcaactacacggtgtgaatgagcaaggtcatgtgattgtccgcaagaaactcagccgtcgcaaactgatgcttttcatgacacatcttccgccctgtctggttggcatggaggcgtgcggaggagcgcatgactgggcacgaaaattcagaacgatgggtcatgacgtacgtttaatgagccctcagtttgtgaagccctatgtgaagagcaataagaacgatgaagtggatgccgaggcggtttgcgaagcagtgcaacgtccaaacatgcgattcgtaccgattaagagcattgagcagcaggatattcaaagcctgcaccgggcaagaagtctggcggtgtctcatcgtacggctcagctgaatcagatacgcgggtttctgatggaatacgggttggtggcagccaagggcgttgcgaccttgcgaaaagcgttgcctggaatattggaggatgcagataatgcattaagccccatgtttcgagagctgttatccggtcttcaggatgagtttcaccggcttgatgagcgcattgccgcctatgatttgcaaatcaaacagctaagcgcccagagtgatgcatgtcgtcggttgatgacgatccccggagttgggccgatgatctcaactatactggtggctgcggttgcggatgcgaaagcgttcaaaaacggtcgcgaaatgtcggcatggctggggctggttccaagacagcactctacaggtgggaagccgaagttgcttggtatcagcaagcacggcgatgcttatttacgcaccatgctgattcacggcgcacgatcagatttgctggcggcaaagaaaaagcaggacagacgtagccaatgggctgttgctcttgaggctcggcgagggcaaaacattgccgcagtggctttagccaacaagatcgtacgaacggcctgggcattattaagcagaggtggcgaatacaaggtgacggcggcttaaacgaagacgagattatatgatttcaacgaactgcgtggatgaagtgagatgatggcatacaaagtggacagctgcatttccagaaacctgaaaatgtcatgggccattgaaggtcgcaggcttgatgaggtcgggaatgcgcggatttccatcagggtcagaagcgattcagcttcaaacaaaggccggatatatgtacgcaacttcctttgatgcatctaaactttttccttgcagtgcgggacggaccatata

SEQ ID NO: 2819 - DNA, 1353 bp, unidentified
  source 1..1353: mol_type = unassigned DNA; note = element_3ffb6c6
  misc_feature 1..2: note = core
  misc_feature 3..71: note = LE
  misc_feature 72..1100: note = CDS
  misc_feature 1101..1353: note = RE
  misc_feature 1104..1343: note = bridgeRNA
ttatggatggcccgcccctcccgccgacgtctgtgtaggatgtcggtgttcaagagaggaaggagcgaaccatgagcatagtgatcctcggcatcgatctgggcaagaacagctgcaacgtcgtcggactggacgcgggcggcacggtcgttctgcgaaggcggatgcgtcgtgacggggtggtcgcgttcgcggccaagctggcgccgtgcacgatggcgatggaagcgtgctgcggcgcccatcacatgggccggtcgctggccacgctggggcacgaggcccggctgatgtcgccggaatatgtgcggccctacgtcaaggcgcagaaaaacgatgaccgcgacgccgaggcgatcgccgaagcggcgacccggccgaccatgcgcttcgtcgaactcaagagcgaggaacaacttgacgttcagactttgcaccgggtgcgcgatcgcctggtcggtgagcgcacctcattgaccaaccagatcaggagccttcttctggagcgcgggcacgtcgtggcgcagggccacgcgcggctgcgcctcttgctacgcgagcttctggacgccggcgcggacacgctgagcccgcgcatggcgttcctgcttggggacatgcgcgcacgctgggaagagctggaccgccgcatcggcgcctttgacgccgagttcacagccatggcccggaccgacgaccgggcccggcggctgacgggcattcccggcatcggagcgttgaacgctaccgcgctggtggcggcggtcggcagcgcggcgaccttcgacaaggggcgcgacctcgccgcctggttgggtcttgtgccccgccaagccacaaccgggggaaggccaaagcttttggggatcacgaagcggggcagccggtatctgcgcaaaatgctgatccagggcgcgcgatcggccatgcccacgctggccagggcggatactgcggtcggcgcgtggctgcgtgcgctcctcgcgcgcgcccaccccaacgtcgcggtcgtcgcacttgccgcgaagatggcccgcaccgtctgggcgctcctgcgccacgggcggttttacggccccgtgccacgggccatgacctgacaaacacgcgcccggcacgaacaccgccggacgcgacgaactgcgagtggtgaaaggaagatggcctgacagtcgatcggtgtcccgaaaacctccggcgcaaaatggcccctcgaggccggcccctttatgaggatcgggatgcgcggatctccatcttggcagcggcgatcatgccgacatgccggatacgtttgtgcagactgctcacgtcgtcacccaatcgccgcttgcaaccggggcgggccatacg

SEQ ID NO: 2820 - DNA, 1487 bp, unidentified
  source 1..1487: mol_type = unassigned DNA; note = element_3ffebc8
  misc_feature 1..2: note = core
  misc_feature 3..155: note = LE
  misc_feature 156..1205: note = CDS
  misc_feature 1206..1487: note = RE
  misc_feature 1225..1485: note = bridgeRNA
agatggtgtggacgcctcccacccacagacggatgcagtgactgaccgcgaaggccgaggacacggctaaggaatggggtggggcctcgcagtcgacggcatcgagtgccaaagtggtgttgtgtcgaacaacccatgcagacggagaccccgaaatgaatcgtacgacgtatggcttggacattgcagagaacgtgatgcagcttcactgggtggacaccgagacgggcgagatcgggcgcaagaagctcgttcgagccaagctcagcgaattcttcgctcggctgcagccggtgcgcgtggcgatggaggcgtgcggcagcgcgcaccactgggcgcgggtgctgagttctctgggtcaccaggttgagctgctgccggcacgccaggtgcgtccgttcgtgcgcagcaacaaggacgacgcggccgatgcccgggcgatctgggtggccgcgcagcagtcggacattcgacgcgtgccgctcaagagcgtggcccagcaggcgtcgctggcgctgcatcgcagccggcagcactgggtgagcgtgcgcacggccacgatcaacgcgctgcgcggaacgctctacgagttcggcgtgactctggccgggggcaagcatgcgggactgaaggcgttgacgacccatcgagcggagatcgacgcgaagatcccggcgacgattcaacggctcatcgacgggcaactcgccacgctcaaggagatcgggcggcgaatcgacgagctcgaggcggagatcggcgtgcagcaagagcaactggaggaggctgcgaagctgcgcaaagtgccgggaatcgggctgctgggcgccacggcgctggcagccacgctgggcgatggcggcgcctggaagagcgggcgggagttctcggccagcctgggcttggtgccggcgcacagcggcacaggcggcaaggcacgagtggggcacctgagcaagcgcggtgacccttacctgcgcacgctgcttatccacggcgcgcgagctgtgatcgcacgcgccaagcacaagccgaagtggctcgaacaactgctggcacgccggccgatgaacgtggcggtggcggcgctggccaacaagatggcacgcacgacctgggcgctggtggcgcacgggcgggagtaccaacgggagtggaagagcactccgcccaagggctgcaccgcgcaagcggctgcagcgtagatcaaccgaaactgaaggagtggaagccgcaaagagtgcgtgagtcgagtcgatgaagtgatggtgaagcggtcggaccgcgggtcgggtaaagctgaatgcctgtcaggacagcttcgtgcgaagtccaaaccggagatgagcaccgaccccgcgaacgaccatcaaggccagcagcgggcttggcccggactgcatccacaggccggatataagaccgcagtcattaccgccaagtcagaacttcaagaactcgcttgccacacgggaggcgtccatata

SEQ ID NO: 2821 - DNA, 1193 bp, unidentified
  source 1..1193: mol_type = unassigned DNA; note = element_3fffa8a
  misc_feature 1..2: note = core
  misc_feature 3..215: note = LE
  misc_feature 216..1178: note = CDS
  misc_feature 1179..1193: note = RE
  misc_feature 39..199: note = bridgeRNA
tcctttagatttgtatttaaataaaagtgttaaatttaattgagaaaggaagtaaaagtaaactaagacaagctctggctagcatcccattcgctgattcagacttttactgccctttcatcaaattctcaaatagaaattagggttaatgacccattattaaggagttgagttatatgatgaaattctcaatctattaacgttaaaacaaatttatgaaaaaaaatgttagtatagatatcagtagtaaaacacttgatatttgcattagagaaaatggttcaaataccttttacaccatagaaaataaggtaaaaagtattcagtcttttttacgaccattagatttggaggatactgtaatttcgatggaaaatacaggaagatataattggcagttgtatgaagtattagctacatttagttgtccagtatatgttatttcgcctattcatttgaagagaagcttaggtttaatccgtgggaaaaatgataaaattgatgctcaaagaatcggtgcatttttagaaaaaaacatatcagaattaactccatggaagccttcatctaaaaatattagaaagataaaaatattacttacagaaagaagttccagattgaaaatggttaaacaattaagctcatcaaaacatgattataaactaatgaaatctttaggattagaatgtagtttaacaacgttaaatgaagcattagtactggagatccgcaatcaaataaaagatcttgaagaaaaaattgctacagttattaaatcagatacagaacttaagaaacaagataaattagtacagagtgttcctggtgttggaaaaatattaacgtggaattttattgcaaaaaccgaaggatttacaataataaataatccacgtaagtttgcatgttatagtggtgtagtaccttttgaacatcagtctggaacatcaataagaggacgaaataaagtatctcagtatgcagataaaaacatgaaaagtattttacatttaggtgcaatgagtgcaatacagcatgaaaatgatttggctgaatattataaaagaaaagtaaatgaaggaaaaaacaaaatgacagtattaaatgctgttagaaataaaataattcatcgagtctttgcagtaataaaaacacaaaaattatatgtatataattaggttagatcatagaaa

SEQ ID NO: 2822 - DNA, 1312 bp, unidentified
  source 1..1312: mol_type = unassigned DNA; note = element_400627e
  misc_feature 1..2: note = core
  misc_feature 3..263: note = LE
  misc_feature 264..1265: note = CDS
  misc_feature 1266..1312: note = RE
  misc_feature 44..211: note = bridgeRNA
cttgtatattaaacgcatctcttaaacacaggattatttaagacaaaacgattatagtaaaactgattttctggggaagccggcccaaccttaagctttgagcttgttcgtagattggctccccaccctcgtcatccatgccgtggagtatctgagacctgtaagccatgcttctgagtctgcattcacaaggacggtaggtgaagtgtcagggttgggaaaccagtaattattatagcaaaactaatataaatgagatgaaaatgaagactgttggaattgatgtaggctgtaaagaattggtgattattattcgcgttaatgggaagtcaggtaagcctaaagcttttgagaatacaccttcaggccatcagtcaattattaaatatttaacaaaaaacaaaggtgaaacaagagtttgcattgaagcaacaggcgtctatcattttgatttagccgtggctttaagtcgagttgagagtattgaggttatggttattaaccctaaggctgctcacaactttgctaaagcattaatgacacgcagtaaaaccgatgcgattgatgcagaaaacttggccatttatgctgaaagaatgccttttgaagcttgggaacgacctgcggatgaatgtattagcctaagagcgaccgcacgtcgtatcgcagctctaagcaagcaaaaaactcaagctaaaaatcagcttcatgctttaaaagcaacgctagaaacacctgcattagtcatcgagcaggtggaattgttgattgattttttagaggaacaaatcacaatcttgcgtgatagtgcacttgggtttgttcagcagcatgagaagttaaagcaggcctataccctaatcatagggataaaaggtattgcacaggcttcagcgatacaaatactcagtgaactcatgatcttacctgcaaacatgacggcaaggcaatgggtcgctcatgcaggcttagatccaagggtatttgattcgggcagtagtgtttctaaaaaaccacgcattagcaaagtggggaataaatatattcgccaggctttatatatgccggcactggttgcgagtcgctttgagccgaatattaaaggctattatcaccatctgattgatgataatggtttgaaaaaagtacaagcaatctgtgctgtgatgcgtaaattgttacacgccatccatggcatgttacggactaataaagaatttgatggctcgcgtttttatacgcaatccatcagtacaaattcataaaaaatatgaatatttgtacatttaggacttgtattttaagagagtat

SEQ ID NO: 2823 - DNA, 1490 bp, unidentified
  source 1..1490: mol_type = unassigned DNA; note = element_400e921
  misc_feature 1..2: note = core
  misc_feature 3..243: note = LE
  misc_feature 244..1470: note = CDS
  misc_feature 1471..1490: note = RE
  misc_feature 14..240: note = bridgeRNA
ctaatcagttctgggagtgagccatccggcacactcctggtggtagccggccggcaggtgagcactctggtgtcctggacttcgagtcctgacgaaagacagtgcccctgcgggtaggtcgggagaagtgatcgctgctgggatgtcgtgccgatccgtgtggtgtgagcactgcgtgattaggtcgctgatggttctcccgctggctgcgcacggtgatcgatttcgaatgcgggaggatcgttgcggctgctcgtgggagatgactgggccgaggaccatcacgacatcgagttgatggacgcctcgggtcgccggctggcgaaagcccggcttccggagggtgtggccgggatggctcggctgcacatgatgatcggccatcagctcggcgagaccgacgacgaggacgcggaggtggtgatcgggatcgagaccgaccgtgggccgtgggtggctgcgttggtcgcggccggctatacggtcatggcggtcaatcctttgcaggcagcggagttccggcgtcggctgggggtctcgggggccaaaagcgacgccggtgacgcccacgtgctggccgacatggtccgcacccattcccacgagctgcgcccggtcgcgggggacagcgcgcgggccgaggcggtcaaggtggtggcccgcacccacaagacgctgatctgggaacgcacccgccacacccagcggctgcggcacgcgctgcgggactactttcccgccgcgctggaggcgttcgagggcctcgacgccgccgaggccctggagttgctggcgaaagctccgacctcggcgcaggccgcccgcttgacgatcacgcagatcagcgccgcgctcaagcgcgctcgccgtcgtaacgtcgccgagaaggcggcggcgatccaggcggcgctgcgcaccgagcacctgggccagcccgagatcgtggctgccgcctacgccgcctccatccagtccctgatcgcggtcatcagcgtgctcaccgatcaggtcaagaccctgcaagggcaggtggaggcccattttgggcagcacccggccgctgagatcatcgcctcccagcccggtatgggagcggtgctcggtgcccgggtgctcgcagagttcggggacgacccacaccgctacaccaccgccaaggcccgcaagaactacgccggcaccagcccgatcaccaaggcatccggcaagagaaaggtggccctggcccggttcattcacaacgaccggctcatcgacgcattgatgacccaggcgttcgccgcactgaaagcctcgcccggtgcccgggcctactacgaccgccaacgcgcccgcggtgtcggccacaacccggcgctgcgtcagctggccaaccgactggtgggcatcctgcacggctgcctgaagagcgccaccctctacgacgagacgaccgcctggtcgcatcacgtcgagaacgttgccgcttgacatttcagctcctgggatgt

SEQ ID NO: 2824 - DNA, 1381 bp, unidentified
  source 1..1381: mol_type = unassigned DNA; note = element_4016684
  misc_feature 1..3: note = core
  misc_feature 4..88: note = LE
  misc_feature 89..1111: note = CDS
  misc_feature 1112..1381: note = RE
  misc_feature 1119..1368: note = bridgeRNA
tgatggtgtggacggctccacccgaacggcatcgcaatgtgccatgctggtgctgttaagaaccaacagagagagggagccacccacaatggatattacaacactcggaatcgatctggccaagtctgttttccaactgcacggagtggatgcggatggcactgttgttttgcaaaagaagctgcggcgcaacgccgtgctcgattttctcggcaagctcgaaccttgccttatcgggatggaagcctgcgcaacctcgcatttctgggcgcgggaggttgcggcgctcggacatgacgtgcgcttgatcccgcctgcctatgtgaaaccgtatgtgaagcggcagaagaacgatgcggccgatgccgaagcaatctgcgaggcagtgacacggcccaacatgcgctttgtgccggtgaagactgcggaacaacaggctgtcttggtcctgcaccggtcgcgggatttgctcatacgacagaaaaccatgatcctgaatgccatccgcgcccatctcgcggagtttggcattgtcacggctcaagggccccgcaaaatcgtcgagatcatcgggcgtctggaggatccggataacatcgaactgccgagttttgcccgctccgcactgctgtcgcttgcggcccagctcaggagcctcacagaagagatcgtgcggatcgaacggcagctgatggcctggcaccggcagagccaagcgagccagcgtctcgagacgatcccgggtgtcggtctcatcacagcaacggcgctcgcggccagcgttcccgatccgagtgtcttcaagtccggtcgccagtttgcggcctggctcgggctggtgccacgacaaaactcatcgggtggcaaggagcgattgggacgcgtgtccaagatgggaaatgggtaccttcgccgattgttggtcgttggcgccacatccgtcacacgacgtgcggcggagactgacacccggaccggggcttgggtcagatccctgctggaacgcaaacctacccggctcgtgaccgtggccatcgccaacaagaccgtccgtacagcatgggcgttgcttgcaaaaggcgagagttacaaggccgcactgaccatctaaccgaaagagcaatacacgcggcgcctcaaggtgccataaagagatgcaagggcaaagatgagtgatgatgatcgaaagggaccgctgccggaacaccccgtggcattgtctgggcgttacagctcggtaatctgattgggactcggcacgcggacttcatcagggccagcggtcacatgtgccgcgtcaacaggtcggacacatgaccgcaccccgcaacgatcgccatcagatcaaattaacccttgcgaaaacggagccgtccacaca

SEQ ID NO: 2825 - DNA, 1664 bp, unidentified
  source 1..1664: mol_type = unassigned DNA; note = element_4016d40
  misc_feature 1..2: note = core
  misc_feature 3..291: note = LE
  misc_feature 292..1569: note = CDS
  misc_feature 1570..1664: note = RE
aatctccattccgcgcgccttcgggtgcggcacaaatagtgatgaaagattttcaaactctctactccatgagataatggcttcaagaagctacactacaaagcacgggaggaggagttgtaaaatctttctcgttttaaacagcattttaatcagtgtaagttctgcctattcaagcacaaataagtggctcttcgagaccgtacactaagaattgttttaacgccttggttaaattgtgtggcagttcagtcaatggcttcttatcatatttacgaaaggagtatgaccatgaaagttacttacctaacctgttgtggtgtcgatgtccataaatcatttctcgttgccacaatcgtcaagactaccggcggtatcgaaccttcttatcagaagaaacgtttttccacctttaacaattcaattcttatgttcaagcaatggcttatcgaaaacgactgccatgatgtctgcatggaatccaccggcaaatactgggttcctgtatttaatctgttagaagatgaaatcaatgttaccatcgctaatcctaaatgggtaaaagctgtaaaaggcaacaaagatgacaccaaagattctaagtggattggagatttattccgtctcggacttgtgaagggcagttacattccctgtaaaaagatccgtattttacgggaatatacaaggtaccgctataagctggtttcctgccgttccagtgaaaagaatagatatcagaacgcgcttactgtctgtaatgtcgctttagattctgttgtttccgatatctttgggaagtcatccacatccattattgactatctgcttgaacagacggacaattctattaatcatgaagaaatcgcttctaagcttctcagatctctcaaatccaaagaagacgccgtgattgaatccatagacggatatcagatgactgattcccaaaaatatcgtatgcgcctcgtccgcgcgcatatggattatatcacagctgagatcaatgatgtagactctatgatagaatctatgatttcttctgaccctgattatgaaaacgctatccggtttctaatgactattccgggtgttaaacgtgatagcgcgatcgccatcatctccgaaataggtattgatatgtcccagttctgttcttcaaagcgcttatgctgttgggctggattagtccctggcagtaatgaatctggtggcaagaagaaatctgtccggatcacacgtgctggtgtttacctcaaacccgcgttagtacagtgcgctcacgcggccgttagatccgaaaagtctccttaccacaaaaagaaatatgaatctcttatgaaacgccgtggtaagaaaagagccattgtcgctatcgctcgtatgattctgaccgcggtctaccagatgttatcaactggtgaagaatggaatccaagtgatttatacaaaatcgatatgcccgaaacccttgtagaaaagcaaaaggcaaaggctattaagcaagcaatgaagttattagaacgtgaaggactgtatcctccgccagaagaacctctggcctcctaactgttcattaacaatccgctttttcctaaagttgtcattttgacagcttgtttaaatgcgctattttttggccgacctctactttctttcacact

SEQ ID NO: 2826 - DNA, 1633 bp, unidentified
  source 1..1633: mol_type = unassigned DNA; note = element_401d5ae
  misc_feature 1..2: note = core
  misc_feature 3..297: note = LE
  misc_feature 298..1482: note = CDS
  misc_feature 1483..1633: note = RE
  misc_feature 64..273: note = bridgeRNA
ctggtatattgtaaaagactcatctagcggtcactacaatataccttttcctttctatcaacctcttataaccgtgggttgaaaacgataaggttcgtttgtagaatattgaaatatgtgaatgtggatttgtatttctccttgtggctttgactacttcagaaaggttcttaccacgccttattccaaaacaatgattagttagatgagtctttgaattcgtatcgcgcaccatgatttgtggtttaagtgctgtggttcatctcttcacatgttttttagaaaggacgtgtttttatgattcttgttggaatcgatattggtaagctttctcatatgttctgtgtcatggattcttctaccggagaatttctcgtaaatcctatttcgttcaaaaacaataaacagggatttgattctttcatggacagtatcaactcattctctaaaaaggatgttctgatcggtatggaagataccggtcattatcatttcaatttgttgaaattcttgctggattctggttatgccgttgccctgatcaatccgattaccacagatatgacccgtaagatgcagcttggtgccaccaaagatgatgatctagatgcacggttgatctgcgatgtcctggcctccaatcaacgccggaaaggctacaggatctctaagatcgacagctttgatctttatgagcagaaacgtcttacccgcgagcatcacgacctcaaggaacagctgaacgtatataccaataaacttcaagagtgcattgatatcgtatttcctgagttcaattccttgtttagatcaaaatacgagtccgtttatatgaacgtcctcaagacttttggcagcgctgattccatcgctcatgctgatatacgcaatatccgtaaatgctttgaagcaaacaggaaagggcgccgcatctccctgaccccggaagagttgaaagaagctgccagaaattcgatcggttttccttccaaagcagaagtgatcgaattacgtcatctgatcgatatcatcgagctgatcaatgtacagatttctgaagtagataaaaaaatagaagagttctccgtgcaaaacaactctcctattctcaccataccaggaatctcacatttctctggtacttccattttagcggaactaggagatttacgcaactactcaaaggcatctcaggtcataaaatttgcaggcgtttcaccttccaagtataaatcgagccagtatgaagcacagcacactgccatcaccaagaaaggatcgcgctatcttcgtaagacgctctatcaggtcatcctgcctgtgatcagatacaatcctgtgttcaacgcattctaccgtcacaaactatcgcagggcaaaggacaccgatgtgcccaaggacactgtgtacgaaagttgctaaggatcatctatcatctggtcactacagatcagtcatttgatccaaagcttttaagataagcctgcacatcagatccaatcaaaaatttagagccttgaccaaggttgttttcgtcatgcctttttattcacattttcaaagatccatacaaaaccagctatcaaaaatcagttagtctacatttgatttacttgatttttatatagttag

SEQ ID NO: 2827 - DNA, 1621 bp, unidentified
  source 1..1621: mol_type = unassigned DNA; note = element_401f253
  misc_feature 1..2: note = core
  misc_feature 3..248: note = LE
  misc_feature 249..1484: note = CDS
  misc_feature 1485..1621: note = RE
  misc_feature 4..220: note = bridgeRNA
gtattataaggtcagccagatatttctggttgaccattttttatatggttttattataactgtagccggggtagaacgtacctgcccatgggaggaggatcccgtcaactaaactgttcaccccctacttgcttaaacatgatttggctggttgggacagcgatctcgtataacaagcgaagctatgaaactgcaaggaggactaggggctgccggcaaatttattattttttggaggagataaacgaatgaatcctgttgttggactggatgtagccaaaggcgaaagccaggtacaggctttcttggataagaaaaaaccttataaaacaagctttaaagtacctcatactctagaaggcctggggacgttaagtgagtttcttaaagagatagaagatcttattgggataagaccacccatcgttttagagtctacaggccattaccatacgccagttgtccagtattttgaggaaagaggctacctgcttattattgttaacccactcgtttcttatcgggcaaaaagctcttccttgcggaaggtaaaaacagacatcattgatgccaggcatttgtgtgaactctattacaaagaggagctggagccttataaaaagcgtggaattcagcttttgaacctccgcaaccttacgaggcagcaccaaagtatgacggccatgtatgtacaaacaaagcttcaatttcaagctgtacttgatcagatattccctgaatacgaagatgtttttggtgacttgtattcggctgtctccctattaaccttattagaattccctacatccaaagaggtattgggagttgaagaagacaccctggctaacaggattgatgagctttgtaaaagccgttcaagcaagtgggcacgcactcaggcaaagaagcttatcgaggcagcctccagaaatccgttcaaggaaatatggtatcaaagccatatcacaagtcttgaactgtatataaagatgcttctggagtaccaaaggcacctatcgaagttggaagcagagatagatgccttggcaaaagaaatggaagaatatcaaatcatccaatctatcccgggtatcggagaaaagatcgcggcaacgatcatttctgaaatcggagagattgaacggtttagccaccctaaaaaacttgtggcctttgccggtttagatcccagcatctttgaatctggaagattcaaaggaacagtcaacaggataactaaaagaggatcaagcaggcttaggcacgcgttatatatggctgtcaggtgtgcaattcgtgattcccgtaaaaagaaaacaacacctgaaattatcccacgcaataagaagctgcgggagttttatgataagaaacgtggtgaaggcaagccatacaaggtagccatcatcgcttgtgccaataagttgatacactggatttttgcactcttaaaaagcaattcaattttccaagatatagcctaaaatgaaaagctagctaaataaatcaaaaccttccaaaattgtcctggtggagggctatttggcatgcgtacttttaggataccacacaacaaaaaatcaattaaatgaaaaatgttgacaaactattagctggttta

SEQ ID NO: 2828 - DNA, 1564 bp, unidentified
  source 1..1564: mol_type = unassigned DNA; note = element_4023a7e
  misc_feature 1..2: note = core
  misc_feature 3..127: note = LE
  misc_feature 128..1150: note = CDS
  misc_feature 1151..1564: note = RE
  misc_feature 1339..1527: note = bridgeRNA
agatggggtaacgggccggaccccagccatcgcgcaagctgatggtaagtggtcgtccctcagaatgatggtgtcgaaacaacggagtctggccgcggccagctccaagcatcatcaaggaacgaccatgaattactatgcgggaatcgatgtgtctttggaagagtcatgcgtttgcgccatcgatgcgaccggcaagattgtgcgggaagcaaaggtcgcgagcgagcctgaggctctgatcgcctggttccgttcgctcggggtggaattgacgaggatcgggttggaggccggaccgctgtcgcaatggctctatgcggggatgcagcaggcaggactcgcggtggagcttttgcagacgcggcacgcgcgcaatgcgttcaagatcatgccggtgaagaccgaccgtaaggacgcccgcggcatcgccgaactgattcgtctgggctggttccggccagtacattgcaagtcgatggaggcccaggagacccgcgccatgctgaccgcgcgcaagctcgtgcagaaggagcttctggaaaccgaatcgagcctgcgcggcattctgcgcggtttcggcctgaaggtcggcaagacaacaccgattcatttcgaggggcggatcaaggagcttgtcgccggccatccgagcctggagatcgttgcatctgcgctgctgtcggtgcgcgcgacgctgcggcgtgagttggacggcttcgagaagcggctgcgggcgatggcccgtaccgacacgcggacacggctgctgatgacaacgccaggcgtcggcgtcatcgtggcgctgacctttgcctgcgcgatcgatgatccgtcacggttcaaatcgtcgaaaaccgtaggggcgcattttggcctgacgccaacgagatatcagtccggagaaaccgactacagcggacgaatttcaaagaacggcgacggcttggtgcgtaccgtgctctacgaggccgctcacgtcatcctgaccaggccgctcaaaggctgcactgccctcaagagctgggcgatgcggatcgccaagcgggctgggatgaagaaagccacggtggcgttggcccgcaaactcgccgtcatcatgcatcgcatgctggccgatggcacgccgttcacgacccaaccagcgtagcgccgtgctcgacaccgtcaaggacgagccgcctgcggcggtggcccaaggggccatccttgacggcgcctgcgcgcggcgctccgcttttcgtcgcaggttgggacgaaggaatggccagtcgcggtcgaacaaaggaatgggatcttaaagaaggagcaagatcgacgggctttcgggcggtcaagacaccagcctccccgaagcgaggtcccgacgccgggacgatggataaggtcaggccgcagtccggtccggatggcacagaccacgcgttcggtagattggccgacctgtcctcttcaaaccccatcaggtggcggtttcgcgccaaccccggacagaagcacgaccccggcaaaaggaaccctcgctaaaccgaatgaggattgacaaaccaaggcccgttacaga

SEQ ID NO: 2829 - DNA, 1377 bp, unidentified
  source 1..1377: mol_type = unassigned DNA; note = element_402df8c
  misc_feature 1: note = core
  misc_feature 2..228: note = LE
  misc_feature 229..1362: note = CDS
  misc_feature 1363..1377: note = RE
  misc_feature 7..232: note = bridgeRNA
cagtgacaatggtgtgtgtggggccagcgcaccgccggtctgacccatcgcctgactgacttcgtgtcctgaaccggatatgtcggccggtaggacgctggccccacgtgcacctgtccgcgatcgacgtgacctcataggagcctgcgctatcaggcgcccatcactgtcttgtccatcggttgttggcgcgtgctgccacccgttagaaccaacgagaggacagcaatgaccatcgtcgcagacccacccgcccgagtcgacaccatcgaggtcaccctcgggatcgacacccatgccgacacccatgtcgccgggttgatcgacccgctgggccgccacctcggacacgccaccttcgacaccaccgtcgccgggttcaaagcgctcctggcgtgggccacgagcttcggaacgatcaccctcgccggtgtggaaggcaccggcgcctacggggccggcctcgcacggttcctcaccgccgaggcggtcacggtcgtcgaggtggaccgtccagaccgcaaaacccgacacaccgagggcaagtccgacccgatcgacgcgtacgcggccgccagggccgccgcgtcaggccgggcgtcgggcaccccgaaaacccgcaccggtgacgtcgaatcggtccgagccttgcgggtggcccgcaacggtgccgtcaaagcccgggccgtggcgttgacccagctcaaagcgctgatcgtgaccgcccccgatgtgcttcgcgcccagctggacggcctcgacggtccaaagctcgtcaccacgtgtgcacgtctgcgacccgctcgaggccccgcaccgacaccgtcaccgttcgcgaaacggcccccacgaccaggtcgactcgtcgacccgggcgccgcaacaaagcggtcgttggcgtccatcgccggtcgggtccagaccctcagcgtcgagatcgccgaactcgacaacgacctcgacgcgctcgttaccccgctcgccccaaccctgctcgccctccaagggatcggccttgacgtcgccggacaactcctcgtcaccgccggtgacaaccccgaccggatccacagcgaagccgcgttcgctcacctctgcggcgtcgccccgatccccgcatcatcaggcaaaaccaccaaccgtcaccgcctcaaccgcggcggcgaccgggcagccaacgccgccctctaccggatagtcatatgccggctccgctgggacccccgcacccgcgcctacgtcgaccggcgcacccaagaaggccgatccaagaaagagatcatccgctgcctcaagcgctacatcgcccgcgaggtcttcaccgccatccaaaccgacctcaaccccaaaacctccccttgacatccataggagcat

SEQ ID NO: 2830 - DNA, 1651 bp, unidentified
  source 1..1651: mol_type = unassigned DNA; note = element_402fdec
  misc_feature 1: note = core
  misc_feature 2..264: note = LE
  misc_feature 265..1650: note = CDS
  misc_feature 1651: note = RE
  misc_feature 90..244: note = bridgeRNA
agtaaagccaagcctttgtcttgattgaaatcagagtggaacacagaacgtttccgccgcctgtggcggcagaaacgtttttagttacctttgctgtaggcataagaagcaagccgtttttttcttgggttttcaatcccacaaaagagtatggctccttgtcctgcgaatcgaagattggtcgtcagaggccgtatagaagaatgctcatcgacaggacatggcttatgccatttatccatcaacaagagtaacgatattaccatggcaaagaaagcaaaaaaagtcaagaccgccaaaggtgcggaacttcggatagttaatcccgatgcggcggggatagacatcgcggacggtatcatgcaagtttgcgtccctgccgaccgatccaaggacaacaaccgcgcgttcggagcatatacatccgacctgcatgccatctcggcatggctcagggagtgcggcataaagacagtcgcaatggaatccaccggggtttactggataccgctgttctgccgccttcaggaagacggactggatgtcgtattgaccaacgcaagggacgtgaagaacataacggagaggaaaaccgacgagtcggatgccgaatggctgatgttgctgcaccagtacgggttgctcaaggcaagtttccaaccgcacaacgacgccaaacggatgaggacactcacccgtcaccgtgacaccctctcgcgtgaggcctcaagcatagtcctgcgtatgcagaaagccatgcagcagatgaacataaaacttacgcttgtcctgtctgacattacgggaaaatccggcatacgtatcatcgaggccattcttgcaggtgaacgtgaccccaagagacttgcggacctggctgacatccagtgcaagactccgaaagaggaaatagccaaggcacttgagggcaactgggaagaagacctcatgtttgtcctcaggcaaaactatgatactttcaaacattattgtacccaacttggcgagtgcgatgcagaactggagaaactcatggaaaactaccgtgcggaggttgccaaagtggaagatacttcatatagcccggcaaaaaaacgccgcgattataaaaagaccaggcataccgtgggcttcgacgtggaaaggaaagcatacgaaatgtggggagtgaacgtttttgagataccgggcataagccacctgaccgcacttgaactgatgagtgaactggggcacgactttacccggaagttcccgtcttccaaacagttctgctgttggtgcaacatctcaccgaacaccaagatatcaggaggaaaaagaatatcaagccacgtgccacaccgtcggaacaatgtcgggttgatttttagaagtatcgcttcttcgctcgccaatgcgaagaaccaattggggaacttctaccgcagaatacgttcacgggccggaggtaaagccgcagtcattgccactgcccacaaggtagccgagatattctttgccatggttgcaaaccaaacaacttataatccggaaagagtaggtatagacgagaaagtattactcgaaaaacggattacaagatacaaacatgaattagaacgaattacagggacacatatagaaattggcaatgcatgtgttccataga

SEQ ID NO: 2831 - DNA, 1280 bp, unidentified
  source 1..1280: mol_type = unassigned DNA; note = element_403e64d
  misc_feature 1: note = core
  misc_feature 2..189: note = LE
  misc_feature 190..1158: note = CDS
  misc_feature 1159..1280: note = RE
  misc_feature 31..199: note = bridgeRNA
ttgtatgacgggaaaggagcattgtgaggggagacgggggctgggtcatgaccgaacccccgtcgcggccggaagcccgcaggcgtttcggaccctaatccgcgagtgagcttggagctccggtcgcttcttccatacccgaacagttgcccgggcacgagcccgcatcagcaagaaagggatacgaagatggcaatgctctctttcggaggtatcgatgtgtcgaaggatcggctggacgtcgtagtcttgcccgaggaggaatgctcttcggtgccgaacgatgccgccggttgggctgaactggtcgagcggctgcgcggcttctcgatcacggcaatcggcatcgagccgagcggtggttacgagcgcggtgccatgcgggccctgctcgcggccggcatgcccgtgcgccaggtcaacccgttcaagcttcggcagttcgccagggcgagcggggttctggccaagaatgatccgctcgatgcccgcatgatcgcctcgttcgtcacgatcatgccgacgcgtccagcgcagcggcagacaccggccgccgagcggctggccgagatgctcgccactcgccgccagctcagcgccgagaaagtcgccgccgagaatgcgtccagactgctggaagatgcgatgttgcagcgcctttctcgccgccgcattgtgcgcctcgcagccgacatcgacctgctcgacaagcgcatggtcgagatcgttgccaccgatgatgcactcgtccaccgctatcgcctgctcacgtcgatgccaggagtcggcgcagtactggcctgcacgttgattgcgctgttgcccgagctcggccgcatgagccgcaagcaggtcgctgcgctggtcggcgtcgctccctacgccttcgagagcggcacgctcaagggacggcgctgcatctggggcgggcgggcgcacatccgccaggtgctttacatggcggcgatgagcgccagcaattggaatcctgtgctcaaggcgttccacgaccgtctcacggccgccggcaagttgccgaaggtcgtgatcgtggcggtgatgcgtaagatgatcaccatgctcaacgcaatggttcgcgacaacgttgtttgggccgaccgtcttagcggtcggcgcgttctgccgaccgcacggtagccgctgcgctgatcgacttggccgagtcaaggccgtagccgcgcgtagcgcgggggcgcgaagcgccagccttgacgtggccaaatcgatcagcgatctcgctgcgacaagatgacagttgc

SEQ ID NO: 2832 - DNA, 1154 bp, unidentified
  source 1..1154: mol_type = unassigned DNA; note = element_4040ce5
  misc_feature 1..2: note = core
  misc_feature 3..193: note = LE
  misc_feature 194..1138: note = CDS
  misc_feature 1139..1154: note = RE
  misc_feature 44..189: note = bridgeRNA
cttgtatcttgcgccgaaggcggccatgatacagcgcatcatcaacccgggcatgatagaccgtcgggtccgtggtccttcgagaccgagcgacagccaaggtcgtcacgccctcacactgcagagcccgaacagttgcgtgggccgttgagcccgtatcatgcaaggccgggccacacaggaggacggtatgatgagtacgcaggtctttgtcgggattgatgtctccaaagcgcagttggacgtggccttccggccggaggggcggttctccgcccccaacgatgaggccgggtgtgcgcaggtcctcgaacgcctgcgggccgtgccccccacgctggtggtgttggaagccaccggcgggttggagatcccgctcacgggagtgttggccgccgctgggatgccagtcgtcgtggtcaatccgcgacaggtgcgcgactttgccaaggccaccgggcgactcgccaaaaccgatacgttggatgcccggacgctggcgcacttcgccgaggtcatgcgcccggagctgcgccccctgccggatcagcagacccaggcgctggcggccatcctggcacgccgccggcaactcgtcgagatgctgacggcggagaagaaccgcctggggagtgcccccaagccggtgcgcaagagtctgcgcacgcacatcgcctggctcgagcgggaattgagccacacggacagcaacttggcccacgcgattcgggagagtcccgtgtggcgcgagaaggatgcgctcttgcggagcacacccggcgtggggcctgtgatgacgacgacgctgctggcgaatctgccggaactcggcaccttgaccggcaagcagatcgcggcgctggcgggggtggctccgctgaatcgtgatagcgggacgtggcgcgggaagcgcacggtctggggcggccgggcgcagatccgggcgacgctctatatggccgcgctggtggcggcgcgcttcaatccggtcatccgggcgttctatcaacgcttgtgtgccaccgggaaagccaaaaaggtggccctcacggcgtgcatgcggaagctgttgatcatcctgaatgcgatgctcaaacatcggaccccgtggcgcacggaactggttcggtgtgcttgacagcccaagacagttg

SEQ ID NO: 2833 - DNA, 1531 bp, unidentified
  source 1..1531: mol_type = unassigned DNA; note = element_4048e22
  misc_feature 1..2: note = core
  misc_feature 3..241: note = LE
  misc_feature 242..1417: note = CDS
  misc_feature 1418..1531: note = RE
  misc_feature 3..220: note = bridgeRNA
ctcgtattataaagtagtagttattaaagtccctctccaagggctgtgctacactgtaagggatgctgtggattggtttgtttctcctaccaccagatggttctcataaggctccaaccacagccctttaccagtttgttgattagttagataccgccagacggtttatgtagagcgaggttacaagcgtaaagtgttctgtggtacagcagcatcaaatatatttccccggaggttcgttatgatttatgttggtattgatgttgcaaaggataagcatgattgttttatcatgaattccgagggtattatcatcgcggatgggttcaccatttccaataacatggagggcttcaacaccctgctggataggattcgctgctgttcctcgcgccaagataaaataaaagtaggacttgaggctaccggacactacagctacaatatcctcggattccttcttgacaatggtctgccaacctacgtcttgaatcccctgcacaccaacctctaccggaaaagccttagccttagaaagaccaagaccgaccgtgtcgacgcacgttccattgcggctatgctcatgtctgatgtgggcctcaaaccctacacagatacagcttaccacaacgaggaattaaaatcactcaccagataccgtttcgacaaggtgaaggaacgcggtcagctcaaacagtccattgctcgcttggtttgcattctgtttcccgaactggaaaaccttgtttcaacactccatatggcctctgtctatgccttgctggaagagcttcccggagcaaggcaaatttccgaggcgcacctcacacacctcaagacgcttctatccaccgcctccaaaggccattacaagcgggatatggcactgctgatccgcgagaccgctcaatcctccattggctcccataggcccgctaaatcactggagctgaagcataccatccacctcatccgggaattggatacggagattcaagaaattgagacggctatccaagctatcatggacaagctccattctcccatcaccaccattcccggtatcagctaccgcatgggcgctatgatactggctgaggtaggcgatttctcccgctttgattctccggataaggtgcttgcatacgccggtctttcgccctctacctaccaatccggaaaactggcaaattgttatccccacatggagaaacgtggctcccgatacttacggtatgctcttttcaatgccgccaagtatgtctgccattgggatgctgcctttgcagcataccttgccaaaaagcgttcggaaggcaagcattacaatgtcgctgtttcccatgcggccaagaaactcgtacggctcatctttgccctggaaaaatccggcgagccgtaccatttggcggcataatattctgctttgttgataatccgtcttatctgacgcttgctttttgtaccttttttgacccatctggttttttacatcactcccaactttcagacttgacttttaatagttagt

SEQ ID NO: 2834 - DNA, 1363 bp, unidentified
  source 1..1363: mol_type = unassigned DNA; note = element_40605de
  misc_feature 1..2: note = core
  misc_feature 3..76: note = LE
  misc_feature 77..1102: note = CDS
  misc_feature 1103..1363: note = RE
  misc_feature 1078..1351: note = bridgeRNA
cgatggggtggacgccccccgacggcatcgatgtgccaaagtggaggtgttgaacaccactgcaaaggaggcgtccgtgggagaagttatcacaatcgggctcgacttggccaagtcggtctttcaagcgcatggggctgatggagccggcggcgtcgttttccgcaagaagctgcgacgggaccagctgctggcgttcttctcgagccagccgcgctgcctggtggcgatggaggcctgcgccagcgctcactactgggcccgcgagatcggcgctctgggtcatgagatccgcctgatcccgccagcctatgtgaagccgttcgtgaagcggcagaagaacgatatggcggatgcggaagccatctgcgaggcggggcagcgcccgacaatgcggttcgttgcgcccaagagcgccgatgcccagggctcggctgttgtgttccgaacccgtgacctgctggtgcgacagcgaacacagctgatcaatgcgctgcggggccatctggccgagttcggcttcgttgtgagacaaggcgccgggcataccgccaagctgattcaggtggtggaagatcccagcactgatctacccgccgaggcgcgaccggtgctgaccatcatcgtcgagagccttcgggcgcttcaggacaaggtcgcacaactggatgccgagatagccgcgcgagccaagcgcgatcccgtcgccaggcggctgatgacggtgcccggcatcgggcctgtggtggcgacagcgctggtggcgctggcgccggcggcctgcaccttcaggcgcggacgcgactttgcggcctgggtggggcttacgcctcgacagcattccagcggcggcaaggaacgactggggcgaaccaccaagatgggtgagcgcagtctgcgaaggctgctgatcctgggggccagttccgctgcaaaagctgcggcacgcgatggctcccgagccagtccgtggctcacgggcatgctggctcgtaagccgcgcatgctggtcaccgtggccctggccaacaagatggcgaggatcgtctgggcgctgatggcgcacggaggaacctacagagctccggccgtggcggtctaaccgtcagggtctgaggcgtcggagaggcgggaaggtcagacgagaggtatggcgcaacggtcagaagacggggtcgggaaaaccagtgaaatgtccgagcgcctcgagcgcgccaaagcggtctggacctgatccgcgatctccatacaggccagcggcgtgtgaaaggccgcattcaacaggccggacacacggaagcacctgatccgaccgcgtcataatctcgaaaaaacttcttgcatcgaacggggcgtccacaca

SEQ ID NO: 2835 - DNA, 1390 bp, unidentified
  source 1..1390: mol_type = unassigned DNA; note = element_40626b1
  misc_feature 1: note = core
  misc_feature 2..200: note = LE
  misc_feature 201..1127: note = CDS
  misc_feature 1128..1390: note = RE
  misc_feature 1152..1382: note = bridgeRNA
caatgtgatggacgcccccatcctcctaatcggcatcgatgtgccaaagtggagatgtgagtaaccacttcactgaggatgggagcgcccgctatgaatattgcaaccatcggaatcgatctggcaaagaacgtttttcagctgcacggcgtggatggccacggcaagcttgcgcttcgccgcagatccatcgcggccagatgcctgggctgtttgtgaacctaccgccgtgcctgattggcatggaagcttgcgcgagtgcgcactactgggcgcgaacgctgcagagctatgggcacacggtgcgcctcatcgcaccgcacttcgtcaagccctatgtgaagacgcacaagaccgatgcgacggacgccgaagcgatttgcgaagcggtgagtcgccccaacatgcgttttgtgccgatcaagagcatcgagcagcagtcggcactgtcattgcatcgcgtgcggcagggttttgtgcgggcgcgcactgcgcaggcctgtcagatccgcggcttgttggccgagtttggcttggtgataccccggggcatcgcgaatatcaagcaggtgccgaagctgctgcaggtggcaggaaaggagctgccggcaccgttctgtcggctgatcgagcgacttctggcgcacctcaaggagctcgaccgccaggctcgagaactggaagagcagatcgtcgactggcatgagcgcagcgaaccgagccgcaggcttgccaagatccctggtatcggtccgatcacggccagtgccttggtggcctctatctccgacgtgagaagcttcaagaacggccgagagctggccgcctggatgggtcttgtgccgcggcagcactcaagcggcggtaagcccactttgttgggcattagtaaacgcggtgatcgttacctgaggacgctgctggtacacggcgcccgttcggtcatcgtgcgcgtgcttaaacgcgatgatcagaagggcagctggctcaacagactcttggagcggcgacacgtcaatgtcgccacggttgcactggctcacaaaaccgttcgcacggtgtgggcaatgctggcccatgaccgagagtactgcccgaattacagatcgctgcctgtggcggcttgataacgaggagtttgagcgcacaccaccgattgcgcaggcgacttcgtgcgagtgacggcacaacaggttagaccgtggctgatgaaacccgagaatggccgagcaccaaagagtgcgcgaaagcagacggggatcagccagcagaccccatcagggacagcggcctacgcgccgcagcaaaagtccggatgtacggctgcaatcgaaacctgtcggccgtgtcacgcgaagagaagcctggcaaggctgggggcgtccatgta

SEQ ID NO: 2836 - DNA, 1606 bp, unidentified
  source 1..1606: mol_type = unassigned DNA; note = element_4064ca2
  misc_feature 1..3: note = core
  misc_feature 4..275: note = LE
  misc_feature 276..1484: note = CDS
  misc_feature 1485..1606: note = RE
  misc_feature 12..295: note = bridgeRNA
tctattacaataagtttgggtggaagtccggcaaccagccgggcttctttccgtctcgtgcctaagctacaataagaggagcaactggctgacctctcctttcttgggctttcatgtccgaatttaagactgtcagccatcctcttgttgcagcgttcgatttgagcaggttgagcctaccgggataccggggagttcgtgtcacccaatagattgaatcggcagcgagaaaagatgggttccggttgcggattctttgtactggaggaatgtgaatgaactctgttggcatcgatgtctccaagggcaagagcctgattgctgtcatgcgtcccttcggagaagtagtagtctcacctcgcgaggtacggcacaccgacagtgaactgagcgagctggcaaagctgctcaaaagtctggacggtgagacccgtgtggtgatggaatccacgggcaattaccatgcgcctgtggcttggctgctccacgacgcagggctttatgtctccgtggtcaacgcaatgctggtgcatgactacgggaacaacagtttaaggcgggccaagaccgacaggaaagatgctgtaaagctggcgaactacggtctcgaccactggcccacgctgccgagatacgtcccggaggaagatacccggctgatgctgaaaaactgctaccggcaataccagcagtattccaaagttcagaccatgctcaagaacaacctgatctccttgctggatactgctttccctgatgcaaatcgcctgtttgccagcccacctcgcgccgatggcagcgagaaatgggtagactttgtggccgccttctggcacgctgaatgtgtctgtgaactttcagaaaaagcctttactactcgttaccagaagtggtgtaggaaacacggctataatttcagcgaggataaggcattggacatttatgcttccgcctgcggtcattttggtgtcatgccgaaaactgaaacagcacatcttctggtggagcaagcagtgtcccaactccatgcgacctccgccgctttagccgctctcaaacaggaaatgcaaaagctagcttcgactttgccggaataccctgtcgttatgcggatgttcggagtcgggccggcacttggcccgcagctcatggccgaaattggcgatgtgcgccgcttccactccaaaaaagctctggtagccttcgccggcattgacgctccgccttaccagtccggcaccgtgaatgtccgcagttgcagcatctccaagcgcggctcatcctcgttgcgtaggacgctctttttggtgatgggcattatcctccaaaactcgcctgccgatgagccggtctaccagttcatggacaagaaacgctccgagggcaagccctacaaggtctatatgatggcctccgccaacaagttcctgcgtgtctactatgcttccgtgaaaggctatttggattcactggaacgggattaacattactatgaatactgcagggtggccgccattcgatttccagatgcatagcggcttggtttggtgtgccattcttaccgtgttcaaattcttgaaatttctgcttgacttttgttagcagg

SEQ ID NO: 2837 - DNA, 1374 bp, unidentified
  source 1..1374: mol_type = unassigned DNA; note = element_4068d91
  misc_feature 1: note = core
  misc_feature 2..174: note = LE
  misc_feature 175..1098: note = CDS
  misc_feature 1099..1374: note = RE
  misc_feature 1128..1369: note = bridgeRNA
caatggtatggaccccgcccttgccgcggtggaacctcgagcgtcaactgcagtgaaggaggatgtcatgcaggtcgttcggataggtctagatctggcgaagtatgttttcgaagttcacggcgtcgacaaccacgggaaagtcgttgtgcgaagaggttgcgtcgcgatgcggtggccggctttttcgccaatttaccggcctgcctggtcggcatggaggcttccaacggggcacactattgggctcgcgtgctcacggagcttggccatcaggtccgactgatcagccctcagttcgtgacgccatacgtcaagtcgaacaagaacgaccagaacgatgcggaagccatctgcgaagcggtcggccgtccgtccatgcgcttcgtgccaccgaaatcaaccgatcagctggcggtacaggccgtccaccgaattcgccggcgcctggtcgccgaccgggtcaggctcgtcaaccagattcgcggtcttctgtccgagcatgggattgtcattgcccgtgacatcgcgcagctgcggcgcggcctcgctgtcatcgtagggaacatcaatgacggcctcagcgagatgctccggacgctcatgagggaattgcaagaggagttgtccgagcttgataaccgtattgcagcctatgaccggcggataagggaaatcttccgtacaagcgagcagtgccagcggctcggcaaaatcgaaggcatcggacctgtgacagcaacagccttgatcgccgccgtgggcgatagaagctgtttcaagaacggccgccagttcgcggcctggcttggcctggtgccgaagcagcgatccagtggagggcgggcccgcttgttcggcattagcaagcgcggcgatcgatacctgcggacgctgatgattcacggagctcgcgccgctttaagccgggctactggcaagcaggatccgcgaagcctctggctcggcaagctgcggcaacggcgccatcccaatgtcgcggccgtggctcttgccaacaagaatgcgcggatcgtgtgggctatgctcacgggcgacgcagcttatgagccggcgctgtcggtgaaggcggcctgaagcgaggcggcaatcaaggaaaggaggtctcacccggcaattgcaacaaatggcaggagatggcgaaacggtcaccccgtcgcttcccgaacctgatgtgtggaccggcacggcttgcgccgatgtctcggggccgttgaggtggaagcgggcgaaaaccatcgaggctcgcggcggagacgttgtccagccgcatcaagaagccggatatacgtcagcagttgtggccgtcgatcctgatcaagccggtcgttgcaatcgggcggggtccatata

SEQ ID NO: 2838 - DNA, 1480 bp, unidentified
  source 1..1480: mol_type = unassigned DNA; note = element_4068e28
  misc_feature 1: note = core
  misc_feature 2..119: note = LE
  misc_feature 120..1136: note = CDS
  misc_feature 1137..1480: note = RE
  misc_feature 1169..1397: note = bridgeRNA
gaatgaaagggacttccccgtccctggtgaccgcgccccttgcggcttgcggtttacggcaacaaagtgccacgatggagaggttcaactgttcatcaactcacctgagaggggaagtcatggcaatcgtaaccatcgggattgatcttgcaaaaaatgtttttgcggtgcatgggatcaacgaggccggaaagcctgtgttggtcaagcccacggttgcccgtggcaagctgctggagttgatcgcgtcgctgccaccctgcaccattggcatggaagcctgttcaggcgcccatcactgggcacggctgttcatgacccatggccacacggttcgcttgatggcgccaaagttcgtggcgccttaccggctctcgggcaagcaaggcaagaacgacgcagcggacgccgcagccatctgtgaggccgtgcagagaccccacatgcgatttgtgcccatcaagacggtggagcagcaaggccagctctgcatccaccgggtgcgccaggggttcattgaacagcgcactgccacgatcaaccgcatccgcggcctgctatcggaatttggcatcgtactgccgctcaaggccgccaccatccgacgggaggccatggctcacttggaagatttgccagggtgggccaacaccgtcattggagatctgctcagcgaagtgagccatctggatgagcgtgttgagcaatacgaccagcacattgaacagattgccaaggaggacagcagaacccagcagctcatgcgcttgccaggcgtgggacccaccacggccaccgccatactggccatgattggcaatggccacgagttcaagtgtggccgccagttcgccgcctggctgggcttggtacctggccagtacagttctggtggcaaggcacgccttgggcacatcaccaaggcgggggattcctacatgcgctctttgctggtcctgggcgcccgtgcggttctgaattccgccaagaacaaaagtgacagcaccagccggtgggccgttgcccttgctgagcgacgtggctactggcgtgcgatcgtggccattgccgcgaagaacgcccgcatggcctgggcatctctggcccttggggagcgctttgccatgcctgcctgaggccatgcagcgagctgcgccaaacgactgatttctaccgccgcttgacggcttgcagtgatgaagcaaggttggacctgcgcggggtgtgcctgaataaagcacgaaggtggttaaccccatccttgattagcgaacgaggcccccgcgtgcgtctttcatcagggtccgcagcacttgagctgcatcaatgaccgtttgtagtacagccagtccgcaccttgtgttccaagtctctgccagagccgccggtcgcgtccgtgactgccaactgcgttccgtggtgacttgctgcgcaagccgccacggtcaggtgttgcttgacttgtggggaagcccttgta

SEQ ID NO: 2839 - DNA, 1356 bp, unidentified
  source 1..1356: mol_type = unassigned DNA; note = element_406ab74
  misc_feature 1..4: note = core
  misc_feature 5..81: note = LE
  misc_feature 82..1104: note = CDS
  misc_feature 1105..1356: note = RE
  misc_feature 1100..1343: note = bridgeRNA
atgatgggtggacggccccttgcggcatcgaatgtgccaaactgggctgtgactaacccccagcggaggagaccgtccgtcatgcaagttatcagatttggtatcgatttggccaagaatgtgtttcaggtgcacggcgtggatgcgaccgggcgagtggtggtgcagcgtcagctgcgccgtgcgcaggtggcgaagttcttcgccgcgcagccgccggcgctgatcggcatggaggcctgcggctcggcccatcattggggccgcacgctcagagcgcttggccatgaggtcaagctgatgccgccggcttatgtgaagccttatgttccgcgcaacaagaacgatgcccgcgacgcgcacggctgttgcgaggcggtgagccggcccgacatgcgcttcgtgccgatcaagacggtcgaacagcaatgggccagagcgctgcaccgcacgcgtgatcttctggtgcgccagcgcacgcagctggccaacgccatgcgtggcatgctctatgagatgggccagacaagtgcccagggggctgcgggtctcgaagccctgctgcagcgcgtcgaggcggccgatgaggcgatccccgaggcgctgctgatctgcttgacgccgctggccgggcaatggcgggcgctggatggcgagatcggcaagctggacaagcagatcctggctcaggtcaggcagcaaaaagcggccttgcggctgacgacgatcccgagcgtcggcccgatcatcgcgcatgcaaccatcgcagccatcggcgacggccgtcagttcacctcgggcagggacttcgccgcctggctcggcctgacccgcaagagccatgacaccggcggcaagcacaaattgacaggccatatcagccgcgccggcgacagggacctgcgaagactgctcattctcggcgccagttcatggctgcgccaggtcagggccaagcccgacagaggctcgccctggattcgcggcctgctggccaggcggccggtcaaggtcgcggtcgtagctcaggcggccaagaccgcccgcatcatctgggcgatgcttaactcgggacaggaatacagggcgccggtagcggcataggccgctatcgagggccctcaacagcgtaaggagcagaaagcagcacggcaaaatggtcaggacctgggtcgggaaactccgctgtcgtcatcgcgcttccaaagcgcgctagaatgattggaacccgatccgcgtaacccctgcgggccagcggtcatcaaatcgaccgcaatcaaaggccgaatacatgaccgctccagacttatgccgtcgccgctattttgcctcttgcccaagaggggccgtccatac

SEQ ID NO: 2840 - DNA, 1499 bp, unidentified
  source 1..1499: mol_type = unassigned DNA; note = element_406fc5f
  misc_feature 1..2: note = core
  misc_feature 3..243: note = LE
  misc_feature 244..1479: note = CDS
  misc_feature 1480..1499: note = RE
  misc_feature 15..239: note = bridgeRNA
ctaatgagtctcagggagcccgccgtctggcagactccgggcgtggtggccgccggcaggtgagcacttgtgtttcccgggctttgagccctgaagaaagaccgtgcccctgccggtgaccgggagagttgatcgctgccgggatgtcgtgcccgcctgctggcgtgagcacagtttcattaggtcgctgatagttctcccgcgggctgctgccggttttcggcatcttggaagggagagcggatgcggctgttcgcgggcgatgactgggctgaggaccatcacgacgtggaggtgatgaacgaggccgggaaggtcctggcgaagaagcggctgcccgagggcgtggccggcatggccgggctgcacgagatgatcgggcggcacctgggcgaggacgcggatgatgcggaggtggcagtcgggatcgagaccgaccgcggcccgtgggtcgcggcgctggtcgcggccgggtacacggtgttcggggtgaacccgctgcaggcgtcgaggtaccgggagcggcacggcgtgtccggggccaggagcgactccggcgacgcgcacatgctcgcggacatggtccgcaccgactcccgccagctgcgagcggtagcgggcgacagcgcggaggcggagggaatcaaggtgctggcccgcacgcacaagacgctgatctgggagcggacccggcaggtgcagcggctgcggcaccagctgcgggagtatttccccgccgcgctggaggcctttgacgacctggacgcccccggcgccctggagctgctgggcaaggccccggacccggcccgggccgcgaggctgacccgcgcgcaggtcagcgccgccctcaagcacgccggccgccggaacatcacggacaaggcgacggcgatcctggcggcgctgcgcggcgagcagctgggccagcccgcggcggtcacggccgcttatgcggtcaccgtgcggtccctgatcgcggtcaccgccgccctgaacgagcaggtcaggatcctgcaggggcaggtggaggcggattttggccggcacccggacgctgagatctaccggtcccagcccggcatcggcgccatcctcggcgcccgggtgcccggcgagcccggcgacgaccccgaccggtacgccgacggcaagtgcaggcggaactacgccgggaccagcccgctcacccgcgcgtcgggaaagaagaaggtcgtcgcggcccgcttcatccgcaacgaccggctcgtcgacgcgctcaacgcccgggccttcgcgtctctgaacgcctcgccgggcgcacgcgccctctacgacgagctccgcgcccgcgggatcgagcacaacgacgcgctccgccggctggcgaacaggctcgtcggcatcctgcacggatgcctcaagactcacaccctctacgacgaggcaaccgcctggtcccaccggcaaaacctccctcaatcctccgtagcggcttgacacttaagctcctgggatgt

SEQ ID NO: 2841 - DNA, 1584 bp, unidentified
  source 1..1584: mol_type = unassigned DNA; note = element_407555f
  misc_feature 1..3: note = core
  misc_feature 4..296: note = LE
  misc_feature 297..1520: note = CDS
  misc_feature 1521..1584: note = RE
  misc_feature 38..272: note = bridgeRNA
cttgtactatatagttagtttttttagctccaagccaacagacttgatccttgacaaccacataggaatcccggggcaacttggataaatattctcgtagaggcagggggcttcgatcatcctccttgggaagctcagctgtcccgataaaaagagtgaagccccacccatacgagataactcgaatgagcacgttgtggatacagcttgctgtataccacgagtcacgagcaaggttgaggctcatatgggtcgtgggaaccctgcctgaattcactgaaagagagtgatattgtatgatttatggtggcattgatgtggctaagtatcgtcatgaagtatgcctcgttaatgataccggagatgttgtcctgcagatgtatatagataacaaccagagtggaatggataaacttctgcagacattagaaaggctgagcattgagcctaacgatattaagttctgcctagaggcaaccggacattactggctccctatctactgccacctcagtgagttagggtttcagttgcatgttatcaaccccatccagtcggatgctttgcgtaatctttatgtgcgcaaaaccaagactgacaggaaagatgccctgcttcttgccgatttgctgcgtctgggaagagctcctgaaactaagctcccctctgaaacaattcttaagttgcagaatctttcccgactccgttttgagttggttcgccaggtcgccgggcttaagaacagggtgctcggtacccttgaccgcatcttccctgaataccccggctgtttctctgatgtctttattcgaacatccagagagttgcttaaatcctaccccgaaccggaagatttggtaaaagtagatctatcagagttatccgctttcttaaaacaacattcccgcggccgtttcggtgaggaaagagctaaaaaaattcagtctttagctaaatctacctttggcattaccctggctctcgatgctttctctctccaactccgtttgctcattgagcaaattgagtttattgaggagcaaataaaggttcttgaggaggcaatcaaccaggttatggaggagcttcgccccagcaaagatactccatatcgccacgtcattgaaaccatacccggtattggccctgtcttggctgctgcaattatcggtgaaataggggacatttctcgttttcctaacgctcgggctcttgtggcctatgccggtttagacgcttctgtcaaggcttcagggctgtttgaaggtacccgtaaccgtatgtctaaacgcggttcacctgtgttaagaaatagtctatggttggctgctgtttcagcccggcgttttaatcccgaattaaaagcttattatgagctaaaacgcagccagggtaaacattcaagcgttgctaccggggcagttgccagaagacttgttcatttaatttactctctctggaagaataatcgtgcctatgacccggattatcaatggtcaccacctggcgacaatgtttgatcaggatccctatgtgattgtcaaagatctttttgctttagtctattgacttttcatagcacgt

SEQ ID NO: 2842 - DNA, 1430 bp, unidentified
  source 1..1430: mol_type = unassigned DNA; note = element_40798af
  misc_feature 1..2: note = core
  misc_feature 3..223: note = LE
  misc_feature 224..1414: note = CDS
  misc_feature 1415..1430: note = RE
ctgatataccgccttgtggaggtcgatgatggccccgacctccacgggggagaccggcgagccgctatccggcagatgaccgttcgcgctagtttccggcccccgaccttcggccttggacggtgatcgggatccgacggcgttgaccggtgatcggatacatcagctgacgtcgaccggagtgagcgggtacccgcgaggtccgcggaaggaggctgcccgggtggcgacgatcgggatcgacatcggcggacggagtcacgcggtggcccgctgtcgggagggtctggtcagggctgaccgggaggtcctccgggtgagccagagccgggcggggttcgctgccctcgacacctggctcgagcgacaggccgaaccggtgagcctcgtgacgatggagtcctcgggccactactggatgccgctcgcgagccacctgcgtcgccaggacgtcccggtggccgtcgtcaaccccctctcggcgaagtactttgcacggagccggctcgcccggaccaagtccgatccggccgatgcccggagcctggccgagatgggaatgcgtgatcaaccggccgcccgcgatccgctcgccggtgccgagctgcgtcaggccgctcgcttcgcgatgaccctcgtcgacgagcaggcgaaggtctgccagcgcctgatccggctcgtcgagctcggctttccggagctcggtgagctgttcgacgatccgacctgccgcacggcccgcgaggttctgcggatcgctccgacggcacgagcggcgacgaagcgtcggacgacgaccctcgccaacgcgaacgccgggcctggtcatcggcgacttggtcagacgaaggcggagcgcctccaagccgcggcggcggactcgatcgccgtgcccgagctcgacgccgaggtcgccttcgaggtcggcatcctgctcgatcagtacgatctgctcgagcgtcagatcgaggtggccgacgcacgggtcgcgggcctcctcgatggcgagaccgcccggcggctgcggacgatcccggccgtcggtccggcgatcgcagcaacgttcctcgccgagatcggcgacatcgaccgcttcagcgatttcgaccaactcctcgccttcgctggggtccatcccgccgagcgcagctccgggcgcaagggatcgaaccccgagaccgcctggcacatgagcaaggccggcaacagccacctccgggccgcggcgtaccggatggccgtcgtgggcgttcagcacaatccggtcatccgggcccactacgagcgcaagcgcgccgccggcaagtcgaagatgaacgccctcggtcactgcatgcgcaaggcgctcagcctcgtctggggcgtctggcgcaatggtcaggacttcgaccccaactgggggctcgaagcttgacgagaccctatgggat

SEQ ID NO: 2843 - DNA, 1376 bp, unidentified
  source 1..1376: mol_type = unassigned DNA; note = element_407c792
  misc_feature 1..2: note = core
  misc_feature 3..80: note = LE
  misc_feature 81..1106: note = CDS
  misc_feature 1107..1376: note = RE
  misc_feature 1102..1362: note = bridgeRNA
tgatggggtggacggcccccgctcccggcatcttggtgccatagtgtggctgttgtcaggccacttgaggagagccgtccatgggcaagattatcacgatcgggttggatatcgcgaagaacgttttccaggttcacggcgtagacgctacggggtcagtggtggttcgccagaagttccggcgttcagatgttctcacatttttcgaacgaacggagccctgcctcgtggggatcgaagcctgcgcgacggcgcattactgggcccgttcgatcatggcattgggtcacaatgtcaaactgatgccgccgacctatgtgaagccctatgtgaagcggcaaaagaatgacgccgccgacgccgaggcgatctgcgaagcagtcaccaggcctacgatgcgcttcgtaccggtcaagggcgaggagcagcagggtatcctggtacttcatcgaacccgcgagctcttgatccgccagagaacgatgctgatcaacgcgctgcgggggcatctggccgagtttgggattgtcatgcgccaaggacgcgccggcgtagcgacgttggtcactctcgtcgaacatgacgagcatgatctgatcccggagattgcccggaaagcgctcctcgcggtagtcgaccaattgcgcgatgcacatgatcggatcggtgcgatcgagcgcaacatccaactatggcatcactccaatgagcagagccggcgtctggagacaatccccggcatcgggcccattacagctagcgccattgcggcgacgatcaccgacccgagtctttttacctccggccgacagctcgcggcctggattggcttggttcctaggcaaaactccagcggcggtaaggagcggctcgggcacatcagcaagaagggcgatccttacatccggcgcctgctcgtgatcggcgcgcacgccgtgctgcgatttgcgcgcaatggcaaagctacgacgacaaagtgggcggcggctttgcttgcccgcaagccttacaaactcgccgcggtggccctcgccaacaaaatggcacgtatcgtctgggcgctgttgacgaagaatgaggagttcaggctgcagccagccgcgtgagccacggcttgcagaccggctgaggattaagaagattggtgaggtgctgagggattgatgacgaaacggtcgtaaccggggatcggcaaaacccgctctaagtggcttggcgtcaatgaacgcgatgacctgaatgggagctgatcccgcggacttcatcagggccagcggccatgtggaccgcaatcaaaggccggacacatgaccgcaccgacccgacttcgtcttcactgccaaaaaacatcttgccatgcgggggccgtccacaca

SEQ ID NO: 2844 - DNA, 1571 bp, unidentified
  source 1..1571: mol_type = unassigned DNA; note = element_4082507
  misc_feature 1..2: note = core
  misc_feature 3..267: note = LE
  misc_feature 268..1440: note = CDS
  misc_feature 1441..1571: note = RE
  misc_feature 3..244: note = bridgeRNA
cttgtatgatgttttcagaagcaaaaacacctactttcctttctttttaatatcgtggtttaatacattcagatactgtgtacttttgatttgtttctgtagccttgactactctaaggagtgtattgccgctaactgtatctgaattgtttattagttggatgtgccatagggttttgccctcgagtacttatctcacgcaagtctacaatgatatagatgggtggatatcacggtatcagactttaggaagggaggtacaacctcatgatttatgttggcatcgatattgccaaactcaaccatttcgcctcagcaatctcgtctgacggtgaagtgctcattgagccgttcaaatttacaaatgacggtgatggcttccaaatcctgctctccaagctcaattcgcttgacgcagagcccgacagcatcatcatcggtcttgaatcaacggcacactatggcgacaaccttgttcgataccttgtcgctgaaaatttccaggtgtgtgtgttgaaccccatacagacttcttctatgcgaaagaataacattcgcaaaacgaagacagataaggccgacacatacatcattgctaaaacacttatgatgcaggattcctaccggttctatactttctatgaccttgaccttatggatctcaaggccatggggcggttctaccaaaaaaccatcaagcaacggactcggctaaaaattcagcttacagcctatgttgatgaggtcttcccagagctccaatacttctttaaatccggtttgcatcagaagtctgtctatgccctcctgaaggaggctcctacaccgcagaccattgcttccatgcatatgactcatctcgccagtctgcttgtgaaaacctctcacggacacttcacaaaagaacaggctaaagaattaagagttctcgcacggaagtctgtcggtgcatccgacagcgctctatctattcagataactcacaccattgcacagattgagttactggatagccagttaaataagatggaagaagagatgactgaaatcatgaaattcaatgactcagttatcatgaccattccgggtatcggttacatcaacggcggaatgatactcggtgaaataggtgatattcaccgtttctccagtcccggtaagctgcttgcctttgcaggtctagacccttctgtatgtcagtcgggtaactttcaggcccgcaggaccaagatgtcaaggcgtggatccaaagtactgcgttatgctctgataaatgcagctcacaatgttgtgaagaacaacactactttcaaggcttactatgacgccaagaaagcggaaggccggactcactataatgccctgggacattgtgccggcaagctcgtcagagtcatctggaaaatgatgacaaacgacttggaatttaacctcgaataagaggtctgtataccatatcgatagatttgtttaaaagcgcccacctgggagccttgttaaggttacccttttttaccatcgatagaaaaaagaattttttgctaattcagggttgacttttcatagttggt

SEQ ID NO: 2845 - DNA, 1325 bp, unidentified
  source 1..1325: mol_type = unassigned DNA; note = element_40828bc
  misc_feature 1..4: note = core
  misc_feature 5..64: note = LE
  misc_feature 65..1069: note = CDS
  misc_feature 1070..1325: note = RE
  misc_feature 1105..1312: note = bridgeRNA
ttatgggatggacgcctcccgtcttccaggcaccatgggtgttcaaccaacaaggaggaaggcgatgaccatgaaaatgctggcgatcgatctcgggaagcaatcgttccacctgcacggcattgatgctcacggcgttgtgatctcacgtaaggtgagccgcactaagcttgagagcgctgtggcggaacttgaacctgataccattgcaatggaggcgtgcgcgagcgcccaccactgggggcgtcagttccgagcggccggccgggaagtacggcttgtcaatccgcggttcgtgaaggcgtttgtgcgcggttcgaagaacgatgcagtcgatgcggaggcgatctacgacgcagcatcacggccaactatgcgcttcgtgccagtgaagaccactgagcagcaggacttgcaatcgctgcatcgcgtacgagagcgtctggtaatccagcgcacgtcgctcatcaatcacgcacgcggattgctcgccgaatacggtgtcgtacttcctaaagggccatggcgcttccgcgatcaggcgccgcaggcaatcgaggaggcgggcctctccgaccttgcccgagaactgttcaccgagcttctggaccaacttcgagacgtcgaagcgcggcttgccaagctcgatgctgaactggtcagaatctgccgagagcatgatgcctgtcgccgactcgctgcgttgccgggtgttgggccagtcattgcgactgcccttgtcgctgcagttgatgatggtcgacactttcgttcaggccgcgaactggctgcatggatcggtctcgtaccgcgacaatacacgaccggcggcaagcctcggcttggtggcatcggtcgacgtgcgaatcattatctgcggcgtcaactgatccatggtgcccgcgcagtcattagccgcttggccggacgcgacgatcggcgttcagcatggctaaaagggatcgtcgcccgcgccggcttcaataaagcccttgttgcactcgccaacaagacggctcgcatcgcttgggtgctgctcgcgcggaaggaatgttacatgcccggctgatcaagcaggctaaggggtcgccgccaaaacggcgataaatgcgaggtggatagtgatggtgcaacggcaagggccgccgcttcaaagcctgatttacgacaaggccagcaaggccgatcatgttatgaggcaagaggcagcggactcccatcaaggccaggggcggaattgctccagcagaaggccggatagattcacgcaagccatgccgagcgcaccagaccgaaaacgccttgcggcgggaggcgtccataga

SEQ ID NO: 2846 - DNA, 1379 bp, unidentified
  source 1..1379: mol_type = unassigned DNA; note = element_409919e
  misc_feature 1..2: note = core
  misc_feature 3..85: note = LE
  misc_feature 86..1117: note = CDS
  misc_feature 1118..1379: note = RE
  misc_feature 1148..1367: note = bridgeRNA
tgatgctgtggacggctcctccaccggcacgtaagtgccaaagaagtgggcgctgttgaggccccacgatttggaggagctaaacatgcaaacggtcacgaccatcggtctcgatatcgccaagtcagtttttcaagttcatggcattgatgcggaaggtaaggtgctgatccgccgtcagctcaagcgccggtacgtcctggcgttcttccagaagcagccaccgtgtcttgttggtattgaagcctgcgcctcatcgcatcattggtcgcgtgaactgcgggctctcggtcatacggtgcgtttgatgccgccggcctatgtgaagccgtacgtcaaacggcaaaagaacgatgccgctgatgcggaggcgatctgcgaggcggtcaccagagccaacatgcggttcgtcgagacaaaaacgtcagagcagcagagctgcttgatgctccatcgcacgcggcatctgtttatccgccagcagacctcagtgatcaatgcgatccgcgcccatcttgccgagtttgggatcgtcgccccggttggccgcaatggtgtcgaggagctgctcgatgttgttgctaatccagctgacaaacgggtgcctgagattgcacgcgcgtgtctcgccgcgcttggggcgcagctgcgcaggttcaaggagcagattctgcaatttgatcgcctgattatgacctggcaccgatccaatgagacgagcaaacggctcgatgacatccccggcgtcggtccggcgctggcgaccgctctggttgccagtgtcgccgatgcgaaggctttccgatcgggccgcaacttctcggcctggattgggctcgtaccgaagcaacattcgagcggcggcaaggacaagctcggcagtatcagcaagcaaggcgatcgctatctgcgcagcttgttaatgatcggcgcgctcgccgtcatccgttatgccaagatccatggaaccaagcatcggccttggctcacggcattgctggcgcggcggccgaccaaggttgccgccatcgcgctcgccaacaagattgcaagaatggcctgggccatgatggccaagggcgaacgctacaaggaacccgtcgcactcgcggcgtgaacgagatcacgccgactacccggcgtgatgtgaaggttggaaagggcgaacagcacgtaatgcagagccggtcgatccggcgatcaggacaacccacatgtgccagcgcattgtcgaatgcgagcttttgaccgggacctgatccgcggagggcattatggccagcggtcatgtgagccgcatcaataggccgaacacatggctgcaccgaccatgcctgcaacgtgaagaaaacccttgccaactcggagccgtccacaca

SEQ ID NO: 2847 - DNA, 1392 bp, unidentified
  source 1..1392: mol_type = unassigned DNA; note = element_409f754
  misc_feature 1..2: note = core
  misc_feature 3..89: note = LE
  misc_feature 90..1127: note = CDS
  misc_feature 1128..1392: note = RE
  misc_feature 1159..1378: note = bridgeRNA
gatgagttggatggctcccgctcacggcgtcaaagcgccaaagtgtggttgctgtcaaaagcgcccacgagcaaagggagccatccgccatggagattacaacgatcggcttggatctggccaaaaacttttttcagattcacggcgtcgacggggctggtcgcgtcgtcgtccgcaaagctctgcgacgcagccaaatgctgccgttcttttcaagacttagcccttgcctggtcgggatggaggcgtgcgggacctcgcattattgggggcgcgagctgatccgaatgggccatcaggttcggttgatgccgccggcgtacgtgaagccgtacgtgaaacgcggcaagaccgacgccaacgacgccgaggccatctgcgaagcggtcacacggccaacaatgcggttcgtggccgttaagacggccgagcaacaagcagcgctctcgatccatcgagcacgagacctcttggtcaagcagcgcacccagcttgtaaacatgatccgcgggctgctcgccgaattcggcatcgatatcccgcgtgggctagagcgcgcgctgctgaaggcgcggcagattgcagacggcgaggcgccagacgtgccggctgaggcaatcaaagtggttctcacgctgtcgcaacaggtgctcgaaatccacgtcagggtgcgcgagatggagcgcgacttacagcgttggcatcgcggcaatgaggtctcgcaaaggctcgcgacgatcccaggcattggaccgatcggcgcttccgcactggtggcttctgtcgctgatccgcagcaatttcgatctggacgacaattcgcggcctggctgggactgacaccactgcagaaatcgagcggcggcaaagagcggctcgggcgcatcaccaagatgggcgacaaatatctgcgcaagttgctgatcgtgggcatgacctctttggtgaggcgcgcgaaatacaaaccggagatggtcgatccgcgcctggctaagtggcttgcccacaagcctgtgcgcgtcgccaccgtcgctatggccaacaaagcggcgcgcgtggtttgggcgatcatgaccggtggcgacacctatcgcgctgggcatgtcccggtgcttgcagcacaatgatcagcgcgctgagagtggagtaagcgcgccaacgaagttgcgaggacgatgcgatgtgatggcgaaccggtcagaccgggaacaaggacaacctgccgaatgtccaaggcgtctcgagcctgcgaagcagaatgggaccttgttcgcggaacccatcagggccagcagtcagcttcgactgcatcaaaggccgaagacaagactgcacccgaccaatacgccgaaacatcaaactgtgcttgcaacgcgggagccatccagacag

SEQ ID NO: 2848 - DNA, 1380 bp, unidentified
  source 1..1380: mol_type = unassigned DNA; note = element_40a233a
  misc_feature 1: note = core
  misc_feature 2..69: note = LE
  misc_feature 70..1101: note = CDS
  misc_feature 1102..1380: note = RE
  misc_feature 1138..1374: note = bridgeRNA
caatggtatggaccccgccctcgcgacgcggtggaatctcgaacgtcaactgcgatgaaggaggatatcatgcaggtcgttcggataggtttggatttggcgaagtatgtcttcgaggttcacggcgtcgacaagcacgggaaagtcgttgtgcgaaagaggctgcgtcgcgatgcggtgtcccgcttcttcgccaatttgccgacgtgtctggtcggaatggaggcttcgaacggggcgcactactgggctcgcgtgctcaccgagctcggccatcaggtgcggctgatcagtcctcagttcgtgacgccatacgtcaagtcgaacaagaacgaccggaacgatgcggaagcgatctgcgaagcggtcggccggccgtcgatgcgctttgtgccacggaaatcgaccgatcagctggcggtgcaagccgtccatcgcattcgccggcgtctggtcgccgaccgggtcaggctcgtcaaccagatccgcggtcttctgtccgagcatgggattgtcattgcccgtgacatcgcgcagctgcggcgcggccttgccttcatcgtggggagcgtcaatgacggcctcagcgagatggtccaagcgctgatgagggaactgcaggcggagttggccgagcttgatcgacgcattgcaacctatgaccggcggataagggaaatcttccgcaccagtgagcagtgccaacggcttggcaagatcgaaggcatcggccctgtgacggcaacggccttgatcgccgccgtcggcgatagaacctccttcaagaacggccgccagttcgcggcctggcttggcctggtgccgaagcagcgatccagtggagggcgagcccgtttgttcggcatcagcaaacgcggcgatcgctatctgcgcacactgatgattcacggcgctcgcgccgctttaagccgggctagcggcaagcaggacccacgaagcctctggctcggcaagatgcggcaacggcggcatcccaacgtcgcggccgttgcgcttgccaacaaaaatgcgcggatcgtgtgggccatgctctcggacgacaccgcttacgagcccgcgctgtcggtgaaggcggcctgagcccaagccgcgaataagcaaaggaggtctcaccccggcaattgcagcaaatggcaggagatcgaaaaacggtcaccccgtcgcttcccgaacctgatctgtggtccggcatggcggtagccaatgtcaccggggctttgaggtggaagcgggcgaaaacccatcgaggctcgcggcgaagacgttgtccagccgcatcacgaagccggatatacgtcagcagttgtgaccaatgatcctgatccagccgactgttgcaatcgggcgggggtccatata

SEQ ID NO: 2849 - DNA, 1418 bp, unidentified
  source 1..1418: mol_type = unassigned DNA; note = element_40a3f4c
  misc_feature 1: note = core
  misc_feature 2..90: note = LE
  misc_feature 91..1125: note = CDS
  misc_feature 1126..1418: note = RE
  misc_feature 1186..1410: note = bridgeRNA
caatgggatggacgcccccacccgcaacggcatcgatgtgccaaagtcgaagcgttacatcaaccacttgaaccgagaggggcgtccgccatgaagattacgacagttggcatcgacttggcaaagaacgtgttccagattcacgcggtcgacgagcgcggcaagaccgtcttgaagaagcaactcaaacgtgaccaggtggcagctttctttgtcaatctgccgccatgcttggtcggcatggaggcctgcggcagcgcccaccactgggcgcgcaagctcgaaggcttcgggcacaccgtcaagttgatggcgccccaattcgtcaaaccgtacgtgaagacgaacaagaacgacgcagctgatgccgaggccatctgtgaggccgtggcacgacccaacatgaggttcgtgccgatcaagaacatcgggcagcaatcggtgctggcgctgcaccgtgtgcgccagggcttcgtcaaggcacgcaccgcgcaggccaaccagatacgcggactcctgggcgagttcggcctcatcattccgcaaggcatcgcccacatagcaaagcgggtgccggagttgatcgaagatgcctccaacgagttgacgggctcatttcggttgctggtgcagcgactgatggaccatctcaaggaactcgataaacaggtcggggagcttgaggtgcagatcaagacctggcaccgtgccagcgaggccagttgcaaactcgaaataattcctggcatcggcccgatcacggccagtgcgttggtggccagcgttggcaacgcgaagaatttcgacgacggcagacagctggcagcatggctggggctggtgccaaagcagcactcaagcggcggcaagtccaccttgctgggaatcagcaagcgaggtgactcgtacctgaggacattgctgattcacggcgcgagatcggtgatctttcgtgcccagcaaaaggccgacaagagcggttggctgcacaagctgctggagcggcgcaatccgaatgtggcggccgtggcattggccagcaagaacgccagaattatctgggcgttgctggccaacgaccggaacttccaggccgattacgcgcgcccactcgccaccgcttagccgggcaccaggccaattcgcagacctattcaacacgacaaacagcaggagattcaaaccaccgattgctcaggcaatcatgaagtgatggcaaaacaggtcagaccgtggttggcaaagcccgtgcgggacgaggcacccagagtgcgtgtaagcgatcgaggcgccgaccagcaaatcccatcagggacagcggccaaaaaagccgcatcaaaagtccgaatgtacgggtgcgatctttaccttcgagccgtcatcaattgaaagcttggcaaaccgggggcgtccatgta

SEQ ID NO: 2850 - DNA, 1363 bp, unidentified
  source 1..1363: mol_type = unassigned DNA; note = element_40a4624
  misc_feature 1..2: note = core
  misc_feature 3..76: note = LE
  misc_feature 77..1102: note = CDS
  misc_feature 1103..1363: note = RE
  misc_feature 1078..1351: note = bridgeRNA
tgatggggtggacgccccctcgacggcatcttgtgccagagtggcagtgtgtcaggccactcgaaaggaggcgtccatggaaaatgttagcacagttggacttgatctcgccaagcatgtcttccaggcgcacggggccgacaaggagggcgccgtgatctttcggaaaaaattgcgccgcagccaggttttgcctttctttgaagctctccctccctgcacagtcgctatggaagcctgctctggcagtcattattggggccgcgagattggcaagctcggccacttggtcaaactgatcgcacctggatatgtgaagccgttcgtgaagcggcagaagaatgacgtgtcagatgccgaggcgatctccgaagccgctcaacgtcccaccatgaggtttgtcgccgtcaagagcgagggggcgcaggctgcggccatcgtattccgtacacgcgatctgctcgtccgccaacggacacaaacgatcaacgccttgcgtggtcatctgactgagttcggtatgatcatcgcgaagggtccccagcatgtttccaaactcattgcgatcgtggaggatcctgtgtcaggtctgccagaggcggctcgcatgattctcgcctttttggttgagcaactgcgttctcttgatgaacggatcacgaaactcgacaaggagatcgcacgtcgggcgaaggaggatgaggtcgtgcagcgcttgatgaccatccctggcgttggcgttttaacggcgacagcgttgacggctctcgcgccgtcagctgcaaccttcaagcgagggcgtgattttgcggcctggcttggtttgacgcctcttcagcgatcgaccggtggcaaggaacgccttggccggacgtcaaggatgggcgagcgaacactgcggcgtttactgatcatcggggcaagcgcagttgcttcttggagtgtgcgcagaggggcgccagctggatcgtggcttgaccggatactctaccgcaagccgccgatgctggtacgagtggcgctcgccaacaaaattgcacgcacggcttgggccctgcttgcaaaaggtggaatatacagagctccgatcatggccgcatagcggacagatcgcgaggttgtcgaaggcgtaggaaggtcgaacggagggtatggcgcgacggtcgatgagacgggatcggaaaaaccagttcatggataagcgcccaggagcgcgccagattgtaatggatccgatccgcgaactcccatacgggccggcggcatgtgatggccgcatcagaggccggatacatgtcagcacccgactacgcgccgcgccaagcctgaagattcctcttgcgccaacgggggcgtccataca

SEQ ID NO: 2851 - DNA, 1371 bp, unidentified
  source 1..1371: mol_type = unassigned DNA; note = element_40a6deb
  misc_feature 1..2: note = core
  misc_feature 3..79: note = LE
  misc_feature 80..1108: note = CDS
  misc_feature 1109..1371: note = RE
  misc_feature 1082..1358: note = bridgeRNA
cgatgggatggacgccccccggcggcatcgaatgtgccaaggtagcgggtgttgaaacaccgctatgaggagagcgtccatggaagaggttcgcatcatcggcttggatttggccaaaaacgtattccaagcgcacggcgctggagccgacgggtcggttgtattccggcgcaaattgtcacgcgggcagttgctgaagttcctgagtgaacagccgtcctgcgtggtggcgatggaggcgtgcgcgagcgcccatcactggggtcggacaatcggcgatctcggtcacgaggtccggctgatcccgcctgcctacgtgaagcttttcgtgaaacgtcagaaaaacgacatggccgatgcggaagcaatcgcagaggcagcgtcgcgcccgaccatgcggtttgtggcggtgaagagcgaggcccagcaggcggcagcgatggcgtatcgcacccgcgatcttctggtgcgacaacgcacccagacgatcaacgcactacgggcccatctggccgagcagggcatcgtcgcacccgctggccctgcccatattggccgcctcgccgcaatcgtcgaaggggacgacgacaccctgcctgcggcggtgcgcgacttggcgcgcttgcttctaggccagatcgcagacttgagcgagaaaatcacaggtttggatgttgaactgcgccgccgcgcaagcgtcgacgacactgcgcggcggctgacgacgataccaggtgtgggtccgatcaccgctgcggcgatcaccacctttgcgccgccgatggagaccttctcaaaaggccgggatttcgcggcttgggtcggccttacgcccagacagcattcgagcggtggcaaggagcggctcggccgaacatcgaaaatgggtcagcgcgacatccgaagattgttgatcattggcgctgtggcggttgtgcgatgggctgcgcgcaagggagcacccgaaggctcgtggctcgcgcggatgttggaacgcaagccgaagatgctggttgcggtggcgctggccaatcgcatggcacgaactgcctgggccctgatgcgcaagggtgaggattacagagatccggcgatggcgaccgtataggtcaagatcgccggggtgtcgccgcggatgtgagcaggacggaggaacgtaagggcaaacgatcaagagaccggatcgggagaaccattattccggacgatgcgccattgagcgcgtgtaagcgaactggacccgatctgcatatctccatacaggcccgcggcgcatgaaaggccgtaacttcgaggccggacacacgaccgcacctgatcacatgcccgatcgtgccaaaaagtgcttgcattcatgggggcgtccacaca

SEQ ID NO: 2852 - DNA, 1150 bp, unidentified
  source 1..1150: mol_type = unassigned DNA; note = element_40a8806
  misc_feature 1..3: note = core
  misc_feature 4..209: note = LE
  misc_feature 210..1139: note = CDS
  misc_feature 1140..1150: note = RE
  misc_feature 16..188: note = bridgeRNA
gcttgtgtcttgaggtaggaatagaatcagaagtgagagcggtgaatggcaagctgtacgccggtagtgcttaaagcacgtgtgggagcaaagctgccattcacctctccactctggcccgagcccgaacagttgattgagcgcctctcgaatcacaagcgtgggccaagccagagcgctctcacaactgagtgtaagagggttcagccatgttgtcttctgttggaatcgacactgccaaagccactttagagatctgcatcaaacctcagaaaatccgcttcgaagtggccaacaactccgcaggcttcgaggcgttgcttgagcgtctgaaggacttcaatatcagtcgagtgctgatcgaagcgacaggcggctacgagaaagatgtgttgatctccctggcctcagcaggactggaaaccatctgcatcaatccagcccgtgcccggaaattcgccgatgccatgggtaaaaaagccaaaaccgacaagatcgacgccgaggtccttgcggacttcgctgcacacctcagcgttcctcaaggccaaccgatcagcccggaacgcgaagagctgcgcgagttggtgaagcagcgcgcccaatttgtgcagagccgtgatgactacaaacggcgtcgcctgcaatgccgctcggcaatggcgatggcccactttgatgagcacatagaacacctgaaagtgctgatcaaacgcctcgacgaagaaattgaccaggcgatggtgcaactggacgataccagggcgagtcagttgttggcggtgagcggaatcggtcgggtaaccgccgcaaatctgctcgcctcactgcctgaactggggcagttggaccgccgtcagatcgccgcgctggtgggcgtagcgccttacaacaacgatagtggtagccatcgagggcaccgccagatatggggtggtcgggcccatgtaaggcgagtgctgtacatgtcgagctggatcatcatccgccacaacacggaatttaaagcacgctacgaagcacttcgggcacgtggcaagtgcgccaaggtggcactcgtagcttgcatgcgggtactgatcgtcaggctgaatgcaatgctgcgggacaataccccttggcgagagcaaacagcctgatcaagacagtt

SEQ ID NO: 2853 - DNA, 1189 bp, unidentified
  source 1..1189: mol_type = unassigned DNA; note = element_40b0a73
  misc_feature 1..2: note = core
  misc_feature 3..189: note = LE
  misc_feature 190..1167: note = CDS
  misc_feature 1168..1189: note = RE
  misc_feature 13..198: note = bridgeRNA
cttgtgtctctccgcagggtgatgattagctaccatcccctgtcagcccggtggcaacccgagtcgctcctgaggtccttgaatctgtgccgtagatcggaccaccgggctgtttctctcaaaacttgaacggtatccaaaccgcttccatttggaggagaggctgcacgaacaaggaaaggtggagagatggcccacattggtattgatgtcagtaaaaacaaactggacctgtgctggctacgcgaacgcggcaaagtgaagaccaaggtcttcaccaaccaccctaaacactaccccgcgttgatggactggctgacccgccagaccggcgagcaagcccaggatctgcgcgtatacctggaagcgaccagcatttaccacgagccgctgaccgagtggctgcatgagatgggtgtccaggtccatgtggtgaacccggcccaggttcaccattacgccaaggcgttgggtatcgccggcaagacggacaagaaggacagccagctcctggcgcgctatggcatcgaccgccagccacctcggtggcagccggagccggagccggtccgccgcctacggcgccttgccagccgtttggagacggtccagcaggacatccagcgagaacagaatcggctcgagaaggcccggttcaaccgcgataaggaaaccgcctcgtcgattgatctggtgctgctggccttacagggtgaagcgaaacggctgcgcgaagagatcaaagaccatatcgatggcaatggggatctcaaacacgatcagtcgctgcttgagagtatccccgggatcggcgaggtcacgtcggtgcatctgatggttctgctgcgaggcaagccgttccgcagcgcccgccaggcggcggcgttcgtggggctggtgccgagcgaatggacatcaggttcttcggtgcgaggccgcccgagcctgagcaagaaagggtcgtcggcgatccgtcgacgcctgtatatggcggcagtggtcgcgagtcgccacaacccgatggtgggtgcgttttacgcccgattgcgacaggccggtaagcccccgatgtctgccctgggcgcctctatgcgcaaactggtgcacatcgccttcggtgtactgaatcggcaaaccccattccagacccaacccgttgggggttgagcccggataggagagacggtat

SEQ ID NO: 2854 - DNA, 1554 bp, unidentified
  source 1..1554: mol_type = unassigned DNA; note = element_40b6a33
  misc_feature 1..2: note = core
  misc_feature 3..228: note = LE
  misc_feature 229..1449: note = CDS
  misc_feature 1450..1554: note = RE
  misc_feature 87..266: note = bridgeRNA
ccattacagtttgagaagtagttagcccaatcgcttaagccatccgcttagacggtcggactacgattgacatatgtcccgagggactgccgatcgggcgcccgcggacggccttatgcccctgccccttgagggcccggggggtgttgccgacgcgggcgccgctgcttctgacgactaataggaaactgccgggctcctccgaccaaagagcgccacggccaggtaatgtgggtgtcgcgcgaggcagcattccgatcgaccgacgattggaaggataccatcatgctgaccgaagccaccgcctgccctgccgtaataggcctcgacgtcgggaagttctcccattgggcgtgccacgtgaccaggcagggcgagatcctcgccagcggccccgtggccaacaccgagcatgacctggacagcctgttcgcccgagtggatgcagggacgctggtcgtcgtcgaccaagtgcgcaacatcgggtcgctggcgatatcgagggcaaggctggccgggctgcccgtcgcctacctgccgggaatcgccgcccacggagctgccaagctgttcgcgggcgacgccaagaccgacgagcgcgacgccgcggtcatagccaagacggcgctcggcatcccggattcgctgctgcccgtgccaaggcgcgacgagaggctcgaggccgcaaggtcgatggcggcgcagaggaaccacatggtcacctgctccacccgtgacaagaacaggctcaggagcatactcctggaaagctgccccgcgttcgaggcgctggccgacctggccgatccccattggctgaagatgatggagtccctgggcggcccctggggcatcctggatgccggcaagcctgccgtcggcgccgtgacccgcggcgcgaacagggcgcgcatcgacgccgcgctggcggcgatatcgtcgtcgacgcgcccgtccgaataccaggtcatggcagagaacccgcaggtcaggatgcttgccaggcgtatcagggagtccgccgaggaagccgcaaggctcgacacggagataacggcgctgctcgtcgaggacggcacttacgaatgcctgctgaccatcccaggaatcggcccaaggaccgcatcggagctggtgataagcatcgacatcgacgacttccccgaccacgaccacctcgcatcgtattgcggaatcgctcccaggaaccgccagtcaggcaagtcgatatcgtcggtgagcgcctcgcgccagggaaacaagaggctgaaaaacctgctcatcttctcctgcaactcgcttagcaggagcaggggccggttcggcgactactaccgcaaatgcagggatcgcggcatgtgccacggagaggcattgaaggcggtcgccaggaagaggatgaaggtgatctacgcgatcatgagggacaaggtcccgtactcggcctagctagccagagccatagaaaaacgccagcccgacaagggctggcgtcagcatgctcgaaagcagtgatctttgccaacaaaatcagttgacaaaactataggaaca

SEQ ID NO: 2855 - DNA, 1639 bp, unidentified
  source 1..1639: mol_type = unassigned DNA; note = element_40b8523
  misc_feature 1..2: note = core
  misc_feature 3..267: note = LE
  misc_feature 268..1506: note = CDS
  misc_feature 1507..1639: note = RE
  misc_feature 80..262: note = bridgeRNA
aacgaatcatgaaagcttatctcagcctataatgaaaataggatactgactccactacttttttcacttctctttttgccttacaatagtcttaggcaggattaagtttgattgcaccttggaggatttgcaccccgtttgtcaacgtaaatgatttgcccttgagcacagcatattgtcgcaccttttatgaatagcacgagtagcaaagtccgtattatctcgggcaaatctcctgccaattctatagtaaaggagttgttctgtatgaaagaccttctggaaatttcctgtggactggatgtccacaaagaaaaaattgttgcatgtatcctgactggtcctctgggcaagccaacccgttctgaaatccgtgagttttctacattgattccggatatgatagcattacggaattggatcgtttctaaaaactgccatcatgtagctatggaaagcaccggtatctattggatgccgatttatgaaatactggaggatgctttctatggtgacattaccctgcttgttgtaaatgcacgccatatgaaaaatgttcctggcaaaaagaccgatatgcgggattccgaatggatttccaccttgcttcgcgccggacttctgaacggaagttttattcccgaaaaaagaattcgggaattccgcgatctaaatcgttaccgtaagagtgtcatccgcgatattacatcacagaagaacaggattgagaaatttttacaaagttccggcttccgtctatcatcctttatttctgatatttttggcgcttcgggtagaaacatcattctgcatttaattgaacatgggcagattgataaaactgctttggattcttgtctcaaaaccaagaccagaaaccgtattgatgaaattctcatgtccgtgaacggaacactgtcagaacaccaaaaggcatttttaaggattctcatgactcattacgattctttaaagaaacatcttgctgaaattgaaacgagtctcgaggaagatatggctccatttgccctgcaggttgagcagttgaatagcatctatggaataagcacaactgcttcctgtgcaattattgctgaaatcggtattgatatgaagccgtttaaaactgcggaacacatctgctcatgggccggtctgtgcccaggtaataacgaaagtgctggaaaacgaaaaagcacctctgtcacaaaaggcaatccttacataaaaagtatgctctgcgaaattgcctgggtgattgcagggaaacgcaacacttatctttcggcatggtactggagaatcaaacagaaaaaaggagccaaaaaagcgattgtcgcacttgcccgaaaacttcttgtcatcatctacacaatgttaaaacaaggaactctatttgacgaatcctgttttgaaacaagacgtaagcactgtgaacaaaaacagctttctcgttatatacgggaattggaaaagcatggttatcatgtggaagctcaaagctagcctttcttaaatacgatcaatctctcactacaggcagccaatactgtgactgctttatagtgatgctttcataattgttgaaaacatttgttgtcaaggttcagtttttggctacgagttttattttcgtagc

SEQ ID NO: 2856 - DNA, 1367 bp, unidentified
  source 1..1367: mol_type = unassigned DNA; note = element_40b8565
  misc_feature 1: note = core
  misc_feature 2..89: note = LE
  misc_feature 90..1109: note = CDS
  misc_feature 1110..1367: note = RE
  misc_feature 1134..1361: note = bridgeRNA
gaatgatatggactccccctccccctacggcatcggatgtgccagattgaatgtgtaaccagtcaatcaacggaagaggaggagtcatcatgaacgttactaccattggtattgatttggcaaagaatagctttagtctgcacggggtcgatgctcggggcaagacggtattccgcaaaaccgtcggtcgcgccaaactgctgcctttcctggcccagcaaccctccagcttggtcgggatggaagcctgctccggtgcccatcattggggccgacatctctccgcgctcggtcatcgggtcggcatcatggcgccccgttttgtggcgccctatcgcaagggtggcaagaacgatggcaacgacgcggaagcgatctgcgaggcggtggcccgtcccggcatgcgctttgtgccgatcaagagcgccgaacaacaggcggtactgtgtttgcatcgcatacgtcaggggttgatcaaggaacgaacggccaccatcaaccagctgcgcggcttgctcagcgagttcggattggttatgccgcaaggccgttatccggcccaacatcacatccccggcatcctggaagacgccgagaacggtctgccgatgctggcaagacgactgctgcacgatgtctacctgcgcctgcaagccatgaacgaacagctcctggcctatgaccgcgagcttgaacacctcgccaaggccagcgccgtcgcgcaacgcctgatcgccgttcccggcatcggcgctattaccgccacagcgctcatcgccagtgtcggcgacccgcatcagttcaggaacggccgccagttcgccgcctggctcgggctgacgccacgacaatacaccaccggcggcaagatccgactgggccggatcaccaagaagggcgatgtctatttgcgtacgctcttgatccacggtacacgtgccgtattggccaatctgaaagacaagtcagatcgaatcagtctgtggttgcacgcgctcatcgagcgacgcggttacaaacgcgcgacggttgcgctggcagccaagaatgcccgaatcctatgggcactgatggttcgaggtgaatcgtatcaactgaaagcggtctagttacggcgctgaacaacgcaatgaggtagccaaccgagtcactgcaacggcaatcgatgacaaacaaaggtaagacccggatgaaagagcctgtttaactcaatggtccagcaagaccgtctaacgaatcaggcattcatcccgcgcagcatcatcatggccagagcgcatgctcaccaacaggccgaatgtagaaccgcagtctgacacctgagctgtattagatcgcagttgcttgacacagggggagtccatgta

SEQ ID NO: 2857 - DNA, 1492 bp, unidentified
  source 1..1492: mol_type = unassigned DNA; note = element_40c403a
  misc_feature 1..2: note = core
  misc_feature 3..171: note = LE
  misc_feature 172..1200: note = CDS
  misc_feature 1201..1492: note = RE
  misc_feature 1248..1487: note = bridgeRNA
agatggggtaacgggccccggtctgccctccaagcaagccgcgcttgctacggcgctattgggtagcgcgctgcgcgcggcttgcttggagggcaggcggtcgtccctcacactgatggtgtggcggagtcgagggattggcctcgctccaagcatcgaggagagacgaccatggagtattatgcaggaatcgacgtgtcattggaatactcgagcctgtgcgttgtggacgggactggcaagatcgttcgcgaagccaaggcagcgagcgagccggcggcgctgatagcctggttcggttcgctgggctttgggcttgcccggatcgggctggaagcggggccattgtcgcagtggctttttgcggcgatgcgggaagctgggctggcggtcgaactgctggagacacggcacgtacggaaggcgttcgaggcaatgctggtgaagtcggaccgcaatgatgcgcgggggatcgcgcaactgatacggctgggctggttccggccggtgcactgcaagtcaatggatgcgcaggaagtgcgggcggtgctgacggcacgcaagctggtgcagaccaagcttctggatgtcgagaacagcctgcgcgggatcttgcgcggcttcgggctgaaggtcggcaagacgacggatcggagttttgcgacacggatccaggaactggtgaagggccatccaaacctggaggcgatcggcgaggcgctgctctcggtgcgtgccgttctgctgcgcgagttcaacgcctttgagaagcgcgtgcgcgcgatgtcgcgtttgaatgcaagagccaagttgttgatgtcgacaccgtcagtggggccgatcgtggcgctcacctacgcctcggcgatcgacgatccggcgcggttcaaatcatccaaacaggcggggccgcatttcgggctgacgccgaagaagtaccaatccggcgagaccgactactcggggcggatcagcaagatcggcgacgccgcggtgcgcgaggcgctctaccaggccgctcatgtcatgctgaccaagccgatcaagggctgctcggaactcaagagctgggcgatgcggatcgctaggcgagccggcatgagcaaggcgaaggtcgcgctggcgcgcaagcttgccgtgatcctgcaccggatgctcgccaacgcaacaccattcaatgccgctgcggcagcagcttaacagggagaaagcaggttttcgggcgggtcacgacaccagccttcccgatttatccgccatagcccgaagggcgaaggcggaagcgaagtcccttcgccgggacgatggatcaggtcaggccgtcatccgggatgtcgacacatctaaagatgtgatcacgctttcgtagattggccgacctatcctccacgaactccatcaggcgacggcctcgcgccgatcccgtacagaagcacgtccccggcgagtggataacgcaaaaagggattgactcatcgaggcccgttacaga

SEQ ID NO: 2858 - DNA, 1354 bp, unidentified
  source 1..1354: mol_type = unassigned DNA; note = element_40cabdc
  misc_feature 1: note = core
  misc_feature 2..72: note = LE
  misc_feature 73..1098: note = CDS
  misc_feature 1099..1354: note = RE
  misc_feature 1120..1351: note = bridgeRNA
taatgggatggtccctcccgccctcgccgagtgcgctacgcttgcggcatcaattccggattggagactgtcatgcaagacgtcacgatagttggcatcgatttgggaaagaacaccttccacctccacggtcaggatagaaggggcaaagcggtatttcgcaagaagctcggacgcaggcaactggtcgagttcttcgcgacttttcatgcatgcacggttgtaatggaggcttgtgccggcgcccatcacatggctcgcctgctgacgacgttcggacatgaggtcaaattgatctcgccgcagtttgtacgtccgttcgtaaagagcaacaagaatgactttgtagacgccgaggctatctgcgaagctgcctcccggcctaccatgcggtttgtcaccgcgaaaaccgaatcacagcagacgctctccgccctacatcgcctacgggagtcattcgtgcgggatcgcacgagaaccatcaaccagatgcacggcttattgctcgaattcggcgttagcttgccagttggaaaggcttccgttgcccgtcttccggccttcctctctgagcattcactgccaccgcgcctgatcgcgatccttcagcgtctgcacgagcactacaagtacctcgacagcgaagttggccatattgagaaagaaattaacgcccagctcgcagacgacgagctcggccagcgcctgctgacgatcccgggcatcggccccatcaccgccagtgttctggccgcagaaatgggagacggcaagcagtataggtgcggtcgcgattttgcagcgtcggtcggtctcgttcccaggcagtacagtaccggtgggaaggcgacgttgcttggtatcagccgacgtggcgacaagaatattcggcggctgctcgtcacgtgcgctcgagcctacatgctgcggctcgagggacggacaggccaactcgcggactgggttcgtgccatgctcacccgacgacattcaaacgttgtagcgtgcgcgctggctaacaagctggctcgaactgcgtggtcaatggcagcccacggcactccgtactgtgcgggattgacggtcgctgcggactgactgcgcggctcaacttctggccaatcacccaactggttttgcgacgactgaaatttgatgacatgaacggcacatcggcctgaaggacaacctgggtattaaataggctttcacaagccgagacagtttttaggaccttcaggcgcgaacctcatcgtggcgcggggcatgatccccacaatcgacgccggatagatttaagcgagcctgcaatgacatcgaaaatcgtggttgcaaaaatgggagggaccataga

SEQ ID NO: 2859 - DNA, 1309 bp, unidentified
  source 1..1309: mol_type = unassigned DNA; note = element_40cd737
  misc_feature 1..3: note = core
  misc_feature 4..215: note = LE
  misc_feature 216..1181: note = CDS
  misc_feature 1182..1309: note = RE
  misc_feature 36..200: note = bridgeRNA
cattgtataatttttaattattatatttttgcataaacattcaacatcaaagtgtggaataaggctgagttttcattagtcaaaaagaccgtgtagtatgttttaccccacactttatacatcagaaaccggatagttcaatgggcttttgagaccccgcattcgcaatgatggctcacgatgtacagatgttgttttaataaatcattcagactatgacttacgttggtattgatgtcagcaaggtgactttcgttgttgcctattcgtctgtaaagacaaacaagacgagaacattcaagaataccgtaaatggcgttcacgagttcgtccaaactatttcagcatccgaacataattgcgtgctggaagctacgggcaattacagcgcgttactcgtttacctgctttcagaggcaggcattaccatcagccttgaaaatccgttgaagataaagaacttcgcccgtgtcatgctcaccgttaccaaaacggatgagattgatgcacgcctgatagcactttacggagagaagatgcaacctgcgccatacaaacttcgcagtgatgcaatccttgtcctcaagcagaaacggacggtgctgcgccaactcaagaagcaacttgtagccacacgcaacctcaaaggctcgatggaggtccttccattctttgaccccaaatgcaagaaaaccatcgaaaagacgattacatttcttgaaaagcaaatcaaagagatggaagaggaactcgcttcattggcacaaggtgaatacaagaaacagatggacctgctcacctccatcaaaagcatcggtgtcacgctggcagctccgcttattgtagccaccggcagattctcttactttgataatgccaagcaactgacccgctacttgggcttgtcacctacttaccaacaatccggtacgtcagtcaatgtcaaaggccacatcaaccgaaacggggattcaagcctcagaagccaactttatgtagccgcattctcatcgctcaggtgcaataccgagtgtaaggcatgtttcgaccgtctcagatctaacggcaagcccggcaaggtggtggttattgcggtcgccaacaaacttgtgaggcaagccttcgctgtcgtcacgcaagggaaaccctatgtcgatggattcaaatccgaaaagccataacagctcctgcggagggaacgccatgcggcaagggactgagcacacagccccgacgagcttttcatgcacgataacttgcatgattatgctaattatcgttaaccgtattcagtttttatattatagtt

SEQ ID NO: 2860 - DNA, 1662 bp, unidentified
  source 1..1662: mol_type = unassigned DNA; note = element_40e9a4b
  misc_feature 1..3: note = core
  misc_feature 4..280: note = LE
  misc_feature 281..1486: note = CDS
  misc_feature 1487..1662: note = RE
  misc_feature 14..300: note = bridgeRNA
tttgttacaatatatttgccgggtaaagcacaccagccaggtgtgctttattcgttctcattcctaagctacaataagaggagtaattggtctgacagcacctcctttggactaataacgtccggaaaagaaacagtcagccatcctcttgttgcagcgttcggtttaggcagattgaactactcataatcctttgtgaaacgttcgggtcactcaacaaacagaatcggcaatgagtaaaagatgtataccaattacaaatactatttggaggttacatatgaacgctgttggaattgatgtttccaaaggaaagagcatgattgcaatcatgcgaccgctcggtgaagtggtcgctacgccctttgaagtgggtcacaccgccgcagaactgaatgagttggcaaaattcattctaaagatcagcggtgaaacccgtgtagttatggagtatacaggcgtttacttcgaacccattgctatggcactttacgatgccggtctttgtgtttgtgttgtgcatgcacaactcattcacaattatggtaacaacaccataagaaaggttaaaaccgacaaagccgatgcaattaaaattgcaaattatgcattagacaattgggacaagttaaagccatatacccctattgatgaaatacggcgtcaactgaaagcttactcccgtcaataccgtaaattcaacaaactgaaaactatgctgaaaaacaacctcattgcattgaccgattctacgtttcccggtgttaacgagctgttttcgtctcccccgaggaagtctgacggtcacgaaaaatggttagatttcgcaatgaagttttggcacgcagaatgtgtttgctctttatctcaaaaagcttttaccgagcgttacaggaaatggtgtcataaagcaggatactatttccttgaaagcaaagcagaagatatttatgccgccgcttgcggtcacatcggcttgcttccaaaagacgagaatacaaaacaacttgtgcagcaaaccataattcaactgacaagtatttgttcatcgctttcagtaattgagtacaggatgaccgagcttgcaggcttacttccggaatatcctgttgttatggaatttcgcggtgtgggcagaatactcggtccgcaaattatggctgaggtcggagatgttttacgctttgaaaagaaagaatctcttgtttgctttgccggtcttgaggcgccgccgtatgaatccggtaaatttgaatctcataacagaactatttccaaaaaaggttcacctcatctaagagccgctttatttcaagtgatggattgcttgttaaaaactcaacccgctaatgaccctgtttttcaattcatcgaccgcaagcggtctgagggaaagcattattactcttacatgtgcgccggttctgctaaatttcttcgcatttactatgctcgtgttaaagaatatctttcagctcttgaataaaacacatatttttattgtcttactctccgcctgacatggcgaggagcattgcgacgagactttcaggcggagagtttcaaaaaaactctcactctccgctttttcgtcatgcctaaatttctctaccaacaaaaaatttttttgctcgaaatttactcttgacttttattggcagg

SEQ ID NO: 2861 - DNA, 1356 bp, unidentified
  source 1..1356: mol_type = unassigned DNA; note = element_40f5bd7
  misc_feature 1: note = core
  misc_feature 2..68: note = LE
  misc_feature 69..1097: note = CDS
  misc_feature 1098..1356: note = RE
  misc_feature 1099..1346: note = bridgeRNA
tatggaaaggcccgccccacctctccggcctctggtaggatgccggtgctaacagagagggacgagccatgaccattgtgatgatcggcatcgacttaggcaagaacagctgcagcgaggcggcgctggatgagcagggttcggtggtgcttcgtcgacggatgcggccaacgagcattgtggagttcgcggcgaagtatgtgccctgcacggtcgcgatggaggcgtgctgtggtgctcactatctggggcgccgacttgtcgcgcagggacacacagtcaaactcatgccgcccgaatatgtgcgtccctatgtgaaggcgcagaagaatgatgaccgggacgcggaggcgatcgcggaagcggcgacccggccaacgatgcgcttcgtcgagctgaagagccaggagcagctcgacgtccagtcgttgcatcgtgtgcgttcgcggctggtgggcgcgagaacaacgctgatcaaccagatgcgcgcggtgcttctcgagcgcggcattaccgtggcccagggccgccgcaaattcgagaaggcgctcgatgggatgctcaccgacggagccttgctggcgccagggcggctcctggacctgctgctcgacatgagggcagaatggtctggtcttgatcgccgcatcgacgctctcgaccaggaatttgcccaactcgcccgcaccgatgaggtggcacgacgcctgacatcgatccccggtgtcggcgctctcaacgcaacggcactcgtcgccgccgtcggcagggcagaggcgttcgcgcaggcacgggatcttggggcctggctcgggctcgtaccgcgacagcacacgacgggcgggaagccgcggctgctcgggatcagcaagcgagggaacacttatctccggacgcttctgatccgcggcgcccgagctgcgctgccaagcctggcgaaggccgatacggcgctgggagcgtggctgcgcgggctccaagcgcgatgccatcccaatacggtggtcgtggcgctcgccaacaagctggcgaggatcgcgtgggtgctcatgcgacgtcagacgctgttctcggcccagcgagcagcgaccgcctgatgcaatcggtcaccgacgaacccgtcgccggttgacccacggaatgtctgcgggaggaattttgaagatggcctgacggtataccgacgtcccaacagtctgatttctcaaatggcacctcgatgccgatatgtttatgagacctgggacgtgcggctctccatcttggcaacggctctgccgctatgccgtatacgttgatgcagacctgtcagttgccacccgaataaaccctcttgtggacggggcgggccatacg

SEQ ID NO: 2862 - DNA, 1579 bp, unidentified
  source 1..1579: mol_type = unassigned DNA; note = element_40fdb92
  misc_feature 1..2: note = core
  misc_feature 3..254: note = LE
  misc_feature 255..1460: note = CDS
  misc_feature 1461..1579: note = RE
  misc_feature 32..274: note = bridgeRNA
ttagtaccataaaagtgtagttgttagagagtaattaactctgacatctgcacttattttattataataaggggagtaattggtctgacgtggctctttttggatcaaagcatccgtcaaaaaaaccgttaaccatccccttattataaacattcgattaagcaggtagggatcagctcccgcgtaaccaactaaactgaatggtaataagtgcggctggaacaattactattatcagtttaaggaggtatcagatgacaagcgttggagttgatgtatcaaaaggaaaaagcactatctgtattcttaagccttatggagagatagtgtgcagcccgtttgaggtacaacatgaagaaggggcaatggaagcatttgtggatctgttggcaaaactggacggagagataagagttgtgatggaggcaacaggcatttatcatttaccaatattgacattccttcatgataaaggatacttcgtgtccgttatcaatccgtttgcaatgaagaagtatgcaaagaacaacagtatcagaggcgctaaaactgataagctggattccatgatgattgcgaattatggcattgaaaaatggtataagctccagaaatatgaaggcgacgaagaaacatatgccgagctaaaactactgggacgcaggtatcggtactatatggagcttcatgtcaaagctttgcaagaacttacgcatatcttggattacgttatgcctggcatcaaaaaaatgtttaatagctggaatgaggctaacggcaaagataagcttagtgattttgttgaaaagttttggcatttcgatttgattacatcaaagaaccttgaagaattcacagaggagtacttggtctgggcgaaggaaaagaaataccactgcagcaggtccaaggctgaagcagtctacgagctggcatgcaatggtattcctacactgtcttccgataccccatcgaccaaaatgctggtacaggaagccgtttctgtattgagggctatagatagctctctgacacttattttagcacgtatgcagtcacttgcgaagtcccttcctgaatattcaacagtacgggaaatgggaggtgtcggggatgttcttgcaccgaagctgattgcagaaattggtgatgtgagaagattacatagcgccaaggcactcattgcatgggcagggattgatccgccgccatatgaatcaggacagttcattggatctaagcgaaggataaccaaacgtggatcatcaacgttaagaaaagtaggttatgaagtaatgcgagtccttaagagtcatccagcaccaaaggacgatgctgtttataactatattttgaagaaagaagccgagggaaagagtaagaaacacgcaaaaatagcaggtttgaataaatttctaaggatatattactccagggtaatggaagtttatcagaaataaaaacttatgttgtaaggtgtttcggctggattgtaaccagcttttttagtgtacgcaaaaatataagatcaaaacatttataaaaacctgctcaaaagtacttgacttttgttagcagg

SEQ ID NO: 2863 - DNA, 1650 bp, unidentified
  source 1..1650: mol_type = unassigned DNA; note = element_4102f8f
  misc_feature 1..3: note = core
  misc_feature 4..248: note = LE
  misc_feature 249..1463: note = CDS
  misc_feature 1464..1650: note = RE
cttatacattaaactaagaacaagccgtctcgacacagggctggaacaagtgtactcttgttctatacgactgttgaacgcgccagggaaagtctcggttctccacacggctcgaccgattgagaaagctcgcacttccctggccccgagccttcgctagaccgatcatgagagagtcgcgcttcgagcgccacagtataagggcacgcgtgcggaggcaacctctcttgcagagaggagcatttctcatgtggtacgctggtattgattgggcggacacgcaccatgacgctttggtcatcgatgagaaggggagtcaagtcggttcgctgcgggtcgatcacaccccgcaagggatgagcaagctgaacgcctttttggagcagatcatcggcacggcacccaaagagcagatggcgtgcatcatcgagacgacgcatggtctgttgatcgcgcacctgctggaagcaggctggccagtttatccggtcaaccctcggaccgttgatcgaaggcgttcggcctcgggagccaaaacggatacgattgatgcctatctgctggccaagacgggacgagcggacttcgccgatttgcaccgactcacccctgatagtgagaaggtggccgagctgaaactgctcacccgtgatcaagatgcgttgatccagacccaaactcgtctggtgaatcaactcacggcttgccttaaagcctactatcccgtcgcgttggagttgttcaccaaggtccagcagcacaccaccctggtgtttctgcaaacctatccaactcctcaagccgccaagagtgcctcgacagaacaaatcacgcaagtactcaagaaagcaggtcatcccaatcctttggcagtcgcccccaagatcgttgaacgcttgcagccgccgcatctgcaagccgatgccgtcatcacccgcaccaaatcgcgcttgatgttggccctggtgagtcaactgttgccactcattgaacaaattgctcaggatgacaaggagattgacaccctttttttgacccatgaggaccatgagatttttgagagcttgccacgtgccggccaacgcctggctccgcgactgctggcagaaatcggggatgatcgaaagcgctaccaggatgcaagcagtctgcaagcgttgggtggaacctcgccagtgctgtatcaaagcgggatgtactccaaagcccatcgacggttgggctgtatcaaacccttgcgtaatgccttgcatcaattcgcctggcagacgacgcaaagtgaagcgtgggccagagcctattatcaacgcaagcgcgcagaaggcaaaagccacaccgttgcgatccgagcacttgccaatgtgtgggtcaggatcatctttgccatgtggctgcatcaccgatgctatgagacggccacctttgagcaagcacaacagcagcatgcacgcagagtagcttagatgcctccgatggccttgcatcctttcaagacgagcaaaaaaccctgctgtaagcgaagcggcttgacagccgtgagcggcgtggtacactggctcatgccttgttgaaagcatttctccacctcgcttttcttctgcttttttctcttgctccaaattggtccctaaaaggcttgacatagagagt

SEQ ID NO: 2864 - DNA, 1659 bp, unidentified
  source 1..1659: mol_type = unassigned DNA; note = element_4103758
  misc_feature 1..2: note = core
  misc_feature 3..495: note = LE
  misc_feature 496..1425: note = CDS
  misc_feature 1426..1659: note = RE
  misc_feature 3..226: note = bridgeRNA
ctcgtataataaaatagtagtatttatagaccgctctccagcggaatgctacaatagtttcagggtgctgtggattggtgaggcgttactaccgcaaagacggtttttgggaggctccaaccacagcttctttgttgaaatgttaatcagttagataccgccagacggtttatttagaacgaggttacaagagcaaagaagtctgtggtcctgaacagcatcgaaataaatacgccggaggtatcaaaatggtttgtgttggaattgacgttgccaaggataagcatgactgctgtattcttgattcagacggaatggttcgtgctgactgctttaccatccccaacaacatggatggatttaagcagctgcttcaaacgattcgaaactgcaccaaaaagtcagacaaaataaaaagtaggacttgaggctaccggacattacagctacaacattcttggatttcttcttgacaatgacctggccgtctatgtcatgaatcctttgcacaccaacctgtaccgaaaaagtctcagccttcgcaaaaccaaaaccgatcgtgtggatgcaagaacgattgcaactatgctattgtccgatgtagacctcaagtcctacacggatatagcataccataacgaagagctaaagtcactaacaagataccgattcgataaggttcgtgaaagagccaagctgaagcagtcagtgtccagactggtcacgattctgtttccagaactggagaagctcgttccctctctccatattgcttcggtttatgcgctcctcagtgaatatcccggtgcaaaacagatttcagaaattcatctcaccaagctgacaaaccttcttgcgacagcatccaagggtcgttatggcaaagataaggctatccagattcgagatgctgccagaacttccattggttccgttatgcctgctaaatttctggaactgaagcataccattaaactcattcgggaactcacctccgagattgatgaaattgaagtttctattcagaaaatcatggatgaactgaatccaccgattctttcgattcccggtgtcggtatccagtcagcagccatgattcttgctgaaatcggtgatttttccaactttgaatctcctgacaaaattcttgcttacgctggctgctctccatctacataccagtccggaaaactcacgaactgctatgctcacatggaaaaacgtggctctcgttatctgcgatatgccctttacaacgcaaccaagtacgtctgctactggaatcctgtctttgctgaataccttgccaaaaaacgtgccgaaggaaaacactacaatgttgccctgtcccatgccatgaagaaactcgtgcggctgatctacgctttgcagaagtctggaaaaacatatcttacagctgcatgattttctcctgagcctgagctaattccaacagaaacttagctggcgcagcgaacccttgacgaaccgaagcattcaaatgctattctgtttttgcgagggttggccgggcttgttttgctattctctccgtcgccctcgctgcattgattatggcatttgaatgctgtttgtcaggggcagcagtcggcagacgggatattttttcattttgggcttgactttttaatagttagt

SEQ ID NO: 2865 - DNA, 1618 bp, unidentified
  source 1..1618: mol_type = unassigned DNA; note = element_410e4a8
  misc_feature 1..2: note = core
  misc_feature 3..279: note = LE
  misc_feature 280..1497: note = CDS
  misc_feature 1498..1618: note = RE
  misc_feature 14..299: note = bridgeRNA
ctactacaatatatttatggttaataccccttacagccagtaaggaattatccatcttgttgcttaagctgttagaatgagtatggcaataggtctggcctccttcctttcaggactttacgtccgtagaaaagtcagccaaccagccccctcattcgcagcattcgttttacgcaggttgaaccatgagacgttcgtgtgaaacacccagtagattgaataggcaatgggaaaactggtattgaccattgctaatccatttacaaaggagtatccattatgaacgctgttggtattgatgtttccaaaggcaaaagcaccgttacgatccgcagaccaggcgatgtggtcctcatgccgccccgcgacatcccacacaccaagtccgccatcaatgaattaatcaaacaaatccaaagccttgacggcgagacaaaagcctgcatggaacacacgggcagatactacgagccgcttgccgcctggctttccgacgccggcatctttgtcagtgccgtaaatcctgtcctcatcagggatttcgctgatgattccctccgctctcccaagacggacaaggcggattccaaaaaaatcgcacgatatactcttgaccgatgggcaaaactgaagcaatatggaagcatggataaaacacgcaaccaactcaaaacaatgaaccggcagttcagcttctttatggcacagaaaactgccatgaagaacaacctcattgcactgctcgaccagtcttacccgggcgcgaacgacctctttgacagtcccgcccgcagcgacggcagccagaaatgggtggattttgtttacacctactggcatgtggactgtgtccggggaaaatccctttccgcctttacggagcactatcggaaatggtgcaagcacaagggttacaatttcagtgcggagaaagcggagaaagtctacgaggcttcctgcgacctcattgccgtgttcccgaaagatgacaacacgaaaatgctcatccggcaggctgtcgccatgctaaacaccgcttccgaaaccgtggaaaaccttcggataaagatggacgaaaccgcttctgctctaccggaatatcccgttgtcatggcaatgaacggcgtcggctctacccttggtccgcagcttatggctgagatcggggacgtgacgcgtttcacgcaccgggaagccctaacagcctttgcgggcgtcgatcccggaaagaacgattccggcaaacacgtccagaagagcgtgcgtacctcaaagaaaggttctccccatttgcgaaggacgctctttcagatcatggacgggctaatcaagcgttcgcccattgacgaccccgtttacgtctttatggataaaaaacgtgctcagggcaagccttactacgtctacatgactgccggcgcaaacaagtttctccgtatttattacggacgggtacgggaatacttcgcatcactgcccgaaacgggagaaaactaagcccagctttcatatctttgtcagaccaacgtcctgcggtggtctggtttttgtacttttaattcaacctgtataaatttttcaaagttctcaaatttctgcttgactttttatttgcaga

SEQ ID NO: 2866 - DNA, 1305 bp, unidentified
  source 1..1305: mol_type = unassigned DNA; note = element_4113291
  misc_feature 1: note = core
  misc_feature 2..265: note = LE
  misc_feature 266..1258: note = CDS
  misc_feature 1259..1305: note = RE
  misc_feature 55..250: note = bridgeRNA
cctttggttttacaaagatagtttttggtaaatattgttgttgttggaaatggggggtccggggggtgttaagaactaaaaactttgtggaaaacgttattataaaaggcagggtgaactatcgccggttcgagtttaaagaactatcgcttgtataagtccctgccttttatgattgcccaaggcctaactagaatactcactttgcatcaacaaaggtaattggcaaaaggcaatttattaacgtacactaaaaggcaaacgtatgaaaagctggaatgttattttaggtgtcgatgtatcaaaattaacactcgacatcgcttgtgcagaacgtagtatatacatccaaatcgagaataactctaaaggatttgatgtatttaaaaaatggtgtaaaagccatggaattgatttaaaagagaccttggttgtgttagaatatacaggtggctatgaataccggttcctgcaattctgtgctgctaaatcaattccatactgccgtgtaccagggttagaaattaaacaatctatgggtatggtcagaggtaaaagtgacaaagcggattctttccgaatcgcagaatatggcgaggacaaaaggaatcggctggctccgtctaaaccattggatgataacgttttgaagctaaagggattgctatcgtttcgtaaaagactggttcgggataacgcagggctgaaaagcaccgaaaaagagcggcagcatatgtatcccgtaaaacaaagcgacaaaattgtccgtatttgcacagcaaagataaaagcaaatgaaaagtttattgtccaggtggaacaagagatcagagaattgattaaaggcaatgaaaagatgttgctaaactaccggataataaccagtatcaaagggattggagaagtgaacggatggatgactatagcctacaccgagaattttaccagctttactgatgcccgggcatacggggtgtatgttggggtgatcccgtttggacatgggtcaggaacaagcataaaaggccggccacgagtcagccatttagcaaataaagagttaaaatcagagcttaaccaagcagccaaagcggcaataacatatgataaggaaatgcatgattatgctgaacgaaagcttaaaaacaaagattataggctggtattgaataacgtaaaattcaagctgatcttaagaatgttctctcttgtaaaaagaggtgaaatgtatgtggaaaactacaacagagcggcttaaaaaaatctattttaaattaaatttggaaatatgccaaacctagaata

SEQ ID NO: 2867 - DNA, 1471 bp, unidentified
  source 1..1471: mol_type = unassigned DNA; note = element_41180da
  misc_feature 1..7: note = core
  misc_feature 8..282: note = LE
  misc_feature 283..1458: note = CDS
  misc_feature 1459..1471: note = RE
  misc_feature 26..246: note = bridgeRNA
agtccttaagttcgtagttgcagtttcttcgtgttgttgaggcagttacgttgggctgtgacccgggtgggtcgggtgtggctgtggtgtgtgttgccggccccttggtgcggcttgaaaggactggccgcccggcctgcctggacttctctggccgctgattgagatctgcgatgtgatcgcttgtttaaggaaatgctggcggggttgtccttggggatcatgttggcagacaagcgaaaagaggtgtgatggcggcgggccaggtgtgggctggagtggatgtcggtaaagagcatcactgggtatgtgtggtcgacgacagcgggaaggtggtgttgtcgcgctcggttggttaacgatgagcaaccgatccgagagctcgtggctgaaatcgacgagctggccgagcgagtgttgtgggcggtggacctgaccacggtgtatgccgccctgttgttgacggtgctggccgacgctggcaaaacggtccggtacctggccggccgggcggtgtggcaggcctcggcgacctaccgcggtggggaggccaaaaccgacgccaaagatgcacgggtgatcgccgaccagtcgcggatgcgcgggcaggacttgcccgttctgcatcccaatgatgacttgatcagcgagttgcggatgctcaccggccatcgcgccgacctcgtggccgaccgcacccgcacaataaaccggctgcgccaacaactcgtcgcggtctgcccggccctggaacgagccgcccaactgagccaagaccgtggctgggtggtattgctggcgcgctaccagcgtcccaaagcgattcggcaaagcggtgtttcgcggctgaccaaagtcttgaccgatgccggtgtgcgcaacgccgcctcgatcgcgggggctgcggtggccgcggtgaaaacccagacggtgcgtctgcccggcgaagaggtggccgccgggttggtcgctgatctggcacgggaggtgattgccctcgatgaccgcatcaagaccaccgacgccgacatcgagggccgatttcgccgccatccactcgccgaggtgatcaccagtatgcccggcatgggatttcgactcggcgccgaactcctcgctgccgtcggtgatcccgcactgatcggatcggctgaccaactcgcggcctgggccggcctggcaccagtgtctcgagactccagaaagcgcaccggacgactgcacacccccaagcgctacagtcgccgactgcgccgagtcatgtacatgtcggcgttgaccgcgatccgctgcgacccagattccaaggcctactaccagcgcaaacgagacgaaggaaagcggccgatccccgccaccatctgcctggcacgacggcgcaccaacgttctctacgccctcatccgcgacaaccggacctggcaacctgaatcacccccaaacatcgcggcggcttgacttcttcattgag

SEQ ID NO: 2868 - DNA, 1155 bp, unidentified
  source 1..1155: mol_type = unassigned DNA; note = element_41192ac
  misc_feature 1..2: note = core
  misc_feature 3..207: note = LE
  misc_feature 208..1143: note = CDS
  misc_feature 1144..1155: note = RE
  misc_feature 12..209: note = bridgeRNA
cttgtcttatgagttttttggtttccaaggcaaaagggagccactgcacgccactttgcgtggtggatggtggcgggggaaggatcggtcaataataaggtcgtaaagggccgaatatgagtttggtcacccccgtcttttctatcgacctgaacggataccagggctctgaggcccgcatgacaagaccaggtggagaatagacccatgcgacagacaatcggcattgatgtttcaatggatactctggacgcttaccgactgtcggacggagagcatatccaggtaggcaatgacaagctgggccacaggactctgatccgatggcttggcaaggaccgtggtcctcttgtggtatttgaagccacaggcgcatatcaccgacagatggaaacggcgctcgcagctcgtactatacctttcgtcaaggtcaatcctcgacaggcacgcaggtttgccgaagcgaccggcaggctggctaaaactgatcgcgtcgatgcgatcatgctggccaggatgggagctgttctcgagcttgaagcgcagaagcccaggagcgagaacctccatgaactcaaggaattaatgaccgcacgccgagccctgatcaaggaccagaccgcggcaaggacacggcttgctaccacgactctgtcgctgatcaagcgccagatcaatgcccgccttctgcaaatcaccgaacatgtgcaacagatcgatgcggccatgaccaaaaaactcgcacacgatgatgcgatgtcccaacaactggctattctcgtcagcattcccggcatcgcggcaaccacagccctggcgatgctcatcgaaatgcctgaactgggcacgctcgacggaaaacaggctgccagtcttgccgggcttgccccaatctcgcgtcaatcaggcaagtggcaaggcaaggaacacatccggggtggacgcccgctgctgcgtcgagccatctacatgcccgcactcgtcgcggtccgcttcaatcccgctctcaaggtaaaatacgatcagctcatccaggctggaaaacctgccaaagttgccctcaccgcaatcatgcgcaagctcatcgtcatggcgaacgccttgctgcgtgacaggcgcaagtggacggaaattaacccttgacgaagacggata

SEQ ID NO: 2869 - DNA, 1636 bp, unidentified
  source 1..1636: mol_type = unassigned DNA; note = element_412ed2b
  misc_feature 1..2: note = core
  misc_feature 3..205: note = LE
  misc_feature 206..1480: note = CDS
  misc_feature 1481..1636: note = RE
ctggtatattgtaattgactcatctaacggtcacttacaaatgtaccgggtcttttttataaaccttttaatctatggttgattacggtgttatacatttgtatgatgtaaaatatgtgatgtggatttgtaactccggacctgtagctttgactactttatgcaggctcttaccacaccttatttctaaataatgattagttagatgagtcttgaattcgtattttgtaccaggttttacgaaataagtgctgtggatatcacattacatattttacgaaaggaatgtatgatcatgattttagtcggaattgacatcggtaaaaaccaacacaccttctccatcattgacaagaatactggagaaatactctctaatccttccttttttcctaataatcgggaaggattcctgtttcttatcaaaaagctaaacacgtattctaaatcagaccttttaatcggcatggaagacaccggacattatcactttgctttactcaaacatcttcttgacagtcgttatactgttgctctgattaatccaaccactaccgatcttaccagaaaacttcaaggcggcatcaccaaaaatgatcctcttgattctcttactatttgtgatgtaattggttctaatcaacataacaaaccatatcgtattacaaaagtgaatcgctttgacctttatgaacaaaagcagttgacacgccatcatcacaacctcaaagaagaattaaacacatacaagaatcgacttcagaaatgtattgatattgtattccctgaatttaattccttattccgttcaaagtacggcatcgtttacatgaatgttttgaaaacattttcttctgctgaaaaaattgcaaactccgatattcgaactatccggaaatgttttgaatataataagcgcggaaaacgcatttctctttcggccgagcagcttaaagcagcagccaaaacttccatcggcatgccttctgttgctgaagaaattcagatcagacatcttgtatgtcagattgagatgatagaagaacaactttctgaaatagacaaaaagatagaagagttctccttacaaaacaactctcctatcctctccataccaggaatttcacacttctctggtacgtccattttagcggaattaggagatatttgcaactatacaaaagcagcgcagataataaagtttgcaggtgttgcaccgtatcactatgaatccagccaatttaacgctcagcacactgcaataaccaagaaaggttccaggtatcttagaaaaacactatatcagattatttttccggttatctatcacaacaaggtctttaatgtttattacaacaaaaagttggccgaaggcaaaggacacagatgtgctcaggggcattgtgtcagaaaacttttaagaatcatctatcaccttttaagtaccggacagatctttgatcctgctttactgagataactaactatacatacaacacaacttatataatcagccttctttgaaaggtctatttgttgtgccacaaaatccataattattcacatattttcaaagtacatatttttgctcagtaaaatttaaattttaaaaaacacttgatttttatatagttag

SEQ ID NO: 2870 - DNA, 1487 bp, unidentified
  source 1..1487: mol_type = unassigned DNA; note = element_4133452
  misc_feature 1..2: note = core
  misc_feature 3..243: note = LE
  misc_feature 244..1467: note = CDS
  misc_feature 1468..1487: note = RE
ctaatgagtgttagcgagcctgctgtccggcagactcggggtgtggtggccgccggcaggtgagcacttggttgtcctgggcttcgagccctgacgaaagaccgtgcccctgccggtgaccgggaggattgatcgctgctgggatgtcgtgcccgccgggtggcgtgagcaccgcttcattaggtcgctgatggttctcccgctggctgctgacatgtttcgacattgctgacgggagcgccggtgcggctgttcgcaggagatgactgggctgaggactatcacgacgtggaggtgatggacgaggccgggaaggtgctggccaagcggcggctgcccgggggcgtggccgggatggcgcagctgcacgagctgatcggccggcatcttggcggggatggcgaggataccgaggtggtgatcgggatcgagactgaccgcggcccgtgggtcgcggcgctggtcgccgccgggtacacggtatatccggtgaacccgctgcaggcagcccggttccggcagcggcacggggtgtcgggcgccaagagcgacgatggtgaccggcatgtgctcgcggacatggtgcgtaccgacgcgcatcagctgcggcctgcggccggggacacacccggggcggcggccatcaaggtggtggcccgcgcgcacaagacgctgatctgggagcggacccggcaggtgcagcggctgcggcaccagctgcgcgagtacttccccgccgcgctggcggccttcgaggaccttgacgcccctgaggtgctggaactgctgggcaaggcgccggatccggcggccgcggcgaagctgacccgcgcgcaggtctccgccgcgctcaagcgcgcccgccgccgcgacatcgcgggcaagaccgacgcgatgctggccgcgctgcgcagcccgcagctgggccagccgccggtgctgagcgccgcatatgccgcgtcggcccgggcgctgatcgcggtgatcaccgtcctcaatgagcaggtcaaggccctgcaagggcaggtggaggcacattttggccagcacccggacgctgagatctaccggtcccagcccggcatcggtgccgtcctcggcgcccgggtactcggcgagttcggcgacgacccgcaccggtacgccgacgcgaagtcccgcaagaactacgccgcgaccagcccgatcacccgcgcctcgggcaagaagaagattgtcgcggccaggttcatccacaacagccggctcgtcgacgcgctcatggcctgggctttcgcgtcgatgaagggatcgcccggcgcccgcgccttctacgacgagcttcgcgcccgcggcatcgaacacaatgacgcactgcgccggctggcgaacaggctcgtcggcatcctgcacggatgcctcaagacccgcacgccctacgacgaggccaccgcctggtctcatcgcgaatcctcgcttgccgcttgacatttaagctcctgggatgt

SEQ ID NO: 2871 - DNA, 1328 bp, unidentified
  source 1..1328: mol_type = unassigned DNA; note = element_413f7d2
  misc_feature 1..2: note = core
  misc_feature 3..68: note = LE
  misc_feature 69..1073: note = CDS
  misc_feature 1074..1328: note = RE
  misc_feature 1095..1326: note = bridgeRNA
ttaatgagatggtcactccctccttcccagtactatgctgaggacaggctttcattcggagaaccatcatggaaaacattgcgcgtattggtatcgatctgggtaagaactctttccatattcattgtcaggatcatcgtgggaaggccgtttaccgtaaaaaattcacccgaccaaagctaatcgaatttctggcgacatgcccggcaacaaccatcgcgatggaagcctgtggcggttctcactttatggcacgcaagctggcagagttagggcattttccaaagctgatatcaccgcaatttgtccgcccattcgttaaaagcaacaaaaatgacttcgttgatgctgaagctatctgtgaagcagcatcacgtccatctatgcgtttcgtgcagcccagaaccgaatctcagcaggcaatgcgagctctgcatcgtgtccgtgaatccctggttcaggataaggtgaaaacaactaatcagatgcatgcttttctgctggaatttggtatcagcgttccgcgaggtgctgccgttattagtcgactgagtacccttcttgaggacagtagtttgcctctttatctcagccagttactgctgaaattacaacagcattatcactatcttgttgagcagattaaagatctggaatctcagttgaaacgaaagttggacgaagatgaggttggacagcgcttgctgagtattccctgcgttggaacgctgactgccagtactatttcaactgagattggcgacgggaagcagtacgccagcagccgtgactttgcggcggcaacagggctggtaccccgacagtacagcacgggaggtcggacgacattgttagggattagcaagcggggcaacaaaaagatccgaactttgttggttcagtgtgccagggtattcatacaaaaactggaacaccagtctggcaagttggccgactgggtcagggagttgttgtgtcggaaaagcaactttgtcgtcacctgtgctctggcaaacaagctggccagaatagcctgggcactgacggcgcgacagcaaacttacgaagcataaaggcagaaatacaccagtttaaacaatcattcatctggttttgcgaatactgatattgatgatactaacggcccaccggcctgttgaggaacctgtaaaacggaaaggctcattgaagccgtatattttctggaggttcatcaggcgcggaactcatcgaggcgcgggaataaaatcccattcagacgccggatagattcaagcaagccaacttgtcgtcaaaatcggtgttgcaaaaacgggagtgaccataga

SEQ ID NO: 2872 - DNA, 1390 bp, unidentified
  source 1..1390: mol_type = unassigned DNA; note = element_41428a9
  misc_feature 1..2: note = core
  misc_feature 3..88: note = LE
  misc_feature 89..1117: note = CDS
  misc_feature 1118..1390: note = RE
  misc_feature 1088..1377: note = bridgeRNA
agatgggatggttgccgccctccccggacggcatcgcaatgtgccaagatggtggtgttgaaagccacgaagcgaggaggacgacgagatgaaggatacgatgatcggggtggacctagcaaagcgtgttttccagctccatggggcggcgatgacgggggaggtgaagttccgcaagaagctgtcacgggagcaattccgggccttcatggccacgcagccagctgctttggttgtgtttgaggcctgcggaagcgcgagctactgggcccgggagatggaagcgcttggtcacgaggtgaagctgatcgcaccgcaatacgtgcgccccttcgtcaagcgccagaaaaacgatgcggcggacgccgaggctatcgtgatcgccgcgcgccagcccgagatgcggttcgtggcgccgaagacggtggaccagcaggcgaaggcggtgctgttccgcggccgcgagcggctcgtccaccagcgaacggaactcgccaacgcgctacgggcggtgctctacgaatacggccatgtctttcccaccgggctctgccacctgaagcgcatggaggcggtgctggaggatccacactgcgaccttcccgcccttgtcatcgtggagtgccaggatctgctggcgcagattgctgagaaaacagataggatcgaggccaagaccaaggccctgaaggcgctggcggccgagaccgacacagcgcggcgcctacagacgatgccgggcgtcggcccgctgacggctttgacggtcgaggcgtttgcgcccgacatggcgcagttcaagtccggccgcgacttcgcggcctggctggggctggtgccgcgccagcactcaaccggtggaaaggcgcgccttggatggatatccaaggccggtcagagcgacatccggcggcttctgatcgtcggtgcaatgtcccgactgaactggctggggcgccgcacgatcgtgccgggctcatggcttgcaaggatgctggcccgcaagccgaggatgctggtcgcaatcgcgctggcgaacaagatggcccgacagatctgggcgatgttgacgaagaacgaggactacagggatccggcgctggcggctgcggcatgaacttcatggagtagtcgcctggcgacggcgccaaggggcgtgtgagaagacgacgacttgaatgggcaaatgatcgaccagatccggatcgggaaaaccagcttgcggctacgtgcgaacagcacgctcttcagatttggacccgacccgctgatctccataccggcccgcggcttctggacgtgccgcacatcgaggcctgaaagaagaccgcactcgatcacacgccgacaagagtcagaatcttcttgcatgacgggcggcaaccaaaga

SEQ ID NO: 2873 - DNA, 1496 bp, unidentified
  source 1..1496: mol_type = unassigned DNA; note = element_41479a5
  misc_feature 1: note = core
  misc_feature 2..110: note = LE
  misc_feature 111..1127: note = CDS
  misc_feature 1128..1496: note = RE
  misc_feature 1185..1463: note = bridgeRNA
gaatgaaagggacttccccgtcccgagctagccgcggtgagcggcaaacggcaacaagtgccacgatggggttgcgaaatctcatcaactcactctgaaaggggaagtccatggccattgtctgcgtcggcatcgatctggcgaagaacgtatttgccctgcatggggtggatgaggcgggcaagcccgcgctggtgcggcccacggtgccgcgcgcaaagctgctggaggccatcgccgcgctgccgccgtgcctcgtcgccatggaagcctgctcgggcgcccaccactgggcgcgcgagttccaagccttgggccacaccgtcaagctcatcgccccgaagtttgtgattccgtaccggctctcgggcaagcgtggcaagaatgatgccgcagacgccgcagccatctgcgaagccgcccaacgccccagcatgcgctttgtgcccgccaagagcttggagcagcaagggcagctgtgcttgcaccgggtgcgacaaggcttcatcgaacagcgcactgcattgatcaaccgcattcggggcctgctcagtgagttcggcatcgtcttgcccttgaaggccgccaccgtgcggcgagaagccctcttgcacctggaagacctgcccggctgggccaacctggccgtgggggattgcctgagcgaagtggggcggcttgacgagcgcgtccacgagtacgaccgtcacttggcgcacctggcccgcgagaacgaagccgccaagcgcttgatgcgcctgtcgggcattggcgagaccacggccaccgcgctcactgcggccatcggcaacggccacgacttccaatgcgggcgccagttcgccgcttggctgggcttgacgccgggacagtacagctcgggcggcaagacgcggctggggcgcatcaccaaagcaggtgacgcctatctgcgcagcctcctggtgctgggcgcgcgggcggtgctggcggcggccaaaaacaaagccgacccgatcagtcgctgggtgcgaaacgtcgaagagcggcgcggctattggaaggcggtggtggccatggcggccaagaacgcgcggctggcctgggccgtgctggccaagggcgacgccttcaagctcgcggtctgaaccgcaccgagccacccgatccaccccggcaaccggagactacccccccccaacaaacattccgccgcgtgaccggcctgtcgttgatgagcaaggttggacctgtgcggggcgtgcctgattaactcaagggagcgggaaaccggctccggctaacgaatgaggcccccgcgcgcgtcttcacatcagggtccgcagcatcgaaaagctgcacgaatgaccgtttgtagtaacccaagtccgcacttgctctgtgctcagcgaaccggccccaatcgcgttggaaatccaactgcaaaccccttgatgaatggctgcgccattcatcagggctgaatattgcttgcaattagtggggaagcccttgta

SEQ ID NO: 2874 - DNA, 1407 bp, unidentified
  source 1..1407: mol_type = unassigned DNA; note = element_4148f73
  misc_feature 1..2: note = core
  misc_feature 3..220: note = LE
  misc_feature 221..1321: note = CDS
  misc_feature 1322..1407: note = RE
  misc_feature 14..235: note = bridgeRNA
caacttgttgaattgggagcaagagagcgtggcctgcagccatgcttctctaggcggtggccggctccgctcgacgcgcacctgtcaccggtaggggttgacttagtagtgacctgcgtccggtcatcgccgcaaacgaggagtggcttgagagaggcctgctaagccgaaagttgatgtgccctcctcgctttcaacatatcgaagtgaggagtgagacatgtcagcggtattaaccatcgaccgacgggtggtgatcgccatcgacccccacaaagcgtcgtggaccgccgtcgcagtcggcgagtctctgcagcccttggccaccttgcgggtatcggtcagccgggacggctaccggtcactgcgccgcttcgcgcgcgcctggcacgccagcatgtgggccatcgagggggcgcacggaatgggcgctccgttgaccgcccagctggtccacgatggagtggacgtcatggacgttcccgccaaactcgctgcccgcgtacggcttctgtccaccgggcacggtcgtaagaacgacgacgccgacgccgtgtcggtcgggatcgccgctctcaacgccgcccacctcacgacggtcaccgtcgatgacgccgcgaccgcgctacgagcaatagtcgaacaccgcgaggatctggtgaagacccgcactcaaaccatcaaccggctgcacgtcctgctcaccaagctgagccccggcggagcatcgggcactttgaccgccgaacgtgccgctacgctgctaggcgcgatccgtccccgagatgccgccgctaaggcattgcgcgccttggccgtcgacatggtggccgaagtccgtcacctcgaccgccgcattgccaaggccgctggcgacatccagtccgcggtcaccacctcgggcaccaccctcaccgagctgcacggcatcggaacagtctcggccgccaagatcatcagccgcgtcggacacgtccaccgattccgctcagcagccgccttcgccacctacaccggcaccgcccccatcgaggtgtcctccggcgacgtcgtccgccaccggctctcccgcgcaggtgaccgccagctcaacgcctgtctgcacgtcatggcgctcacccagatccgctccgacacccccggccggacctactaccagcgcaaacgatccgaagggaagagcaaacgcgaggccatgcgctgcctcaaacgacgcctctccgacgccgtctaccgacaactaacccgcgatgcccacccagacgaggcggacccgggaggacactcgggggcgactctgttgtctcgcgcgatcggctaataccccgtacaccgacacttcagacaagtcacttcccgggcccgcaatcacacgctacaaccaacacccttgacacagagaggcgt

SEQ ID NO: 2875 - DNA, 1936 bp, unidentified
  source 1..1936: mol_type = unassigned DNA; note = element_414e38a
  misc_feature 1..3: note = core
  misc_feature 4..274: note = LE
  misc_feature 275..1513: note = CDS
  misc_feature 1514..1936: note = RE
  misc_feature 13..294: note = bridgeRNA
ctactacaatatatttatggttgataccccttacagccagtaaggaattatccatcttgttgcttaagctgttagaatgagtaaagcaattggtctggccttcacctcccaggactttgcgtccgtagaatagtcagccaaccagccctcattcgcagcattcgttttacgcaggttgaaccttcccgttcgtgtgacacacccagtagattgaacaggcaatgagtaaaactggtattgaccattgctaattcttttcaaaggagtatctcttatgaacgctgttggtattgatgtttccaaaggtaaaagcactgtcaccatccgcaggcccggcgatgtagtcctcatgccgccctgcgacatcccccacacccaatccgcaatcagcgccctgatccaacagatcaaagagctggatggggaaacaaaggcctgcatggagcataccggcaggtactatgaacctgtcgccacatggctttccgatgccggtatctttgtcagcgccgttaaccctatcctgatcagggacttcggggatgactccctgcgtgctcccaagacagacaaagccgattctaaaaaaatcgcacgctacactcttgaccgatgggcaaaattgaagcaatatggaagcatggataaaacacgcaaccaactcaaaaccatgaaccgtcagttcgggttctacatggaccagaagaccgctatgaagaacaacctcattgcacttcttgaccagacctatccaggggcaaatgacttctttgacagccccgctcgcagcgacggcagccagaagtgggtggattttgtctacacctactggcatgtggactgcgtccgcagcaagtcgcttcctgcatttactgaacattatcagaactggtgtaagcgcaagggctataacttcagcgcagataaagcggagaaggtctatcaggcatcctgtgacctcattgccgtgtttccgaaagacagcaacacgaaaatgctcatccggcaggctgtagcaatgctgaacactgcttctgaaaccgtagagtccctccgccggaggatggatgagaccgctgcaacactgccggaatacccggttgttctggcaatgaacggtgttggccctacccttggtccccagctcatagctgagatcggggatgtgacccgttttacacaccgtggggcgctgactgcttttgctggcgttgatcccggaaaaaacgattccgggcagcacgtccagaaaagcgtgcgtacatcgaagaaaggctcaccgagcttacggaaaactctctttcagatcatggacagtctcattaaacgttcccctggggatgacgctgtttacgcctttatggacaagaaacgggcacaggggaagccttactatgtttacatgactgccggtgcaaacaagtttctccgtatttattacggacgggtaaatgaataccttgcttcactggatcaggcccccaaagggaaggagaatacggatggagtataaaatgcatcccggtgaggtaacgtttcagtacctcgtccgtaaaggcatgcctgtcatagccgggttcctttctgagaaagatgccgctgactatgccctgtccgtcggtgggactgttgtaaaagctgccgggaacccacgcaatgccggaaggatcccaaaattctccgatcgtgagaaagatgccatcagggagctgatctcccaggacatccccatgcgccgcatcgctgaagaattcaaatgctctgtaggctatgttcataaattaaaatgtgaacatcccttatagcagtcgcaaaacataactttccatttcctcttaagccagcgggtgacggtggcttagtgtttatgccctaatttcaacctgaataaaattttcaaagttcacaaatttctgcttgactttttatttgcaga

SEQ ID NO: 2876 - DNA, 1398 bp, unidentified
  source 1..1398: mol_type = unassigned DNA; note = element_4154ef2
  misc_feature 1..2: note = core
  misc_feature 3..89: note = LE
  misc_feature 90..1121: note = CDS
  misc_feature 1122..1398: note = RE
  misc_feature 1092..1382: note = bridgeRNA
agatggggtggttgccgccctccctcgacggcatcgcaatgtgccaggatagtggtgttgatggccactgaacgggaaggacggcaaccgtgacgaacgatacgatgatcggcgtggatttggcaaagtctgttttccaactgcacgcagcctcggcgaccgggcagcttttgtttcgaaagaagctgtcgcggtcggcgtttgcgaaattcatgtcggagcatccgccagcgaccgtcgtgatagaagcttgcggcagtgcgcattactgggctcgcgagttggctcgatacgggcatgaggtaaagttgatcgcggcgcagtatgtgcggccgttcgtgaagcggcagaagaacgatgcggcggacgccgaagccattgtcatcgcggcacagcggcccgagatgcgctttgtagagcccaagaccgccgagcaacaaagtcgagccatcctgtttcgggcccgcgaacggctcgtccaccagcgcaccgaattgatcaacgcgcttcgggcctgcctttatgagtatgggcataccgttccgcagggaatgcaccagatcaagcggatcggcgagatagttgacgcgccaaatagcgatctgcccgctttgatgcgcgaggagtgtgcagagctgctggcgcaaattgccgagcagacggtgcgtatcaatgcccgaactgcgaagatcaaggcgctggcagctgaggccgatacggcgcggcggctgcagaccatccccggcgttggccccttgaccgcgctggctgtcgaggcgtttgccccgcggatggagaacttcaagtgcggtcgtgactttgccgcctggctcggccttgttccgcgccagttctcctcgggcggcaaagagcgcctcgggcgcatctcgaaggctgggcaagctgatatccgcaggctgctgattatcggcgcgatgtcgcggttgaaccgactggggcggaaatcgatcccggaagcttcgtggctggcacgcatggtagcgcgaaagccccggatgctcgttgcgatcgcgctggccaacaagatggcgcggacgatctgggcactgataacgaaaaatgaggattatcgagttccgacgcaggcagcggcggcatgagcgacatgcaaccaaccctgcctgacgccggataatggggggagcaagaaggcgacgacccgaatgggcaaaatgatcgaacagatctgaatcaggaaaaccaggtgaatgacgagagcattgcagctcgacggttagatttggacctgatccgcagattaccataccggccagcggcttctgaaatgccgcaatcaaaggcctgacagaagaccgcactcgatcacaacccaccggatccgaaacttcttgcttcacgggcggcaaccacagaaga

SEQ ID NO: 2877 - DNA, 1168 bp, unidentified
  source 1..1168: mol_type = unassigned DNA; note = element_415603b
  misc_feature 1..2: note = core
  misc_feature 3..160: note = LE
  misc_feature 161..1156: note = CDS
  misc_feature 1157..1168: note = RE
cttgtattaacgagatttggtattctgcgatcgttccatgaggaacgcccactccgggtagccgcccggagtggggcgccggtcgtcggatcgagcgctcctcctgagcctgttgggctgttggtgagcaggatcgcgatcggctcttcatcagacccggatggttgaaggaaccgagggttcgcatcacaaggaagggatgacgaagatgatccagcctaccacaatcgcggccggaatcgatatcgccaaggctaaattggacgtcgccatcgatggctgcaaacaacactgggaggtatcgaacgacccggccggcttcctgcaccttgccaagctgctgcgctcccgcaaggtcaatcgcgtcggtctggagcccaccggtggctacgaacgagacgttactgagtatcttcgtagagctggcttcaccgtcttcttgctgcagccacgccaggtgcgcgctttcgcggagtccatgctgcggcgcgccaagaacgaccgcatcgatgccagcctgatcgcagccttcacggcgctgatgaagattacacgcgaagcgccggatcccagatatgcaccgctggccgatgttctcgtcttcgtcgaacagatcgaggaggacatcaagcgtatcaagacccgccttgaacatgctcgtatcgccgagcatcgccgcttcatgctcgacgacatcaagcgtctcaaaatgcggcgctccaggatgctggcaaagctcgaagccgcggtgcgcagccacgacgatatcgccgaacgactcaatctcgtccggagcatcgacggcatcgccttgcgaatcgcgcttgcgatcatcgtctacatgcccgagcttgggaaactgtcgcgcgagcaagccgccgccctcgcaggcgtcgccccgttcgacgataacagcggcaaacgctgcggtgaacggcacatctggggtggccgtgcccggctgcggaccagcgtctatgccgcgactttgccggccgctttccgctggaacagccaacttgtcgacctctaccggcggctcatcgccgctggaaaagcccacaaagtcgcgctcgtcgcctgcaccagaaaactcatcatcttcgcaaacaccgtcctggctcgcggcactccatgggtcaaagtcaccgtctagacttaatggttg

SEQ ID NO: 2878 - DNA, 1602 bp, unidentified
  source 1..1602: mol_type = unassigned DNA; note = element_415dafc
  misc_feature 1..2: note = core
  misc_feature 3..311: note = LE
  misc_feature 312..1481: note = CDS
  misc_feature 1482..1602: note = RE
cttgtatgatagatatataaataattatataaaataccacacactcctttctttatatttcttatttttttcttttctgttcctattgcttttctcttcccttattttgtataattattttagggaaactgcggactttttatttttcttaaggagctctcgctacttttcaatggagattattgccgctgttttatctttaacccttatagttggataagtttttaaatttttatgtttagcaagaatgcgcctgataaaactttgcggttcctacagttcccctatttcttcttaaaggatgtgatcttatgttttttttaggcattgatatcgccaagctcaaccacgttgcttcccttgtttctgacaacggaaatatcgttttttctaattttatgttcaaaaacagtcttgagggctttctttccttaattgataaagtaaagtccatccctaaagacgacattgttattgctcttgaatttactggacactattctgacaattttgttaatttcttctttaacagaaagtttaatgtcactctggtaaatcctgcaaatgtcgccaatttcagaaaatcttatggcagggattctaaaaatgacaggattgattccatcaatatcgctaaaatgctgctttcccgtgaatactctcttgttacgcagagcgatattgaatatctttcattgaaaaaactcaacagaatcagagattcccttgtcaagcagaaaagtaaatgcaaaattttgctgaccagaaatctcgattccatattccctgagcttcacctgctgccttcaggcatccattctaaagctgtctatgcccttttgaagaaatatccttcttcagaagaaatagccgccttaggaattgatgttttaacaaatattttaaaaactaattccagggggcatttctgtgaaaagactgcctgtattatcaaaagtcaggctaaatcttctgtcggttttgaggacatctccttaagttttcatatttcacagctgatttcctctattgagctgctggaagagcagataaggaatactgaaaagcagatcaatgacatcattgaaaagcttaaacctgttattctgtctattcctggcataagcaatgttgcctgtgcctgcattctgggagaaatcggaaatatatcaagattccgttccccttcaaagctattagcatttgcaggtttagatcctaaagtcagacagtcagggcagttcagagccttatcatgccgaatgtcaaaacgtggctcaaaatatttacgatattccctaatctacactgcctggaatgctgtccgaaacaatgaagttttcagtaattactatgctcttaaacgttcacaggggaaaaatcattacaaggcactggggcatgttgcccataagcttgtaagagttatttacagacttatgaaagataatattccatttgatgctgagcagcttatttaaaaaaactatacaaaatatctaagaaaatctattttcaataggttaatttaaattcgcccaaaattcaagatcaaaaattttaaaattttttttaaaaagggcttgacaattcatagttgat

SEQ ID NO: 2879 - DNA, 1490 bp, unidentified
  source 1..1490: mol_type = unassigned DNA; note = element_415e4bc
  misc_feature 1..2: note = core
  misc_feature 3..360: note = LE
  misc_feature 361..1470: note = CDS
  misc_feature 1471..1490: note = RE
  misc_feature 6..241: note = bridgeRNA
ctaatgagatgtagcgggcctgccgatacggcagactcgctgctggtagcggctggcgggtgagcactctgcgcccccgggacatcgagtcctgaaaaaagatcgtgcccccgccggtcgaccaggagaacggatcgctgctgggatgtcgtgcccgcccaaggcgtgagcacttttcattaggtcgccgggtgttctcctgaacgctaccgatatcgaaagctgttgatagacaggaggactgctggtgctattcgtcggagacgactgggcccaagaccatcacgacgtggaattgatgaaccaggcaggcaagagactggcccgagcccggctatccgaaggcgtcgaatcacgcgattgcacgcactgatcggcgaacacctcgatgtcggcgccgcagaagatgccgtagtcatcggcatcgagaccgaccgcggcccatgggtcgcggccctggtcgccgccggctactcggtgtatgcagtcaaccccttgcaagctgcacggtaccgagacaggcacacggtctccggcgccaagagcgatcccgccgatgctcacgtgctggccgatatggtgcgcaccgactcccaccagctacggctcgtcgccgcggacagcccgcaagccgaggcggtgaaagtagttgcccgagcgcacaagacgctgatctgggaacgtactcgaaccacgcagcggcttcggcactcattgcgcgaatacttccccgccgcgctcgaggcattcgatgacctcaccgcatccgacgccctggaactgctggccaaagcgcccgaacctgttgcggcagcgcggctatcgcgcaaccagatccgtgccgcactcacccgggcccgccgccgcgatatcgacaccaaagtcactcgcgtccaagcggcactgcgagccgaccatctacgtcgtgaccaggtgatcgatgccgcctatgcggccaccacacgcgcctcgatccaaatcctgattacgctccaagaacagatcgccgaactggccgcgcaggtggaagcctattttggtcggcacccggatgctgagatcgtcctgtctcaacctgggataggcgtcatcctcggtgcccgggtgctcgccgaattcggagatgcccgcggccgctacgcctcggccaaagcccgcaaaaactatgcgggcaccagcccgatcacccgcgcctccggcaagaagaagatcgtcgccgcccggttcgtccacaacgaccggctcatcgattcactggcccagcaagcgttctgcgccctgaccgcctcacccggtgcccgcgcctactacgaccggcatcgcgcccgcggcatggaacaccgcgccgcgctacgccaactcgccaaccggctcgtcggcatcctccacggctgcctcaagacccgcacaccctacaacgaggccaccgcctggacccccggcgtcgccgaccaagccactactgcttgacaatctaagccctgggatgt

SEQ ID NO: 2880 - DNA, 1359 bp, unidentified
  source 1..1359: mol_type = unassigned DNA; note = element_4164e51
  misc_feature 1..2: note = core
  misc_feature 3..76: note = LE
  misc_feature 77..1102: note = CDS
  misc_feature 1103..1359: note = RE
  misc_feature 1078..1346: note = bridgeRNA
tgatggggtggacgccccctcacggcatcgctgtgccaaagtggtgtcgttgaccatcacttgaacggaggcgtccatgtcggaagttagcataatcgggttggatctggcgaagaatgtgttccagatgcacggcgcggatgcatcaggagccgtgcttttccgcaagaagctgcgccgggaccaagtgcgcaaatttcttgccgcgcagccggcttgcacggtcgccatggagacctgcgccagcagccattactgggcgcgcgaaatcgcgaggctggggcatgaggtgcgactgattgcgccagactatgtaaagcctttcgtgaagcggcagaagaatgatgccgccgatgcggaagcgatctgcgaagccgtccagcggccgaccatgcgtttcgtggcggtgaagagcgcggagcagcaggcggcggccgttgtgtttcgcgcccgcgacctcctggtgcgtcagcgcactcagaccatcaatgcgatccgcggccatctggccgaattcgggatggtagcggcgcaaggcccgtcccatgttgccaaactcgtgtcggcgatcgaggaccgtgacaccgacattcctgagctggcccgaccgatcctgcgcctgctcgtggagcagttgcgatcactggacgagagggtggcgctgctcgaccgtgagctcgcccggcgcgccagggaggatgccgaagcgaagcggttgatgacgatcccgggaatcgggccgatcacggcgacggcgctcgttgccctggcgccgatggctcaggccttcaagaggggacgcgactttgtggcgtggctggggctcaccccgctgcagcgctccaccggcggaaagcagaagctcggcgagacatcccgcatgggcgaacgaaccctacgccgactgctgatcatcggcgcgagcgcggccgtgcgctgggcaatgcgcaaaggctcgaccgccgatccttggcttgcgcgcatgcttgcccgcaagccgcccatgctggtgatcgtcgccctcgccaacaagatggcacgcatcgtctgggcattgatggcgagaggcggaacctatcgggctccggctgcggcgaagtagttccgcggcagggccttgagagtgtgagaaggtcaaccggagaggtatggcgcaactgtcaacgagacgggatcgggaaaaccagatcatggatacgcgcctcgagcacgcgaggttgaattggacccgctccgcgaactcccatacgggccggcggcatgtgacagccgcagcaaaaggccggacacatgtcagcacccgaccacgctccgtgctcttcgaaagattcttcttgcaccaacgggggcgtccacaca

SEQ ID NO: 2881 - DNA, 1433 bp, unidentified
  source 1..1433: mol_type = unassigned DNA; note = element_4166ad7
  misc_feature 1..2: note = core
  misc_feature 3..220: note = LE
  misc_feature 221..1423: note = CDS
  misc_feature 1424..1433: note = RE
ctcctaccatcaattcatagtataagtctatatggaatctattaaccatggaaaggcaggaggactcatttcttcctgggtcaaagaacccttatttcagtctgtcccctgcctcccaagccataataagttgattggatcatagaatccttgtcacggtggaggattggtcggggggcagttcctgctttaaccatgcacggattggaggaggagagagatggacgaaaaagaacggttcggatactttctcggtatcgatatctccaaggagacattcgatggatgctgcatcaacagccaaggggaaaagcttttcagcctctcaacctctatggataggaaaggctttgaggagctgatcaaacagctttcttccctatcttttggtcaagagtctgtcctgatagggatggagtcaacggcctgctaccatgtaaacctttactccttccttatctcgtcagggtattcggtggtaataattaatcccctgcttatttctaattttgttaaacttcaattgaggaaaaccaagacagataagaaagacgcctgtgtgattgcgcagttccttcttttgaaccgagattctctttctcaaaccatcctatcttctgacctctccgacatccgagatctctccagacaacgggagagtcttgtggaccagatgacttcgatcaagagcgagatcaagcggttactgaccatgacatttcctgaattggaacaccttgcgggtattttcaccaaatccatgcttcgtctgctgtgtcaatatccttccgctgcttctataaagtatgccaagcgttccaagatagccaagatactgatacccggatcgtatggaaaacaaacagatgcatcggtggagcggatcatcaaggcagccgagacatccatagggacagcaagccctgccaaagagatcatcctcaaacagaaagtttcattactaatgcaactggaggagcatcttcaggagcttacacatatcctcatagaacattgtcaggggaagatgcgccgggatatggatatcctcacctctatgaaaggaataggggaaaagacggccatgaattttctgatcgagatgggaggagatatcaaacaatttgagagtcataagaagctgattgcaatggcaggcctcgaccccgctctctaccaatcagggaaaatagatcggaaagggaagatttccaaacgaggcaacaggcatctcagacgggtgatctggctgatgacaacgaaggtcatccagtttaacgaaagatttaaacaatatcacctgaagcgaatcaaggatggactgccttataaaatggctgtactggcaacagctcataagctcatcagggtaatgtttgccatgttgaccaatagaacactattcaacacaaggatgaattgatgatagttga

SEQ ID NO: 2882 - DNA, 1394 bp, unidentified
  source 1..1394: mol_type = unassigned DNA; note = element_416fc32
  misc_feature 1..2: note = core
  misc_feature 3..131: note = LE
  misc_feature 132..1154: note = CDS
  misc_feature 1155..1394: note = RE
  misc_feature 1166..1354: note = bridgeRNA
acattggggaatcgcgggagcgagtcgcccatgttggtctttaccggcctgcagaaggtggttgttcccctgtaagatgagaaacgggctctcgattggtgaccgggcccagcatcagatggagaacaaccatgggtgaatatatcgggctcgacgtttccttgaaagagactgccgtatcgatccggcgcgatggccagcggatttggcgcggcaaatgcgtctccgacccgcaagcactggccggcttgatccgcaagcgtgcagccgacgccgaaaaggtcgtcttcgagacgggccccttgtccgtatggttctatcacgcgcttacgtcgcacggtctgccggcgatctgcattgatgcccgccatgccaaagcggcgctcgacatggcagctaataaaactgatgccaacgacgccgacgggttggcccatctggccgaagcgggtttctatcgtgaggtccgtgtcaaagccttcgacagcatgctctcgcggaccttggtcaatgcccgttcgaagcttgtcaggatcggtatcgaaatctcgaaccagatacgcgggatgatgaagatcttcgggttgatggttccacgcagcgcgggcagcaaattcgacatccaagttcaggacctgctttccgcccactcagaactttcagccatcattctaccgctgcttgatgcctggagagccgtccgggcacgggcagcggacctcggacgcaaggtgctcgctcaggcccgagccgacgaaaagtgccaacttctcatgtcggtgccgggcgtcggggcgataaccgctactgccttcatcgccgcagtcgaagatcccgcaaacttcgagcgttcacggtcggtaggcgcatggctggggctgactacccgtcattaccagtcaggcgaagtggattatgatggccatatctcccggcgtggcgatgcccatcttcgcgggctgctccatgaggctgcaacggtaatcctgacccgtaccgggccggtagtgatctgcgggccttggggaacgaagccttgcgaacggatcggcttcaaacgagccgcagtcgccgttgccagaaagctgaccgttatcatgcatgccatgctgcaatcaggtgaactgttcaacaaggtgaccgctgcggtctgacagtccaagccggccccgcgccttcgggcgcaacaagttgtccctgccgggacgtgggccgatccattccgcagagtccgttgcatcaggcctcctggccaccaatgcgctccaaacataggaaggatcgtccgcgaagccccatcatgcggcggctcatgtcgaccgcgaagacgaccatgcttccggcatacacaccatcaaacacgaaaggcttgcaaaatgacgcgcgattagacg

SEQ ID NO: 2883 - DNA, 1516 bp, unidentified
  source 1..1516: mol_type = unassigned DNA; note = element_417025d
  misc_feature 1..2: note = core
  misc_feature 3..287: note = LE
  misc_feature 288..1445: note = CDS
  misc_feature 1446..1516: note = RE
  misc_feature 45..239: note = bridgeRNA
ctaatgagatcagcggggcttcttctgggaggctcagccgcagcagcggccggcgggtcagcactcattagcccaggccccctttgttgggaggcctactgacagattgtgcgcctgccggttcgccggtgactggactgctgatgggatgtcgtgcccgcttcggcgtgagcacttgatcattagggtgcaggggtctccgggtgctgtgatcgtgtcggctatctggaggagttggtgcagggtgttgttcatcggagatgactgggctgagggtcaccacgacattggagctcgaggacgaggccggtcgccggctggcccgggcccggttgccggagggtttggagggcatcacccggctgcacgcgctggtggccgaacacgccccggggtcctgggcggagctgccgcccgaccaggtggccggtcaggtgatcgtcgggatcgagaccgaccgtggcccgtgggtcacggcactgcgcgcagccgggtatcaggtgttcgcgatcaatccgctctcggcggcgcggtaccggcagcggcactccacctccggagccaagagtggcgccggtgacgcacacgtgctcgccgagatcgtgcgcctggatcgcgatcatcaccgtccgatcgccggggacagtgatctggctgacgcggtcaagctgttggcccgtgcgcatcagaccgcagtctgggaacggacccggcaggtgctgcggctgcgttcgacgctgcgtgagtatttccctgctgcggtagaggcgttcgaagacttggcggcgccggacgcgttggcgttgctggctcgggcgcccgacccggcacgggccgcgaagctgactcgcggtcagctggtggccgcgttgcgggctgcccgccgtcaccatgtcgagacccgcgccgacacactgctggcggtgctgcgcgcgccggcgttgcgtcaatcggcgacgctgcaaggtgcctacgccgccgccgtgaccgggcaggtcggcatcatcaccgcgctcaacgcacagatcacgcaactggggcaggtggtggacgagcattttgcgcggcacccggccgctgacatctacctcagccagccgggcttcggcgtcgtcctcgccgcccgcaccctcggcgagttcggcgacgacaaggaccggttcgcgaccgcgcgggcgcgcaagaactactccggacagagcccgatcacccgcgcctcgggcaagaagagcgtcgtcctggcccgctacgccaccaaccgccgcctcggtgccgcgctgcacttgcaagccttcgctgcgctgggcgcatcgccaggcgcgagggcctactacgacgcaatacgcgcccggaacatcggccaccacgccgcgctacgccagctcgcgaaccggctcgtcggcatccggcacggctgcctgaagaccggcaccctctacgactagaacaccgcctggcaacaccaccgcaccgacattcagcctgccgctgcttgacagaattcaggatgggatgt

SEQ ID NO: 2884 - DNA, 1442 bp, unidentified
  source 1..1442: mol_type = unassigned DNA; note = element_41712e1
  misc_feature 1..2: note = core
  misc_feature 3..230: note = LE
  misc_feature 231..1427: note = CDS
  misc_feature 1428..1442: note = RE
  misc_feature 10..223: note = bridgeRNA
gctctaccttcttgatcgggttgatcgagccattcgtagggttgggtcgcccaggggtgctgggtgtggctatcagtgggctgccgtttcgtggctaccatcgcttcgccgcccggcgccccacgacgactcggccgccgattaggaagtgcgaacaagtcgctgtgtagagcaatgccggcgaggtcgtccgtggtacgaacagcacgcacacgtacgtcaggagcacgatgagccggatatgggcggggatcgacagtggcaagggccaccatcacggcctcgcgctggacgccgggggcaagaccctgctgtcgcggcgggtcgccaacgatgagcccgagctgctgaagttgatcggtgacgtcctcgacctggccgacggccgccaggtgacctgggccatcgatatgaccggcggggagcccgcgctgctgctggctctgctgatcaaccacggccaggaagtcctttacatccccggccgtctggtgaaccgggcatccgacggctaccgcggcgagggcaagaccgacgcccgcgacgcctacgtgatcgccgaccaggcccggatgcgtcgtgacctgcggcccatccgccccggtgacgaagccgccatcgaactcaagctgctgaccggacgccgtgccgacctggtcgaagaccgcacccgcgtggtgaaccggctgcgcggcaccctgctgagcatgttcccggcccttgagcgtgccttggacgtgaccaacaccggcccgctcaggctgctgacgggctaccaggctccggccgcgatccgccgcgccgggaccgcgcggctgaccaaatggctggccaaccgcaaggtccgcaacgcaagagccttggccgaaacagcagttgaggccgccgagcgacagcacaccgccgtccccggggagaagaccaccgccaagctggtccacaccctggccgaggaggtgatggccctcaacgagcagatctccgagatggacaagctcatcgagggccggtttcgcgagcacgaactcgccgacatagtccagagcgtcccgggcatcggcaccgtgctcggtgccgagttcctcgccgctatcggcggcagcctggacgacttcggctccccggacgccctggcggccttcgccggcgtcgcccccgcccctcgcgactcgggcaaggtcagtggcaacctccaccggccgctcaattaccaccgaagactccagcgcgtcttctacacctccgcgctggtcagcgtccgctacgacccgaactcgcggaagttctacgaccgcaaacgcgccgaggggaagaagcacgtccaagccgtgctcgccctcgcccgccgacgcgtcaacgtcctgtgggccctgatccgtgaccgacggtgctatcaagtcacaccctcagcgactgcggccgtttgacaacagcattaggaa

SEQ ID NO: 2885 - DNA, 1384 bp, unidentified
  source 1..1384: mol_type = unassigned DNA; note = element_41716c9
  misc_feature 1..3: note = core
  misc_feature 4..85: note = LE
  misc_feature 86..1117: note = CDS
  misc_feature 1118..1384: note = RE
  misc_feature 1091..1371: note = bridgeRNA
tgatggggtggatgccccctcccgacggcatcaagttgtgccaggctggtaattgcagacaccagcgcaaacagaggaggcatccatggagaagattacgatcatcggcattgacctggcaaaacggtttttccagttgcacggtgcaacggcggatggtcagccgatgctgcgcaagaaggtatcgcggagccaactgctgtcattcctagcgcgccagtcacgggccgtggtggcgatggaagcgtgtgcgacggcgcactactggggccgcgcgattgtggagctggggcacgaggttcggttgatcccgccgatctacgtgaagccgttcgttcggcgtcagaagaacgatgcgacggacgccgaggcgatcgtcgaagcggcgtcgcggccgaccatgcgattcgtggctgtgaagacggaggatcagcaggcgcgggcgatgatcttccggacacgggatctgctggtgcgacagcgcacgcagctgatcaacgcattacgcggccatctagcggagcatgggattgtcgccgctcaaggaattgcccaggtgagcaggcttgccgcggcactgaacgaagcggtggatgcaacgttgcctgcgctggtccgggagttgggtcagcaatacctcgagcatatcgaccgtctcagtacagagatcaccgggctcgaacagcgcctacgccggctgtcgaaggatgatgagacggcggtgcgtcttcagacggtaccggggatcgggccgatcacggcagcggcgatcgaggcgtttgcgccgcccatgacgaccttccgtcgaggccgcgacttcgcggcatggctgggcctggtgccgcgacagcactccagcggcggcaagcaaaggctggggcggacatccaagatggggcagcgtgacatccgccgtctgctgatcatcggtgctatgggcgtgatcagatggacaatccgtacgggccctgccgagggctcgtggctagcgcgcatgctggcccgcaagccacgcctcgtggtggcgatcgcgctggccaacaagatggcacggtcggtatgggcaatgctgagccggggcgaggattatcggggatcggcgatggtggcggcctgacggccgcggcaagcgctgatacgtcggcgatgacggaggtcacagaacggtaagggcaaactgatcggacgggtcgagaccagaaaaagcaaagtgcggtatcgagcttcgcgctcgcacatatgatctgcctctggtctgcgtatctccatactggcccgcggcatgtttacggccgcacttcgaggccgaatacatgaccgcacccgatcatcgcttgccggcaccgttcaaaagacctcttgcatcgacgggggcatccataca

SEQ ID NO: 2886 - DNA, 1365 bp, unidentified
  source 1..1365: mol_type = unassigned DNA; note = element_4173b9b
  misc_feature 1..2: note = core
  misc_feature 3..78: note = LE
  misc_feature 79..1101: note = CDS
  misc_feature 1102..1365: note = RE
  misc_feature 1132..1362: note = bridgeRNA
ttaatgagatggtcagcctgaccgaaacaacccgatcggcttacgctgatcgggttgtttccttattgggaggtcattatggacacggtatcgctgatcgggatcgatttaggcaagcattgcttccacctgcatgcacaggctgcatccggccacatggtgttccgcaagaagcttacgcgcaatcagttattttctctgctcggcaacgttccgagctgtacggtggtcatggaagcgtgtgctggtgctcactggatggcgcgccgtatccaagggctgggacatcaagccaagctgatttctccccgattcgtcaaaccgttcctgcgcggcaacaagaacgatttcgccgacgcgcaggcaatctgcgaggccgggtcacgtccggccatgcgcttcgtcagtcctcgcaacgaaacccagcaaacgctctcggccctgcatcgggtacgcgaggggctgatacgcgaccgtaccggcacggtcaaccagattcatgggtttttactggagtttggagtaagtctgcccaaagggatggctgttatccggcggctgccggccgtgctggccgcacatgaattgccgccgcggctgattgcgctgctcgagcgtctccaggcacatttcaagtacctcgatgagcaaatcggggaactcgaccgtgaagtggttcagcagctaggcgaggacgagcgcagccagcggttgctggaaattcccggcatcgggccagtcacggccagcgtgctcgcgacggaattaggtgatgcccgacaatttgcttcagcgcggcaattcgcggcttccatcggacttgtcccgcgccaatacagtaccggcggcaagccgaccttgctgggcattagcaagcgaggagacaagaatctgaggcggctactggtgcaatgcgcgcgatctgtcatgcagcggatcgagcggcgcaccgatcgcttgagcgtctggctccgcggtctgttgacccgacggcattccaacgtggtggcctgtgcgctggctaacaaattggccagaatcgcctgggccatccttgccaaaggtacacattatctatgcgaacaggctgcagcagcctgacacggcctcgcttatatagcccgatgtatcgagtccttcctgcttttgcgacgcgagatacgtgaagacataaacggctcaacggccgggcaagcaacctgaccacaaaaacagcgcatggacgctgacgcatttttgaggtttgcccggtgcggctctcatcatgggacgaggaacctgtttccatcgcgatcccggatagatttgcgcacgcccaatttacgtcgacacccactcgcttgcgaaagtcaggctgaccataga

SEQ ID NO: 2887 - DNA, 1418 bp, unidentified
  source 1..1418: mol_type = unassigned DNA; note = element_4176d3c
  misc_feature 1: note = core
  misc_feature 2..127: note = LE
  misc_feature 128..1147: note = CDS
  misc_feature 1148..1418: note = RE
  misc_feature 1179..1418: note = bridgeRNA
atggtatgaacgtctcccacccgtgatcagtgtgctcaagaaatgtggaccctcatgggccgacggcatcaaagtgcccaatgtggaagatcataaaggtcttcacaggcaaaccggagggtccgtcatgaagattacgccagtcggagttgacatcgcaaaggcggtgtttcaggttcactacattgatactgaaagcggagagatcgtgaacagatcgatcaagcgggccgcatttctggagcatttcgcaaatcgcgagccttgcatgatcggcatggaagcctgcgggggtgcgcagcattgggcaagacaactcacgaagctgggacatcatgtgaagctgatgcctgcaaagttcgtgaaggcgttcaacgtccgcaataagaacgacgccgctgacgcgcaggcaatctggctggccgtgcagcagcctggcaagcctgtggcagtcaagacggaagcgcagcaagcggtattggcgttgcaccgcatgcgccagcagttggtgaaattccgcacgatgcagatcaacagtctgcgcggcctgctgaccgaatatggtgaagtcatgggcaaaggccgaaccgcgttggacaaagcgataccggcggtactagccagggtcgcggatcggcttccagcggtcctgatcgacacgttacgcgaacaatggaatggtttgcggaagctcgacgaccaagttcgcgagatagagcggcggcttcggcaatggatgaaagaggacaaggcagtcaaggcaattgccgcgatcccgggtgttggtgtgcttaccgcaacagctgcagtcgcaacgatgggtgatgtaaccgctttccgctccgggcgagagtttgcagcgtggataggtctggttccgaagcaaaccggatctggcgggaaggtgacattacagggcatcagcaaaaggggcgatacgtatctgcgcacgttgctgattcacggcgcgcgcagtgtgctggcacatgcgaaggagcctagtccttgggtcgagcaaatcagaacacgccgtccgccgaatgtagtgaccgtggcgctcgccaacaagactgcacgcatgatctgggcgattcttgctcacgaccgaccgtatcaaagggaatatacaagcccgaagccggcttgaacattacacgagacattaaatcttctacaggatgattcgtcgaaaggttgcgcaggcaatcgagcatgatgacaaaacaggtcggaccgggactcgttaaacctgaatcggtcagagagcttcgagctcttgggggaaatgaggtgcgagtcagcggatatcatcggggccagcggtggaactgcaccgcaacaaggccggatataaaggtgcaacccatcctgtcagtcaacgcgcacgaattcctgcacaaacgggagacgttcatata

SEQ ID NO: 2888 - DNA, 1227 bp, unidentified
  source 1..1227: mol_type = unassigned DNA; note = element_417c1fd
  misc_feature 1..2: note = core
  misc_feature 3..240: note = LE
  misc_feature 241..1212: note = CDS
  misc_feature 1213..1227: note = RE
  misc_feature 6..213: note = bridgeRNA
cttgtatctcgacagtcatccagtttatgaatgattgtccccgaaagatcatcgggagcagggccagaaagacgagcccacccttaggcttagagcctctgatgtagatagttcttcggccctgcgcactcactcgtgaagttcgaacggtatcttgagcccgccttcagcgagagctcgcattcacaaggttgaacagagtgtcgtgatgatcaaagtgaactattcaggagaatcatcatgtccagtgtagtcggcatcgatattgccaaaggcagctttgatattgccatcccgcagagcaatggcaaattccgcacgaaagctaatctgtccaataatccacagggctttcagacgctacacgcgtggctggccaagcatgcaaccgctgatgcctggattgtgatggaggcgactggcgtgtatcaccaagcgctggctgagtccgtctacagcctgggttaccgggtctgcgtggtgaaccctgcgtgcatttgcagctatgccaaaagcctgttgcaacgggtcaaaaccgataaagtcgacgccaaattgattgcgctttacgcacagcggcataccgatcagctaaaggcctggcagcctcaagcgcccgcacagcgccgccttcaggccctggttcgacgtttggaagacctcaagggtatcgagcagatggaacacaaccgcttggatgtctcggatgtcagtgtgcaggcgtcaattcgctcggtcatccagcatcttgagcaagagattgccgccaccctgaaggctatcaaagaccatattaacgatgacccggacttgcgtaaccagcgtgatttactggtgagcattaacgggattagtgacaaaaccgctgcgctgttattggccgagctgggtaacccgctgcgtttcagggactcccgggctgtagtcgcattcgctgggctgaatcctcggctgcaggaatccgggaaacataaaggccatgtgcgtatctcaaaaatgggtccatctagcctgcgcgccggcctgtacatgccggcggttgtcgccatgacgcacaacccggcggtaaaagccctgagtgagcgactaaaagccaaaggcaagtcgggcaaacagatcgtctgcgcggcgatgcgcaagctgttgaacatcgcctatggcgtgttgaaatccggcaagccatttgacgcgcaactggctattgcgcactgaccggcaagacggtat

SEQ ID NO: 2889 - DNA, 1568 bp, unidentified
  source 1..1568: mol_type = unassigned DNA; note = element_417ccad
  misc_feature 1..2: note = core
  misc_feature 3..247: note = LE
  misc_feature 248..1198: note = CDS
  misc_feature 1199..1568: note = RE
  misc_feature 1..226: note = bridgeRNA
ctcgtattattaaatagtagtatttatgaatccctctccagggataaatgatatactgttgaagatactgtggattggttttctaatcctaccacacagatggtttaatggaggctccaaccacagtctctttgtatatttgttaatcagttagataccgcatgacggtttatttagaacgaggttacaatcgcaaggagaacctgtggttctaaacagtatcaatacttttcaaaggagatttcttatgatttacattggaattgatgttgctaaagataagcacgactgctttatcactcactcggatggcgaagcattatttaactcctttaccatctctaacaatcgcgaagggtttgaaactttatttcagagaattgaatccgtatcagatgatttaaccaaagtaaaagcaggactggaagccaccggacactacagctacaatcttctgggattccttcctgataaaggtctgaccaccttcgttatcaatccgttacataccaatctttacagaaaaagcctaagccttagaaagaccaaaacggataaagttgattcccgtaccattgccactatgatgatgtctgacatgaacttaaagtcctactcagacacatcttaccacaatgaggaattaaagtcactcactcgttatcgttttgataaagtaaaagaacgggcaaaactgaaaagttctgtttcaaggcttgtgtgcattctttttccagagctggaaaaactcgttcctacacttcatatggcatccatctacgctttgctttctgaatttccaagtgctaacgctgtcgcagccgcacacctcacaaggctttcccatctgctatctgaaagttcgaaaggcagatatggaaaagatactgccatcatgtttcgtgaagctgcaagaagttctatcggttctcatatgcctgctaagtccttggaactgaaacacaccatcaaactcattcaggaattaaccgttgagattgacgaaatcgaagcagccatcaaacaaatcatggatgaggaaatccagtcgccaatccttagcattcccggtattagttaccggatgggtgcaatgattatcgctgagattggtgatttcagccgttttgattccgctgataagatacttctatgcaggaatgtcaccatctacctatcaatcaggacaattagataacggctattcccacatggaaaaacgaggttccagatacctgcggtatgctctttacaacgccacaaagtatgtctgccgttgggatgaatcttttgctgtatatcttgaaaagaaacgctcggaaggcaagcattataatgtcgcattatctcatgctaccaaaaaacttgtgcggttaattttcgccatggaacaatcaggacaggcatacataccagcatcttaagttgttctgtaattatctccttttagagtgccagtaatgacactctgtttgctatgcggttttcaaggttcaaatatatctgaaatgcatttctgcaattcattcaaaaaattttattttaggtcttgacttttaatagttagt

SEQ ID NO: 2890 - DNA, 1789 bp, unidentified
  source 1..1789: mol_type = unassigned DNA; note = element_417e955
  misc_feature 1..2: note = core
  misc_feature 3..109: note = LE
  misc_feature 110..1384: note = CDS
  misc_feature 1385..1789: note = RE
  misc_feature 1451..1616: note = bridgeRNA
agcattcctgtagatcgttaaatatcaggtttgaaaaaaataaagcccctcagtaagatatgagtatagacaccactctaactcagtctcttaaggaggaagccctactatgaattttaaaatgcaagacaaacaaaatcaactaatagaaagaatttccgatacacatcttattgttggtgtagacattgctcaacaatttcacgttgctcgagctgtaaacttccgtggaattgtagtcggagatccccttacatttgtaaataatgaagaggggtttgttaaactgcagaattggattgaaaagttaaaaagactaaaaaatctagattccacaatagtaggtatggaacctactggccactactggaaaaacctatctaaatggcttgttaaacaaaaaattgaggtagtaacagtcaatccccacctagtcaagagaaacaaggagaatcgtgataacactcagtcaaagagtgataaaaaagatgcactcgttatcgctgatatggtgaaaaacggctattattcctttgttcacccttcatctgaatcctttgagaaactcagagttttaatttctaatcgagacgtgattgttaaacgtctcgtaagctctaccaatcagatccatagatgggtagatattgtgtttccagaacttagacaagtatttaaagatgttacttgtaaaggggcaatcgcaaccctccgattgtttcctactcctattgaaatagcttccttagagcctctagatgtcatgaggggatggaagtctttaatgcagcgacaaccaggacccaaaaaggctcaattactaatcaatctagcaaaatcctcgattggaactggacaagcactggacgcttataagttccatttagaacaattactggaggagtatgacctcgccataaaacaactcgaaagatttgaacaacaagttaaagaagttctcaataaaataccatttgcaagtaagctgcttatgattaaaggtataagtgaaatttcattagctggcattttaggagaggctggagatctaagtgggttttctcatgggaattctctattacgccatgcaggactccatttagctgaagcaagctcaggaaaatggaaagggcagattgtcctctcaaaacgagggaggtctagactacggcgtttcctctacctagcaaccatgagccttgtgatgaataaccctgagtttaaagctatccatgcatataatgtgaaggtcaagaagatgaagaaaatgaaatctatcatgaagttggtcggtaaattagcaagaatttttgtaggtatagctaagcgaaacgaatcttactgtgcaagtaaattacaagaaacaatcccattagcagcatagaagcagtatgactaaaagtcttatagttaaatagttatcataaattttgaatgttgtcttattcgtaggatttcaaatatgcacggagtaccaggtttcttcaacaaaagggcactgtgacccatcagtttagcataactggcctccaccccttggataggcatgacgaaggaatgagagggcaattgacccgttgagacatgggagggaaagcctccaggggcggcgtggagatgtgcattatatggtgaaatatggagtggtagctgactcctttatttaactatgccttcacgaagccaagatgatattaactaatttcaattacccgtaaatccaattacaagggttatgaaatcctgcgaataagtgagcattcaagagatattcgtatcaaactgaggg

SEQ ID NO: 2891 - DNA, 1424 bp, unidentified
  source 1..1424: mol_type = unassigned DNA; note = element_4183121
  misc_feature 1: note = core
  misc_feature 2..219: note = LE
  misc_feature 220..1239: note = CDS
  misc_feature 1240..1424: note = RE
  misc_feature 15..231: note = bridgeRNA
ctgattgatacttgtggtgggtgttgcggcgtttcgtagcatttagagggtccggctggttgtctctctatgtgcctgccaccttcgggttggctttgtatcgagttgtctgccggtccggtgtccttgctggggtgtggctcgaaggaggcgagaacacgatcgacccgaatcaggagtgcccatctcggttccactgtctatgagaagggcattgttatgacgatgattgggatcgatctgtatatggcaacccatacagtggttgcggttgatgacgacgggacggtgatcgccgagttcacgcttggatcctcgaatactcaggctcagcgcctgtgtgattgggctgaaggactcggggagcgggagtgggcggtcgagtccgcgaccgggcttggatatctgatcggccagcagcttgtcgcagctggtgagacggtgtttgatgtgccaccagtgttggcgtcgagggtccggttgttgggatctggccggtctcagaagaacgatgcccgctcgatagcgattgctgtgttgcgttcagaccgtcttgtcgtagtccaacgtgacgaccatgttgtcgtgttgcgtctgctggtgaaacgacaccgcgacatggcaaggcttcgcaacaagcactgctcgcgtctccatgccctgctccttgaactcgaggcaggcgggatcggtggaaagatcagttccagcaacgcttctgagctcctcgaccgggtcaccgctactgatgaggcggccaggtatcggatcctgatcgccagagaggtcactgccgacatcgcccgactcgaccgagcattgaaggcctccaaggatcggattgcagtggcagtcaccgcatccgcgacatcgctgagggacattgttggggtcgggccgatcggtgcagcaacgatcattggatacaccaaagacatcaaacggttcccaaccaagggccactacgccacctacaacgcgaccgcaccgatcgaagcatcatcgggaggaaccaaacggcatcggttgaacctgcggggaaaccggatcttgaaccatgccatccatatcgcagccgtcacccagctccgccacgacaccaacggccgcatctactacgaccgcaagatcgccgaaggcaaaacatcgagagaagcgatcagggcgttgaaacgacgcatctcagacgccatctaccgagccctcattgccgacacaacaagagttgccgccaactagaaagagcgggaccgggaggacaaccaggaacgcctcatgagccacgtgaccagctcaccatcctgaaaagctggctcttcggacaagtcactcccggacccgacaccaaacctacaccccaaaaccgaacccggatcggctccaacaaacgcgcccccacagaccctcttgacacaaagaggctt

SEQ ID NO: 2892 - DNA, 1583 bp, unidentified
  source 1..1583: mol_type = unassigned DNA; note = element_419066f
  misc_feature 1: note = core
  misc_feature 2..91: note = LE
  misc_feature 92..1135: note = CDS
  misc_feature 1136..1583: note = RE
  misc_feature 1350..1575: note = bridgeRNA
taatggtatggacgcccccctacccgaaacggcatcacgtgtgccaaagtggaagtgtgttgtatccactaactgagagggtgcgtccgagatgaagattactgcggttggaattgatttggcaaaaaccgtctttcagattcacggtgtcgacgaacgggggaaggtgatggtgcgcaaacagctcaagcgagctgaggtcgcaaagttctttgccaatctcccgccctgcttgatcggaatggaagcgtgcgcgagtgcgcattactgggcacgtaaactgacggatttcggacacacggtaaaactgatggcgccgcaattcgtgaagccgtatgtcaaaacgaacaagagcgatgcgcgcgatgcggaggcaatctgcgaggcggtgcagcgacccaatatgaggttcgtgccggtgaaaacaccggagcagcaggcggttctggccttgcatcgggcgcgccaggggttcgtgaaggcgcgcaccgcgcaggcgaatcagctgcgagggttgctcgcggagttcgggatcgtgattccgaaaggcattcgtcacctgccgcagcgggtgccggagattctggaggacggggagaatggcttgccaggtcacgcacggcagctgttcgcggggctattggaacacttccgggagttggatcgccgagtggcggagttggagaaggacattgtgctgtggcatcgcaataacgagcacagccgcaagctggaaaagattgctggcattgggcccatcacggcgagcgccctggtggcgagtatcggggatgcgaggactttgcagagtgctcggcaggcggctgcctgggtcgggttggtgccgcggcaacactccagcggcggcaaagaccgcttgctgggcatcagcaagcgaggagatgtgtatttgcgcaccctgctcatccacggagcacgttctgtggtgaggcgcgtggaggcgcaagcggatcatagcaatggctggttaaaagcactgcttaatcggcgtaacaagaatgtggcggcggtggctctcgccaacaaaaacgtgcgcatcgcttgggcgttgcttgccaaggaccgcgattaccaagccaactatgcgccaactgcaaaggcagcccaagcatgaagctctactgccaacacacctcgaggggcgctgcccctcgaactccccgcactcgccgtgaggcaggggtggcagggagaaacaccttccctgccaccccctgccgggaaagtgtatttgagttcggggccgtcaagggaagctgcgccgggcggcaagccgcccgcccttgacgcaatgagcgcagcgacaatttaggcgttgaaaggagactccactggttgctcaggcaaactctaggtgatggcgaaacaggtaagaccgtggttgaccaaacctgtcctgtgtcatgggtaataaacccgatattctgattaggcgtcaaccagcagattccatcagggccagcgacttaaactcgctaatagtaggccggatatatgactgcaatcttcaacctgcgaaccaaggccgcagagagtgcttgacaaaaaggggcgtccatata

SEQ ID NO: 2893 - DNA, 1383 bp, unidentified
  source 1..1383: mol_type = unassigned DNA; note = element_419865c
  misc_feature 1..2: note = core
  misc_feature 3..86: note = LE
  misc_feature 87..1118: note = CDS
  misc_feature 1119..1383: note = RE
  misc_feature 1149..1371: note = bridgeRNA
tgatgctgtggacggctcctccaccggcacgtgagtgccatgaatgtgggtgctgttagggcacccacgattcagaggagctaagcatgcaaacgattacgacaatcggtctcgatatcgccaagacggtttttcaggttcatggcgttgatggcactggccaagtggtcatccgccgtcagttgaagcgtcggtacgttctcgcgttctttcagaagttatcaccatgcctgatcggcatcgaggcctgtgcctcatcgcatcattggtcgcgcgagctcaaagcgcttggccatacggtgcggctgatgccgccggcctacgtgaagccgtacgtcaagcggcagaagaacgacgccgctgacgcggaggcgatctgcgaggcggtcaccagagccaatatgcggttcgtcgagatcaagaccgcggagcagcagagttgcctgatgctccatcgcacgcgccatctgttcatccgtcagcaaaccgcagtgaccaatgtgatccgcgcccatctcgcagagttcgggatcgtcgcgccggtcgggcgcaagggtgtcgaggagctgctcagggttgttgccgatcctgctgataaacgcattcctgagatagctcgtgcctgtctcgcggctctgggaactcaactgcacaggctcaaggagcagcttcttgagttcgaccgtatgattatggtctggcaccggtccgatgagacaagtatgcggctcgatgaggctcccggcatcggcccaatgctggccaccgctgtggttgccaccgttgccgatccaaaggccttccgatcaggacgcaacttctcagcctgggtcgggctggtgccgaggcagcactcaagcggcggcaaggaccggcttggtcatatcagcaagcaaggcgaccgctatctgcgcggtctgttcgtcgccggtgcgctcgccgttatccgctatgccaagatctatggcaccaaacatcggccctggcttacggcattgttggcgcgccgaccaacaaaggtggctgctatcgcgcttgccaacaagatcgcgcggatggtctgggcaatgatggtcaagggtgaacgttacaaggaacccgtcgcgcttgcggcgtaaacaagatcgcgtcggacacccggcgtgatgtgaaggttgggagggcgaacagcacgtaatgcagagccggtcgatctggcgatcaggacaacccacttacccccatgcatcgtcgaatgcgggctttcgtttgggacctgatccgcggagggcattatggccagcggccacgtgtgccgcacttaaaggccgaacacacgggcgcaccgaccaatgctgctgcatatgtgaagaaagctcttgccaactcggagccgtccacaca

SEQ ID NO: 2894 - DNA, 1688 bp, unidentified
  source 1..1688: mol_type = unassigned DNA; note = element_419bd13
  misc_feature 1: note = core
  misc_feature 2..332: note = LE
  misc_feature 333..1403: note = CDS
  misc_feature 1404..1688: note = RE
  misc_feature 45..293: note = bridgeRNA
cattacgttgttggcagttccgcttaaaggagcccaggattcgtactcctagccccatgctggggcaggctatgtttatctgcgttccttctgccttgtggcagcggaactagtcgctggcttcggtatggcttattttcgtccctgttaagaaaatgatccggggggggtgatgccgccgaaggcagtgacatactccaaactgctaataggaacctgacccgcacacaatgtgcgaggtctcaaagtaatgtggatgccagcgtgaagtatgtccgaccaccagcgatgaaataagtcccatactcattcaattcgctaggaggtcagacatgacctacgactatgtcatcggcatggacgcctgcaaatactttcaccacgcttgcgtcttagatatcgacggcacccaggtgctatctaagcgcatcaatcaaaatgaacaatccctgcgcgcactgttttcagcgttcagcgcatacgaccacaaggtccttgtcgtcgtggaccagcccaataacattgggcgactaactgtcgcagttgcccaagatatcggaatcgacgtgcgctaccttccaggtttggctatgcgtcaactctcacgcatccacgctggtaatgccaaaactgatatccgggatgcatatatcatcgcccacgctgcaaagaaccttccggaatccctccgcagtgtcgaccgcgtcgaagaagccttcctccagttgaaagtcctcaacggcatcgacgaagacttagcgcgctcctacaccaggctcatcaatcagattcgaagtgcattagttggctgttacccgcaattcgaacaagcccttcgcggccagataatccaccgcaagtgggttctgcacctacttgcacgctacggcgggcccaccaagataaagcgcttaggtaaggccaaggcagccgccgtttgcgtcgacgatataaggcacgaaatcccggaacctgtcctcgatgccatattcgctgccatctctgagcaaacagtcactattgcaggtgcacactatgccgaaatgggcgtagcaatgtcggcgaaggacgcacttttaaagctcgagcaccgccaacaaatcgaaaaggaagtcatcgagctcatcaacgacatcccccacacccaattcctgctatccatgccgggaatcgggccaaagacggctgcccaaattcttatgaccgcgggcgatatgtccgactttccgtcagctgggcacctagcctcctacgctggcttatcgccccgaacgaatcagtccggaacctcaatcatgtcgaactcactgaaccgagccggcaataaaaaaattaaagaacgccctatggcaatcatcttttgcatccatcagattccacgagcgttcccggcaattctatgaacgaaagcgccgtgaaggcaaaaggcacaacgccgcagtagtagcactagcccgcagacggctcaacgtcctctacgccatgatgcgcaaccacgagcactaccacgatcccgcaccatcacaggaagacctagcagcctagacactaagagtaaagctagccgaccgggtaaaatcccagtcggctagctgtcatgcccgaaaacaaacccgtccacacaaccccacagagagaatccgcccccgatttctccacccgctgggttgacaacctatataggaaca

SEQ ID NO: 2895 - DNA, 1558 bp, unidentified
  source 1..1558: mol_type = unassigned DNA; note = element_41a3cf4
  misc_feature 1..2: note = core
  misc_feature 3..216: note = LE
  misc_feature 217..1443: note = CDS
  misc_feature 1444..1558: note = RE
  misc_feature 3..255: note = bridgeRNA
cttgtatgatatagttagtaactaaatcatacgctcctttctaaaatttgctcattttttatatacactatttttttattagctataattgattcagacactgtggactttttattttaacctatagcttgactattcgatggagtgtattgccactgtcttatttaaatcatttatagttggataagtttttaaacttttatctcctgcaaggctatgagaataagactaagtgggtcaaagcagttgtctgatttttttattaaaggatgtggttccatgatttttattggcattgatattgccaaacaaaaacactttgccgctgctatgaccgctgatggcgaagtcttaattccatcttttggttttactaataactctgagggtttcaccttcttgctatccaaactcaaaacatttgataaggaaaatctcctaatcggccttgaatcaactgcccattatggtgaaaaccttatcggctatctttttgatctaggctatcatgttgcagttatcaaccctatccaaacagccactttgcgaaagacaaatattcgtaaaactaagactgataaggttgatgccatgctaatcattaaatcaatgatggtcaatagttataggctctttactaaaaccgatattgatttactgcatctgaaaagcctttgccgcttcagagagaaaatcaaaaagtccaaagcccgccttaaaatccagctcgtatcatatgttgatgtattgttccctgagttgcaatatttctttaaatccggtatccacatcaacacatgctatgaactgctaaagaggcattctatcccaaatgatattgctgctttacaccttacatacttaggtaatcttcttcaaaaggcttcccacggccgctttggtaaagaagaagctatcgctttaaaaagtctggcaaaatcatctgttggtactggcaatacctcggtttctattcaaataactcaatccatctcacaaattgagctattagaaaagcaaattactgaattagataaaaccattaaatccataatgcttgaaatggattctgtaatcttgaccatacctggtatcggatatcttaatggtgctatgatactcagcgaaattggtgatatatcaagattttcaaatccttcaaagcttttagcctatgccggtttagatcctgcggttaatcaatccggcaattttaatgctaaaagtaccagaatgtccaagcgtggttctaaacttcttcgatatgctttaatcaatgctgcttggaatgtttcacttaataacaggacatttaaaaattattttttatcaaaacaatctcagggtaacaaccattatacagcactcggtcatgtagctcataagctgattcgcattatcttcaaaatacttaaagacaatgttgctttcaacttagactaaaatcattcagtcaaaaagtctatcaacacataggcttattaaagtatgctcttttttcatttctaaattacttatacaaatttatccacttttcacttgacaattcatagttggt

SEQ ID NO: 2896 - DNA, 1359 bp, unidentified
  source 1..1359: mol_type = unassigned DNA; note = element_41b25b3
  misc_feature 1..3: note = core
  misc_feature 4..84: note = LE
  misc_feature 85..1098: note = CDS
  misc_feature 1099..1359: note = RE
  misc_feature 1135..1356: note = bridgeRNA
tgatgtgatggtctcctcccaccttacggcatcaatgtgccatgattgagtttgacaaaacaatcagaatgggagaagaccaagatgaatattacaataatcggccttgatatagcaaaacaagtatttcacgcagcgtgctgtaatgagcaaggaaagttagttaagaaaaaagtacttaagagagcggctgtgctgtcattttttagcaacatgcctagttgtattgttgcaatagaagcctgcgccactgcacattactgggcgcgagaaattgaacgttgcggtcatacggttaagctcattccgccacagcatgttaaagcatttttagtcggcaataaaaatgactacaacgatgcattggctatcgctgttgccgctagccaacatcacattagagtggtgaatgccaatacgattgagcaacaagataatcaagcgctacataaagccagacagttagcgattagacaacgtaccgcagtgtgcaaccagataagaggtttagccgctgagtacggtatgtgtatcagtcgaagtgttagcgcagtgagacagaatataatggtttggttgagtgatgaatgcaccgaactgagcgtattgttcaaacaattgctttttcagttaaaagagcaattgaatatgctagatgtcagtattggggtgtttgacgaaatgataaacgtcacaagcaaagagaatgcgatttgccagcggttacaaagtattcctggggtaggccctatgatagccagcgcctatttcaatgaagtcggcaatggtagtgcctatcgaaaaggcagagatgtatcagcatcactaggattagtgccaaaacagcatagtagcggtggtaaagacgtgttgttgggcattagcaagcgcgggaattcttatttacgatgtttactggttcagggcgctaaagccgtagtgtctcgcgctaaaaagaaggaggataagttaagctgctggataaatcacttagtgaagacccgcggtcataatcgagcgtgtgtggcatacgccaacaaaatagcgagaatggcatggtctattaccgtgaatgacaccgaatattcagctatttaagcacttagaaaagcaggcaaaaaagtaacactcaccacgaattgcgttggttttacataaagatgacataacaggtcaaaccggcatattgaaaacctgtagagttcagcggtaagcagataccgataacctgattaggacaatatgcgcgttttacatctaggtcatagtcttaagactaatcaaagaccgtatatatgacagcaatcctgtccctgttatcaatatgaaaagccttgcagtacgggaggagaccatata

SEQ ID NO: 2897 - DNA, 1406 bp, unidentified
  source 1..1406: mol_type = unassigned DNA; note = element_41c010f
  misc_feature 1: note = core
  misc_feature 2..83: note = LE
  misc_feature 84..1121: note = CDS
  misc_feature 1122..1406: note = RE
  misc_feature 1181..1401: note = bridgeRNA
caatgggatggagtcctccccaccctcccggcgccaatgcgccaaactgagagggtgaggcccctggcagaggagagcatcccatgagcatttcacgtgttggtgtcgatattgccaaatccatcttccatatccacggtgtggaccgtcacgaccaggtcgcatggtgtggcaagtacaagcgcgacaagtggctggaagccatcgccaaacgcgttcccgtaggtgccgagatcggcatggaagcctgctcctcatcccatcactgggcacgtgcccttcaggcacgtggctatcgcgtcaagctgatcgccgcccagttcgtgaaaccctacgtcaagagcaacaagaatgaccgagcggatgccgaggcaatctgtgaggccatggcccgtcctcacatgcgcttcgtaaccatcaagacagtggctcaacaggacgtgcaggcagcgcatcgcatccgcagtgaactggtccagcagcgcaccgccaaggccaaccagattcgcggcctggtcagcgagtacggcctggtggcgcctaccggtattggtcagttgcgtgccgccttgccgtactggcttgaggatgccgagaacgggctgacggacgatttccggatcctgttggcaggcctcgcagacgacctgcgttatctcaacgagcgcatcgccgcgatgaccgaccgcatcgaacagcatgcccttaccgacccagtagccaagcggctgatgaccttgaggggcgttggcacgatcaccgccagtgctctggccggggccctgggagatgccaaggccttcaagtgcgggcgagatttcgccgcctcactaggcctgacgccacgccaacacagtaccggagggcgcgatcgcttgctgggcatcagcaagcgcggtgacagttacctgcgcacgttactggttcatggtgcccgagcggtggtgcgttacacgggaacgaaggatgacaatttgagcagctggctccgacaactgacggagcggaagcacgtcaatgtggcgatcgtggcgttggccaacaagacagctcgacttgcctgggccattacgcaccacgatatgccttacgaccctgacatggcggctcaggccgcgtaaccccgaactgccgtacctagccgttgacagcgttttacttcactgaggtcacccgccaccacgattgctgagcatgctgcaagatggcaaacaggtcgaaccgacgtcagcaaaccccgttttggtcgaagagtttgcagctcgccacaccaactgggagctgacgtgcggatagcccatcagggtccgatgcctctggcatcactcaagagaccggatatacgtgtgcagtcgtacctattagccaccgcgccacatgcttgcaaacggggaggactccatata

SEQ ID NO: 2898 - DNA, 1351 bp, unidentified
  source 1..1351: mol_type = unassigned DNA; note = element_41d36de
  misc_feature 1..3: note = core
  misc_feature 4..81: note = LE
  misc_feature 82..1089: note = CDS
  misc_feature 1090..1351: note = RE
  misc_feature 1096..1337: note = bridgeRNA
tgatggggtggacggcccctgcaacggcatcgacgtgccaagatgaggtcgttggtcaaaccttatcgagaggagccgtccatggagaaagttagcatagtcgggttggatttggcgaagaacgtgttccaggtccacggcattgacgcgcaaggaaaagtgctgctgcggcaacatctgcgtcggggtgaagtgctgtcgtttttcgcgaagctcgcgccctgccttgttggcatggaagcctgcgccacggctcactactggggtcgtgagctgatgaagctcgggcatgccgtcaagctgatgccgccggcctacgtgaagccctatgtgaagcccggtaaaaccgatgcggcggatgccgaggctattgctgaggccgtgtcgcgtccaacgatgcgtttcgttgcggtcaagaccgtgggccagcagtccgtcctgatgctgcacaaggtccgtgatcttctggtccgtcagcgcaccatgctgatcaatgcgctgcgcggtcacctcgccgaatttggcgtcgtgaccgctcgtggaccggccggggtcaaggcgatcgaggaactgcatcagatgcaagacggtctgccagctttggcaagaatagccttccaacgcctagtcgatcggcttgaggcggtcggcgccgaaatccgcaaagccgagagggagatcgtcgcgtcgtgtcgcgaggacgccgtaagccgtcgtctcatgacgatcccggggatcggaccgatcactgcgagcgccatcgttgcggcggcgccggatggcacactgtttcgatccggtcgccaattcgcggcgtggctcgggcttacaccacgcccccatagcagcggcggcaaggaacggcttggcgggatcagcaagcaaggtgacggctatatccgccgcctgcgggtcaccggcgcgacggcggtcatccgattggcccggcaaggcaatccgagcaaggtttgggctgccaagctgctcgaacgaaagccagccaggctcgtttcggtagccttggccaacaagaccgcccggatcgcttgggttgtcctcacacgcgacgagtcttatcgcgccgtttaatcgaaccctggtcgccgacgcacaagccgtcggttccagacgtgcaaggtgctgagatatgatgacaaccggtcgaaccgggaatggggcaagcccgaagtgtctcaagcgctctccagcgcgacaaactgatcggaacctcgttcgcggacttcatcagggccagcggtcataagcgccgcgacaacaggccggacacatgactgcacccgaccgcgcagaagcatcattttccccttgcaccgcagcggccgtccacaca

SEQ ID NO: 2899 - DNA, 1738 bp, unidentified
  source 1..1738: mol_type = unassigned DNA; note = element_41d70ae
  misc_feature 1..2: note = core
  misc_feature 3..260: note = LE
  misc_feature 261..1583: note = CDS
  misc_feature 1584..1738: note = RE
ctcgtataataagttttgcagacgattttaagtgtgtctgcttagtccacttgttgaagatcggcaggccctgagatgcctgtgatacaatagctgtaggacagcagggtcaagttctccatctcctggttgagccgtaaggttacttcatgtaaagtccgttcccctgagccggaagttagctgcaaactcattagctgtttgccggagtcaagtccgcccttttagcagtgagggatttcgcattggccttcttcggaatgattctgatacgcgaggttgcggatgccccggatatcatgggtatctcagggcctgctgacctaaaatcttcacgcggggaggtgaaaattttgaatcaattatttgttggcattgatgtgagcagcaaaaacaatgtagcctacctgatgaagcctgacggcagcaagcactcaagcttttccgtacaaaacaatcttggcggtactaaactgttgtctgaaagaattgtgtcggcgctcaacgccatgcagctcagtgacgtggcaatcggattggaggccacctccatttatggagacagcctggtctacgcactccgggaggatggcagtcttggtcgctttgtacgaaaaattcatgtgctaaatccaaagcaggtaaagaagtttaaggatgcctattctgacctgcccaagaacgactttgtggatgctttcgtgattgccgaccatctcagatttggtagaatcaaccgggaagtctacatggatgattatcgctacaaagccctgcaaacccttaccagagccagatttgatgctgtgcagaaccttacaagggagaagcagcggtttggcaactacctatttctgaaatgctccgggctggcgcaggaaaaaacactttcgcagaataccagtgccaccaccatcgcactcatggaacaatttgaaacggtggacgagcttgcctatgctgaccttgaaacgttaaccgccttcattgccaaatccggtcacggaaagttttctgacccggcagccacggcaaaagcggtacaggctgcggctcgtggctcctaccggcttccaaaaacagtgagagattctgtgaatcaggccctatcggtgacggtggtcgccatacgagctttggaaagtcaaatcaagaccttggacaaagccattgagcagcagtttgagatcattcccaatacgcttacctctatccccggtatcggcaaggtgtactccgccggtatcatcgccgagattggcgacatcaaccgttttgacgcccaagcctctgttgccaagtttgccggtcttgtctggacacagcaccaatccggtgattttgaagcacagcataccaaactcattaaatccggcaaccgctatctccgctactacctgctggaagccgccaactccgtgagaagatgcgactccgagtttcggcgctactacggccttaaattcaaggaggtcaaccagttccagcacaaacgcgcactcgctttgactgccagaaaactggttcggcttgtctttcgactgctgaaggacaaccgcctgtatatcccatcagagcgctgagctactgctcgccgctctgacgccgcagccctgtttcaagaatctttatgggcagggcttgggttggtgttgtcttttttgcctcaactgtacggttaaagcatgcttttctcttgttttgttcacattccacctcttgacttcataccattaga

SEQ ID NO: 2900 - DNA, 1442 bp, unidentified
  source 1..1442: mol_type = unassigned DNA; note = element_41ddd46
  misc_feature 1..2: note = core
  misc_feature 3..149: note = LE
  misc_feature 150..1169: note = CDS
  misc_feature 1170..1442: note = RE
  misc_feature 1206..1442: note = bridgeRNA
aaatgtaatgaacgcattccacttcctaaacgcggagcagaatgatggatgaaagagtgaggtctggaggtgtggagcctcgcagattttcggcatcatagcgctcaatacggggtgcataagcgccctcagactggaggctccacagcatgaaatttataccggtaggcgttgatatcgcaaagcatctgattcaggttcacttcatcaatgaacactcgggtgaagtggttgataaacaagtacgtagccaggattttctaacgttcttcagcaaccgggaaccctgtctgattggcatggaagcttgtggcggctctcagcactgggcgcgtgagttaacaaagcaggggcacaaggtcagattgttgcaagctcgctttgttaaagcgttcgtcatgggtaacaaaaacgacgtgatggatgcgcgtgctatctggatggcagtacagcagcctggtaaggaaatatctgttaagacagaagaacaacagtcagtactggttttgcatcgttcgcgcaggcaactggtgaagttcagaacagcgcaaattaatgctcttcacgggactctgctggagtttggcgaaactatccacaaaggtcggtcagcgatggacagggaactaccagcagccctggagcggatgaagacgacgttgccgccgtatctcatcgcggtactggaggaccagtacaacaggctgaatgatctggattcactgatagatggccttgaaaaacagcttatcagtgtagcgaggcagaatgaaatgtgtaagcggctgatggacatccccggagtggggccgttaattgctacggcagcagctgcaacgatgggtgaggcatcggcatttaaatccgggagggcgtttgctgcttatattggcctggtgccgaagcagactggctccggaggaaaagttcgcctgctggggataagcaaacgtggagatgcctatctgcgaaccctgtttatccatggagcaagatcggtttcatcggtcgcaaaagaacctggcctatggataacggaactgaaaaaacggcgtcctgccagcgttgcgatagtagcaatggcaaataaactggcgcggacagtgtgggcaatagcggcccatgatcgtaactacgataaggatcatatcagtatcaggccatattaatcgctgatactggtaaacattaactcttaacaaagggtgaatgctgaaaggttgcgatggcgaccagtgtgatgacaaagacaggtaagaccgggactcactaaacctgaatgcgattatgggcttaaagcccgttggctaaataaggcgtgagtcagcgaattacatgggggctcgcagcgaaaatgctgcaattaaagccggatataaagctgcaacctatccgtcaatgtcagaacaatggatgccttgcaaacgggatgcgttcatata

SEQ ID NO: 2901 - DNA, 1599 bp, unidentified
  source 1..1599: mol_type = unassigned DNA; note = element_41ebdc5
  misc_feature 1..3: note = core
  misc_feature 4..118: note = LE
  misc_feature 119..1204: note = CDS
  misc_feature 1205..1599: note = RE
agttcctatgtttaaaatcggaagtgacggataacataatatagccctaaaaaagctataccattatagttaactttgtaagtgataacaacaatattaactcataacgatatagcttatgaaacgtgtacaaagtaacacattagatttcagtggtcaaaatatttatgtaggaattgatgtccacctgaagagttggtcggttgcaattttatcagagcatagtgttctgaatcgattcagccaaattccggaaccggaagcattgcacaagtatcttgtcagcaattatccgggcgccaattacttctctgtgtatgaagccggattctgcggcttttggatacacgagaagttgatggatttaggaataaccaacatcgtggtcaatccagccgacgttccgaccatgagtaaggaaaaacttcgtaagacggatgccgtggattgtaagaagctggctcgtgaattacgttccggttcgctggtaggaatatacgttcccaaggcggatgtcctggaaatgcgctctttgataaggatgagaaacctgattgtaaaagacagcacccgtgcgaagaaccgcatcaagtcattgcttcgttttcatggagtggatatacccgaagagtttacccgatgctcgataggatgttggtcaaaacgtttcctgacttggcttcattctctcgaactctcaacagagtatggcaagaagactttggaactgcacctggagcagttcgtgcgtttgcgtaagatgcttcttcaggaaacacgtgccatccgtgagatatcacgtaacgcaccttttgagaggccgatacgtcttctgacttctgttcccggaataggcgttactacagctgctaccctgatggttgaacttgacggtatagtccgtttcaggaatgaggaccatctggcttccttcatcggtctggtacccatgtgccattcgagcggtgagagtaacggcacaggagatataacggtacgtcgccatttcatgctccgctgcctgttggtggaagctgcatggattgcaatccgtaaggatcctgcaatgactgtagcctatacggaataccgtaaacgtatgaatccccagaagtcaatcataaagattgccagacggcttgtaaacagaatatattatgtactcaaacatgaaaaggaatatataccgtgtgttgtcaaatgatacagaatcctataaggtaaaacaactttcttttgaggaaaatactatcattactttgcggctttgaagtccgcttaaaaaagtttgtaatcctcattaatggtttgactgataaaggaacttgcagccccttgtgtggtgtctgctgtggaaagtttgttttaccataagattatggttaggttttcttagccatatcagacgatatcagtaatacaaaaagagaggcgtgtaaccgcctcccaaagtagcattactgcgtaccgttaggatgcttattgctggtaggttgctcctcagcagagcctacttcctcttaacatcctgacaaaaagatatgaaactaaagttaattattaatgaattatccaactttgtttggattttaaatggaa

SEQ ID NO: 2902 - DNA, 1434 bp, unidentified
  source 1..1434: mol_type = unassigned DNA; note = element_41f0242
  misc_feature 1: note = core
  misc_feature 2..227: note = LE
  misc_feature 228..1421: note = CDS
  misc_feature 1422..1434: note = RE
  misc_feature 14..241: note = bridgeRNA
ctacttgtttcattgacgcaggaccgacgtctggcaaggctcggtccaggcgcccggtccgtcgctctcattgcggctgcccacgctgagtcgtgtggctctcatttggcctgcgcggaccgggcgtcgccagggtccggagaggctcaagaggggtttgctcggctcgaagtagcgttgccctcccgactcgacatccagtgatgggacgagcatcggaggagcaagtgaagaacacatctactacccgcgtggtgatcgggatggacccgcacaagaggtcggtcacgatcgaggtgatggctgccgacgagaccgtcctcggcggcggccggtacgccaccgatcagggcggtttcgccgagatgaggcgctatgtcagccagttcccggaccacatctgggcgatcgagggctgcaatgggatcggtcaccacgtggcggtccgactcctcgccgcgggcgaggaagtcgtcgacgtcccaccgaagctggcagcacgcacgcgagtcttcgccaccggccaaggacgcaagaccgacgccactgacgcccactcggttgcgctggtcgggacccgaatggccgggctacgacccgtggtggacgacgagcagctcgcggtcctacgactcctggtagatcgccgccgctcgctgggcgacgagcacacccgtaagacttcccagctgcaccagctgctgctcgagctggtcccgggaggtgcgaagaaagacttgtccgccgcccaggccaaggcgctgctggccaaggctcgcccacgagacgtcgtgggcaagacccgtcgccgggtcgccgccgagctggtcgcagacctggaacggatctacgcgcggaagaaggcggcgaacaaagaactgactgagttggtcaaggccaccggcaccaccttgctggacctgcacggcatcggaccctctggggcagcccagttgctggtcgaggtcggcgacatcacccgcttccctgaccgtgaccacttcgcctcatggaacggcaccgcaccgatcgacgcgtcctcgggcgaccaggtccgccatcggctgtcgcgtgccgggaaccggcagatcaaccgggtcgtgcacatcatggcgactgtccaactacgcaacgcaaccgagggccgggcctactacgaccgccgcaaagccgagggcaagacgtcgatggaagcgatgcgtgcgctgaaacggcgactgtcgaacatcgtctacaagaccatgctcgacgacacggtcgcccacaccgctactggttcgaggacgggcccgggagggcaacggggcaacgactctgactccagcgcggccggctcacagccccagaccaactcttcggacaagccacttcccggacccgccaccacagatcctaggaccccactaccgacagcttcttgacacagaggggagc

SEQ ID NO: 2903 - DNA, 1373 bp, unidentified
  source 1..1373: mol_type = unassigned DNA; note = element_41f9b09
  misc_feature 1: note = core
  misc_feature 2..78: note = LE
  misc_feature 79..987: note = CDS
  misc_feature 988..1373: note = RE
  misc_feature 1133..1365: note = bridgeRNA
taatggaatggtcgcctcccatctcttgtgccacagtgggacgataaatcgtcactcattgaacggagcgctgctatcatgaacgttaaaactattggaatcgatttggcaaaaaacgttttccagatccatggggttgacgagcacggaaaacggttgttcaacaaacaactcagacgggcacaaatggcctccttttttgccaacatcccaccctgtttgatcggcatggaggcctgtgcatctgctcatttctgggccaataaactgatatcgatgggccataatgtcaaactgatggcccctcagttcgtcaaaccctatgttaaaaccaataagcatgatgctgcagacgctgaagctatttgtgaagccgtcactcgacctaacatgcggttcgtgccggtcaaaaccgctgagcagcaagccgtattggcacttcaccggagtcgtcagagcttcatcaaacagcgaaccgcacaagccaatcaaatcagggggttattggccgaatttggcattgtcgtcccccgaggtatccagcagctacagcgacgattacctgagctcgtggaagatgcggataacccgttacccgtcctgtttcgtacacagctgagtctactacagcaccacatggcgtacctgttcgatgtcatcgctacactcgacaagcagattgagcagtgctatcggcaaaatgctctctgccagcgtatcggcaagatccctggtattggccctgttaccgccagcgcgctgattgcgaccattggtaaagccaacaatttcgagaatggccgacaactggctgcctggctcggattggttccacgtcagcactccagtgggggtaaacaagtcctgctcgggataagcaagcgaggtgatacctatttgaggaccttgcttatcatggtgccagggcggtattgcagtcggccaaacataaacaggatgccgtatcgagctgggctaaccagctaatggcgcgccggaataacaacattgcctcggtagcattggctaacaagaatgcgcggactgtgtgggcgctcctggccaaagagcgggagtattgtgcaccaataataagcgcttaagttgcttaatcagtaagacagaaacaacaccaccgattgcccaggcaagcatgaagtgatggcaagacaggtcagaccgcgatggggaaaacccggtttattcaaggctcctgaaagagcgctttgttgatagaggcctccatcagcgtattccatcagggacagaggtattttacatcacctcggcaaagtccggatctatggctgcaatcgatgaccagtaaagccaccacaacatatttagcttggcaaacaggaggcgaccatcta

SEQ ID NO: 2904 - DNA, 1526 bp, unidentified
  source 1..1526: mol_type = unassigned DNA; note = element_41fe91d
  misc_feature 1..4: note = core
  misc_feature 5..259: note = LE
  misc_feature 260..1516: note = CDS
  misc_feature 1517..1526: note = RE
ctcactggtgcaccatccttgtgtcggtgatcttggatggattgccgatgcacccgaggtgccgctgggttatcgccctgctcgcttgacagccgtgatgtccatcatgagttttgcggagtccggcggttgccccggacgcgccgaccgtcgacaggactgagcgccgacgagcgccgaacagtgagcgatgcggcagccgcgttcgggcctcgcacgagggtgcctccccactgggtctagcagcgaggaggctgttatggagtctactgccgaaaccacattgcgcgacgagccgcagaacggcgtcacgggtggaattgattgggcgcgagacgatcacgcggtatcgatcgtcgatgcgcgtggccgcgaggttcgccgcgccacgatcgagcacaacgccgccggactgcgcgagctgctcgagctgctgaaccgggccggtgtgcgcgaggtcgccatcgaacgcccggacggcccggtggtggacaccctgctcgaggccgggctcacggtggtggtgatcagcccgaaccagctgaagaatctgcgcggccgttacggctcggccggcaacaaggacgaccgcttcgacgcgttcgtgctcgccgacacgctgcgcaccgaccggtcccggctgcgtccactgctgcccgacaccgcggccacggccaccctgcgccggacctgtcgcgctcgcaaagacctggtcgggcaccgggtggcgttggccaaccagctgcgcgcgcacctgcgcatcgtctttccgggcgtggtcgggctgttcgccgacatcgactcgccgatcagcctggcgttcctgacccgattcgactgccaggaccgcgcagactggttgtcggtcaagcgcctggccgcctggctggccgccgccggctactgcgggcgcgtcgaccccgcggtgcttcacggccggctcaccggcgccccgcgcggtgtcacaggtgaggacggcgccgccaacgcacacatcacccgcgccctgctcgctgcgcttaccagcatcgccacgcagatcaaggccctcgacgcgcagatcgccgagcagctcgccctgcacgccgacgcgcacatcttcacctccctgccccgctccggcaccgtgcgcgcggcccggctgctcgccgagatcggtgactgccgagcccgttttcccacgcccgaatcgctggcctgcttggccggcgtccccccccccccccgccagtccggcaaagtcacccacgtcgggttccgttgggccgcagacaaacaactccgcgacgccgtctgcgacttcgccggcgacagccgccgagccaacccctgggccgccgacctttacaaccgcgcccgagcccgcggccacgaccaccctcacgccgtacgcatcctcgcccgcgcctggctttacgtcatctggcactgctggcaagacggcgtcgcttacgatcccacccaacaccgagccctgcaggctctccgtaaccaagttcgccaaacggcggcttgacacagggcta

SEQ ID NO: 2905 - DNA, 1113 bp, unidentified
  source 1..1113: mol_type = unassigned DNA; note = element_41ffbee
  misc_feature 1..2: note = core
  misc_feature 3..162: note = LE
  misc_feature 163..1107: note = CDS
  misc_feature 1108..1113: note = RE
  misc_feature 1..164: note = bridgeRNA
cctgtgtctgagagacctgtcatgatggagtgggcgggaagccgttgggtccctggcgcttgacgccgtgatccggcccggtctcccgcccgtctcgacccatcatcctgaacagttgcacgaggctgcagcaacagacctcgcatcacagggacaggctccatgatcctagcacctcgctgcgtcggaatcgacgtctccaaatataggctcgacatcttcgacgatgccgtcggcaccgccgagagcatcgccaacgcgccacagcccatcacagagcagctggcgcgttggcgatgcggtaaagtgttcgtcgtgttcgaggcaactggcgtctacgactgcgagcttgccgcgcaattgcatcaggccggcatccgcttctgccgtattaatcccgcccgtgcccgggattttgcccgcgccagcggcaggttggccaagaccgacgcgatcgacgcctgcatgcttgcagcctacgctcgcgcgatgcggccgccggcagatccagctggcgagcctgtacgcgaggcgctggccttgctggcaaaacggcgtgatcagctcgtcctgatgcgcgcccaggagaaaaaccgccgcagcgagacccgtgattgcgccatgatcgcagacatcacgcgcgtcatcgacttcctcgatggcgagatcgcaacgatcgagacccgcatcaaagcgcttatcgagaccgaaccaccaatcgccgagattgcgcgcctcatccgctcggtgccaggtgtaggaccagttgcttgcatgcagctgatcgcccagatgcctgagctgggacagatcggtcccaagcagatcgccgctctggctgggctggcgccactcaacgtcgacagcggcatccatcggggcaaacgcaccatcggcggcggtcgaaagcgcgttcgcgacgcgctctacatggccgcccttaacgccgtccgccgcagcggccccttcaaaaccttctatcaacggcttcgaacggcgggcaagcccgccaagctcgccctcattgctgtcgccagaaaactcctgacgaccctcaacgccatgttgcgcgaccaaaaaccctacctcgcggccagacccacataacagttg

SEQ ID NO: 2906 - DNA, 1340 bp, unidentified
  source 1..1340: mol_type = unassigned DNA; note = element_4206ccd
  misc_feature 1..2: note = core
  misc_feature 3..80: note = LE
  misc_feature 81..1097: note = CDS
  misc_feature 1098..1340: note = RE
  misc_feature 1131..1293: note = bridgeRNA
cgttggggtggacggcccctcgcggcatctgtgtgccaaggtttggctgttgaggctgcaaaccagaggagccgtccgagatggagcttaagcggattgggatggacacgtcgaagcacgtgttctcgctgcatggggtggatgctgcgggtcaggtggtgctgcggcgtgatctgcggcgtgggcaggttgaggcgtttttcgcggggctggcgccgtgcgaggtggtgatggaggcctgcgggggctcgcaccactgggcgcggcggctcggagccctcgggcaccaggtgcggctcattcccgcgcaatacgtcaagccgttcgtcaagcgcggcaagaacgaccgtgccgatgcggcggcgatctgcaccgcggcaggtcagcccgacatgcccggcgtgccggtgaagtcggcggcccagcaggcggcgctgatgctgctcaagacgcgcgagctcctggtgcgccagcgcacccagctcgtgaacgcgctccgcggccatgcggccgagttcggcatcgtggccgcccgcggcaccgcccagatcgaggcgctgctcgctgcgatcgcggccgatcccgacatccccccgcccgccctggaggcgctcgggctcctcagcgcgcggatcgcgcaggtgagtgagcaggtgggcgccctcgatgccgcgctcctggcccagcaccgggccaacccgatgagccggctcctcgagggcatccccggtgttggcccgatcacggccctcagcctggcgctgaccgtcgagcccggccacttcgcctcaggccggcacttcgcggcctggatcggcctgaccccgcgacagaactccactggcggcaagacccgattggggcgcatcagcaaagccggccaccggcgcctgcgcagcctcctcatcgtgggtgcgaccaccgtcatccagcacgtccgcccagggcgcaaagccaccccaccctggctccttgacctcgtggcgcgcaagccccgcaagctcgccgccgtggcactcgcgaacaagatggcccgcaccgcctgggccatgatggcgcggggcgaggcctaccggcgcaccccggtcccggcctgaccacgccgcacggtgcaggagggcaacagggcagaagatggcagacgcgcgatccgtcgagtgggacaacccccgagtttcggtggcccccagaggtctcttgtccgttcgggacccactcgcgcaacccatctgggccagcggccgtcgtgccgcgccaacaggccggacacacgaacgcaatcgcacctcaacgccaacttccgcccaacacccccttgcaccaacagggccgtccacaca

SEQ ID NO: 2907 - DNA, 1306 bp, unidentified
  source 1..1306: mol_type = unassigned DNA; note = element_4209389
  misc_feature 1..2: note = core
  misc_feature 3..61: note = LE
  misc_feature 62..1066: note = CDS
  misc_feature 1067..1306: note = RE
  misc_feature 1093..1294: note = bridgeRNA
ttatgggatggacgcctcccgcttccaggccacgattggtggtcaagcaatggaggcggatgtgacgtttgatatggtcgccatcgatcttgggaaactgtcgttccacctgcacggcgtgagcagtgacggggtcgtcctatcgcgaaaggtcagccgagctaaattatttgcggtcgtgaccgagctcgcaccggcgattatcgccatggaagcctgccccagcgcgcactactgggggcggcgctttcaggaagccggccgccacgtgcgcctgatccaccctcgtttcgtgaagccgttcgtccgcggagcgaaaaacgatgctattgatgccgaggcaatcttcgaggcggccagccgtcctaccatgcgctttgtgccggtgaaaacgatagttcagcaggatcttcaagcagtacaccggatacgtgatcgcctgatctgccagcgaaccgccctgatcaatcaggttcgcggtctgctggccgaatacgggatcattctggccaagggaccatctcggcttaccacagaggggccggcggcagtggcggacgcaggattgtctgatctcgcgcgtgaggtgtttgtcgacctcttcgatcagttgcgcgatcttgagcgtcgcatcggtgccttggatacgcgcctcgtggcgatctgccgagaaaacgcggcaagccgacgcttggctaccgtaccaggcgtcggccctgtcatcgcgacagcgctcgtcgccagtattgatgacgggcgacattttcgcagtggacgccagcttgccgcttggatcgggctcgtgccgcgccagtatacgaccgggggaaagcccaagcttggcgggatcggcaagcaagccaaccactatctgcgtcgccagatgatccatggtgctcgatctgtcgcatttcgcgcctctgggcgtggcgacgtgcggtcaagatggctgcaggccctggtggcccggcgcgggttcaaccgagcgatcgtagcgctcgccaacaagaccgcccggattgcctgggctctactcacacggcaggaggtttaccaaacggcgtgaggagaccaaatcacactgtgcggtttcgtatgcgaggtgaattgtgatggcgcgtcggcacggaccgcagttcctaaacctgatcttctacaaggcccacgtggccgagcatattatgaggttaggagcagcggactccatcaaggccaggagctttgctccaacaaaaggccggatagatttttgcatccaatgccgccaacccctgacaaagcaccttgcgcgggaggcgtccataga

SEQ ID NO: 2908 - DNA, 1424 bp, unidentified
  source 1..1424: mol_type = unassigned DNA; note = element_420b5c0
  misc_feature 1: note = core
  misc_feature 2..231: note = LE
  misc_feature 232..1308: note = CDS
  misc_feature 1309..1424: note = RE
  misc_feature 14..246: note = bridgeRNA
ctacttgtttcattgcggtagcgaccggtgcccggccaggcttcggtctaggcgcccgggctgtcgctctcacatcggctgcccacgctggtcgtgtggctctcatttggcctgcgctgttccgggcgtcgccccaggggcggggagaggctcaagaggggtttgctctgctcgaagtagcgttgccctcccggctcgacaaccgcgttggatcgagcatcggaggactccttgagctccacggcagaacctgtcgtcatcggcatggacccacacaagcgttcggccacgatcgaggtgatgaccggcgacgagcgggtggttggcggtcatcggttcggcaccgaccgggacgggtactcggcgatgctcagcttcgcgacgcagtggccggaccgggtctgggccatcgagggatgccggggcatcggccggcatattgcgttgcgactgctcggcgagggtgagcaggtggttgacgtgccacccaaactgtcggcgcgggcccgcttgttcgccaccggccagggccgcaagaccgacgccaccgatgcccactccgtcgcgctggtcggcactcggatgagtggcttgcggccggtgatcgatgaccaggagctcaccgtcctccgcatcctcgtggaccggcgtcggtctttgggcgatgaccacacgcgcatggtgtctcaactgcaccagcttctcttggaactcatcccgggtggagcgaagaaggacctgtccgcggcccaggccaaggcgctgctggccaaggtccgacccaaagacgccgccggcaaggcacgccgccgggtcgcggccgaactgatcgccgacctcgagcgggtctaccagcgcaagagggccgcgaacaaggaactcaaagcactcgtcgccgccaccgggacaacgctgatggacctacacggcgtcggaccctccggtgccgcccggctgctggtcgaggtcggcgacatcacccgcttccccaaccgtgaccacttcgcctcctggaacggcaccgccccgatcgacgcctcctccggagatcaggtccggcaccggctgtctcgtgccgggaaccggcagatcaaccgagtgctgcacatcatggccaccgtccagctccgcaacccgaccgagggccgcgactacttcgaccgcaagaaggccaccggcaagacctcgatggaagcgatgcggtgcctcaaacgacggctctccgacatcgtctaccgacacctcgtcgacgacgcgatcactcacgcgctgacggggcccgggagggcaacggggaaacgactctgactccagcgcgaccgactcacatccccacatcggctcttcggaccagccacttcccggacccgccaccagccaccctagaacccggctccccaacgcgtcttgacacagaggggagc

SEQ ID NO: 2909 - DNA, 1577 bp, unidentified
  source 1..1577: mol_type = unassigned DNA; note = element_421299f
  misc_feature 1: note = core
  misc_feature 2..251: note = LE
  misc_feature 252..1190: note = CDS
  misc_feature 1191..1577: note = RE
  misc_feature 6..223: note = bridgeRNA
tcgtattatgaggtttgccagttatatttctggttgacctattttttttaggtactattcttgaagtagccggggtagaacgttcgggccagtgggactagatcccgtccacaaaactgttcaccctctacttgtagaaacatgtgtgaggctggttgggacatagatctcgtataacaagcgaagaaatgatactacaagggtgtttagaggtaccggcaatgatgaagtagagagggagtgtttagagcatggatccagttataggtctggacattgcaaaagaagagagtcaggttcaagcctttttacaaaggaaacatcgttacaaaaagagtttcaaatttgaacatcatttagatggattgaatgtattttacaagttttataaagaagtagaagccgaggcagacaaacctccaattgtaatctttgagtctacaggtcattatcatgaaccagttgtgcaatttttagaaagggaagaaatcgtctatatcatggtgaatcctattgtttctcatggtgcaaaaaagtcgagtatgagaaaggtgaaaacagacgcaattgatgcttcccatctatgtgaactgtactataaagaggatctagagccttaccataagaaaagtgttcaggttttgaacctacgcaatttgacaaggcaacacgacgcgataacaagttcctatgtgcaaatgaagctacaatttcaagctaatttagaccaggtatttccagagtacaagaaggtattcggagatacgtattctagggtatcgttgaaaactttattattatatcctacttcagaaaaggtattaaatgaggatcataagcacttagctgaaacgatcaaagaactttgtccaactagatcttataactgggcaataaagaaagctgaagaattaaagggagcagcatctagagacccatttcaacagaatctctatcagagtaatttaatcagtctgaaaatgtatattcaaatcctattggagtaccaagagcatctatccaagttaaaagaagagatagatactctggcaaaagacatggaagactaccatattattcgttctattcccggtataggagataagattgcggcaacattcttatctgaaattggggagatagatcgctttatacacccgaaaaaacttgtagcattcgcagggcattgatcctagagttcacgaatcggggaaatttaaagcaacatataaccgaataacaaaaagaggttcaagtaggcttcgtcaggctctttacagtgcggtattatgcggtttaagaaaatctcgaaatagtaagctaatagagttttatcagagaaaacgagaagaaggtaaaccccataaagtcgtcatgatagcttgtgctaataagctctttcaatggattttctacattttgaaacgtaaagaggcttttaggtaaataaacaataaaatactatagaaccaagaccttccaataagattgagaaggctatttggtatgtctaaaattattatatcacggaaattagttcattttttaataagttcttgacctcctattagctggta

SEQ ID NO: 2910 - DNA, 1215 bp, unidentified
  source 1..1215: mol_type = unassigned DNA; note = element_421c148
  misc_feature 1..3: note = core
  misc_feature 4..238: note = LE
  misc_feature 239..1201: note = CDS
  misc_feature 1202..1215: note = RE
  misc_feature 41..224: note = bridgeRNA
tcttgtatgttgccgtcatcgcttgactgcgtcgcggttgggcggtctactcggggacgcctgagtaggagcggcgggaggctgatccgcgtctaaggccatccgagcctgtcatcggagttcagccgccgacgctcaccgtgtggcgtccggtcgaacggtatcgaaagccgctctcgtgagcgcagcttgcatgcacaaggctgaccgcacacgacgccaccgaaaggagcgacgcgtggaggccattctcggtatcgacatcgccaaagcaaccttcgtcgtcgccttactgactccggaggggcggcttcggcggaaaagctgcgcgaatacgccggcgggctacgcgggcttggccggatggctcacgcggcagcacgtgacgcacgtgcacgccacgctggaggccaccggcccctacggggaggccctggccacgtggctgcacgaggccgggcatgtcgtcagtgtcgtcaatccggcggtgatccacgcgtatgcgcggacccagctgacccgcagcaagaccgaccgaattgatgcagcgctgatcgcccagtacaccgcgacgcagcggcctgctgcctggacgccgccggcgcccgagatccgccaattgcaagcgctcgtccggcgcctggacgcgttgcacgggatgcgcacccaagaactgaaccggcgcggcgcgggggccctggtggccgacgtgcgcgcctcgatcgaggcggtgctggcccagctcgaggcccagatcgcgcacgtccagcagctgattcgtcagcatctcgatcagcacccgggcctgcgcgcgcaacgcgacctgctgaccacgatccccggcatcggggagaccaccgccgcggtcctgctcgccgagctgtttgacaagccctactcgagtgcgcgccaagcggccgcctttgccggcctcgtgccgcgcctggtcgagtccggcacgcgccgtggccgcgcgcggctctcgaagattggccccggacgcctccgcaaagccctctattttcccgcggtcacggccctacgctgcaaccccacgattcgcgccgtgcgcgcgcgcctgcaggccgccggcaaacccccgatggtcatcattggcgccgccatgcgcaaactcattcatctcgccttcggcgtcctgaaatcacgccgcgcgtttgaatccaggtgtgcgcacccttgacaaccaacacggta

SEQ ID NO: 2911 - DNA, 1284 bp, unidentified
  source 1..1284: mol_type = unassigned DNA; note = element_421f995
  misc_feature 1..2: note = core
  misc_feature 3..244: note = LE
  misc_feature 245..1270: note = CDS
  misc_feature 1271..1284: note = RE
  misc_feature 63..223: note = bridgeRNA
tccattagacttgtttattgtaaatatgctataatggaacacaagttctttgagattaacctaagtaccgaatagagggctgaataagtctaagacttctcaaaagcataacttatattgcgaataagacccagcccccttgatgattaaagctagatagtgtttccatcgctttaaagcgattattaatggagccagctcatatcatcgttattcggcacaaaacaaagaaggaggttccataatggcaaagaacactttttatatagggcttgatatagcggctgatgactttgcagccagcatataccagtctcccgggataccggtaattgttaaagcagctatcagtaacaatccgaatggttttactatgttaatatcatggcttaaagagcacaatatcaatcaggcaaatgctgttatatgcatggaggcaacgggtgtctattctgaaagcattgcccactgcctgtctgctaaaggctttagggtcagtgttgagcatccgttaaaggtaaaacgcgcctttgatcctacagggcataagacagaccctgttgactcaaagcagatagctgaatacgcctacaggtatatagatgagcttaagttccttgagcctagacaagagatcgtcgagaagatcaaacagttgtttaccgcgcgcgagcagtttaccaaacagaaagttgccataaaaaacgccatgcacgcatacgcactgcatatagtccaggttgaacttataaaacaggctcatcaggaaacattaacccagcttgaaaaacagattgccaagattgacaaagaactatcaagatttatccagcaaaaccctataatagcacaaagggtaaataaccttaaaagcattcccggctgcggtatgcttttagctgccaacttaatagctattacagacaattttaaacatatagacagccataatacattagcagcctttataggtatagtgccttacaagcatcaaagcggtacatctgtgcacaaaaagccaagaatcaggcactttggcccacagtatacgcgtaagctgttaaggcttgctgctcagtctatggtaacacataatatcgtattcaggcaatattacctgcgcaaactagccgaaggcaaagccaaggctttagttttaaacaatgttagcaataaactacttaagattgcctgcgctatgatacgtgataataatagttatattaaagagcatcgttctatacaccctatgtacttaaaaacagcttgacaaaatcatagtgt

SEQ ID NO: 2912 - DNA, 1299 bp, unidentified
  source 1..1299: mol_type = unassigned DNA; note = element_422a75a
  misc_feature 1: note = core
  misc_feature 2..259: note = LE
  misc_feature 260..1252: note = CDS
  misc_feature 1253..1299: note = RE
  misc_feature 52..248: note = bridgeRNA
cctttggtctaaaagaagacaattacaaatattgttattgttggaaacggggggtccggggggtgttaaaaactaaatgttttgttaaaaacgttatgattaaaggcagggtgaacttctgaacacactagcagagcgcttattcaggtaatagttccctgcctttatgattgcccaaggcccaactagaatactttctttgctacaacaaaggtgattggcaaaaggcaatttattaatgtatttaatccataaacgtatgaaaagctggaatgttatttttggtgtcgatgtatctaaactgaccctcgacatttgctgcgctgaacgcagcctgcatgtgaaaatcgacaattgttcaaaaggatttgaggtattcaggaagtggtgtaaagcacatggcatccgtctcggggatagcctgatggtgatggaattcaccggtggctatgaataccggttcatccagttctgccagtcgctgtcgatttcctattgccggatacccggcctggagatcaaacaatcaatgggcatgaccagggggaaaagcgaccaggccgatgctttccgcatcgggcagtatggtgaagaaaaaagcaaacgcctggaaccgtccaagccactggataacaatatcgtaaagcttaagcaactcctgtcctttcgtaaaaggctggttcgtgaaaaagcaggcctggagagcacgatcaaagagcggaagtgcatgtatacgattacgaaagcggataccattatccatattgcccgggcaaaaataaaagcaaatgaaaaatatatcgccctggtcgaaaaggagatcggccaaataatccaaagcaatgaatcgatgttgcaaaactaccggatcataaccagtcttaaaggaatagggccggtcaatgcatggatgaccatcgcctataccgagaacttcaccagctttacagacccacgcaaatacgctgtatttgtcggggtgatcccctttgagcacacttcgggtacaagtattaaagggcgaagacgggtaagccacctggcgcacaaagaactaaaacaggagcttaatcaggcagccaaaacggccatagtacacgatccggagattagggcttacgctgaaagaaagcttaaaaataaacagtatccattggtattaaacaatgtcaaattcaagctgatcctaagaatgttctcactggttaaacggggtgtaaaatatgtcgaaaactatcaaaaagctgcctgaaaagaccttttttaaaattaatttggaaatatattaaacctagaata

SEQ ID NO: 2913 - DNA, 1269 bp, unidentified
  source 1..1269: mol_type = unassigned DNA; note = element_4236b74
  misc_feature 1..4: note = core
  misc_feature 5..250: note = LE
  misc_feature 251..1165: note = CDS
  misc_feature 1166..1269: note = RE
  misc_feature 71..227: note = bridgeRNA
aataccttagatttgcgcagtaaacaggagatgagatagagttggtaattttgtagagaagaggttagctaaaagaaagggaggcagggagtgaaccaggtatcgataagaattcaagattcatttccatattaggactctttgtctttcttgaaccgagacctgaataagaatttaacctttcattgttaaggtagttaggataggttcaagttcctttctctcaatttgatggtcaaaaacaaaagtaatggacaatttttatttcatcggggttgacgtcagcaaaaagaaactggacttctgcgtactattcgagggtaaggttctgcgcgaagaacaggtaagcaaccaccagcaggctgtcgccagactgatcggcgagttgaagaacgatttggaaatggataacgaacagtttttaatctgtgccgaacatacggggcaatatactttccctctggtatgtgcttgcaagtcggtcgagtgcaaactttggttggagaacccgtcccagatcaaatattcatccggtatgcagcggggcaagaacgacaaggtggatgcaaagcgcatagccatttacgcttcacggttcggagataaggttaagtattacgaccgtcccaccgaggagatagagaggcttaaacagttggagagggagcgtgcgctttacgttaccgacctggctaaatacaaaggccagatgtacgatcagaaagattttatgccggcggcgctttatcgcaagaaaacaaagcggatgaaaggcttaatacaggaactacaagcggctatcgatgcgatcactgctgaaatggagaagatcataggctcaacggaagtgcttgcgcgccagatggaacttttaatgtcgatagacggtgtaggtaaagtggtagctctgaatgtgattatcgaaacagaagcgttctcccgcttcgacaatcccagaaagttctgctgtcacgcaggtgtcgctccgttctcatacacatccgggagcagccagcactccaaaaacaaggtctcgcatagggccaacaagaacataaagaaactgctacatatggcagccgtatcggtaactcatcgtaaagagggtgaactaaaggcctactatatgcggaaagtgaagaaggaaagaacaaaatgtcggtaatcaatgcgttacgtgctaaaatcgtggcccgtatgttcgccgtcatcaaaagaaatgaagtttatactcctatttactcttaaaaaacttgcaaaaaccataag

SEQ ID NO: 2914 - DNA, 1328 bp, unidentified
  source 1..1328: mol_type = unassigned DNA; note = element_423b1e6
  misc_feature 1..2: note = core
  misc_feature 3..68: note = LE
  misc_feature 69..989: note = CDS
  misc_feature 990..1328: note = RE
  misc_feature 1094..1326: note = bridgeRNA
ttaatgagatggtcactccctccttcctggtactatgcagaggacaggctttcattcggagaactatcatggaaaacattgcgctcattggtatcgatctgggtaaaaactcttttcatattcattgccaggatcgtcgcgggaaggctgtttaccgtaaaaaatttacccggtcaaagttgatcgaatttttggcgacatgtccagctacaaccatcgcaatggaagcctgtggtggttctcactttatggcccgtaagctggaagaattgggacatttcccaaagctgatatcaccacaatttgtccgcccattcgttaaaagcaacaaaaatgatttcgtcgatgccgaggctatctgtgaagcagcgtcgcgtccatcaatgcgttttgtgcaaccccgaacggaatctcagcaggcaatgcgggctctgcatcgtgttcgagaatccctggttcaggataaggtaaaaacaactaatcagatgcatgcttttttgctggaatttggtatcagcgttccacgaggttctgcagttattagtcggctgagcactattcttgaggacaataatttacctctttatctcagccagttattactgaaactacaacaacattatcactatcttgttgagcagattaaagagctggaatcccagttgaaacgaaagctggacgaagatgaagtaggtcagcgtttactgagtattccctgtgtcggaacactaactgcaagtactatttcaactgagattggcgacgggaagcagtatgccagtagccgagactttgccgccgcaacagggttggtacctcgacaatacagcacggggggggcggacaacattgttgggcatcagcaagcgaggcaacaagaagatacgaaccttgctggttcagtgcgccagagtatttatacaaaaactggaacaccagtcaggcaggttggccgactgggtccgggagttactgtgccggaaaagtaactttgtcgtgacttgcgctctggcaaacaagctggccagaatagcctgggcactaacaacacggcagcaaacttacgaagcatagtgagagttatatcagtttaaacaatcactcatctggttttgcggatactgattattgatgatacgaacggcccaccggcctgttgaggaacctgtgaaacggaaaggctcattgaagccgtatattttcttgaggttcatcaggcgcggaactcatcgaggcgcgggaataaaatcccattcagacgccggatagattcaagcaagcccacttatcgtcaaaatcggtgttgcaaaaacgggagtgaccataga

SEQ ID NO: 2915 - DNA, 1613 bp, unidentified
  source 1..1613: mol_type = unassigned DNA; note = element_423cb6b
  misc_feature 1..2: note = core
  misc_feature 3..275: note = LE
  misc_feature 276..1490: note = CDS
  misc_feature 1491..1613: note = RE
  misc_feature 15..298: note = bridgeRNA
ctcctaatatataagtgtagggtttcagtacccaacagccagttgggacttaatcctctcattgtttaagctgtataatgattaggcatcggtctgacgatgactcctaggaccctgagcgtccgttcaatagcctgtcagccagcctgtcattgcagccgttcgatttatgcaggttgaactacctcaatacgttcgtttgataccccaggagatggaatcggcaatgagaaaagctggaatccatgcaaatatacttttggaggtacataagaatgtacaatgcagtaggtattgatgtctcaaaaggcaagagcactgttgcaatcctgcagcctggcggcactgtgatccgtaagccctttgacgtttcccacacatcccagaacctgcatgaacttgctaagtatctggacacgctgaatggtgataccagaattgttatggaatgtacgggcagataccatgagcctatcctgaaaactctctctgaagccggattgtttgtctctgtggtaaacccccacctgatcaaaaacttcggcagcaactccctgcgcaaggtcaaatccgatcctgctgacgccaggaagatcgcgcgctatacgcttgacaactgggcgaatctgcgccaatattcaggtatggataacatgcgtactcagttaaaaactttgaactcacaattcagcttcttcatgaaacagaaggtcgccgctaaggcaaaccttattgcactcttggataatacttatccgggtgtgaacaaactctttgacagccctacccgtgatgacgggagtgaaaaatgggtggattacgcctattccttctggcatgtggattgtgtccgtggaattggcttaaaagcttacacagaacgctatcaggccttctgtaaaagacaccactacatcttccaggctgataagccagagaagctgtttaacgcttcaaaggaactgacggccgtcttccccaaggagaaaacttataagctgctgatccagcagagcattcagcagttaaaccttgcttccgcgcatgtggaacggctccgcagggaaatgaatgaactggcatccacactccctgaatacaacactgtaatgagcatttatggcgttggaaagacctatggtccacagctcatcgctgagattggtgatgtgtccagatttacccacagagaagcgctgactgcctttgccggtgttgatcccggtgtcgatgaatccggccagcacaaatccaaaagcaaccgggcatccaaagttggctctgcaagactgcgtaagacattgtttcagatcatgacaaccttgctgcaaaatgccccagaagacgacccggtataccgttttcttgacaaaaagcggtcccaggaaaagccttattatgtttacatgacagccggagcgaataagttcctccgcatctactatggcaaagtcaaagagtgcctgcgtaacatagagcaggaatcataacatctgcttttcctaccacctctttcaaagccggcattcatggcggcttaaaagttgtacctaaaaatatcaaatcagatttctcaaattttcttcaaaaacacttgactttttattagcagg

SEQ ID NO: 2916 - DNA, 1625 bp, unidentified
  source 1..1625: mol_type = unassigned DNA; note = element_423d37d
  misc_feature 1..2: note = core
  misc_feature 3..284: note = LE
  misc_feature 285..1505: note = CDS
  misc_feature 1506..1625: note = RE
  misc_feature 13..310: note = bridgeRNA
ctactacaatatatttatggttaatatcccttacagccagtaaggaattatccatcttgttgcttaagctgttagaatgataagagcaatcggtatagcggtcacctccttggacttcgcgtccgtaagttagtctgctaaccagctcttcattcgcagcgttcgttttacgcaggttgatccgccttatgggtgcgttcgtgtcacatcacagtagattgaatgggcaatgagtaaaactggcactgaccatttgcaatccaaaaataaggagtgacatttttatgaacatgaacgcagtaggtattgatgtttccaagagaaaaagcacgatagccgtcttacgtcccggcggggaagttgtggtaaaaccatttgatgttccacatcggtcaactggtttccaatcattaactgaacttattaattctcttgacggtgaaacacgcattgtcatggaatgcaccggacgctactatgaacccgttgctcgccaactgtcacaggcaggctttttcgtaagcgctgtgaatcctcagatcattcataactttcagggacaggacaatcctctccgcagggtaaagacggataaggcagattccgtaaaaatcgcacgttacactcttgactgttgggcaaatctgaaacagtataatcttatggatgaattacgtacccaactaaaaaccatgaaccgacagtttgatttttacatgaagcacaaaaccgccatgaaaaacaacctgattggccttatcgatcagactcatccgggggccaacacttactttgacagtccagcccgtgaggatggcagccagaaatgggttgatttccttgatacatactggcatgtggattgtggccgtaaaatgtccctgaatgcttttacagaccgctatcaaaagtggtgtggccgcaagaagttcaacttcagcaagtcaaaagccgaagaaatctacaggacagctaaggagcttattcccgtacttccaaaggacaattttaccaagcgcatcgtcaaacaggcaatccagcaattaaacgccgcttcccagaccgttgagcagctgcgctcacttatgaatgaaactgcctccaaactgccggaatattcggttgtcatggcgatgaagggcgtgggtccatctctagggcctcagcttatggctgaaatcggggatgtggcacgttttacccacaaaggcgctatcacggcatttgctggagtggatcccggcgtaaatgattccggggattattcccagaaaagcgtacatgcttccaaacacggctcgccagtgttacgcaagaccttgtttcaggtcatggatgtactgatcaagaccaaaccggatgatgcggtatatctattcatggacaagaaacgtactcaaggcaagccttattacgtctacatgaccgcaggtgccaataagtttttacgtatttactacggaagggtcaaagaatatcttgccactcttcccacatcggactaaccatcacatagctttctttcagaccggcataatctggcggtcttattttaatacctatttttcaacctgcataaaattttcaaagttttttaaaatttaacttgattttttatttgcagg

SEQ ID NO: 2917 - DNA, 1579 bp, unidentified
  source 1..1579: mol_type = unassigned DNA; note = element_4241f5b
  misc_feature 1..3: note = core
  misc_feature 4..249: note = LE
  misc_feature 250..1452: note = CDS
  misc_feature 1453..1579: note = RE
  misc_feature 8..226: note = bridgeRNA
gttcgtattatagagttaaccagtttttactggttgctcttttttttataggacctattatttcagtagccagggtagaacgtacgggtgcgtgggagtcagatctcgtaacataaactgttcgccccctacttgtagaatgatgtttgaggctggttgggacatatgatctcgtataacaagcgaagctatggaactacaggaaggtataggggttactggtgagtacatcaaagggagagataattattgaatccagtagttggcctagatgtggccaaaggggaaagtgaagctcaagcatttcttgataaggacaagccatatggaaagagcttcaggatacaacatatcaaggaggatttagatactttcatctcttttttgaaagagatagaaagaaagactggcgtaagaccagcagtaattcttgaatctacagggcattaccatacaccaattattcaatgtctggaggagagtcaatatctatatatcttggtaaaccccatcatttctcatcaggccaagaaaaccagtcttagaaaggtaaagacggatgccgttgatgcatatcaactttgtgttttgtattacaaggaagaatttgagccttataagaaacgaggactaaggctactaaatctaagaacactatcaaggcaatacgaagcagttacgaacctttacattcaggcaaaacttcaattccacacaattcttgaccaggtatttccggaatataggggagtctttggagatttattttcaaaagtctctcttcaggttttaaaggagtttcctacatctgaagatgttctgaggactggtgaagcaaagatactggagcgaattgtgggaatgcgtataaaacggtctgagggttgggccagggagagggcagctaaattaatagcttcggctgagcgaaatcctttccaacaaggtgtgtatcaaagtcagttgttcagtttggatatgtatatctctatgcttcttcagtaccaagaacacctatccagtatagaggcagagatagatgtcttggcagaagaaattgaagaatgtaagataatccaatcaattcccggaataggaggaaaaatcgcggcaacgatcatttccgaaatcggagaaattgaccggtttaatcaccctaaaaaacttgtggcttacgcgggagtagatccaagtgtccattcatcaggtaagttcacagctactataaatcatattactaaacgaggttcaagccgattacggcacgctttgtatatggccgttttatgcggtataagaagctccaggaacaagaagctaaaagagtattatgatcggaaacgaaatgaaggaaagccttcaagagtagcaatgatagcctgtgtaaacaagcttttacactggatttatgcaatcctaaaaaggaatgagcagttcctagatatggcttaatcaacaagaaaaaacagctaatgaaaaaccttccaaacggtatttggagggttatttggcgtgccttcaaaagtataacacggaagaacaaatattttaataagaagttcttgactcctattagctg

SEQ ID NO: 2918 - DNA, 1367 bp, unidentified
  source 1..1367: mol_type = unassigned DNA; note = element_4251b4f
  misc_feature 1..3: note = core
  misc_feature 4..84: note = LE
  misc_feature 85..1113: note = CDS
  misc_feature 1114..1367: note = RE
  misc_feature 1109..1353: note = bridgeRNA
tgatggggtggacggcccccgctcctgacagcgcgtgttgtaaggtgctgcggtcgtccacctccacggcagggagctgtccagatgcaagttgccacgatcgggctggatctcgccaagcactggtttcaggttcacggtgtcgatgcggcaggggctccggtccaccgcaagcggttgaagcgcgctgaggtactcgctttcttccaaggccttgagccctgccttgtcggcatggaggcttgtgcttcctctcactactgggcgcgtgagatcgcgcgttttggacacaccgtccggctcatgccgcccgcttacgtcaagccttatgtcaaacggggcaagaacgacgcggccgacgcagaggccatctgcgaggcggtgatgcgacccaccatgcgcttcgtggcggtcaagacggcggagcagcagggtctccttctgctccatcgcgctcgtcggctgctggttcgccaacgcaccatgacggcgtgtgccatccgctcccatttggctgagtttggcttcatcaccggccagggcatcggccgcgttgagcccctcctggagcgcttggccgagaaaggggcggagaggctaccgggcgaggtgcgcgacatcctcctcatgctcgcggccgagctcgccacccttggggagcgcattgcccagatcgaggctcggatcgacgaacaacaccgtgccaacccggtgagccgtttgatcgcaaccataccgggcattggtccgatcaccgccacggcgatcgcagcaacggtcccggatgccgccgcctttcgctccggccgcgactttgcggcctggctcggcttgaccccgcgccagaactcgagcggtggaaaggacaggttggggagtatcaccaagcgcggagacacctacctccggcacttgctgttcatcggcgcccgcaacgtgatccgctatcccaaggccagagcagccgccggagctgcctggatcgaggcgctcgtggcacgacgttcaaagaccgtcgcggccgtcgcgctggccaacaagatggcgcgcattgcctgggccatgatgaccagcggggaggtctaccgatcagcgcgtgaggccacggcctgaggagggctgctgccgaaccgggctccagacgtgcgagggcgatgacgacgtgatggcgaaccggcagggccggggattggcagagccagcagagctttcggagcgcaaagcccgccccgttgatttggcgccgatccgcggactccatcagggccagcggtcatgtgggccgcaccaacaggccgaatacatgaacgcaccccaccgccgccaaacgccaacatccttcttgcaccgcgggggccgtccataca

SEQ ID NO: 2919 - DNA, 1583 bp, unidentified
  source 1..1583: mol_type = unassigned DNA; note = element_42545c6
  misc_feature 1: note = core
  misc_feature 2..280: note = LE
  misc_feature 281..1459: note = CDS
  misc_feature 1460..1583: note = RE
  misc_feature 23..256: note = bridgeRNA
cgtataatccaattatcttagatggtaattggatttttcctttctcccagttaacactgggtatttatttccatctttgatatattttgaaaaggcactgtggatctgtatctatttaattacagctttgactggtacgaggtgactcagaccacagcttttcgtctattactgttaatcagtttgttaacgcatcgacgtttttatttacgtgattacacagccgaattctctgtggaagacagcagtgctcaaaatatttatcaggaggtataaacctatgtcaatgtactttattggaattgatatttccaagtacaaacatgattgctgcatcatttctgcagctgatcaaaaagtagtttctaaagtcacaatcaaaaacaataaagccggttttaatgaactgcttacaatcattcattctctcgcaaatcctgcggacataagaatagggtttgaatcaactgcccattatgctctcaatcttgaactcttccttgaaaattctctcctaaccttcatggaagtaaatcctgttctcatcagtgaatacaagaaatcaaaaactcttaggcgtacaaaaaccgactctgttgactgtgaatcaatagctcgttggttaatgactgttgaatacaaaccccattcaaaaggattttaccacgcttactctttaaagtcattaactcgtttacgcgataaacttatccgacagcgttctttctatcttgttaaaatcacaaatgtgttagatcatacattccctgagtttaaaccattctttaatgaacgcttatccaaaactgctctctatctgcttgagaactatggttctgctgaaaagatggctcgtatgaactcagcctcttatgaaaagctacgttccgtatcccgggggaagttttcaccacagcaattcctacgactaaaagaacttgctgccaatactgttggtgtaaataactctatttttgatgtagagctgaacagtcttttatctttatacaaatctcttgtaaaagagattgataccattgaaaaagaaatcaacaaactaattgaagaagtacatcctcactatatgtcagttcctggaatcggaccattatcagcagctgtaatctattctgaatacggcgatatatctaacttcactaataatccaggacaaatgcttgcatttgccggaatagaaccgggaatcaacgaatctggtactgaatctcacggaggcaagatggttaagcgtggatcatcccagctccgctacacacttatcaattgttgtctaccattaatccgctttgacatgacatttgcaacttactatgccaagaaacgcggagaaggcaaaccacatcgagtagccattactcatgtagccaaaaagcttattagagtcatctacgcattggagagccaagatatcgactttaatgctcaaaaacttcgttaatctctagtggattaatactaatttctcccatctgaaatacgatgtattcagatggcttattaaaattacccatttttacaattcaaaaaatttcaaaattctcttgactgtttatagtttgtca

SEQ ID NO: 2920 - DNA, 1490 bp, unidentified
  source 1..1490: mol_type = unassigned DNA; note = element_4255379
  misc_feature 1..2: note = core
  misc_feature 3..205: note = LE
  misc_feature 206..1474: note = CDS
  misc_feature 1475..1490: note = RE
ctgatggcactaccttctttcgtcatcgggcgctcccggggaacgcttgtgtcgcttgtcccgcgaggactgacatgagacggcgtcccctggagtgaccggcggaggcccgaagcccgcgagggtgttgtcctgcgaggactggtccatcagcacggcgcagcgcctccaccgtctgttgctggtactggcgagaggagcgtgcgtgcttggcgtggggattgactgggccgagtcgtttcacgacgtggcagttggcagacccggtgcgggggtgatcgagcagttccggatcgagcacggcccggccggagtgcaccggctgatcgcccggtgcctggagctggagcctgacccggccgaggtgcgggtggtgctggagacccggcacggcctgctggtcgaggcgctggcagatgccgggttcacggtgctgccggtcaacccggacctggtggcccgccgccgcggcccggcgaagaagaaagacgacgccgaggacgcgcggatctgctgcctgctggccctggacgcctacctggacctgcgccggctgatcccgcacggccagacgggtaccgagctgcgcgcgatcgcccgcgacgatgagcgcgccgcccgcgacgagcggcggatcggcaaccggctccgcgccgacctgctggcggcgttcccggccgcgctggacatcgccgccggcgacctgggctcggcggtgttcctgcggctgctggaacgctggcccgctgctgacctgctggccgccgcctcccgcgatgagatcgaggcgttcgcccggtcgcaccggcacggctgggccggccggttcgccgatcaggtcactgccgcgcgggccgagccgcggcttgccgtccgcgccgagctggcccgcgccaaggccggctcgatccgcctggcagccgcccagctgctggccatccgcgcccagcggcgcgaatggcacaaacggatggccgagctgctgctcggcgccccccgcaccggccgggacaagaccgcgaaggacccggacccggggaaggcgttcccgggcggcgagatctacctgagcatgcctggcctgggagatcgtctcgccgcccgggtcgccggcgagatcggcgagcaccctgagcaatacgccacgccgaacgccctgcaatgctacgcaggccgcgccccggtcacccggcgatccggccgcagcgaatacatcgtcgcccggcgcctggcctacaaccgctacctcggcgaagcagtccaccagtgggcgttctgcagcctgtcccgctccacctgggcccgcgagttctacgacaccaagatcgccgccggcaaaacccaccacgccgcgctgcgcgccctcggcaaccgctggctcgaagtcctctggcactgcctgcacctcggcgtccgctacaacgaagccatccacatcgccaaccgcaaccgcgcactcaacaaagcggcctgaggttgacagagggtgt

SEQ ID NO: 2921 - DNA, 1621 bp, unidentified
  source 1..1621: mol_type = unassigned DNA; note = element_4255fb6
  misc_feature 1..3: note = core
  misc_feature 4..263: note = LE
  misc_feature 264..1463: note = CDS
  misc_feature 1464..1621: note = RE
  misc_feature 38..283: note = bridgeRNA
tttggtacgataaaagtgtaaatgcaagacatcaaataaatgatgttgagtatttgcacttatttttttacaataagagagtaattggcctggcgtgggcttttttggattatagcatccgtcataaaaactgtcagccatctcttattgtagcattcgattaagcaggttgaactaataaaagacgttcgtgtaactaaccaaaatgaagggcaataagtgcagatggattgcaattacaaaataaatcatggaggttaactatgataagtgtaggaattgatgtgtcaaaagaaaaaagcatggtttgcattttaaagccatacggggaaatagtccagtcaccgtttgaaatcatgcatacagagggatcggttacaaaattagctaataaaatacttgaattagaaggagaagtaaaagtagttttagaagcaacaggagcataccatttaccattattaagtatttttttagacaaaaaaatatttgtaagtattataaatcctttagttatgaagaaatatgcttctacatctattagaaaaggaaaaacagacaaaattgattctatacggattgcaaattatgggatagataattggtttcatttgactaagcatgaagcgaacgaagagacatatgaagaattgaaatttcttggtagacaatattctcattatataaagataaaaattgatagtaagttggcacttactagtattcttgatagaacaatgccaggaataaaaaagttgttgtcaggaaaaagatctgataatccaatgaaggataagctaagtgattttgtagagcattattggcattatgataacataacaaagctaacggaattaaagttcgttgaaagttatcagaaatgggctaaaaagaatggataccacgcaagtgagtccaaggcaagaaaaatctatgcgatggcatgcagtggtattccaacacttccttccagaacaccatctaccaaaatgcttgttctggaatctgttagagttctaaaagaagtgaataaaactctatataatattttatcacagcttcaatctatagcaagaactttaaaagaatatgagacagttagagctatgaatggtgtaggagatgtattagcaccaaggttaattgctgaaatcggtgatgtgaaaagatttcatagtgtaagtgcattgatagcttatgcaggattggattccccaccatacgagtcaggagcttttataggtacaaggcgaaagatatccaaaagaggttcttcattactacgaaaaacaggttacgaagtcatgaaatgtttaaaaacagtcaaaccaacagaagattcagcagtatatttgtatatgctaaagaaggaagctgaaggaaaacctaagaaagtcgctaaaattgccgcccttaataaatttctaagaatatattatgctcgagtgatggaactgcagtaaccataaacagaataaagatgaattaggctaactcagatatacaagttagtctatttagcatgcaaaaaacatcatctgattaaaaggatgatgttttttattgccatttcaaattttgcttaaataattgaaaaaaactattgatttttcttagcagg

SEQ ID NO: 2922 - DNA, 1614 bp, unidentified
  source 1..1614: mol_type = unassigned DNA; note = element_4262f94
  misc_feature 1..3: note = core
  misc_feature 4..251: note = LE
  misc_feature 252..1487: note = CDS
  misc_feature 1488..1614: note = RE
  misc_feature 8..227: note = bridgeRNA
gttcgtattataaggttgaccaagttaattggttgacctttttgtttgaggtctagaatactagaggtagctggggtagaacgtaagcccctgtgggattcaatcccgacaactaaaccgttcgccccctacttatagaaacatgattgaagctggttgggacttagatcccgtataacaagcgaagctatgacactataaggagccatctaggggttaccagctaatttattgaggaggaggagatcatcatgaatccagtcattggtctggatgtcgcaaaaggagaaagtcaggttcaagcattcttggagaaaaagacaccctataaaaagagctttaaagtcgcacatacactagaaggattacaggaactacatgcatttgtcaaagagatagaaaacttaacaggctcaaaacctcccttcattttggagtccaccgggcattatcatatgcctgttgtacagtatttcgaaaaaagaggttatctgttaatcattgtgaacccactcatttcatataaagcaaaaagttcgagtttacgtaaggtcaaaacagacataattgatgcccaccacctctgcgagctgtattacaaagaggatttagagccatataaaaagcgaggcattcagcttttaaacctgcgtaatctgacgagacagcacgagaatttgacaggtatgtttgtgcagacgaagttgcagtttcaatccgtgctggatcaagtatttccagagtatgtaggtgtatttggagagttatattcggatgtctctttacttactttatcagccttcccaacctctgaagagatcttggaggctggtgaagagaccttatctatgaagattaaggaactgtgcaagagccgatctcagaaatgggcccgtaatcaagctaccaaactgatgaaagcagctaagcgaaatccatttcagcagaccttatatcatagccacctgattagtttagagatgcttattaagattcttcttgagtacaaaaagcatctatccaagcttgaagaagagatagatgctttagcaaaaaatatagaagaatataagattatccaatccattcctggaatcggtgaaaaaatcgcggcaacgattatttctgaaattggagaaatagatcggtttaatcaccctaaaaagttagttgcctttgcgggaatcgatcctagcgtattcgagtctggcaccttcaaaggtaccaagaatcacatcacgaaaaggggttccagcaggcttagacatgccttgtttacagctgtccgatgtgccattcgagatgcacgtaaaaaacgaacgacaaaagaactcatccctagaaacaagagactacgtgagttttacgacaaaaaacgggacgaaggaaaaccgtatcgagtatccattattgcctgtgctaacaagcttttaggttggatttacgctcttttgaaaaccaaaacaacattccaagatgttgcttaaaataaattttcacatatattcaaggaacttccataacgttgaaggaagtttatttgtcatgccttattttcagtatagcatgtcaaaattatatgattaagtgaaatgtttgacaaactattagctg

SEQ ID NO: 2923 - DNA, 1457 bp, unidentified
  source 1..1457: mol_type = unassigned DNA; note = element_4264a71
  misc_feature 1..3: note = core
  misc_feature 4..135: note = LE
  misc_feature 136..1182: note = CDS
  misc_feature 1183..1457: note = RE
  misc_feature 1222..1453: note = bridgeRNA
agatggcatggtcaccccacccacaccgttgctgttgccgtgaggcccaaagtccgctgaagggggccgtgcagatacggcataaatgtgccagagtggagatttctgtaaccgctcaaacttggaggtcccgccatgcaatctaccgcacaactgcccgtcatcggtctggatatcgcgaagaatgtgtttcaacttcacagcgtggatgcagcgactggagagatccagcgccgccaattgaagcgcccaaaggtggctgaattctttgcaaatcggcaaccgtctctggtggccatagaagcctgcggcggagctcaccactgggcccgtactttgcttgccatggggcacaaggtcaagctgctgccggcaaaacatgtgcgggcgttcgtactgcgcgacaagactgacgcgctcgacgcacaagccatttggatcgcggcccagcagccgcacatcaaggacgtgtcggtcaaaagcgagcagcaacaagcctgcttggccctgcacagcatgcggcagcaactgatgaagatgcgaatcatgcagaccaatgcactgcgtggcttgctctacgagtttggcatcgtgttgccagttgggcacagcaaactgcttggttccattcaaagtgaaatgactcaagcgcaactgaacaaccgactgcctgacatcgtcgtgttgagcgtgcaggagcagctaaaaaggattgatgcgatgcaggaagacatcgatggtctcagcaagcggcttatcgccctgctcaaacagaaccagcaaatgctcgcggtacaagcaatacctggcgtggggccgttgacggccacagctttggtggcatccgttggagatgtcttgccattcaaatctgggcgccactttgcctcgtggttgggtttgacgccgcgccaggtgggaacgggcggcaagacgcagcagcttggaatctccaaacgcggagacacctacttgcgcacgctgctcattgcgggagccagatccattgttggtcgaagtgcacacaatggttggatcgaacggttgctgcagcggcggcacttcaacgtcgtggtggctgccgtggccaacaaaatggcgcgtaccgtttgggcggtcctggccaaaggcgctgcctttgaccaggttaaatggagtcctgcagagccagtggcggtctgaagagacaccgatcctgaagaactgacaactcatgtaaacctgttttgaaggagagcatgcaagaagcgaatgtgatgggataaaggtaaaaccggggtagaggaaatccgagcgacaagttgggcaataagcccggacaatagattggaactccgcccgcgaatcgccatcttggtcagcagaaataactccctgcattaacagaccgaatgtaaggctgcaacccctttgaacttcacaccgcaaaaacttgctttccttggggtgaccatgta

SEQ ID NO: 2924 - DNA, 1302 bp, unidentified
  source 1..1302: mol_type = unassigned DNA; note = element_4275d8f
  misc_feature 1..2: note = core
  misc_feature 3..252: note = LE
  misc_feature 253..1188: note = CDS
  misc_feature 1189..1302: note = RE
  misc_feature 83..231: note = bridgeRNA
cttgtatcttacagaggtaggtaacccgtcgcccctaaggtgaaacgaacaccgttttgtagcttgggtgcctatatttttaggaaggagcgtggcaacccagtttccccctggtgcttgacaccgaatggtagccctcggagccacgctgctagcccaatgaccaaaactcgaaggatcgctagagacctagatctcggatttgcaaggacgagtggtcaaagggacaaaaaccatacctcagcataaacgatgacaccagaaaaaacatgggttgggattgatgtcagtaaagcgagtctagatgtgtacctgttgccccaagcgaccagcttacaggtgcccaacacagcagccggggtgcaattgttgattgagcaatggagtgcaactccaccgcatttagtggtggtggaatcaaccggaggattggagcgaacgctggtggagggattgcaacaggcgaatattgccgttgccattgctaatcccagaaaagtgaaaggatttgccattgccctgggcaaagccaaaacggacaaactcgatgctcaagtgattgcccgctttgctcagagcattcccttgcagccacgagcggtggtagatgccgccagccaacagttgagtgagttgatgcatcgtcgtcagcaactcgtcgaaatccaggtggctgagaagaatcggctctctcgggttgctccaaccgtgcgaagcaacatcgagcagcatctccaacagctcaggcaacacctggacaatttggatcaacagattcaagccctcggtgagcagcaagccgattggcagcgcaaagaccagattttgcagtccgtcaagggcattggtcgggtgaccgccgccctctgcttggtggaactccccgaactgggcaagctctctgaaaaacaaattgctcggttggttggggttgctcccatcaaccacgacagtggcaaacaccagggcaaacggatgatctcaggaggtcgcacccgcgttcgctgcggcttgtacatggcaaccttagtcgcctctcgtcataacccagtcatccgcaacttctatcaacacttgctcgccagaggcaagctcaaacaagttgccctggttgcctgtatgcgaaaactgctggtcattctcaatgccatgatgcgagacaacaaaacctggcaaccgcctgcctaatccagcttcatcgccaaattctgacaagataacgggttgggagacccgttatcttgtcatgaacatccacaggtcacaattgtccttcttttcccttgactttcaagacaatcg

SEQ ID NO: 2925 - DNA, 1578 bp, unidentified
  source 1..1578: mol_type = unassigned DNA; note = element_428d327
  misc_feature 1..3: note = core
  misc_feature 4..245: note = LE
  misc_feature 246..1448: note = CDS
  misc_feature 1449..1578: note = RE
  misc_feature 8..224: note = bridgeRNA
tttcgtattataaggttagccagtttttactggttgacctttttttaatagaatctattatatcagtagccagggtaggacgtacgggtgcgtggggcattgatcccgtcaactaaactgtccgccccctacttgtagaaacatgtttgaggctggttgggacgtagatctcgtataacaagcgaagctatgacactacatggaggactaggggtactggttagtaagtagaggaggagaagacaatgaatccagtagttggtctggatgtggcaaagggagaaagtcaagttcaggcattttcagataaatcaaaaccgtatggaaagagtttctcaatgaagcataccagagaggaattagatcaatttataggctttttaaaagagatcgaagaggtgacagggcaagttcctatggtcattttagaatctacaggccattatcattcccccattgttcaatgcatggaggaacacgagattttatatatcttgcttaatcctattatttcttatcaggcaaagaagtccagtttacgaaaggtaaaaacagacgtgatcgatgcgtatcagttgtgtgtgctctattacaaagaagattttgaaccccataaaaatagagggattcagcttttaaaccttcggaatttgtcaagacaacaggagattgtaacgaatatgtatgtggaagttaaacttcattttcacaccattttagatcaagtgtttcctgaataccggaaggtttttggagatctatattcaaaggtttctttatcgatgttaaaggaatatcccacttcagaggccatattaacagccggggaaagtagactagtagagagtgttatggagttctgtccgaggcgatctggtcaatgggcgagggaaaaagcaaaaaaaataatggactccgcatctcgaaatccatttcaaaaagtcgtgtatgaaagtcacttaatcaatctacgcatgtatattgatttgctttttcattaccaagggcacctttctgatttggaaggtcgtatcgttgccttggcaaatgaagtggaggaatacaagatcatccaatcgattccgggaatcggagaaaaaatcgctgcaacgattatctctgagattggtgaaatcgatcggtttaatcatcccaaaaaactcgttgccttcgctggagtcgatcctagtgttcactcatcaggtaagtttacggcaacaatcaatcatattactaaaagaggttcgagcagactacgccattccctgtatcttgccgtattatgcggtataaggagttcaagaaacaaaaagcttaaagcattctatgataagaaaaaatcagaaggaaagcccgccaaagtggcgatcgttgcctgtattaataaacttcttcattggatttatgctttattaaagagaaaagaaacgttccttgatttagcttaattaacggttttgtgaaacaaagagaaatccttccaaaagggttttggagggttatttggcatggccaaaaatagtataacataagggaaatgaaaattttagagaaagatattgacttcctattagctgg

SEQ ID NO: 2926 - DNA, 1578 bp, unidentified
  source 1..1578: mol_type = unassigned DNA; note = element_428e0da
  misc_feature 1: note = core
  misc_feature 2..263: note = LE
  misc_feature 264..1463: note = CDS
  misc_feature 1464..1578: note = RE
  misc_feature 10..241: note = bridgeRNA
cattaccatgtttagtaggttctgatagtcaggacccggtcgccggttccggtatgactctctcgccctgtcgctgatgatccggggggtgctgtcgccgggagcggggacgtccgcagaccgctgataggaaccaggccggtcgcacgaatgccccagggactcgcggcgcaggccccgcgtaatgtggctgcggcgcgggcgcccggactccatcccagtccacggcggccacggaacatccccagacgggaggaacgacgatgaccccggacgacatcgacgtgtggatcggcctggacgtaggcaaaagcgcgcaccacgcgcatgccctcgaccgcgacggcgccaccgtctacgacaagccggtcagacaggacgagaaagccatccggaccatgctggaaaggctttccgaacgaggccggccgctactggtcgtcgaccagcccaacaccatcggctcgctgcccctgaccgtggccagaagcatggggatcgccgtcgcctaccttcccggaggcgcgatgcgcaaggccgcccagctcctgcccggcagcgcgaagaccgaccggagggacgcgcgcgtgatcgcatgggccgccctcaaactgcccgagaccctcaaagacgcaggaagcgacgacgagaccctcgccgccctgaggatgctggcgggacacgacgaggacctcgcccacgaggccacccgccacatcaaccgggcgcgcggcctgctcctgcaggtccaccccgcgttcgaacgcgcgctcaaaggcgagaggatcgcgcgggactcgaccctcgccctgctcgaacactacggcggccccgcgggcatgaacaaggcaggcgtccagaacgtgagggcgtgggccaaggccaacggccttcgcgccggcaccatcatcgacgacatgttccgcgcgatcggcgagcagaccgtcaccgtgccgggcgcgctcatggcggagagcatcatccccgcgctcgcccgcgacatcaaggcgatcaaggaccggcgacgcgagatcggccgtcaggtcgagacgcttctggaggaccaccctcttctcacggtcctgacgtcgatgcccgggataggcgtcaggaccgcaagcggcatcctcctcggcatcggcggcgacatcgccaacttcaagagcgcggcccacctcgccgcgtacgccggcatcgcgccggtcaccagccaatccggcaccagcatcaagggcgaacggccggcccgcggcggtaacaagcgtctcaagaacgcgctgtggcagaccgcgttcgtcgccagcaccaagcacccgccatcgatcgcctactacaaacgcaaacgggaacagggcaagcaccacaacgccgccatcatctgcctcgcacgccgacgctgcgacgtgatctacagcatgctcaaaaacggaaccctctaccaagatcccatcctcgccgcctgaaaaccgaacgacggacaaagcaccggaccggccggcaaggcgaagcgcgcccgcaaacggccaccgagaccccgatatgccaaccctctacggagttgacaaaaacataggaaca

SEQ ID NO: 2927 - DNA, 1512 bp, unidentified
  source 1..1512: mol_type = unassigned DNA; note = element_4292c26
  misc_feature 1..2: note = core
  misc_feature 3..79: note = LE
  misc_feature 80..1189: note = CDS
  misc_feature 1190..1512: note = RE
  misc_feature 1251..1499: note = bridgeRNA
tgatggggtggatggccccctcacagcatctgtgtgccaaagttgggttgtcgacaacaccaacagacgggagccatccatgaaagaggttacaacgatcgggctggatctggccaaggcagtgtttcaggtccatggggttgatgcggcaggggcggtgacgctgcgtcgcgcggtgcggcggaggcaggttgtggcgttctttgccaaattgccgccctgtctgatcgggatggaggcgtgcgcgacggcgcactactgggcgcgcgagatcaccaagctgggccacgacgtgcggctgatcccgccggcttatgcgaaggcctatgtgcggcgcaacaagaacgacccggcggatgccaaggcgatctgcgaggcggtgagtcggccctcgatgcgctttgtcgcgatcaagaccgaggtgcagcaagcggcggcgggcattcacaaggtgcgtgagatgctggtcaagcagcgcacgatgctgatcaacgcgttgcgcgggctgatggcggagtttggcattgtcgtcgccgaaggtccccatcatgtcggcgaactcgtcgcgatcctcgccgatccggcagaccggcgcatcccaacaccgctgcacgagggcttgctggcgattgtggagaccttgcgcgggctcgagcgacggatcgagatcgtcgagaagcagattgtcggctggggccgcggcaaccagacctgtcggcacctgatcaccatccccggctacggaccgatcctgtccagtgccatggcagcgctcgccgtcgaccccgccgccttcaccagcggccggcacttctcggcctcgctcggcctagtgccgcgccaggacggcacgggcggaaaggtcaagctcggtccgatcagcaagcgcgggaacggctatctgcgccgcctgctggtcaacggggcgatgtcggtgctgtgcagcaagcgcgccaaggaggacccctggttggtgagactgctcgagaccaaagagcgcaaggtcgccgcctgcgcgctcgccaacaagatggcacgcatcggttgggcagtaatgatgcgccaggaggactttcgcaaccggcgccacgatcaaccgtgccccgacctgggcgagcctggcaccgtgctcaccgccgtcaagaccgctgcgcgcgcgcctgcggcggtggccttcggccagtcttgaccgcggctgcgcgcggcgccaccccggaaccaggtcgggacgaagaaacggccctttgatcgaacaaagaaacagcacttcacagacacaggacttgcgagggtgaacaagcgtgatggcatcgtcggtcaaccgacggatcgagggatacctgtcccgggacatggggcaatgcgaccccgcgggcttgatcaggcctcgacccacggaacccatcagggcctgcggccttgcgccgcgccaccaggccggacacatgactgcaattggtctttgatgccaaggcgtgaaaaaatccttgcgagccgggggccatccacaca

SEQ ID NO: 2928 - DNA, 1417 bp, unidentified
  source 1..1417: mol_type = unassigned DNA; note = element_429abbf
  misc_feature 1: note = core
  misc_feature 2..96: note = LE
  misc_feature 97..1128: note = CDS
  misc_feature 1129..1417: note = RE
  misc_feature 1179..1408: note = bridgeRNA
caatgggatggactcctcctcccctaaacggcatctaggtgccagactggaagtaacacccaccagtcaccagtcaccagagagaaggagtccgtcatgcagattagtcgagttggtattgatttagcaaaggatgtttttcaacttcatggtgtagattgtcatgaaaaagctgtctggcatcgccgtctaaaacgtaataactggttaaaggtattgttgaaaacggttgaaccgggttgtgaaattggcatggaggcatgtgccggtgcacatcattgggcacggctactgatacaaaaggggtttaccgtaaaattgattgctccgcaatttgtgaagccatatgtgaagagcaataaaaatgatgccaaggatgctgaggcaatctgtgaagcgatgagccgacccagtatgcgctttgtttccgtgaagacagtagagcaacaggatatccaggcaacacatcgcattcgttcagagctcattagccagcgtacagccaaagccaatcagatccgcggcctggttgctgaatatggtttggttgcaccgcaacgcatgaatcatctacgagtagccataccgatgtggcttgaagacgcagagaatggcctgacagatcgattccgatgcttattgcatggcctatggcatgacctaaaaactttggacaacagggttgatgagcttggctgtgaaatcaatagaattgcagaaaatgatcctgccgctaaacggttacaacagcttcgtggtgtcggccccatgattgcgacggcattggttgctgcggtgggcaatgcacaacagttcgccaatggtcggcaaatgtcagcatcactggggttaacgcccagacaacacagttcgggaaataaggaccgcctgctgggcattactaagcgtggtgatgcctatctgcgctgtttgctgattcatggtgcgcgagcggccatctatgcagccaaagggaaagatgatcgattaagccaatgggttactgaattggcagcacgtcggcatccaaatgtagctgcggttgcgctggccaataaaacggcacgtattgcctgggccatgctgacacagggcacagactataaaccagattttattgcggcatgatgttaaacaacatccgataacagcgttatgaaacattgaaacgggagcacctcacatacgattgcaaagcaagccgaatgatggtgaacaggtcgaaccggcgccagcaaaacccgtgaatggccgtgtgcgagaagcacgtaagagcaatagggagttggcgcgcgaatagcccattatggccctgcatcaaaaatagtgatgcttaattggaggccggatatacgtgagcagtcgtgccttatcaccatacaacggagtgcttgcaagctgagggggagtccatata

SEQ ID NO: 2929 - DNA, 1387 bp, unidentified
  source 1..1387: mol_type = unassigned DNA; note = element_42ac1f5
  misc_feature 1..3: note = core
  misc_feature 4..85: note = LE
  misc_feature 86..1114: note = CDS
  misc_feature 1115..1387: note = RE
  misc_feature 1085..1374: note = bridgeRNA
agatgggatggttgccgccctcccgaaacggcatcgcaatgtgccatattgattttgttgatgatcaataagagaggacggcaaaatgaaggatacaatgattggcgttgacctgtcgaagtcagtttttcagctgcacggcacatcaatgacgggtgaactgaagttccgaaagaaactgtcgcgacagggatttgtgcggttcatggaatcgcatgatccagcggtggtcgttatggaagcctgcggcggtgccaacttctgggcaagggaattggccgggctgggccatgatgtcaaactcgtagcacctcagtacgttcgaccgtttgttaagcggcagaaaaacgacgcggcggacgcggaagcgattgtcattgccgcgcaacgtccggaaatgcgcttcgtcgagccgaagacggaagaacagcaggcaagagcagttgtcttccgtgcacgcgagcgactgctctaccaaaggaccgaactggtcaacgttgttcgctccattctctatgagcatggcctcacgttcccgacaggcttcgagcaaatcggacgcattgaggcaacgcttcgtgatcccgccaccgtgttgtccgatattgtccgcacagagtgtctagatttgatcgagcagatcgcagaaaagacaacgcgtatcaatacgaagacgcagatggccagggaactcgcaaaagatgcggaaacggcgagacggctccagacgatgcccggtctcggaccgatcacggcattggccatcgaaaccttcgcgccgccaatggagactttcaaatgcggccgcagcttcgcagcctggcttggtatcgtccctcggcagcattcctccggcggcaaagccaggctgggacgtatctccaaggcaggacaggcagacatccgaagactgttgatcaccggcgcgatgacgcgattgaactggctcggccggaaaagaatccagcccggttcatggttggcaaagatgctggacagaaaaccgaggctccttgtcgcgatcgccctggcaaacaagatggcacgcgcgatctgggcgatgctcaccaaaaaggaagactaccgggaccccgcacaagttgcgatcgcctgacagcacagcataacgaaacccaaagggcggaaaggaatagtccaagaagtcgatccctcgaatgggcaaaatgatcgaacagatctggatcgggaaaaccagagtggttctgtgagcgcttcagctctgcggagagatttggacccgacccgctgatcaccataccggccagcggcttctttagcgccgcacaccaaggccttatagaagaccgcactcgatcactcgccaataaagggaaagagttcttgcactacgggcggcaaccataga

SEQ ID NO: 2930 - DNA, 1405 bp, unidentified
  source 1..1405: mol_type = unassigned DNA; note = element_42accc4
  misc_feature 1: note = core
  misc_feature 2: note = LE
  misc_feature 3..1121: note = CDS
  misc_feature 1122..1405: note = RE
  misc_feature 1170..1397: note = bridgeRNA
caatgggatggacccctcctcacctaatcggcatctatgtgccagactggaagcggtatccaccagtcaacagtgagaaagagtccaagatgaagattatccgcgtcggggtcgatttggcaaagaacgtgtttcaggttcacggtgttgatggtagcgagaagccggtctggcggcgcaagctaaaccgcgctgaatggctgaaggtattgctcgaaaagattgagccaggatgtgagcttgggatggaagcttgtgggggtacgcaccattgggcgcgacggctgcaagcccagggatacgaggtgcggttaatcgccccgcagtttgttaagccctatgtgaagagcaacaagaacgacgccaacgatgctgaagcgatttgcgaggccatgagccggcccaacatgcgatttgtgtcggtgaagacggttgagcagcaggacattcaagcggtgcaccgtgttcgctttgagttgagcaatcagcgtaaggcgaaagcgaaccagatccgcggcctggtggccgagtacggattagtggcgcccaaggaattgcggcagctgcgtggggcgcttccgggctggctggaggatggcgagaatggcctcagcgatcgattccggcgcctgctcaatggcttgtggcatgacctgctggggcttgatcaacgggtgacggagctcgatggtgagatcgcccagattgccgccaccgatccggtggccaagcggctccagcaattgcgcggcgtcgggccgatgattgcgacggcaatggtggcgacggtcggtgatgtgaagcatttcgccaaggctcgccagatggcggcatcactgggattgacccccaggcaaaacagcactgggggtaaagagcggctcctcggcatcagcaagcgcggggacacctacctgcgcacgctcctgatccacggggcgcgcgccacgctgagaaccgccaaggataaagatgaccggctgagtcgatgggtcacgcggatcgcgcagactcgtcaccccaacgtggcggcggtcgccttggccaacaagaccgctcgcatcgcttgggcgatgatgaagaacggaacgcagtatcaacccaaccgggttgcgccgtaagggttgggcaaagcaagcaaagctgtagtgcattaacccaggagatcatccaccacgattgcaaagcaagccgcttgatggccaacaggtcgaaccggcgccggcagaacccgagaatgtccaaggccctcgaggccggcaaagcgatagggagtcggcgcgcgaatagcccattatggtcctgcatccaaaccggatgctgttgttagagaccggatatacgtgagcagtcgtacctcaacgccaaagaacggagtgcttgcaaccgaggaggggtccatata

SEQ ID NO: 2931 - DNA, 1435 bp, unidentified
  source 1..1435: mol_type = unassigned DNA; note = element_42ad79f
  misc_feature 1..2: note = core
  misc_feature 3..49: note = LE
  misc_feature 50..1111: note = CDS
  misc_feature 1112..1435: note = RE
  misc_feature 1197..1432: note = bridgeRNA
taatgaaatgggcccagccttcttccccgcaggcctcataggaggcaagatgggtgctgtcgagcgcgcaatgcacactcatcgtcagaacgaagggagggcggttatgcacatcacgacattggggatcgatgtggcgaagaacgtctttcagttgcacgggatggatgcgcgaggacgagcggtgctcagccgacgcgtcaagcgcgatcagttgttagacacggtggcgagtctgccaccctgcgtcatcgggatggaggcgtgcgggagtgcgcagcactgggggcgagcgtttgaacagctcgggcatacggtcaagctgatgcaccccaagtacgtcaagccctatgtcaagacgaacaagaacgatcgtcgcgatgcggaagcaatctgcgaagcggtgagtcggcccaccatgcgcggtgtcgcgatcaagacggtggagcaagccgacctgcaggccgtgcaccgcacacggtcgctcttcgtgaaacatcggaccgccgtcatcaatcagattcgtggtttgttggccgagcagggattcgtgattgggcaatccccggagaaggtccggcccgccctcgtccggtttctggatgacgcggcgtcgggattgaccgcctttgcccgggagaccttcggcgagttgtacgcgcaactgacagagctcgacgcgcgcattgagcgggtgacgcaccgggtggagcgcgtagctcgggcacatccggtctgccagcaactcgcagcggtgccggggattggtccgatgacggccacggcgctcgtggcgaccgtcggtcagcctcaggcatttcacaacggccggcatctggcggcttggttagggctggtgcctcggcaatattccagtggaggcaaggagcggttgggcgggatttcgaaacgtgggagtcgatatgtgcggaccctgctgattcatggggcgcgcgccgtcgtccaacgagcggagcggcgaaccgatacgcaaggacggtggctgtgcgcactcaaacaccgcaaaggcaccaatgtggccgcggtcgccttagccaacaaaaatgcccgagtaatctgggccttattggcccatgatgaggtgtattgaccacccgcctagaggcaggaagggtcgcgacgatcttcaggaggagaggagacgccaaccacatcacaccaggaggattcaccccacggagtgcagcgcggacgatccgtgatgacaccagagggacacccagcgcgttcagaccctggacaaattgtcggccccaacgaggccgttgtgctaataaggagaacgcgcgcgtatttcatcaaggcccagacacagctgtggtccaccgagaggccggatatatacacgcagccctgttcttacctggtgcatcgcgtgacacaccgtcgttgccgcgaaggctgggtccatata

SEQ ID NO: 2932 - DNA, 1404 bp, unidentified
  source 1..1404: mol_type = unassigned DNA; note = element_42adaba
  misc_feature 1..2: note = core
  misc_feature 3..86: note = LE
  misc_feature 87..1136: note = CDS
  misc_feature 1137..1404: note = RE
  misc_feature 1173..1382: note = bridgeRNA
agatgggatgagaaggccgctctccgcggagtcgggcggttaaaccgcctgctccagatgtgcgtgccagcacaaggagagcggcgatgaagaagcgtaacgcggtgttcgtaggatgcgacctcggcgacaagttcagcgagatttgcgtgctggaccaagttggggcggtcctagcgagggagcgcgtccgcacaacgaacagtggtctcacgaaggtggtcgcgcactatgcctcgtcagttgtcgtgatcgaggtaggcgttcactcgcgttgggtcgaggagctgttccgctctctcggccatcgcgtggtggtcgctaatccacgccaggtcaggctcatctggaagcgtcgactgaagacggaccggtcggacgcgatgctgctggcccgcctcggccgggttgacctcacgctcctcgcgcccgttcagcaacgcgggcgcgatgcgcagctcgatctcgtcgctctgcgctcgagggatatcctcgtgcgctcgaggacgcgactcatcaaccatgtgcgcggcgtcctcaagcagttcgggctgcgcgtccgcacatgcgggagctcggcgttcgcgaagcacgcgaacgaagtggtgcccatcgatctcatgccagcgctagagccagccctacgctcactgcacgagctggacgagcagatcacggtccacgaccggcagatcgacgagctcgcggcggcatcgccgaccgcgcagcacctcatgcaggtcactggggtcggagcgctcaccgccctcgccttctgccttacgatcgacgacccgcaccggttcaagcgaagccggctcgtcggagcgtttctcggcctgacacctgccaaggatcagtccggcgagtccgacccggagaagcacatctcgaaagcgggaaacccgttcttgcggcggctgctcgtgcaatcggcccaacacatcctcgggccgtgcgggcgggagtccgacctacgcacgtggggaaagaagctcgtggctcgcggcgggcaggccgccacgaaacgggccatcgtcgcggtcgccagaaagctagcggtcctgctccaccggctgtgggtgaccggcgaggcctacgacccacagcactactcacggtgcctcgccgcgtagaaccgaacgaacttctgggagaggagggacaagagctagagcggttccgacacgccccgtccaagcgactgcgagacagtcctcaaggcgaacgacctcgtcgccgaccttgcggcgcgagactgcagcgctcatgacgggcaggaccccagcgtgcaccggggcgaacggccctcgaagagtgcggatggaagcatggcagtcactcggaaccgatcggccagcgagtacaggtccatccgttgacaacaggcggccttctcatgga

SEQ ID NO: 2933 - DNA, 1204 bp, unidentified
  source 1..1204: mol_type = unassigned DNA; note = element_42b1bc5
  misc_feature 1..2: note = core
  misc_feature 3..168: note = LE
  misc_feature 169..1170: note = CDS
  misc_feature 1171..1204: note = RE
  misc_feature 12..198: note = bridgeRNA
cttgtatctctccagatagagtaataagctattattctatcacaggaattgagtgagtttgggcccaccctaagagataatactctggttcgtagatgaaaccctcaattcattttatcttaataaactggatggtatccaagtgcctttcttagaaagtgacactgcatgaacaagggaagctataagatgaattattatataggtattgatattgccaaagataaatttgattgcctttggttaagagacgttgacgcattaaagatcaaaacaaaagtactacccaatacaacaaaagggtttgggcttttaaaaacatggatagaaaaaaatattacaagcgacttaaataccgtttgtgtgaccatggaggcaaccggcatttatcacgaagcattgtgttatgcgttacatgaaataggagtgagggttagtgtgatgaaccccgcgtttattcgagactttgcaaaaggattaggtgttcgaggtaaaaccgataaaaaagatagtatggtattagctcgttatgcagccttagttcaaccgcgcgagtggaagccggaaccaaaagatgtaagaacgttaagagccatgttatcaaggcttacaagcttagaaaaggatctgcaacgagaaaataataggctagaaaaagccgaaattagccaagcttcagagactgttatagactctctgcaattaatgatacggtctattggaactgaagtagcaaggattaaaaaacaagtggatgatcacattgaacaaaatccgacattaaaaaagaacagagctatattaaaatcaattccggcaattggtgatgttttatcgcgagaaatgttggcattgttagaaagtaaggattttacaagcgctcgtcaagtagcggcctttgttggactagttccaaagctttgggagtcaggaaaaatgaaaggccgaaccactttatgtaaaaatggttcgagtcatttgagggctgttttgtatatgggagccatcgttgcaatacaatataatccagacataaaacgtcaatatgaacgcttattaaaagcaggaaaaacaaaaatgcaggcgcttggtgcggcaatgagaaagcttgtacagatttgttttggtgttttaaaacatcaaagcgagtaccgaccacaaatgagttaaattatcatttgaaatcggtttggagagatggtat

SEQ ID NO: 2934 - DNA, 1388 bp, unidentified
  source 1..1388: mol_type = unassigned DNA; note = element_42bddc2
  misc_feature 1: note = core
  misc_feature 2..71: note = LE
  misc_feature 72..1103: note = CDS
  misc_feature 1104..1388: note = RE
  misc_feature 1148..1383: note = bridgeRNA
caatggtatggaccccgcccttcgcaggcggtggaatctacgaacctcaaccacgttcgaaggagaatgccatgcagatcgttcgtgtggggctggatctagccaaatacgtctttgaggtccacggggttgatgggcgcgggaaggttgtgctccgaaagaccctacgtcgcgatgccgtgtcgagcttctttgccaacctgccatcgtgcctgattggcatggaggcctcgaatggtgcccattattgggcgagggtgctttccgggctcggtcacgaggtccggctgattagccctcagttcgtgacgccatacgtcaagtccaacaagaacgatcgcaacgatgccgaagccatctgcgaagcggtcggccgaccgacaatgcgcttcgtgccggcgaagtccgtcgatcagctggcggtgcaggcggttcatcgcattcgcagccgcctcgtcagcggccggacgaggctcgccaatcagatccgtggggttctcgccgagcacggagttatcgtcgcgcgcaacatcgccaagctgcgtcagaaccttgctgatatcgtcgggaaccgtggaaatggcctcagcgacttggtccgggctctcgttggcgagctgcaacaagagctggccgacctcgaccggcgcattaccacctatgatcggcggatccgcgaactctaccgcggcagtgaggtttgtcagcgtctcggccaaatcgagggcattggcccgttgagcgcgacggcgctggtggccgcagtcggtgatcggcaaggcttcaagaatggccgccagttcgccgcctggctcgggctggtacccaagcagcggtccagtggcggccgtgatcgcctgttcggcatcagtaaacgtggcgatcgctacttgcgcaccttgctgatccatggggcgcgcgccgcgctcgggcgagccgggggcaagcaggatcccagaagccgctggcttggcaagctgcgggaacggcggcatcccaatatcgcggccgtcgcgctcgccaacaagaatgcacgcatcgcctgggccttgctgtcaaacggcgaagcctacgatcccggcctcacggttggatcggcctgaggacgccggaacgtctcggcagcgaagccaaggaggtcccaccaagccattgcaacgatcggcagagatggtgaaagcggtcaccccgtcgcttcccgaacctggtgtgtggaccggcatggcttcggccaatgtcttggcgccattgaggtggaagcgggcgaaaacccatcgaggctcgcggcaccgacatatgccgcatcaggaagccggatatacgtcagcagctgtggcccttgatcctcaacatgccgaacaccgttgcaatcgggcggggtccatata

SEQ ID NO: 2935 - DNA, 1379 bp, unidentified
  source 1..1379: mol_type = unassigned DNA; note = element_42be7c7
  misc_feature 1..2: note = core
  misc_feature 3..86: note = LE
  misc_feature 87..1118: note = CDS
  misc_feature 1119..1379: note = RE
  misc_feature 1124..1367: note = bridgeRNA
tgatggtgtggaacggcccttcgcaccggcatcgaggatgcctatcgtggtgacgccaatcgccacaagagagaaggaaccgttccatggtgaagattaccacaatcggacttgatctggccaagtcagtctttcaagtccacgccatcactgaagacggacaaatcgctgtccgacgtgccttgcggcgatcacaggtgttggagttcttccgtaacatcgccccctgcctggtcggtatcgaggcttgcggaagtgcccactactgggccaacgcgatcagtgaattcggtcattcggtgcggataatgccaccggcctatgtgaagccctacgtcaagcggaacaagaccgatgccgccgatgcggaagcaatctgtgaggcggtaacacgtccgacaatgcgctttgtaccgatcaaatcacctgaggaacaggccgcaaacatggtcttgaagaccagagagctattcgtgcgtcagcgaagccagactgcaaacgccatgcgtgcccacatggctgaactcgggattattgctgctactggaatgacgagcatagccaagctcattgccgttttgcgcgatgatcgagaccaacgtctaccgaactcggcaagaaccgcacttctggagatggccgagcagatcgaaaagctgacgacaagagttgaggcgctcgacagcaagattgtcgcggcggtgaaagccgatgaggctgctcgtcggctgacgaccacccctggtgtagggccaatcatcgcggcaaccgtccgtgcggctgtcccagatcctgcagcctttcgaacggggcgggacttggcggcatggatcggcatcacaccaagggcaaattccagcggaggaaaagagcggctcggcaagatatcaaagcagggcaataagcagttgcgaactctcttaattgttggagcgacatcaattctcaaacaggttcgccgaggcgtgaagttgcctgcctgggtggtctccctgattgcgcgccgcccctacaaggtcgtcgccgtagcactcgcgaacaagatggcgcgcacaatttgggctttgcttgtcaagggcggaatctatcaacctccgtcgtcatccgtggctgcttagagaccaaattcccaaagccaaggcattgggataaagtggcaaggtgccaaaacatgatgaacctgagggacgcaacctcgacgccgatcagaccgtctgacgtagggcgcctttgagcgcgcaaaattgattaggcgatcggcatcgcggatctcatcgtggccagcggtcgatggccgcgcaaacaggccggacatatgactgcaccgtccaatgtggatttatgcaacaaatgccttgctaaccgggccgttccacata

SEQ ID NO: 2936 - DNA, 1482 bp, unidentified
  source 1..1482: mol_type = unassigned DNA; note = element_42cb2a4
  misc_feature 1..2: note = core
  misc_feature 3..209: note = LE
  misc_feature 210..1220: note = CDS
  misc_feature 1221..1482: note = RE
  misc_feature 13..191: note = bridgeRNA
cttgtatgtaataggcatgtggtggttagctactatcacatgaagtggagtgagccagattttcgcctaaggttatgaccttctatggaagctatagccctccacttcacctttcacgccagcattaacattgaacggttgccaagagcaatgactctgcatgtacaaggctaataggcgtgatggttcagtgaaaggagaaagcatttatgtttcagttaggtattgatgtcagtaagaaaactcttgatctgtgcctattgcgagaaggtgtaaaaggcagagtaaaaacacgtaagcttaaaaacgatttcaacgccgccagcgctgtaataacttggcttcgcaagcaacacgttgagccgactgatatccatatcatcatggaagccaccggggtttatcacgaattactggcttatggccttcacaagtccggagtaaggatatcgcttgccaatccccatcgagcaagagagttcgcacgaggcatggacattttgtcaaaaaatgacagtgttgatgcttatatgctcgcctgttacggtgcacttaaagtgcctgaacgatgggttcccccgcctgaaaatgtccgttatctcagtgcacttcttcgccgacgagatgcgattatcaccgacagaacccgtgaaaaaaacaggttggaaaaatgtcgggcaacggacacccctcctgctgtgactgaatccatcgagaatgcacttcgtaacttaagcacggagattgagcatctggatgctcttatcctagctcaccttgaccagcatcctgaattaaaaaaggattttgacttgctgacgtcgataaaatccgtcggtattcagttaggtctgaatatgctggttatattgcgcagtcatcatttcgacactgcaaagcaggcagctgcttttctgggcgtggtgcctattgaaaagatctccggttcctcagtcagaggtaagccgagactgtctaaaataggaccccctgaaatcagggcaaagctttatctggcgtcactgtgcggtctgaaatttaaccctgtgatgaagctgatgtatgagaggttgtgccagcgtggcaaggctaaaatgtgcgccattggtgctttgatgaggaaacttgttcactggtgttatggcgttttgcatacgcagaaagcgtttgatgctgaatatcagtcttccgatgggcgtagcgcatgtaaggcggcatgatgttgttttatatggctctatagttaaaccgacgacacccggcgtaagccggtgaaggactgtcagagagccgtataccccatccgccctgaatagccatgtgtgcttatagctatgatggtgttgatataagcccttttaaccccgttagcgcggcctagccgcgatgtatcggggacttagtactggcagcttgctgacagtgcttaggaggctgtattcctgaaattaaagcgagttttttcttgactttacacggtag

SEQ ID NO: 2937 - DNA, 1505 bp, unidentified
  source 1..1505: mol_type = unassigned DNA; note = element_42d6a7e
  misc_feature 1..2: note = core
  misc_feature 3..246: note = LE
  misc_feature 247..1485: note = CDS
  misc_feature 1486..1505: note = RE
  misc_feature 6..239: note = bridgeRNA
ctaatggggcttaccgggccttccggtctctggcaggttcggtgccggtagcggccggtgggtcagcacttgcgtcgactggaaggtgcggattcctaggctcagatcgtgcgcccaccggtcgtgagggggcctgaccgctgatgggatgacgtgccccgggttctccggtgagcacttgaccattagtccgctggctgtctccctccacgctgccaaccggccggttcgacgagggaggcgcggatgctgttcgtgggtgatgactgggctgaggatcaccacgacatcgaggttcaggacgagcacgggcatcgactggctcgggcccggctgcccgaagggattgccgggttgagcaaactgcacgagctcatcgccgagcacctcaccgacgatgacgtcgaccccgagaccggcttcgtcgcgcagagcgtgatgctcggaatcgagaccgatcggggaacctgggtctcggcgctggtggcggccggctaccaggtgttcccgctcaatcccgtgcaggtggcccgctaccgggaacggcatggcgcctcgggggcgaagtccgaccgcggggacgcccacgtcctggcggagatcgtccggctggaccgatcccatcaccggccgatcgccggtgacagccccgaggtggaggggttgaagctggtggcccgctcgcaccaggcgttcatctgggatcgcacccgccacttccagcggttgcgcagcgcattgcgggagttcttccccgccgcgatcgaggcctttcccgacttgatggcccccgacgccctcgagctgcttgagcgggcgccggatccggcccgggcggcccgcctgtcgaggtcgaagatcaccgccgccctgacccgggcgcgccgacgtgagccggcggcaagggccgaggcgatccaggccacgctgcgggccccggcgctgcgtcaggacccggccatcgaagccgcctatgcggtcatcgtggccagtgcggtgcggctgatcgcacagctgaacatccagatcggcgagctgcaggcggtggtggccgagggttttggccgtcacccggacgctgacatcgtgaccagccagcccgggctgggagcgatcctcggcgcccgggtgctcgccgagttcggcgacgaccacgtccgctactcggacgcgaaggcgcgcaagaactacgccggcacctcgccgatcacccgcgcctccggcacccgccgggtggtcctggcccgctacgcccgcaacaaacacctggccgacgccacccaccagtgggccttctgcgcgctcaccgcctcacccggcgcccgcgcctactacgacaccatccgcgcccgcggcgcctcccaccacgccgccctccgacaactcgggaaccggctcgtcggcatcctccacggctgcctcaagacccacacccactacgacgaggacaccgcctggccccggatcaccgaagccgcggcttgaccctgcgaaccatgggatgt

SEQ ID NO: 2938 - DNA, 1320 bp, unidentified
  source 1..1320: mol_type = unassigned DNA; note = element_42dacc2
  misc_feature 1..3: note = core
  misc_feature 4..233: note = LE
  misc_feature 234..1196: note = CDS
  misc_feature 1197..1320: note = RE
  misc_feature 50..209: note = bridgeRNA
gttgtatattatttgtatattcaaaatatttgttgtatctttgtagccgatttaacatctaagtatggaataaggtcgattttatggtggtgattttacaccgtgataaacgttatgcccccatacttatacatctaaaaactggatagttcattgggcttttgaccccgcattcgcaacgatagtgttcagatgtattgatgtttaatctaagcaattaatcaaataacattatgacctacattggtattgacgtcagcaaggattcgttcgtagcagcttatccagaaaagagtggtttcaccactaagacattcaaaaacaccagtagtggtgtgcacctgttcattcaatcgcttccggctgagtgccattgtgtgatggaggccaccggcaactacagtatgttgcttctctatctgcttcaacaggctaacgttgctgtcagtatggagaatccacagaagattaagcactttgctcgtgccatgttatccactaccaagacagacgagatcgatgcaaaactgattgctatgtatggcgagaagatggagcctgcaccctacaaaatcccgtccgagagcattatgctgctcaagcagaaacgcacagttcttcgacaacttaagaagcaacttacgatgatgaagaatcttcagcactctctgtcaattctgcctaaacaagattctacggctaaagtagctaccgagcaaaccattaagtttctgaacaagcaaatctctaagttagaggacgagattactcatctatctaacaaagaatttaaacgccaaatggatctactcacttccattaaaggcataggcgaaaacattgcgtctgcactcataatggctaccggaggctttacgtactttagcagcgctaaacagatctcgcggttttggggactttgtcccacttaccagcaatcaggtacgtcagttaatttcaaaggtcacattaaccgtaatggagatacacatctgcgtagtcaactatatgttattgcattttcatctataagatttaatgcagcatgtagagaaacttacgaacgattacgtgcaagaggcaagtctggcaaagtcgctatcattgctgttgctaacaaacttatccgccaggcttttgccgtcgtcactaacaatcgcccctacgttgatgggtatgtatcagcattaccataaaatattttatttgttttcccgctgggagcgctgtcggcaagggagtgtcggaacactcccgacgagacacttggcaggtaaacattaaaatctatcaatttttgactactttttaatatagttc

SEQ ID NO: 2939 - DNA, 1363 bp, unidentified
  source 1..1363: mol_type = unassigned DNA; note = element_42dd145
  misc_feature 1: note = core
  misc_feature 2..72: note = LE
  misc_feature 73..1107: note = CDS
  misc_feature 1108..1363: note = RE
  misc_feature 1125..1350: note = bridgeRNA
cgaaggggtggatggctcccgctcaccggctgaggcagtttgcctgggccacaatggagcgaggagcatgtcatgggcaggatcgttacggtcggactcgatatagcgaagtcggtctttcaggttcacggggtcgatgaagacggcaaggtcgtcgagcggcggcagttgaagcgaagtcagatggttcgctattttggcgagttgccaccggcgctgatcggcatcgaggcgtgcggtaccgcgcaccattgggctcgtcagcttgccgagttagggcacgaggtgaggctgattccgccggcctacgtgaagccctatgtcaaaaggcagaagaacgacgctgcagatgcggaggcgatctgcgaggcggtgatgcgcccttcaatgcggtttgtcgcggtgaagtcagtcgatcaacaggcggccggtgtgctgcacaagacccgcgcgctgctgatcaagcaacggacgatgatgctcaacgccgttcgcgcgcatctggccgaattcggggtcgtgaccggcgccggcattacacaggcaatccgtgcggttgccgagttggccagtcgggaggatctgggcctgccagatgtggcgcgggaagcgctcggcaatctggccggcctgatccaggaattgcaggccaagctgaccgcagtcgacaagcagctgacgcgttggcactaccaaagcgatgtaagcaacctcctcgagacgatcccgggagttgggataatcacggcgtccgcactggtctcgtcggtgactgagcccaacgcattcaaatcagcgcggcacttcgcagcctggctgggtctcgtgcccaagcagaactcatccggcgggaaaacacggctcgggcgaattaccaaaggcggtaaccgatacctccgccagttgctggtggtcggcgcaacggccgtgctgcggcatgcgcgcgcaggcaatgggaacgtgctgccgtggatcaaggcgttgctcgatcgacgcccccccaaagtcgttgcagtcgccttggcgaacaagatggcgcgcatcgcatgggtggtcatgacccgtggtgtggagtacgaacggcgggagttggcgatcgccgcttgaggcgggcgattgatggacgaggttgaggtgtgaggagagactgaaggcaagccaatcgatccaccgggcacggcaatcccgcttagcgttgagaacttcgagttcgcctagacgatggtgatgctggtgctggcggaatccttcaaggcccgcagccgtgaatgggctgcaccgacaggccggacacgcgactgcactcgatttggcgaagcaaacagtctggaaatcacatcgcaacgcgggagccatccacacg

SEQ ID NO: 2940 - DNA, 1355 bp, unidentified
  source 1..1355: mol_type = unassigned DNA; note = element_42e6701
  misc_feature 1..2: note = core
  misc_feature 3..216: note = LE
  misc_feature 217..1098: note = CDS
  misc_feature 1099..1355: note = RE
  misc_feature 1126..1343: note = bridgeRNA
tgatgctgtggacggcgcccgaccggcggcggcgaacctgatctagggttcagctccgtcaaaggagggcagcatgcagagcgttgttacagtgggtctcgatatcgcgaagaacgtgtttcaggcacatggcgtcgatgctgaaggcgaggtggtctttcgaaagcgcatcacgagagcgaaggtgagagacttctttgcgagcctgcgtgtttggtgggcattgaagcctgcgccagctcccaccattgggcgcgagagatcggcgctttagggcacacggtgaagctgaagccgccagcgtatgtgaagccttacgtgaagagccagaagaacgattcagctgatgcggaggcgatctgcgaagcggtgacccgaccgaacatgcgtttcgccgaggtaaagtcggtggaacaacagagtgtattggcgatgcacaagctccgcgccacgctgatccgtcatcgaacgcgcgtgggaaacagcattcgtgcgcatatggcggagtttgggctgatcgcgccgatcggtcgtatcgggcttgagagcttggtgcagatcatctgcgatgagaaggatgagcgcatcacgccgatggtccggcgcgcgctcgggtatctcgtcaatcagtacgatcagctgcaggcgcagatcttggattgcgatcggcaggtgctcgcatggcatcgcggcaatgaaacgagccgccggctcgcaacgatacctggcatcggtccgttggccgcgagtgcgctcgccgccacgatcggcgacgcatcgacattcaaatcagggagagcgctatccgcttggcttggtctggtgcctaagcagagttcgaccggcggcaaggagcgcctgggcgcgatatcgaagcgcggcgacagttatctccgctggctcttggtcgcgggatcactctcggtgatccgctatgcgcaacgccacggcacgaagcggccctggctggtgaaattgctcgagcgcagaacatcaaagatcgccgctgtggcgctcgcgaacaagaccgcgcgcatggtctgggcgctgatgaccaagggtgagcaatatcgcgagcctcaattgcaggtcgcgtaacgaacgcgcgtcccatcgcggcgcgcacagaggttggaaagggcgatcacgaaatcatgcaagaccggtcgaaccggggaccaggcaaacccatctatcccagagcgtcttcgagcgcgtgcttttgatcgggatctggtcagcggatagcatgaaggccagcggtgttcgcgctgcatcaacaggccggacacatgggcgcaccgaccgccgagcatgatcagagatttccttgccagcagggtgccgtccacaca

SEQ ID NO: 2941 - DNA, 1282 bp, unidentified
  source 1..1282: mol_type = unassigned DNA; note = element_42e8faf
  misc_feature 1..2: note = core
  misc_feature 3..235: note = LE
  misc_feature 236..1270: note = CDS
  misc_feature 1271..1282: note = RE
ctgacttgttgaatcgaccccagacgctcggtctgcagccgtagcgtccagggtgtcggtcggcacgggcccgcagtgctccttgccgcccacgggctggctctctcatagcgtgccgccgccggccgacacccgcgcggtgtggctcgacagaggcatgaggacggcacggtgacttcaagtcaggatgcccaccgcactccctccccgctcccgtcgagtgcaaggccagcctgtgatcctgatcggtatcgacccgcacaagtcctcccacaccgccgtcgccgtcgacgcctcggggcaccaactggccaagcgccggttcgtcgtcaacgccggtacgctccgccagctcatggcctggtgcgagcagtggcccgagcgtcgcttcgccgtcgagggcgccggcgggcttggccgctcgctcgcccagcagctggccgccgccggcgaggacgtggtcgacgtgccggccacgctctccgccagggcccggctgctggccaccggcggcaaccgcaagaccgacgaggcagacgcccgccacgttgcccaggtcgccctgttccgccccgacctgcggcaggtgaccgccgaggaccagacgacgatcctgcggctgctgaccgagcggcgcgacgacctggtccacgagcgcacccgcgtcctgaaccggctgcacgccgtcctgcgtgacctgttgcccggcggcgtggccaccggtctgtccgccgacaaggccgccgccgcgatgaagggcatccgccccgtcaccgccaccgacaactgccgccgcgacatagcccgcgacctgctggccgacctgcgacgcctggaccgactggtcaaggacaacgagatccagatgcgcgaggcactggccgccacccgcaccacgctcacccgcctgccgggcctgggaaccgtgctggctgccaaggtcctcgggcacgtcggcgacgtcacccgcttccccaccgagcaccacttcgccagctacacaggcaccgcgcccctggacgcctccagcggcaacaacgtccgccaccgactcaacaccggcggcaaccgcgcgctgaactcggtcctgcacacgatcgccgtctgccagatccgcgacggcggacgcgggcaggactactacctccgcaagatcgccgaggggaagaccccgcccgaggcccgccgagctctcaagcgacggctgtccaacgtggtttaccggatcatgcaacgcgaccatcggacccaactcgctgcagtcgcttgacacacagaggcg

SEQ ID NO: 2942 - DNA, 1457 bp, unidentified
  source 1..1457: mol_type = unassigned DNA; note = element_42f5e7e
  misc_feature 1: note = core
  misc_feature 2..110: note = LE
  misc_feature 111..1139: note = CDS
  misc_feature 1140..1457: note = RE
  misc_feature 1189..1401: note = bridgeRNA
gaatgaaagggacttccccatcccgatgtttcggcggaagccgcgaaccagcatcggcgtaccattgttcggtcccgatcgtttaaccgcatcgacatcaggagaagttcatgacccttgctacgttaggaatcgatcttgcaaagaacgtctttgccgttcatggtgtggacaaggccggcaaagccgtactgatcaagccacgtgtcatgcgcgatcaattggcggcacttatcgcacaacttccgccttgtctgatcggtatggaagcctgctcaggcgcacaccattgggcacggatgttccagcaacacgggcacacggtaaagctcatggcgtcgaaactggttgcgccgtaccggatgtcaggcaagcggggcaagaacgatgccgctgacgcggctgccatctgtgaagctgtcacgcggcctaacatgcggtttgtgccccttaaggacgaacaccaacaggcggccctttgcctgcatcgcacgcgtcagggttttatcgaagagcgcacagcgacctataaccgtgtgcgcggccttctgtccgagttcggcattgtgttgccgcagagcccgggaaagttgcgcagcaacatcgcggtccgtatggatgatgccttgcctggctgggcaaatcgctgcattcgagatctgctcgaacacatcaatcggctggaagagcgtctcggcgagtacgatcgtgccattggtgagcttgcgcgccaggatgagcgcagccgcaggctcatggaattgcgcgggatagggcccaccacggccagcgcattgctcgccactctcggcgccgccctcgacttcaggaacggccggcaggtagctgcatggcttggattgacgccttcgcaatatagcagtggtggcaaagcccggctcggaggcataaccaaggctggcgacgcctacgtacgtacgctactggtaagcggcgcacgcgccgtgatggcaaatctgcgggataagcaagaccggctgagccggtggatcaggagcctcgttgagcggcgtggatactggcgcgcggcggtcgctattgccgccaagaatgcgcggatggcgtgggcggttttgaagtacggtgatgctttccaactagaaccggtggaagcctgaccagcactgccgcattcttcaatcggaccttctccacggcggtcagaaccatgaatagatagaagatcactttgcgctgccaacagtgatgtgaagtgggttggacccgcgcggggagtacctggaagatctactggagtatccgttcccgatagatgaattaggtcctcgcgtgcgtctttcatcagggtccgggcgattggcccgacatgaccgtttgtagtatcgcagtccttcaccttcttaaacattgcaggcaacgcaacaggcaacaccagggactccatcggacttgtgctgaatggggaagcccttgta

SEQ ID NO: 2943 - DNA, 1384 bp, unidentified
  source 1..1384: mol_type = unassigned DNA; note = element_42f9b53
  misc_feature 1..2: note = core
  misc_feature 3..86: note = LE
  misc_feature 87..1118: note = CDS
  misc_feature 1119..1384: note = RE
  misc_feature 1126..1372: note = bridgeRNA
tgatggtgtggaacggcccttcgaggcggcatcgaaggtgcctattgtggtgacgtccatcgccacgaaacagaaggaaccgttccatggagaagattaccacgatcggcctggacttggccaagtcggtctttcaagttcacgccgttaccaaagacggccgcgtcgtcatccgccgagccttgcggcgctcgcagttgttggagtttttccgcagcgtcgagccgtgcctcgttggcctagaggcctgcgcgagtgcgcatcattgggcgaatgccatcggccagttcgggcatacggtcaggatgatgccgccggcctacgtaaaggcttacgtcaagcgcaacaagaccgacgcggcggacgccgaggcgatctgcgaagcggtgacgagaccgaccatgcggttcgtgccgatcaaatcgcccgaagagcaggctgccgggatggtcctgaagacccgcgagttgttcatccgccaacgaagccagaccgccaacgccatgcgcgcccatttggccgagctcggcatcgtcgccgcaaccggcatgaccagcatcgccaaactcgtcgctattctacgtgacgacgacgatgcccgccttccatcagcagctcgaactgcactcctggagatggctgagcagatcgagcgactgacggctcgtatcgaagcgctcgatacgaagatcatgacggcagtgaaggctgacgaaaccgctcgacggctcaccagcatcccaggcgtcggtccaatcatcgcagcgactgtccgggcaacgatccaggatcccgcagcgttccggacaggccgcgatctggcggcctggatcgggattacgccgagggccaactccagcggtggcaaggagcggcttggcagaatatcgaagcgaggcaacaagcagttgcgaacactgctgatcgtcggcgcgacatcgatccttaagcaggcacgtcgtggcgtgaagctgcccgcctgggtcgtctccttaatcgcgcggaggccctacaaggtcgcggccgtagcgctggccaacaagatggcgcgcacgatttgggcgcttcttgtcaaaggcggcacctaccaagcgccggcgatcatggggagggcatagaacacaaggaattccggcgcctcggctccgggatgtagcggcaaggtaccaaaagcgtgatgaacccgagggacgataacctcgataccgatcagaccggcttcctcaatgcgctgtcgagcgcgtcaaagtgatcaggcgatcgggatcgcggatatcatcgtggccagcggtcaaatgaccgcgccaacaggccggacatatgactgcaccgtccgacggagatttgcgtagagaataccttgccaaccgggccgttccacata

SEQ ID NO: 2944 - DNA, 1374 bp, unidentified
  source 1..1374: mol_type = unassigned DNA; note = element_430258d
  misc_feature 1: note = core
  misc_feature 2..283: note = LE
  misc_feature 284..1360: note = CDS
  misc_feature 1361..1374: note = RE
  misc_feature 1..293: note = bridgeRNA
tagtcagaagatggtcgctagttcccgggtggtttgtctcaaacaccgatcgaccgtctggtaggctggcgccgtagggcgtctcggtgtggtctgacccacactccgatagaccagccgtgtctttccctggacctgtcgactgcccgggaacgccctgcggtgaggttttgcctcgccgatgcttgtgacccaagaagggcctgccctcgttggtctcgtgactgtcctgtccgcgcatccggttccaggcaaagccatcaactgtgaccaggagctcggaatggatcgagaaagaccacttccatgcgttgttggcggcgtcgacacgcataaggatctgcatgtcgcggccgtcgtcgatgatcacgatcatctgctcgacacccaaagcttcgcgacgacccgacacggctaccggcagatgatcgcctggatgcgttcgttcggcaatcttcgacgcattggcatcgagtgtaccggaagctacggagctggcctgctccgcttcgttcagaaagccgggatcgaagttctggaagtgaccacacccgacaaatcggatcgtcggcgacgtgggaaaaacgatgatctcgatgcccagaacgcagcccatgccgccttcgcaggcaaacggacaatgacgcctcgctcgcgggacggcatggtcgaagccctccgtgttctcatggcatgtcgcaagactgctgtctcggcacgtcgtgtcgctctccagatgatccaaaacacgatcgtctgcgcgccggacggcctgcgggacgatttgcgcaagatgacgcgcatgcaactcgtgcgaacgctcgcagcttggcggcccgatctgaccgggtatcgcgagatctcaaccgcttatcggatcgctctgaaatcgcttgcccggcgataccttgagcttcacgacgaaatcgctgatctcgacacgatgatcaccgccatcgtcgccgatctcgcccccgatctcacggcccgaaactccatcgggcatatcggcgctgcgcaactgcttctaaccgccggggacaatccggaacgcatgaaagccgaggccagcttcgccgccttgtgcggcgtgagccccgttccggcttcttcaggaaaaacgatccggcatcgtctcaatcgcggtggcgatcgtcgcgccaacagcgcactccacatcatcgcgatcggacgccttcggactgatcaacgaacgaaagactatgtcgccagacggatcgctgcgggccattcgaaactcgaagccctgcgttctctgaaacgcgatatcgctcgcgaggtcttcggcgtcatcatgcgtcggcaaaaggaggtcaatcagggccagatcgcggcttgacaaacagacgggcg

SEQ ID NO: 2945 - DNA, 1595 bp, unidentified
  source 1..1595: mol_type = unassigned DNA; note = element_4311bcc
  misc_feature 1..2: note = core
  misc_feature 3..264: note = LE
  misc_feature 265..1461: note = CDS
  misc_feature 1462..1595: note = RE
  misc_feature 35..264: note = bridgeRNA
ctcgtataatatatttgtattaattatttaatgatgttaatacacaaacatctatttaatattcaattcttattgaatacatgttaatatatttttgataacactgtagactattgtttttcctccttacagctttgactggttcaattaggaaatagctacagtttttaattttaaatggttatgagtaggttacagctttgactggtacatcaagaacgaggtaacgtgaattaaaaattgtagatagcaccggtgttaatcatgaaaggacaagatattatgatttatgtaggtatagacgtggcctcacaaaaacacgactgctttttacttaaagatacaggtgaagtattttctaagacttccttcactatcaaaaatgattttgaaggatataaaaaactccacaattcaattttacaatttgtggagtcaactaaagattcaaatgtacgtataggattagaatcaactgggcattatagcaagaatattcttctatatttgattaagcaaggttatcaaactaccttaatcaatcccatattaaccaatatggacaggaaagcatctacagttcgtaaaactaaaaccgataagatagatgctgaagccatttgtaaattcctagacaagaacagatttgatttcaaaccctatacgttattatcatatcacattgacgcattaaaatcactaacaagacaaagattttcgcttgttaaacaaatgactcaacaaaaattaatctttcaaagactagtaaatgttatatttcctgagcttttaagtcatttttctaacgattatggtgaatcagtacttaatatactatattcatatcctacgcctaaaaaactagctaaggcgcataaagaatcaataactaagcttcttcatagcagatgtaaaataacatctagtgaaatcttagaactggctaaaaattcaatcggacaatcagaagagtacttaggatttgaactaaagcatacaattgatatgattcttttctaccaatctcaaatcgaaatttataataaacaaattgaaatcgagttaaacgaaactgaatatggtaaaattattacctctattccgggagtaggtatcattacaggtgcaatgattatttctgaaatcggggatataaataactttacaacgttagaccaattattagcttatgcaggtttggatcctagtgtttatgaatcaggtaaatttgaatcatctcataataaaccatcaaaacgtggttctaaatatcttagatgggctattcaccaagcttcatctgttatttggcaacatgataatacatttaaagattattatcttaagaaaattaaagagagcaaacatcattacgtagcaattggtcatattgacaaaaagctaattagagttatcttctcacttcttaagaataaatcaatgttcattccacaaaaataaccatataaaattttcaaagatctagattattcaattatcctcgtttttaaaaaatgataaaatcgaggatttttatgcttgatataaataaatttaaatatttttcaaatatctcttgatttatttatagtagg

SEQ ID NO: 2946 - DNA, 1259 bp, unidentified
  source 1..1259: mol_type = unassigned DNA; note = element_431b306
  misc_feature 1..3: note = core
  misc_feature 4..209: note = LE
  misc_feature 210..1223: note = CDS
  misc_feature 1224..1259: note = RE
  misc_feature 2..200: note = bridgeRNA
tgcctttagtttgtattctaattaaatatacgataatttaactgaaaggagacgggtgaactataacgttttgtaggtgtatagacctaatagctgcataagtcccgtctccttaattcagacttgcaagagctaattggaatgataggcttaaaggcctgctaaaggcaatcgcaaagcaagttttttattaacgtaaaaacaaaattatgaaaaaaattaaagaattaaaacagttttcagaaagtgtaggcattgatgtttcaaaacttacactagatgtgtttctttataatagaaagaaacatcgtcaatttttaaacaacccgaaggggtttattttaatgcagaagtggataaaatcagaagtcagctgcgagagtgatttaatatattgttttgagcatactggttggtactgcatcttgcttagccattttctgcacgagcaatcgttattttattgttgtataaatcctctggaacttaagcgttctatgggttttaaaagaggcaaaacagacaaaacagattcctttgagattgccagatttgcctggttacgaaaagaagagttagatccgtctgttcccatgtctatgaaattaatagagctccaaagactaatgagcgtaagagagcaatttgtaaaacaaagcaccgcgcttaagaatttggaaaagggactgcttgttacaattgaaaatcgtacaagtgatattggtctcaaagtaattaggcaatctattgagcaacttgaacaacaggtagggaaagtagaaaaagcaatggaagaactcatcaagacagaaccggatatgaagacaaattatcaactgagtaaaagtgtaaaaggggtaggtaaaattctaggcatacaaatgcttttgcatactcataattttactcgttttgagcaatggcgtcaattctcagcttattgcggacttgtaccatacccatttcagtcaggcacaagcatcaatggcagaaggaaaatacatgcaataagtgatgtaaaaatgaaaagtttattatcgatgtcggcaataagtgcaatacaacatgattcggagttaaaactatattatcaaaaacgagtagaggaaggaaaacctaaaatggttgtgttaaatattattaggaacaagattgtttcaagaatttttgcagcagttaaaagaggaacaccatttgtggagttgagcaaatttgccgcttaaaaataaatgttaaaaaatttgtttttgatcttggaa

SEQ ID NO: 2947 - DNA, 1515 bp, unidentified
  source 1..1515: mol_type = unassigned DNA; note = element_43271de
  misc_feature 1..2: note = core
  misc_feature 3..178: note = LE
  misc_feature 179..1228: note = CDS
  misc_feature 1229..1515: note = RE
  misc_feature 1254..1513: note = bridgeRNA
agatggcatggacacctcccacccgatgaacaagtgctgtgacaggcgagaggccgagaaagccgaataccgctgagcaaggagaagacgggccggcggcgtgggcggggcctcgcgtcgcacggcattgagtgccaaagtgaggttcctttgtgaacttcgctgacggaggccccgaatggatcgtacgacttacggtttggacattgcgaagaacgtgatgcaactgcactgggtcgaggctgaaaccggcgagatcggccgcaagaagctggcgcgagccaagctggcggcgtacttcgccgagttgcagcccgtgcgcatcgtcatggaagcctgcggcagcgcgcaccactgggcgcgcgtgctcgggggcctgggccaccaggtcgagctgctgccggcggcgcaggtgcgagcattcgtgcgcagccacaaggacgacgcggccgacgcgcgggcgatctggctggcggcgcagcaaagcgacatccggcgcgtgccgcaaaagagcgtggaacaacaaggcgtgctggcgctgcaccgggcacgctcgcactgggtgagcgtgcgcaccgccacggtgaactcgctgcgcggactgctgtacgagttcggcgtggtgctgcgcggcgggcgccgtgcagggctgaaggcgctggccgagcagcgggcgagcatcgacgaacagatcccggcgacgatgcgcgcgctggtggacggccagttgaacacgctgacgcagatcggcgagcgcatcgacgcgctggagcgcgagatcgcggcgctgcaggagcagatcaagggggcccgcgaactcgaccgggtgccgggcatcggcgtgctgggctcgacggcactggcggccacgctgggcgacgcgaaggcctggcgctcggggcgggagttctccgccagcctggggctggtgccggcgcacacgggcaccggcggcaaagtgcgtatgggccacctgagcaagcgcggcgacccgtacctgcgcacgctgctgatccacggcgccagggccgtgatccagcacgccaagcacaagcccaagtggctcgagcagctgctggcgcgccggccgctgaacgtggcggtggtggcgctggccaacaagatggcgcgcacggcctgggcgctgatcgcgcacggccgggcgtatcagcgggattggaagagtgcgaagcccggcagcggcgccgcgcaagcggccgccgcgtgagatcaacctaccgatacaaggagtggacgccgcaaagagtgcgtgagtcgagtcgatgaagtgatggcaaagcggtcggaccgcgggccggataaagctgaatggccgccgggggaacgcctcgtgcaaaccccgcagcaggagataagcaccggcctcgcgaatgaccatcaaggccagcggcgggcttgccctgtccgcacccaaaggccggatgtaagaccgcagtcgtatccgccaagtcaaaacttcaaacactcgcttgccacacgggaggtgtccatgta

SEQ ID NO: 2948 - DNA, 1477 bp, unidentified
  source 1..1477: mol_type = unassigned DNA; note = element_432b263
  misc_feature 1..2: note = core
  misc_feature 3..379: note = LE
  misc_feature 380..1204: note = CDS
  misc_feature 1205..1477: note = RE
  misc_feature 1230..1424: note = bridgeRNA
agatggggtattcggctttcgccccatcttctacggtgatgcagggagatggggtattcggctttcgccccatcttctacggtgatgcagggaggtgctgcgcttcgagctgatgatagaacgtggtctgttcaaacagccacaagcatcaggaaaggaagcgcagcatgaagcacgttattggcctcgatgtctcggtaaaagagactgccgtttgcattatcgacgaatccggcaagatctgtcgtgaggtgaaggttgtcagccaccctgacgatctcattgcggtgctgaaggacccgacctggaacgtcgagcgggtcgggcttgagccggacctttgtcgcagtggttattcgaagggctggccagggcgggattgccggtcatctgtatcgagacgcgccatgtgaaggccttcctgaaggcgcagcccaacaagacggatcgcaacgatgcgcgcggcatcgcgcaaatgatgcgcgtcaatctgtatcgcccagtgcatgtgaagacgctgacgagccagaagcggcgggcgctcttagcggcccgcaagctgctgcaggaaaaggcgatcgccatcgagaacgacatccgcggccttctgcgcaatttcgggctgaaggttggcgccgtgggaacggcaaagttcgaagagcgcattcgggagctcaccgaaggcatgcccgacctcgcggcgatcatggagccattgcttgccgcccgagggaagctgcgtaccgaatttgcgcgcctgcacagacaagcccttgcggtggtgaaggatgatgccacctgccggcgcctgatgacgatcccgggtgtcggccccgtggtggcgctcgcctataccgcgacaatagacattccgcagcgcttcagaaactccaaggcggtgggatcgatcctgggactaacgccgaagctccacgagtccggggaaagcaagcgcgtcggctgcatatcgctatgcggggacggcacgatgcgcactttgctctatgaggctgcccagctgctgctgacgcgcgtggggaaatggtcgtggctgaaggcttgggcgatgaagatcgccaagcggcgcggcatggcgaaagcgaaagtcgcactcgctcgtcgcctagcggtcgtcatgcatcgcatgtggctcgacggcactgaattccgctggacgcgggaagccatgacatcagcgagctgacaacaggtcagaaggagaaagacacatagttccgccagttggcggaaggacgtccttcgcaggacgatggatgaggcaagttcgaacctatgtctgtgccgatcgcatcacgcggtaatcacgtcccggagattgaaccgccccattctcctaaccccatgctgggagggcgaaacgccgatcccgaagagaagcgaggacctgcggaagatgtcatgccccaaagaggtggagacgctcgtaagtgcttgacgccaacacgccgaatagaga

SEQ ID NO: 2949 - DNA, 1315 bp, unidentified
  source 1..1315: mol_type = unassigned DNA; note = element_43323a9
  misc_feature 1..2: note = core
  misc_feature 3..240: note = LE
  misc_feature 241..1269: note = CDS
  misc_feature 1270..1315: note = RE
  misc_feature 14..184: note = bridgeRNA
cttgtatctttcgaagtgaagcgtaaagatagtttgcgtttcggcggagaggccgttcccagccgaggcctgcggagcagagcctgagccccagatcggccctccgtccctctcttttaacaccgtggagaatcgaaggccgtagagcctgcatgatcaaggtcggtgcgaagagttagcccgttcgcgcgggtagggacggacgagccggagccctatcttagcaaacggagaaggtcgatgatcaagtcctttacccctgagcgtgagccgtgcagccgcgaagcgaatatcttctgcggtatcgatgtgggagctgagaccctggtggtggcggttcaaccggatcagcaccgagagttccccaacagctcttgcgggcatcgacagctgatcgcctggttaggcaagttcgggttcacgcgggtcacgttggaagccaccgggatttactggctggatctagggttggctctggacgcggctgccgggatcgagtgcgcggtgctcaaccccaagtccgcccataacttcgccaagaccctggggcggcgctccaagaccgataagttggatgcgcagtccctggccgagtacagtcggcggatgggcttcatcgcctggcgccggccaagcgtggaagctctgcaactgcgctctcttagccgccatatcgaatcgctcaccatcgagcgggtgcgggatagcaaccggctgcacgcggctgaagccacagcctcaacaccccgttgcgtgttgcaggatctgcgccggtcgctcaaggcgatggagaaacgtatccgcgacctgcgttcggcggcggtccagctgatccggacacacgaagttctccgccaacagttccaactgctgatcgccatgccaggcatcgccgacatcagcgccgtgcacctgctgggagaactggctgcgctgccgtccggcctgtcggtgcgagagtgggtcgcctacagcggcctcgatcccgcccaccaggtctctggcacttcggtccacaagccatccagaatcagccgctctggaagtcgtcacttgcgacgagccctctacatgcccgcgctggtggcctcacgccgtgatccgcatctcaaggccttctaccaggccctgctcagccgtcacaaagcaaagctccacgctctgatcgccgtcgctcgaaagatcctccatgccatctatggcatcttcaagcaccaaactccctacaatggcgctctcctcttccctaacctcacccccactgattagaaactcttctctctactctcaaaaaacttgcttctcaagagagaat

SEQ ID NO: 2950 - DNA, 1353 bp, unidentified
  source 1..1353: mol_type = unassigned DNA; note = element_4338d05
  misc_feature 1..2: note = core
  misc_feature 3..1127: note = CDS
  misc_feature 1128..1353: note = RE
  misc_feature 1116..1338: note = bridgeRNA
agatgtatggactcctccccttaacgggagatttacggtataaagtgaaaagcattcactcaaatcaacttttacctggagtccacacaatggaacaatgtaacgtaattgctatcgatttagcaaaagatatttttcaagtttgtattatgaccgaaaatggaaaaatcattttcaataaggctatgagtagaactaaactaaaagaatggctcgctaaacaaaagctttcccttgtcgctatggaaagctgtggcggtgcgcattattgggcaagattcgctcagtctttaggtcataatgttgtggttataccccctaaacaagtcaaaccgtttagaacaggtcaaaaaacagatgccaatgatgccatagctattgccgttgcaagtcgagcagccaatataaaacccgctagagttttatcaatcgaacaacaagggcttcaatctattgaaaaaatgcgaagtatgcttgataaacaaaaactacaactatcaaatcaagtacgcggtttattgttagaatttggcattgttatcaataaaagtattaaaagctttaaagaacgggtacctgaaattttagaagatggcgacaatgatttatcttttgcgatgagaagggttttacttcaaatgtggacgctttattatcgccttgaagaggattttgaagcaataaataatgaactaatgcaattaaccaaacaagatagtgactgtcaaagattaatgaagcttgaaggtgtagggccgattacagccatcagactaaaaatacaattaggtaatggtggacacttcagcagtggtaggcaagttgcttcctgcattggccttactcccaaacagcacagtagtggcggaaaggtaaagttaggctccgtagggaaaagctcatgcgataaaccgctgcgtagttgcatatttttaggggcaagagcggtggtgtcgaagttaaaaagcagaccagccaaaacagaaaaagaacgttggctaaaagccttaatagaacgaagaggtgttaattgtgcatcgatggcgttagccaataaaacagcacgaacagcttatgcactattgaaaaagaatacagattacaagccagtactaattgcggcttaaaaagtagaaagaataaatattgtcaataaagagctttaaaatggttagaccaaccttcaacagcctgtaatatgctctgaacatattaataatgtcgcgcaggagattaggcatgaaggtgcgaatacatcaaagtggccgggatagcttcccactaagagcccgtatataagcacgcatctaatatttttaaaattgttattgcacaatatgaggagtccatata

SEQ ID NO: 2951 - DNA, 1726 bp, unidentified
  source 1..1726: mol_type = unassigned DNA; note = element_4348633
  misc_feature 1..2: note = core
  misc_feature 3..348: note = LE
  misc_feature 349..1587: note = CDS
  misc_feature 1588..1726: note = RE
  misc_feature 48..316: note = bridgeRNA
ctcgtattatataaattaaattattgtattttcccttttcagtttgtttattcgatcatcagatgttagcctctaattgtcattgactttggtcaattggtataggtttttcatccttgtagcttgactactttaggaagtctgccgcccaagcagttttactaatgactcactcacatgctgtatcgatttaaactattactgattcagagcagtttcagttgcggcttgtagtttgaacctatgaatacttatattttgcgaggttgtcttagaaactgtaattaggggttaacacgtgatgatcgatctatgaccaaaaatttgttagaaaggaggccattctcaatgaaattatttatcggcattgatgttagttctaaggatttacaagttgcttttacagattctgagcattacgacaaacctttagttaataaatcattttctaatgacttaatcggtgcaaatgaagttaagcatcttattatccagtgggctaccagaaatcattacgatcaaataattttaggcatggaagccacttcaatttatagctttcatcctgcctattttttcgctaatgatgaagacctgaaaaaacttaattttgaaaccgatgtggtcaatcctagatctaccaaaagatttcatgaagcttttgaagaaaacaagaatgatccaattgacgcttactatattgcggaatatctgcgctatggcaaatatcgggttacaattgcacgtcaagaagaatatctagctcttcaacgccttaccaggaccagatatgaaatcacacaatctttagccagagctaaacagcactttattgaagcactctattatcgcttaaacaaactgattaccgttgacaaaaataagattaaaacccctatctttggcgcaacgatgatgtcaatcatcactgatagtaaaactattgatgagatagccaatatgtctactgagaatttgattgattatcttcagaccaaaggacggggacgtttttcagatcccgattccttagctaaagctattcaaagggctgtcagaggttcatatcgtctaggaaaagtgatgaaatactcgattgattccgtactttctgtgtactacacagagattcaaaactatcaccatttaattaaagatttagataagtctattaccaaaatcgttgctggcctgccggaagctaaaatcctgcagtctattcctggtgttggcccggtttactctgcaggcattatagctgaaattggaaacatcagtcgctttaacgatgaagctaaattagctaaatatgccggtttagcttggcgtcaaaaagaatccggtgattttaacagtgaacatacacctagactaagaacaggcaatgcatatcttagatactatttggttgaagctgccaacctgattagattaagagaccctgtttttgccaaatattatcggaaaaaatatgacgaagcaactttttctccgcataaacgtgcttgcatcttatgtgcaagaaagctatccaggaccattttcacactgctcaaaaatggtcaaatatatcaaacaccgaggtgagaaattggtataaaacaaattaactagcaattttaaaaatccctgaaatagggcttagtttcgtatactcaaatttttggttttaaacaaactgaatcaaaataaattattaattttacattgacttattaccacatga

SEQ ID NO: 2952 - DNA, 1430 bp, unidentified
  source 1..1430: mol_type = unassigned DNA; note = element_435165e
  misc_feature 1..2: note = core
  misc_feature 3..117: note = LE
  misc_feature 118..1152: note = CDS
  misc_feature 1153..1430: note = RE
  misc_feature 1184..1383: note = bridgeRNA
agatggggtaatcggccggcgttgttgatattggaagattgtgggtgctgcgcttcaggctgatggcgatacgaggtcaccgcggttacgggccccaagcatcaggagaagcgcagcatggagcattttgccggactggacgtgtcagtcaatgagacgagcatctgtattgtggacgatacgggcaagatcgttcgcgaagtcaaggttgcaagcgaaccagaagctttgctggcggtcctgaagaacagtgcctatcacttcaagcatatcggactggaagccggaccgctgtcgcaatggctttacagcgcttttgccgaagcggacttgccggctatctgcgttgagacacggcacatgcgggccgttctcaaagcgcagatcaacaagaccgaccgcaatgatgcccgcggcattgcgcagatgatgcgggcggggctttatcgcccggtgcatgtgaagacgttgcgcagccagaagctgcgcatgttgctgacgcaccgcaagctgctgcagtcgaaggccatcgccatcgagaacgatctgcgtggaacgttgcgcaactttggtctcaaggtgggcatggtcgggacggccaggttcgaggtgcgcatcagggaactggtcgagaacagccccgatctgaccacgctcgttgaaccattgctcgttgtccggcgggtgctgcgcgagcagatcgccgtcctccaccagcgcgtggtggccgtcgcccgtgacgatgatgtttgccggcggctgatgacggtgcccggtgttggtcctgtcgtggcgctgaccttccgggctacggtcgatgtgccagcgcgcttccgcaactccagggcggtcggggcggtgttgggactgacaccctgcaagtatcaatccggcgagagcgaccggaccggcgccatatcaaaatgcggagacgagatgatgcgcgtcatgctctacgaagccgcccaggtcctgctggtgcgctcaacaaaatggtcctggctcaaagcctgggcgatgcagattgccaggcggcgcggcgtgaaaaaggcgatcgtggcactggcgcgccgattggccgtcatcatgcatcgcatctgggttgacggcaccgagttccgctggacccgacaagagattgccgcagcatgacaatgcaagatcaaacccgataggagaaacgcgagctccaccgtgcggtggcatgatgtccctcgcgggacgatggatgaggtgagatcgcaatgtccgctggacctgccgccaatcaacggtaaggccgcccaatagattgttccgcctcgttctcgaatcccatgatggaagggccttggcgccgattccgaagagaagcacgagcccgtgagcgacatcgacaccgcagcgatggaaagtctgatagcgcttgacccaaaccggccgattagaga

SEQ ID NO: 2953 - DNA, 1291 bp, unidentified
  source 1..1291: mol_type = unassigned DNA; note = element_435e84d
  misc_feature 1..2: note = core
  misc_feature 3..74: note = LE
  misc_feature 75..1091: note = CDS
  misc_feature 1092..1291: note = RE
  misc_feature 1099..1259: note = bridgeRNA
agatgggatgaaagagggcgtaccttcctggtacgtgctctaggcacagaaaatccatcggaggaaggtacgcgatgaagagccacataggagtagatcttcaccagagattttgctatttgacggcagtggatgcaagtgggaagcgctatgggcaagcgcgtgtagccaacgacgcgggagcgttgcaagcctggttaggacaaatgccccgaccccggcaggtggtgatggaagccagcgggttctggcctgcgtttgagcgggcggtgcgaccagaagccgaacgcgtggtgatggtgcatccacaacgggtgaaggcgattgcctcggcgcggctgaagaacgatcgggtcgattcggagatattggcgcgcctgtcgcaggccgaccttctgcccgaggcgtggatggcggacccgcagacgcaacggctacggaagttggcgcggctgcgcatcgcgctgggacagcagaggacaaccgccaaaaatcagctgcaggcagtgctgcatcaggaaggctttgccaaaccggtgaccgacgtattcggcaaacgcggacgggcatggctggggaagctggagttgagtgcggccggacgcatggtggtcgatacatggttgcagatggtggatcatctggatgggctgatcgcacagcagaaacgggaactggaacggatggcgggcgaggatatgcgggcgcgatggctgcagacggtgcctgggattggggcatattcggcgatggtgattctggccgagataggggacattgcgcggttccacagcaagcgagcgctggccagctatgccggcctgactccttcggtgcgcgagtcggccggcaagcggaaacgaggcggcattggccatcacggctcgggcacgttgcgctggatcatgctgcaagtggcccaggtcgcggcccggcactcgcccgcggccaaagcctggattgccaggctgcgcaagaaaaagccagcccaggtagccaagatcgcgctggcgcgcaaactgctcactgccgtctgggccctgctgcgccagggcgtgtgttttgaggaatccgtcttcggccaaccataaaacaggcggccagcaagacagaaaggcgtttgcgacgattgcaaggagaacccggccagctcgctcatcctctgtactgcgagtacatcctcagatggagcggccgggattcgaacccccttatgtgccctgagcacgaatagaagtctgtacgcaatctatccgcaatcgctcctggacacctctgcctttttcataga

SEQ ID NO: 2954 - DNA, 1146 bp, unidentified
  source 1..1146: mol_type = unassigned DNA; note = element_437012f
  misc_feature 1..2: note = core
  misc_feature 3..192: note = LE
  misc_feature 193..1131: note = CDS
  misc_feature 1132..1146: note = RE
  misc_feature 38..205: note = bridgeRNA
cttgtatgtttcgttttgctggacaaggttaagtttaatgttggttaatcttatctggcccagcacggcagctcgattgtccctggggacatcaagcccgtgggagagcaaggagcgtcgtgctggtttttcagtgataacccgaacggttgcttgggcaaataagcccgcatttttgcaaggatgggtgccatgaacgaaacgatagtggagaggtttgtcggcattgatgtgtccaaatccacattggacgtaagcatcgagccaataggtcagacgttgcacgtaacttacgacggggctggcattagccaaattgttggctgcctgaaagaagccgtcccgacgctggttgtgatggaagccacgggcggactggaaatacgcatcgcgacagaattggccagcaaaggtttgccggttgccgtcatcaacccgcgccaagcgcgcgactttgccaaagccaccggacgactggccaagacggatcaggttgatgcccaaatgctggccgcatttgccaaagcgattcgaccgcaagcgcgcccgctcaaggacgaggacacctgcgccctgaatgacatggtgagcaggcgtcgccagttgattgacatgcgggttcaagaaaccctccggctcggcacagcggcctcaaaagcactacaaaagaacctgaacaaacacatcacttggctggacaagcagattgccgaatttgaccacgacctgaccaaacggctgcgcgactcggatgtgtggagaaccaaggatgacctgctacggggcattcccggtgtgggagcggtgaccacgctcacgatgttggctaaatgccccgaactgggaatgctcaatcgccgcgaaattgcggcactcacgggcgttgcccccctggcaaacgacagcgggaagcggttcatctggggtgaaagagcggatgtgcgtgcggtgctatacatggctgctgtctctgcaatacgttgcaacgagcccatcaaggcattcgcagaacgcctgaaaaaagcgggcaaaccacccaaagtggtcatcgttgcttgtatgagaaagttgttaactatcatgaattcaatgttgaaaaataatgcgccgtggaatcctaaattcgcttgacttgagacacggttg

SEQ ID NO: 2955 - DNA, 1588 bp, unidentified
  source 1..1588: mol_type = unassigned DNA; note = element_43840fc
  misc_feature 1..2: note = core
  misc_feature 3..268: note = LE
  misc_feature 269..1450: note = CDS
  misc_feature 1451..1588: note = RE
cacgtataatgtatttagtaaattgatgaagttgctaattatcagtttactagtataatattattactcttcttagagtaaaatttatgcgattgagtttaggcaaattataacacgggtcttaagtatccataaatatgacggcctagctcttttctttttattatcctagttttagaatgtgaggattatttattaatcttatataacaagcgtgatgaggagtgagaggttcaaagggtcaatcgtgaatggaaggatggtgcttatgcacagttgtttagctattgatgtagctaaaggtaaaagtatggttactttggttagttctagtggtgaagttctaattgatccatacgaggttaatcattctattaatgattttactaatttacttaatagaattaataaatttaaattagataatatttctgtaataatggaatctactggtatttatcatagacctattgaaagatttttcttagaaaataatttcaaagtatttgttattaatcctatttatggaaaaatgaaaaaaagaaatttaagaaagactaaaactgataaagaagattgttttaacttagttaatttatttatatctaatacttttaaagaatatattaagccagatcagttatatttagatttaaatgctttatctagacaatattttgctttagatgaattatgcataaatattaaaaatagatatagaaatttactttatttatgttttcctgaatatgaagaaatatttaaaggaaatatggtttattccagcatagctttagaatttatcgaaaattatcctcatgctgatattatttctaatattaggattgacaaacttcaaaatttctttaaaaaacgtgaatataaatcttggaagtctaaacccattataataaaggacatagctttaaaatcttatccatcagttaatatgaatgatgagctggtttcaaatttatctcaaatggctagtcttgttaatgagtatcaaaaagcaattgatattattaaatataagattacttttttagctaaaaaatctaaatactttgaaccaattaattctatttatggtcttggtgaatttactacttctattatcattgctgaacttggtgatattaatagatttaataatattaaggaattaactgcttattgcggacttgatccatctatcaaacaatctggtaaatcagttaatattcatggtcctatttctaaatctggtaacaaatacataagaaaaattctttatattgcttgttcaaacattattactattgttggcaaaacaaaagtaaaaaatgatattgaaatttattacagaaaaaaacgtaatgaaggtaaacatcattacgcatccgttattgcatgcacaactaaactccttagaataattttagccttgtgtaagcaattagagaagtagtcatcaccacttgactacacatttattataatacaaattagcacattatttataaatttttaagaatttataaatttcgtgtgtttttgtagtgcctataataacataaaaaatcagtgttgacaaatcttagaatgt

SEQ ID NO: 2956 - DNA, 1278 bp, unidentified
  source 1..1278: mol_type = unassigned DNA; note = element_4388714
  misc_feature 1..2: note = core
  misc_feature 3..229: note = LE
  misc_feature 230..1273: note = CDS
  misc_feature 1274..1278: note = RE
  misc_feature 18..241: note = bridgeRNA
ctgacttgtttggatgcatggacgccgttggggtctgcagccttagcgtgcgaggacggtgatcggtctggctctcacgcttcttgccgcgctcggtggctgtctcatagcgtgccgacggtcgccgcccgccgttggcgtggctcgatagaggcgtgaccgttgtgctcgaactcaggttgcccgccgacggtgtcccgtcgtctcggattgaaggagcagcactcagatggtcacgatcggcatcgatccgcacaaggcctcgcataccgccgtcgcgctggacccgaacggtgagatgctcggcgagctcggggtcgtcgccgacgcgtcgatgctgcgacgcctgcggaagtgggcgtcatcctggccgcaacgggtctgggcgatcgagggcgccgccggcctgggacggctgctcgctcaccaactcgtcgccgccggggaacgcgtcgtcgatgtcccgtccgcgctggcggcccgcgcgcgcgtgctggcaagcggtcacggccgcaagagcgacggcatcgacgcccgcagcgtcgccgtcgtcgcgcagcaccgcggcgacttgctcgcggtcgcggccgacgaccacaccgcggtgttgaggttgctctctgatcgccgcgacgagctgaccggcgagcggcgtcgcaccatcaaccgactccaccgcgtgctgcgcgatatgcaccccggtggcgccccgcggcagctctccgccgaccgagccgcgcggttgctgacctcgattcggccggcaagcgctgttgatctcgagcgcaaggcgatcgcccggcaactgatcgccgacgtccgccgcatcgatcgcgccctgctcgaaaaccgccgtcgctgcgagcaggccattgccgcctccggcagcacgctgacagagatcttcggcatcagcgacgtcctcgccgccaagatcctcggccacaccggcgacatcacccgcttcgccagcgccgatcactacgccagttacaccggcaccgcgccggtcgaagcctcaagcggcgagcagacccgccaccgcctctcccgcgccggcaaccgctcgctgaaccacgcgctgcacatggccgcccgcgtccagaccatgcaccccggccccggccgcacctactaccagcgcaaacgggccgagcacaagacctctacggaagccctgcgcagcctcaagcgacagctcgccaagatcgtttaccgccagctgcgccacgaccacctgggtcggccattcatagattcaggattgacatagaggcg

SEQ ID NO: 2957 - DNA, 1525 bp, unidentified
  source 1..1525: mol_type = unassigned DNA; note = element_4397a62
  misc_feature 1..2: note = core
  misc_feature 3..222: note = LE
  misc_feature 223..1500: note = CDS
  misc_feature 1501..1525: note = RE
ctgatggctctaccctcccttcttgaggtcctccccggggaaagcttgcatcgcttgtcccacgaggactgaaatgagacggcttccccggggaacggccttggaggcccgacgtccacaagggtgtcgtcccacgaggactggtccatcagcacgacgccgcgtctccgcccgcacttccccgtgacctattggcacttccccacgatggaaggaggcgatgtgctcggagtcggcatcgactggtccgaggagttccacctcgtcgcgcttggaaagcccggcgagggagtcatcgacatcgggcgcgtggagcacagccccaaggcggtcgacgcgctggtcgccaagatcgccgcgctggagcccgaccccgtcgaggtccgggtcgtgatcgagaaccgccacggcatgctcgtcgagcggctgattgacgccggctacgtcgtcgtcccggtcaatcctgatctcgtcgcccgccggcgcggccctgccaagaagaaggacgacaccgaagacgcccgcatcgcgtgcctcatcgccctcgatcgcttcgagcgactccgcccgctgatcccccacggcgatctcgctggcgagctgagagcgattgcccgggatgacgcgcgcgccgccagagacgagcgcaggctgctcaaccgtctgcgccaggacctcatcaccacgttccccacggcgcttgcgatcgccggcgacgacctcggagctccgtcgttcctgcgcatgctggagcgctggccgacggcaaatttcctcgccgaggcgccgcgcgacgagctggtggcgttcgcccgctcgtgcaagcacggatggccggagcgcttcgccgacaaggtcgaggcggcgctcgcccacgatcacttcgtggcgcgcgactacctcgtgcgggccaaggccgacaccatcaggctcgccgccacccagctgctcgccatcggcgcccagaggagggcgtgggagcggcgcatgggcgagttgctgctcggcgcaccccgcaggggcagagccaaacagccccgagaggacgagctggggcagggctttcctggcggcgagatctacctgagctttcccggcctcggtgaccgcctcgccgccaggatcgccggcgagatcggcgatcatcccgaacagttcgagacgccgaactcgctgcaatgctacgggggaaaggcgccggtgacgcgccgctcgggaaagagcgagctcgtcgtcgcgtgccggctcgcccacaaccgctatctcggtgacgccgtccagcagtgggcgttctgctcgctcaagcggtccgggtgggcgcgcgagttctacgacgggcagcgggccaaggggaagggccatcacgcggcgctgcgggcgctcggcaaccgttggctcgaggtgttgtggcactgccttcgcaaaggtgtcctctatgacgagtcggtgcacgtcgccaaccggaaccgcgctctcggaagaacggctaaagccgcctgacgcggtggtggttgacaaagggtgt

SEQ ID NO: 2958 - DNA, 1456 bp, unidentified
  source 1..1456: mol_type = unassigned DNA; note = element_43a0277
  misc_feature 1..2: note = core
  misc_feature 3..83: note = LE
  misc_feature 84..1202: note = CDS
  misc_feature 1203..1456: note = RE
  misc_feature 1275..1395: note = bridgeRNA
taattggatggactcgcccccgccgaggcgtcgatgcgccacggtggcatctttgcgttgccaacgacagcgagggcgagcccatgaaacagcatacgacaagacgcaagacggtccctgcaacacgtacagcgacggagctgtcggcgtgcaggaccgtggcggtagatctggccaagcgggttttccaggttgcggcagaagatgcgcgcggccaggtggtgcatgaggcgcgcatcgggtcgcgcgaagcgtttcagaccttcctgcagcgattgccggccggcatcacggtgctgatggaagtcggcccgggtgcgcaggcctgggcgcggcaggttcaggcttcgggtaatgcggtgcggttgttgccggcccagcgcgtcgctgaacaccgcagcggtgcgaagaacgatcgcaacgatgcgcacgcgatcctgcgagccggtcgcgataccagtctccacgcagtgccggtcaagagcctgacggcgctggcgatgcaggccctgcatcgggttcggcagggttgcgtgcggcgacgtaccgcgctggccaaccagatgcggggcctgttgctggagcacggggtcgcactggcccaaggcgatgcggcgctgacacgcggcgtggatcgggtgctgcaagacgccacccagccgattccggcactgctgcgcgagctggtcgccgacgttcacgccgaatggcggcgcctgggcgagcgcatcgacgggctgaccgcacgactggagggtgccgcacgcgaggatgccgaggcgcgtcggctgatgacggtgcgcggtatcggccccatcagcgccaccgccctgatcgccaaacagaccgaaccccagcgtttcgccaacgcgcgtcggttcgccgcctacttcggcaccgtgcccgaccagcacagcagcgggcagaaggtccgcctgggcaagatgagcaagcgcggcgacgcctacctgcgcagcctgatgattcagggcgcccatgccgtgctcaagcagctcaagcccgagtcgacgcagcccgacgatcgacgcctgttgcgctggcgtcagcgtctgggtcagaaaggcgctgcggtgcggctggccaaccgcaatctgcgcatcgtctgggcgctgctgcaaaccgaacagacctaccgtcgccaacccgcggccaaggccggcaccgaggaggccaccgagtgatctgatcagtcctttcccgccaccgggcgcatcgtcgcccaaccgctgctcacgaacattgaccccaggtcagaccttcgcgattcatgcctgcgctcctaccggccctcgaggcctctccgtaatcggcataccgcgagctcatccaatgtcggccagaagcacttcgttgcttcctcgaacaggcctcatacatagacgcaaccggatggtcgtgttcacagcagggttgtaacggagggcgagtccataca

SEQ ID NO: 2959 - DNA, 1167 bp, unidentified
  source 1..1167: mol_type = unassigned DNA; note = element_43a92b6
  misc_feature 1..2: note = core
  misc_feature 3..177: note = LE
  misc_feature 178..1146: note = CDS
  misc_feature 1147..1167: note = RE
  misc_feature 34..198: note = bridgeRNA
cttgtatcttaaaaaaactttaaaatagctacgattagatttggcacagtgtatgcagcccgatgacacctggggttaatagcccgttaaacagcgactggcgcatacactgagccactcatctgaaacccgaacagttgtccgtactccataacgcatttgcaaggatgggtaataatgagtctgccaaatccactttgtgtgggaattgatgtttcgaaagctacactggacattgctgccagcactgatattactcagtttacggtcagtaatgactctgacggttttgatgccattattgccgaactcagagaacactctgttgcactgatcctgatggaggccactggtgggcttgaagctgctgtagcttgccagcttcaggctgaaggctttgatgtcgcagtaatcaatccgaggcaggcccgtgactttgcccgggccatgggacatctggcaaaaacagatcgcattgatgccagagtccttgcgcaaatggcagaggtcattaaccgacatccagatagagtgcgttttattcggtctctgccagatgttgaacgtcaggttcttgctgcaatggttgtacgcaggcgccagttgatagcgatgttggttgctgagcgtaaccgattacatcccgtacatccgcagagcagaaaaagcatcaatatcatcatcaaagcacttgaggatgagctcgccagaatcgatgaagaaatgaacagtcacataaggaatcactttaaggagcaggcagccagactgagcagtattaaaggagttggtgctatgacggttgcttcattgctggccaaggttcctgaactggggagcctctcacgacgagcaatcagcgcgcttgtaggtgttgctccagtcaatcgggactctggttccatgcgaggccgacgaaccatttttggcggccggtctggcgtacgagccgcgttgtatatggccgcgcttgtcgcaacccgttttaatccggtaataaaagccttttacatgcgtctgcttgcagctggaaaaaccaaaaaagtggctctggttgcctgtatgcgcaaattgctgaccatcctgaacgcgatgatcagaaagaatgaagaatggaatgagtcctaccattacgttgctccataattattacgttcaagacagttg

SEQ ID NO: 2960 - DNA, 1555 bp, unidentified
  source 1..1555: mol_type = unassigned DNA; note = element_43ab0e6
  misc_feature 1..2: note = core
  misc_feature 3..260: note = LE
  misc_feature 261..1439: note = CDS
  misc_feature 1440..1555: note = RE
  misc_feature 3..243: note = bridgeRNA
cttgtataatgaaaaccaagtaataatacttaaattttcatagtttatttattatacttagtttagacgctgtggattagttggttctcctatagcaaatcattttattatgatcagactatttaatttaggctctaaccacagctctatgtttaaattgttgatgagttagataacgcatgacgttttatatatagcaaggttacatttgacatagagtttgtggacatcatagcgtactacttttttaggagttttttatgttatatgttggtattgatgtagccaagctcaaacacgactgttgtattattgattcagatggtgtaatacacactaattctttgactgtcccaaactcgaaagaaggcttagaattgctttgctcaactatttttaaatatcttcctgataatgatttgaagaatgtaagaataggacttgaagcaacaggtcattacagcaataatatctctcattatctgcgttcgaagggcttccagctcactacacttaaccctttggctaccaacctttttcgcaaagcgaaaacgcttaggaaaacaaaaactgataaaggtgatgctaaagtcatagcttacatgctctttactgatgaatcaaagtcctatccaccagtatcatatcaaatcaatgagctaaagtcattaaccagacatcgttatcgtttgattggttatcgctcaaaacttaagatatccttaactcgtcttgttgatatcatcttcccagagcttccttcgctggtttggtctgtcaaccaaaaatcctcttatgcactgcttcttgagtgtccttcaccgcatgatatttgcaattgtcatcttaccaagcttactaatttattaagtaaagcttcttatggcaagtatggcagggataaagctattgcattgaaggatctagcccataactcaatcggtacttgcaatcgttctttagcttatgaactaaaacaaaccattcgtcttgtgaaatctctacaagttgaaatctcggagctggataagcaaatcaaaattgttgttgatgagctcgattctccaatcatcactattcccggcatctcttatactttagctgccattattttagctgagatcggtgatatcaatcgcttttcttcacctggtaaacttcttgcttttgcaggacttgagccttctacttatcaatcaggtaactttagagcttctaacactcctatggtcaaacgtggttctacctatttgagatgggctattatgcatgccgctagacttatttctatgcgtgatgctactttccatgattacttatccaagaaacgttcagagggcaaacattactatgttgctttatctcatgtttcaagaaagcttcttcgtgttattcatcatttgcttctgtctgatactacatttgttcctcaaatgtaatctgtagccttttctatatgagggcaacttgcagttgctctttttgtcttgctctttttctactcatcatctcctttttatttctctcttttttctcttgacttcatatagttagt

SEQ ID NO: 2961 - DNA, 1347 bp, unidentified
  source 1..1347: mol_type = unassigned DNA; note = element_43aef10
  misc_feature 1: note = core
  misc_feature 2..74: note = LE
  misc_feature 75..1088: note = CDS
  misc_feature 1089..1347: note = RE
  misc_feature 1118..1341: note = bridgeRNA
gaatgacatggactccccctcatcaggctctgccacactaggtaagtctgactacgaaattaccggaggccaccatgtcacattctatttatggcattgatttagccaaacatagcttcagtatccacggtgaagatcatcaaggcaaggtgttgatccacaaaacaataacgcggtcaaaagtccttgagacgtttgctaatatcccacccgcaattatcggtatggaagcctgcggtgcctctcattactgggcccgagaactggcgaagctcggccatacgccaaagatcatggcgtcgaagtatgtggcacctttcagaaccggtgccaaaaatgatctcaatgacgcctttgccatttgcacagctgtcatccgtccttcaacacacttcgtccggatcaaatcggccgaccagcaagcgattttgctcctgcatcgtgcgcgtgatcattgggtccatgaacgaacggcattactgaatcaaattcgcgccatgctggccgagttcggcattatcgcgccgaaaggacgccacgcattacaaaccgctatccccgaagcgcttgaagatggtgacaacccactccctgatctcgccagagcgatcatttcagactgtttcgggcacttgctcattctgaatcaacgtattgcagaccaagaacaatgcttcgatatgctggtttctcgcagccgccaagcaaagaaaatcatgaaggtggcaggcattggacccattacagcaacagccgtcatcgccagtatcggcaaaggtgagcaattcgataaaggacgggatttcgccgcctggctcgggttggttcccagccagtattcaaccggtggtaagccaaggctcggacgaattaccaaaaaaggcgaccgatatctgcggacactcttggttcatggtgcacgtgctgttatcgccagtctcggcgataaaactgaccgactcagcttgtggtgcaaaagtctggtcgaacgccgtggctttaaacgggcgattgtcgcactggcggcaaagaacgctcggatcatttggtcgctgctgagaaacgatactgagtaccaaacgatttaaaacggaacattttttcaacggagtcacttgcttcaccgggtcattgcaatagccaatgatggtgtaaggttcagaccttttgcgggaaaacctgatagcgcggcgggcactttcgatgccgtctaacgaatgaggaaccgcaaccgcgtagtgtcatcagggtcatggcatgaatgccagttaacagaccgaatgtagagcggcagtcccaaccttgcattacctgacgctgttgttgacaaccgggggagtccatgta

SEQ ID NO: 2962 - DNA, 1278 bp, unidentified
  source 1..1278: mol_type = unassigned DNA; note = element_43c1159
  misc_feature 1..2: note = core
  misc_feature 3..233: note = LE
  misc_feature 234..1268: note = CDS
  misc_feature 1269..1278: note = RE
  misc_feature 25..234: note = bridgeRNA
ctgacttgtttagatgagcccagcacctgggccgcgcgggccttagggtgcgaggtcggtgaccggttggctcccatgctccttgcccacccacacggtgtggctctctcatagcgtgcctgccggccaccgaccgccgccggcgtggctcgatagaggcgtgagacgttccccggaactcaggttgcccgccgcggtgctccatcgtccaggcagctcgaggagacaccagggtgatcacgatcggcatcgatcctcacaaggcttctcacacggcagttgcgctcgacgaaacaggtcgcgttctcgctgagctgcgagtcgccgcgaccaaggccatgctcgtccgactcttgcactgggcggagcgctggcctgagcggatctgggcaatcgagggagccacaggcctcggccatctcctggctcagcaattcgtcgcccgcgaggagactgtgctagacgtgccggcgacccttgctgcccgggttcgcatgctcgctcggggccatggccgcaagacggacggcatcgatgcggccagcgtggcgagggtggctcagagccagtccgacctgcggcacgtcggtcccgaggaccacagcaccgtgctgcggcttctctccgatcgtcgcgatgagctcgccaaggggcgccgcaccgtgatcaaccggctccatcgtctgctccgtgacctgcatcctggcggtgccccgactgaactgtcagcggaggctgcttctgggctactcggccgcatccgaccggcgggcgcagtcgacctcgagcgcaaggcgatggcccgagcactcgtcgccgacctgcggaggatcgaccgggccctggtcgagaaccgcgcgcgctgcgctgctgacgtggccgccagcggcaccaccgtgacggccatcttcgggatcagcgacgtgctcgcggccaagatcctcggccatgccggcgacgttagccgctttcggtctgctgaccgcttcgctagctacacgggcacggcaccgatcgaggtctcgagtggcgaggtggcccgccatcggctctcgcgcagtggcaaccgctcgctcaacaacgcgctccacctcgcggcgcgggtccaggtcatgcacccgggtcccgggcgggaccactacgagcgcaagctcgccgagcacaagtcctctcgcgaagcgctgcgcagcctcaagcgccagctggcgaaggtcgtctatcgccatctcgtcgccgatcgcgcccatcgtcttgctatcgcctcttgacatagaggcg

SEQ ID NO: 2963 - DNA, 1708 bp, unidentified
  source 1..1708: mol_type = unassigned DNA; note = element_43c8be5
  misc_feature 1..3: note = core
  misc_feature 4..247: note = LE
  misc_feature 248..1462: note = CDS
  misc_feature 1463..1708: note = RE
cttatacagtaaactaaaagcaagccctctcgacacagggctggaacaagagtacacttgttctatacaactgttgaacgcgccagggaaagtctacttcctccacacggctcgaccgattgggaaagcttgcacttctctggtaccgttcctgagcgggaccgatgatgagagagtcgcgcttcgagcgccacagtataagggcacgcgtgctcagggaccattgatgtagagaggaacattgcgcatgtggtatgccggtattgactgggcgaacgaccatcacgacgccctggtcattgatgaaacgggccgtcaggtcgggaccttgcgtgtcgatcacagcccgcaaggcatgagcaaactgaacaccttcttggagcagatcatcgggcaggagtcgaaagagcagatggcctgtatcatcgagacgacccatgggttgctgattgctcacctgctggaggcgggctgggctgtctatcctgtgaacccgcgcaccgtcgatcgccgacgagctgcatctggagccaagaccgatacgattgatgcctacttgctggccaagacaggacgtgcggacctggctgatttgcaccgcctcaccccagatagtcagcagattaccgaactgaaactgctcacacgcgatcaagatgcgttgatccggatgcaaacgcgcctggtcaatcagctcaccgcctgcctcaaagcctactacccggtggctctggagctgtttaccaaactgcaacagaagagcaccttgctgttcttgcaaacctaccccactccacaggcggcgatggctgcttcggctgagcagatcaaagaggtcctcagacgagcgaagcattccaatccgatccctgtcgccgccgagattgtcgagcggttgcaccaaccacatttgcaggccgatgtcatcaccacgcgcacaaaatcgcgtttgatgctggtgctggtgagtcagttgctgccgctgattgagcaaattgctcagtatgacaaggagattgccaccctttttttgacccatgaggaccatgagatctttgcaagcttgccgcgtgcaggcaaacgcctggctccgcgactgctggcagaaatcggcgatgatcgcgaacgctaccaggatgccagcagtctgcaagccctggggggaacctcgcccgtgctgtttcaaagcgggatgtactccaaagcgcatcgccgattgggttgcatcaaacccctgcgcaatgcgctgcatcaattcgcctggcagacgacgcagagcgaaccgtgggccaagcagtactaccaacgcaagcgagctgaaggcaaaagccataccgttgccgtgcgcgcccttgccaatgtctgggtcaggatcatctttgccctgtgggtcaaccatacctgctatgagacggctatttttgaggcggcgcaacgccaccatgtccgcaaagtcgcctagcactgcacgcacgactgagcgacgctgagcagcaaaaacccctgctgtttttttgcttgcaattgggcatgcccaaaaaagaccacgcaagcgagaggctgtcaaggaaagcgcagcggcttgacagcagcgagcggcgtggtacactgcgttatacccagttgaaggctcctcccgtcgcatcattgctgtctcgtccttcctctgttctccgatttggtcgttttagggcttgacatagagagt

SEQ ID NO: 2964 - DNA, 1234 bp, unidentified
  source 1..1234: mol_type = unassigned DNA; note = element_43f855c
  misc_feature 1..2: note = core
  misc_feature 3..209: note = LE
  misc_feature 210..1133: note = CDS
  misc_feature 1134..1234: note = RE
  misc_feature 12..191: note = bridgeRNA
cttatctgttcggaatctggcagtttgggcgtcgagagccggcgtgggccaccgtgagagcctggatcgttaccgatcgtcttgtagctgggtgcccacgccggttcctcccctgtgtcgcccgaacagttgccagagttgccactcgtagacgtaaggctgggcaggcaggggagctctcgacccttcaagcctaacggagttcgcccatgaacggcatcgggattgatgtgtgcaaggccatgttggatgtggccgtccaccacggcgcttgcatgcggttccacaacacaccagcgggctgtcgcaagttggtggcctggctgacaacgcagcaggctggccagatcgtcctggaggcctccggcggctatgaacagcgggtactggatgctttgttcgacgccggtcaccgggttgtgcgggcggatgcgcgccgctgccatgccttcgctgctgccaccggtctgccggcaaaaacagatcgtctggacgcgatcaatctcgcctgcatggctgagaagctggagctgcgcccgtatcaaccgatggagccttggcggcgacggctgcgcgagttcgtacgcgcgcgacagcagctcgtggagctgacaacaagcgcacacaaccagttggagcaggtaacggacacgcgcttgcgccgcgtgctgcaggccaatatcgcgcagatgaaaaagacctgcgtgcgattggaacagcagattgccgaacaggtccgccaacaaccgcagctggaggcgatgcgctcgttcaaaggcgtcggagccaccttgcaggcggtgatcgccagctacctgccggagctgggaaccttcgaggggaaggcgattgccaagctggtcggcgtggctcccatcgcccatgacagcggacagatgcgcggcctgcgccggatccgcggcgggcggatcgaggtccgcaacgtgctgtacatggcgtgcctgtctgccatccagcacgagccgcggatccgggagttttataggtctctgcgggcacgcggaaagcccggcaaggtcgccgtcgtggcggcgatgagaaagatgctcgtcatcctcaacgcgcgagcacgagacgctcaagccgcagacgtccaaaccgtcccgacctgagtgtgtctacgctctagattgagccgccggctgctgaccagcggccggcgctcccgtgcccagcttccagaacggtcagcccccctccaacaacacagttg

SEQ ID NO: 2965 - DNA, 1441 bp, unidentified
  source 1..1441: mol_type = unassigned DNA; note = element_43f8fb8
  misc_feature 1..3: note = core
  misc_feature 4..235: note = LE
  misc_feature 236..1426: note = CDS
  misc_feature 1427..1441: note = RE
  misc_feature 14..199: note = bridgeRNA
gccctactttcttgatcgtgggttcgaactggtcactcgtaagatcagcgggacccaggggttctgggtatggctgtcatggggacgccgtgagatggccggaaaggcttggccgcccggagccccgcgacgactcgaccgccaattgggagatgcgactcgatcgctgtgtagggcaacgtcggcgaggtcgtctgctgggctgtgaacgcgcgacgagccggcggaggtgactgtgccccggataggggccggagtggacatcggcaaggaccaccaccactgcgtggtgatcgacgcggacggcgaacggctgctgtcccgccgggccctgaacgacgagacgagcctgctggaactgatcggggacgtcctggccctcgacgccgatgcgctgtgggccgttgacctcaaccacggcggcgccgccctgctgatcgggctcctgctcagccacgaccagcccatggcatacatcaccggcctagccgtgcaccgtgcctcggcttcctatcgcggcgagagcaagaccgatgccaaggacgccttcgtcatcgccgaccaggcccgcatgcgccgcgacctgggactgttgcggcccggcgacgagatcgccgtggacctgcgcatcctgaccactcgccgcaccgatctgatgtgtgaccgcacccggcagatcaaccgtctccgcgcacgactgctggagatcttccctgcgttggagcgtgagctggagctgaccaacaaagggcccgtcatcctgctgaccggctaccagacgccggccgcgatccgccgggccggagcgaagcgcatcgagacgtggttgcgcaaccgcaaagtccgcagtgccgccgcgctcgccaggacggcggtggaggccgctgaggcccagcacaccgcgctgcccggcgagaagctggccgccgccatgggggtccgcctcgcgaagggggtgatggccctcgatgaggaaatcgcggaagtcgatgccctgatcgaggcccggtttcgcgagcatcctcatgccgaggtgatcctcagcctgcccggtatgggcaagcagatgggcgccgtcttcatcgccgccaccggcggcgacatggacgccttcggcagcgccgaccgcttggccggctacgccggcctcgcccccgccccacgcgactccggacgtgtccgcggcaacctgcgccgtcccagacggttccaccgagggctgctcaacgcgatgtacttgtccgcgctctccagcctgaaaagctgtccggcctcgaagtcctactacgcgcgcaagcgtgccgagggcaagggacacaagcaggcgctgctggcgctcgcccgccgtcggctcaatgtcctgtgggccatgatccgcgacggagcgtgttaccaagccacaccacctgtcacagcagcggcttgacatcagcattgggaa

SEQ ID NO: 2966 - DNA, 1308 bp, unidentified
  source 1..1308: mol_type = unassigned DNA; note = element_4405262
  misc_feature 1..2: note = core
  misc_feature 3..191: note = LE
  misc_feature 192..1151: note = CDS
  misc_feature 1152..1308: note = RE
  misc_feature 32..201: note = bridgeRNA
cttgtgtccaggaaatctggcaggatgtgcgaacgggcggttctcgcaaaaccgcccgttgctggaactgagcccgtaacgccccaaaagcgataagcctgtatcagagcgagggacagctccggtgtcttcctcaacccgaacagttgcaagggcttcgagcccgtaccgagcaaggaagggagtggatgatggcacaaaacgatctcgttgtcgtgggcatcgatgtcgccaaggacaaggtggacgcgtgcattcgcgtgttggcattgcggcagacctgcccggccaccgcgcaagggcaccgcaagctggttgcctggcttcgcaagcaccaggtgggcatggcggtgatggaggcaagcggcggttacgagcgtgaatggcgcaaagtgctgtacaaagccggcatcgaggcccggattgtcgaccccaagcgggtccgcaacttcgcgctgtcggctggacggctggccaagaacgatgcgatcgacgcggagatgattgcttggtttgcagagacatttaacgaggcaccgagccagacgcacgataccgcacacgaggaactggtggcgctggtgaaagcacgcataggtctggtcgagcttaagacccgactgcaaagccaggatgtacatgctgggccaggacaggttcgaaaagcgcatgcacgcatcttgaagagcctggctgccgaaatcgaaaagctcgaggctgcaatcgcagccaagatcaaggccacagcggattttgccgaacgcgccgagatcatcgagagcgtaccaggcttcgctgaaacgacctccgccaacctcgtcgccgcgatgccagagcttggccatgtaagcgaccgcatcgccgccgccttgatcggcctcgctccgtatgacgacgatagcggccagcggcgtggcgagcgccacatcaagggtggtcgccgctggattcgcaacgccatctacatgccttgcctcggcgccgccacgcagaacaatcccgtcatcaaggccttctatgaccgtctgattgccaagggaaaggcgccgaaggtcgcgctcgttgcctgcatgcgcaagctgatcatcatcctcaacaccctgatcgcaagacggcagaaatgggatcccggccgtcacgtgttggcctgacgagcgcctccagatcgcgctcggtcctcgaccgagcgcttgcaaagccacagaccggtgagcggacggggtcaaggccgtcagccgccgaaggcgggggcgcgcaagcgccagccttgagaccggccgatcaccggtctacctcacaacacagttg

SEQ ID NO: 2967 - DNA, 1411 bp, unidentified
  source 1..1411: mol_type = unassigned DNA; note = element_440b167
  misc_feature 1: note = core
  misc_feature 2..89: note = LE
  misc_feature 90..1124: note = CDS
  misc_feature 1125..1411: note = RE
  misc_feature 1180..1403: note = bridgeRNA
caatgggatggacgctcccaccttaaacggcatcactgtgccaaagtggagattgcgtatcaaccacttcaccgataggagcgtccaccatgaaggctacaacaattggcattgatctggcaaagaacgtattccagatccacggcgtgaacgaattcggcaaacccgtcatcaagaagcagctcaaacgggaccagatggcggccttctttgccaacaccccgcctgcactcatcggaatggaggcctgcgccagcgcccaccactgggcacgtaagctgcaaagctttggccacaccgtcagactcatggccccgcagtttgtcaaaccctacgtcaagagcaacaaaaacgacgccaatgatgccgaagccatctgcgaggcagtggctcgccccaatatgcgatttgtccctatcaaggatgttgagcagcaagccgtgctctcattgcatcgggtgcgccaaggctttgtggctgcgcgaactgcacaggccaaccaaatcaggggtttactcggtgagtttggactggtcataccccagggcatcgcccacattgcccgacgtgttcccgaactcattgaagatgctagcaacgaactacccggctcctttcgattgctcatcgagcgattgatggagcatctcaaaggtttgcatcgccaggtacttgacctcgaagccctgattgaagcctggcatcgcaagagcgaagcaagccgcaagctggaggcgattcctggcattggccccattactgccagtgccttggtggccagtattggagacgccaataactttgcggatgggcgtcaactggcggcatggctgggtctggttcccaggcagcactccagcgggggcaagcagactctactgggcattagcaaacgtggtgattcttacctgcgcaccttgctcattcacggcgcacgggcatgcattcaggcctttagtcgcaaaggcaattccagtggttggctgcatgaattgttgcagcggcgtaaccacaatgtggctgcagtggccttggccaataagaatgcgcgcattgtttgggcgctgttggcgcagaagaggcaatacgttgcggggtactctcgcccagtaaccatggcctgagtgctgcacatccataacaagcaggaacgagacaacacgcagggaggaatgaaccaccgattgctcaagcgatcatgaagtgatggcaagacaggtcagaccgtggttggcaaagccctatggcaaccaggcacatcgaagtgcgcattcgcgattgaggtgccaaccagcaaatcccatcagggaccgtgatcgcaagatcacagcaagtccgaatgtacggatgcaatcttgatctatcgcggtgtcatgaattgagagcttggcaaaacgggagcgtccatgta

SEQ ID NO: 2968 - DNA, 1196 bp, unidentified
  source 1..1196: mol_type = unassigned DNA; note = element_441d2e1
  misc_feature 1..2: note = core
  misc_feature 3..176: note = LE
  misc_feature 177..1193: note = CDS
  misc_feature 1194..1196: note = RE
  misc_feature 35..198: note = bridgeRNA
tcctttagattagcataattaatttagtggaaaaacagattgagaagaagcagggtaaactatgactaggcctctgagttaatggctcatatcctgatgaagaccctgcctcttttcatcaaccttagactcaaatagaaattcgggctgaagacccattatcaaggagttgagttgtgttggtgatctcaatcatcttaaatcattacaaaattatgcaaaatcaaacaattgttggtattgatgtcagtgcagctacattagatatctgtgtaaccggaaaaactcaaaaatcggttgttattaaaaacgaatcggctgcaatccgcaaattctttaatacttatcaatcagaccagctgttgattggcatggaaaatacaggccggtataactgggctttatatgaagtattaaaagacctgcatcaccaggtttatgttatttcaccgctgcaccttaaaaaaagcatgggcctggtacgtggaaaaacggacaaggtagatgctataagaatagctgcctttattgcaaagaatcataccgacatctcacaatggaaaccttcatcaccagctgttcaaaaactgaaaatcttccttaccgaacgcaactcgcgcattaaaaccaaaaggcagctacttaaacagcaacatgattatgttaaaatgaaacatcttgggctcgataaaacattaatgaagcttaactcaaaacagttaaccttaattgacagtcagatcactgaaattgaacggcaaatagaactggttataaaagcagaccaaaatatggatcagcaggctaaacttattcggtctgtaccgggcgcagggaaagtgctttgctggatgatgatagcaaaaaccgagggttttacaactattactgagccgcgcaaaatggcttgttacagcggggttgtaccttttgctaatcaatccggcacatccattaagggaaaacagagggtatcacattatgccgataaggccatcaaagccgttctacatttagctgctatgagcgccatccgcttaaaaaacgaactgcgtgactattaccttagaaaggtggccgaaggaaaaagcaaaatgagtgctttaaatgccgtcagaaacaaaatcgttcataggatatttgccgtcgtcaaaaaccaaataccatatcaatctaatttgcttttatcatagaaa

SEQ ID NO: 2969 - DNA, 1185 bp, unidentified
  source 1..1185: mol_type = unassigned DNA; note = element_44218d4
  misc_feature 1..2: note = core
  misc_feature 3..222: note = LE
  misc_feature 223..1170: note = CDS
  misc_feature 1171..1185: note = RE
  misc_feature 3..200: note = bridgeRNA
cttgtattgtttgaggtgtcggggtgagggactctgtggtgcatcggcagccgcctgctgaccgacctcgcgagttttctcccaccccaccctccagcgtcgatcaggaactgagcggcacagtgcgccttgcggtgcaccgtgaccaccgatctgaaggcaagccaacgcgacggatgggttcaccccgacgtggccattgtcttcatcggaggtactcccatgcaaccgtctaccttgttcgtcggcgtggacatatccaaggccgagctcgtcatttgcatcgccggccagcggccttgcagcattgccaacgacgcagccagcattcgcgcctggctgcgcacggtgcctgcgcatgcactcattgccatggagtccactggacgctaccacgccttgttggcgcagcttgcttatcaagccggtctccaggtctacgtgctcaacgcccgtgacgtcttcttttacgcccgggcgctcggcacccgcgccaagaccgatgctgtggacgccgtggtgattgcgcgctatctggagcaacatcactgcgcacttgcatccttggcaccccggcagcgccacccagcagcagctgcaggaattgctcgtgcgccatgcacaggtagtggcgcatcgaaccgccttgacccaggcgtttgtcggcgtgccgacggcgcgcagttggcagggttgaacgcggccttccaggcgctgctcaagtccatcgatgcgcaggtacagcgcctgatcgacagcgacgcgcgcatggcccgcgggtaccgactgctgcttaccatcacgggcatcggcccgcaatcgggcgccttgttgaccacgctgttcagccgcctcgagttcgctaacgcagacgcattggtgggctacagcggactggatccgcgtgcgaacgattccggtactcggcatgggcgccggcgattgagcaagaaggggccggcgctgttgcgccgccagatgtggctggccggcttctccgccagtcgaagcaagctgttcgcaccgtggtaccaaaccttgcgcgccaagggctttgcctccactgaagccatcgtgatcatggggcgcaagctgctgcgcgtggcctttgcagtttggaagagcgatcaagcgttcgactcccaaaagcttgggcccaaaccggcttgacgaaaacaatagaac

SEQ ID NO: 2970 - DNA, 1711 bp, unidentified
  source 1..1711: mol_type = unassigned DNA; note = element_442ec0a
  misc_feature 1..2: note = core
  misc_feature 3..69: note = LE
  misc_feature 70..1227: note = CDS
  misc_feature 1228..1711: note = RE
  misc_feature 1259..1481: note = bridgeRNA
agatgctatggggcagaccgcggcgaggctctaccattgtcacttaaggcaacgtcgatggagcatcccatgtcacaactcaacgacttaagcaggtccctcacttccctggagcaagacaacgcgatcattgcggtaatcgagatgagtcaatcgagctggctcgtcgccggcatcgttccaggcatagagcgccatccgctgaagaagcttgaaccgaacgagggggagttgctccgtttactgatgcgctggcgtgcggaggcaaccaaaatgggctgcacgatcacgcgcattgccgtcgcgtatgaggctggccgcgacggattttggctggcgcgctggctacgggcgcacgacatcgaaacctacgtcatccacccgacgagtgtagctgtatcgcgcgagcatcgccgcgcgaaaacagatcgactcgacactggattgctcaaacgcgtcttcatcggttggctgcgtggtgaaccagatcactgccacatggtggcgattccgacgctggcggaggaggatgcgaagcgcccgaaccgtgagcgcgagggactcgttcgtgagcgtacgcgcattgtaaaccggatgaagagctgtctggcccgcttcggtgttcgaagcttcaagccgacgttgcgcaaggcaccggaacgtctcgcaacgctggtcacgccggagggggttccgctcccggcaaacacacttctcgaacttcgtcgagacatggcgcgactgcgttttatcatggaccagatcaaggaagttgaggaggcgcgtgggcaacgcttggaacaggcgcctcaggaaaaatcgcatgcgatggtccgactgctcgcccgtgttattggcgttggcatcgaaacggcggacatgctggtgcatgagatcctgtcgcggagtttgcgggatcgacgagctgtggcgcgctacgctggtctcaccggcgcgccagatgagagcggcagtagacggcaagagaaaggacttgccaaggcgggcaacgcacgggtgcgccgcggaatgattcagttggcttggcgctttttgctcttccagaaggatagtgcattggcccaatggtatcgtacacggactgaaagtgctggcaaaaagcgtaagacaatgatcgtagctctggcccggaaattgctaattgctctgtggcgtctggtaacaattggagaggttccagctggcttcgtgttgcgagccgcgtgataggagaactcagaaaagataagctctcggagcctgacgaacagaacctcgtcagcatccgatgacgatccgaggtggcggtcgcccgaagcaggccatggtgttaacaccggtttcgagaatgggtccgccgccgaggagcttcgccgccgatgcgcatgactgcatcatggtcaggtctctatggacctaccgaatacaaggttgcggcgcgatgattcgcgccccatggcaagctcccctctgatcgtcgtcccgatcgcgtcaagcgtgccgtcgtgctcggagccgtctaggtatggcctggccagggcggagcatgcggaaaggttggtgcgacggccaaccttgacggcccctgcgcgcgccgccgtgagcaaagcgcgcgtggggacgaagaaacgagctttgagatcgaacaaagaaaccgatgaaggagaaaagatgcgttgtgccggcaagacctcttgacataccccataca

SEQ ID NO: 2971 - DNA, 1366 bp, unidentified
  source 1..1366: mol_type = unassigned DNA; note = element_44317ea
  misc_feature 1..3: note = core
  misc_feature 4..107: note = LE
  misc_feature 108..1115: note = CDS
  misc_feature 1116..1366: note = RE
  misc_feature 1135..1364: note = bridgeRNA
agatggaatggtcgcctcccgccttaacgggccgtccggcgccgcaatctcgcgtccagagcatgcgacattgctggttcggcagcctagccgacaaggagaaccagatggaacccacgaccattgccatcgatctagccaagcgcgtttttcagattcactttgtggacccggacggcacgattcacagcaaggtgctcaagcgtgcccagatgctgccgttcttcgccaaccggccggcgagccacgtcgttatggaggcctgcggcagcgctcatcattgggcccgggtcctggcgcggctcggccacgacgtgcggctcatcgcagctcagtttgtgcggccgttcgtgaagtcaaacaagaatgatgcggctgacgccgcggcgatctgggaggctgcccagcgtcccggcatgcggttcgtggccgttaagaccgaagaccagcaggccatgctggcgatgcaccggatacgccagcaactggtccggattcgcgtcatgcaggtcaaccaacttcgcggattgctctacgagttcggcgtcgtgttgcctcaaggccgtcgtgcatcggtcgacgccgccaaagccgcgctggcgtcactggccgacgagttgccggccatgctgctagacagcctgcaggatcagctttcgcgactccgtgcgctcgatgagcagattgctcggatcgagcaacgcattctcaattggcgtcgcaatgacgacgcatgcctgcgcatctctgagattccgggcgtgggcgtgctcacggcaactgccgcggtttcggtcattggacaggcaagaacgtttcgctcggggcgggagtttgccgcctatctcggtctcgtgccgcggcaaaacggctcgggaggcaaaatcaagctcagtgggatcagcaaacgcggtgacgtttatttgcggacgctgctgatccacggcgcgcgatcggtcatctcgagctcaaagcacttgccggagcgtttgcgtcagatgctgtcccgacgaccaacgaacgtcgttgctgttgcactcgcaaacaagatggcgcgaacaatctgggcgctgctggcgtatggccgaacgtatgaggcagcaccgtcgcagtagtcaagcttcaatccctttaacccatccacggttgcacaggtgatgctgaaagatggcaagacaggttggaccgcgcaagggcaagcctgagacatttctcggacctcgagtccgctatttagattaggaaccttgcggcgaaatccatcggggccggcaggcacgtcctgcgatcgagtccggatataagtccgcaaccaccctcctcgccacgatcaaaaatcaccttgcaaatgggaggcgaccatata

SEQ ID NO: 2972 - DNA, 1463 bp, unidentified
  source 1..1463: mol_type = unassigned DNA; note = element_4444dc2
  misc_feature 1..4: note = core
  misc_feature 5..247: note = LE
  misc_feature 248..1447: note = CDS
  misc_feature 1448..1463: note = RE
  misc_feature 1..238: note = bridgeRNA
acccgttaccttctaggtgctcccgctccgtgggggctggtcgctgggccgggcatgactgatttcccctgtcgttcgcatgatccggggggtgttgtcgcccggtccggtggcccggtgatgactgctgatagggacctggccccgatctgaccatcggtggtctcttcgtaacgtggatgccagcacaccgtggcctgacccttgggcgaccacaggctgtgagcacctcacaggaggaccccaagtgatcaccaccgaccagatcgcggtgtacatcggactggacgtcggcaaacaggaacaccacgcctgcgccctgaacccgtccggtgaccgtctgcacgacaagccccttccacaggacgaaacccggctgcgggagttgttcacccagctcgccacccacgggccggtgctggtcgtggtcgaccaacccgcctcgatcggcgccctgcccatcgccgtggcccgcgaaacaggcgcccacgtggcctacctgcccgggctggccatgcgacgcatcgccgacctgcacccgggcaacgccaagaccgacgcccgcgacgcctacgtcatcgccgaagccgcccgcaccatgccccacgcactacgacgcgtggacaccggtgacgaggcactggccgacctgcaggtcatcatcgggttcgacgacgacctcgccggggaagtcacccgggtgtcaaaccgcatccggggcctgctcacccagatccaccccgccctggaacgcgccatcggcccccgcatcacccacccagccgccctggccctcctgacccgctacggcgggcccaccggcctggccaaggctgggcgccgcgggatcaccaccaccacgaagaagcacgcaccccgctcctggcaacgcatcacccagaacgtcctggacgccttgggccagcagaccgtcaccgtgccgggcaccaccgccgcagaactggtcctgccccaactcgccacccaactgggcagcctgctggaacagcgcaaggccgtcgcggcccaggtcgaggagatgctcgatgcacaccctctttccccggtcctgatgtccatgcccggggtgggcgtcaggaccgcagcacgcatcctgctcgaggtcggcgacggcagctcgttccccacaccggggcatctggccgcctacgccggactggcccccgtcacccgcagatccggcacgtcaatccgcggggaacacccctcccgggccggcaacaaacacctcaaacgagcgttcttcctctcggccttcgcagccctgtcagaccccaccagccgcgcctactacgaccgcaaacgcgcccaaggcaagaagcacaacgccgccttgatctgcctggcccgacgccgctgcgacgtcctacacgccatgctccgcaacggcaccacctaccagccgccagtcgccaccgcggcttgacgaaccccatagggac

SEQ ID NO: 2973 - DNA, 1349 bp, unidentified
  source 1..1349: mol_type = unassigned DNA; note = element_444ec12
  misc_feature 1..3: note = core
  misc_feature 4..76: note = LE
  misc_feature 77..1099: note = CDS
  misc_feature 1100..1349: note = RE
  misc_feature 1095..1337: note = bridgeRNA
tgatgatgtggacgcccccgcccagcgccggcagcaatggtgctgacccggcgattcggatcgggaggagcgccccatggtgatcacgacgattggtctggacttggcgaagagcgtctttcaggcgcatggcatcgatgcgaccggtgcgacggtgttgacgaagaagctgcatcgcaagcagatgctaccgttcttctcgaagcttccgccgtgcctgatcggcgtggaggcctgcggcacggcgcaccattgggcgcgaacgctttcggcgatgggccatgaggttcgcttgatcccgccgtcctacgtcaaggctttcgtcaagcgcggcaagagcgacgccatcgacgctgaagctatctgcgaagcggtgcagcggcgaacgatgcagttcgttcccgtgaagtcggtcgaccagcagagcatcctcatgacccaccgggcccgatcactgcttgtccgccagcgaacatcggtcgccaacgctttgcgctcgcacctggccgaactggggcttgtcgccaatcccggcatcgccaatctggcgaggctcgccgagcaggcgctcgctgacagggatgcgcttccatccttcgcccgcgtagcgctggcgatcatgctgcgccagatcgttgcccttgggcaggagatctcggcgctcgatcgccagatcgctgcttggcatgtcgagagcgaagcgagccgcaggcttgccgcgatccctggcctgggcgtcatcaccgccaccgcagtagcagccaccgtcaccgatcccgatcagttccgctccggccggcagttcgcagcctggcttggcctgacgccgcagcagcaatcgacaggcggcaagatgaggctgggcggcatctcgaagcagggagaccgctacctccgccgattgctcgtcgtcggcgccactgccgtcatccgtcacacgaaggacaaaccgacacccatggccgcctggatcaggaagctcatggagaagaagcccttcagggtcgtgtccatcgcgctcgccaacaagcttgcgcggattgcatgggtgctgctgacgcggaaggagacctacaggccctaccagctcgcagcctgagcgaccgacaaaaggagctgaacagaattggtgacggcagtcgatgatgagggacgatcgagccaatgacgaggccaacccgtctgattcaatgcgcgccagcagcgcgtcatcttgatagggacctcgccggcggatttccatcagggccagtggcaaacatcacgccgcacaaacaggccggacatatgaaagcaaccgatcaaatcatctcgacaaaaaagtcgttgccatagggggcgtccacata

SEQ ID NO: 2974 - DNA, 1452 bp, unidentified
  source 1..1452: mol_type = unassigned DNA; note = element_4451c29
  misc_feature 1..2: note = core
  misc_feature 3..234: note = LE
  misc_feature 235..1437: note = CDS
  misc_feature 1438..1452: note = RE
  misc_feature 12..198: note = bridgeRNA
tccttacctttcttcatgggtgttcgtggccgccggccgtaggcttcgagtcacccagggacggcgggtatggctttcatcggtctgcccttgatggccaaggaggattggccgcccgtcgtcccgcgacgactcgaccgctaattgagagatgcgatttgatcgctgtgtaaggacacgacggcgtggtcgtctgctgggttggccgagatctgaacgaggacggaggtggttgtggcacaacctgtgtgggcgggtgtagacgccggaaaagcggaccattactgcgtggtcatcgacgcggacggcgcgtctctgctttcgcggcgcgttaccaacgacgaggccgcgctgctggagttgatcgatatggtcacgtcgctggctgacagcggggaaatcacctgggcaattgacctcaacgctggcggcgctgcattgctgatcaccctgctgatcgctgctgagcagcggctgctctacattcccggccggaccgttcaccatgcttcgggtggctaccgcggtgacggcaagaccgacgccaaagacgctgcggtgattgccgatcaggcccggatgcgccgcgatctgcagccactgcgtcctggcgacgacatcgccatcgaactgcgcatcctcaccagtcggcgctccgatctggtggctgatcgcacccgggcgatcaaccggctgcgcgcccagctgctggaatacttccccgcccttgagcgcgcctttgactacagcaaaagcaaggccgcgctgatcctgctcaccgggtatcaaacccccgatggtctgcgccgcgccggagccgcccgagtagcagcctttttgcgtaaacgcaaggcccgcaacgctgatgcggtcgccaccggcgccatcgaggcggccaacgcgcaatacaccgtcgtgcccggacaacagcttgctgcgggcgtggtcgcccgcttggccgaggaggtgatggccctcgacaccgaaatcggcgacaccgacgcgatgatcgaggaccgatttcgccgccaccgccacgccgaaatcatcctgagcatgcccggcttcggcgtcaccctcggcgccgagttcatcgccgccaccggcggagacatgagcacattcccatccgtcgaccgcctcgccggcgtctccggtcttgcgcctgtaccgcgcgattcgggccgcatcaccggaaacctcaaacgtccccgccgctacgaccggcgcctgctgcgcgcctgctacctgtccgccctggtcagcatccgcaccgatcccgcctcgcgcacctattacgaccgcaaacgcgccgaaggaaagcgccacacccaagccgtcttggccctggcccgccgccgactcaacgtgttgtgggccatgctgcgcgaccacaccacctatcaacccaccgcacctaacaccgcggcggcttgacaacctcattgagaa

SEQ ID NO: 2975 - DNA, 1498 bp, unidentified
  source 1..1498: mol_type = unassigned DNA; note = element_4456f09
  misc_feature 1..5: note = core
  misc_feature 6..254: note = LE
  misc_feature 255..1481: note = CDS
  misc_feature 1482..1498: note = RE
  misc_feature 47..226: note = bridgeRNA
cccccgttaccttcttcgtggctcctggatccgtcaggatcaaggagtgctgaccggccggtcctgggcatgatcgtttgcccccagtcacccatgatccgggggggtgttgtcacccgggaccggtccggtgatcacggatcactgatagaggcaggacccgactgacaagggccttcgtaacgtggatgccgagcgtgatcacctcccggccggccagcacacgccactggcggaccagaaggagatcaggcatgagcgcccagcaaaccccggccgtgttcatcggtcttgacgtcggtaaatccgagcaccacgccgtggccctgaccgcggcagggaagaaggtctacgacaaggccctgcccaacgaccagacccgcctgcgcgaggtcctcgccgagctcaccaccacccacgggcccacgctgctggtggtggaccaaccggccaccatcggggccctgcccgtggcggtagcccagacctgtgagggcgttgaggtggcctacctgcccgggctcgcgatgcgccggatcgctgacctgcaccccggtgcggccaagaccgacgcgaaagacgcagccatcatcgccgaagcagcccgcgctatgccccacaccctgcgctccatccgggccgatgaggaacagatcgccgagctggccatgctcgccggtttcgacgacgacctcgtcgcgcaactcaccgcgacctcgaaccggttgcgcgggctgctcacacagatccacccctcactcgaacgcgtgctcgggcccaagatcacccaccccgccgtggcagacctgctgagccggtaccccacccctgcacagctgaagaccgccgggccggggcacgtgcgtgcccggctgcgtaagcacgccccacgtctggctgcctctctgacagaacagatcttccacgccctggacgagcagtccgtggtggtggccggcacgcaggccgcggccaccgtgatcccgatcctggccgagcagctggcaggactgacccggcagcgggccggactggcctcacaggtggaggccgtggtggaggcccaccctcttcacccggtcctgatctcgatgcccggagtagggatcaggaccgcagcacggatcctcaccgaagtcgtgggcaaggacttcgccgatgccgggcacctggcctcctacgccgggatcgccccggtcacacgccgctccgggacctcgatccgtggcgagcgcacaccacggggcgggaacaagcgactcaaacgcgcactgttcctctcagcgttcgcttcactgtcacaccctgcctccagggcgtactacgaacggaaacgagcccagggcaaacgccacaaccaagcgctgatcgcgctggcccgacggcgcacggacgtgctctacgcgatgctccgcgatggcaccctgtaccaggacccgggcacacctacagccacaccatcagtggctctcgctgcttgacgaaaaccatagaggca

SEQ ID NO: 2976 - DNA, 1413 bp, unidentified
  source 1..1413: mol_type = unassigned DNA; note = element_445e795
  misc_feature 1..3: note = core
  misc_feature 4..81: note = LE
  misc_feature 82..1131: note = CDS
  misc_feature 1132..1413: note = RE
  misc_feature 1130..1400: note = bridgeRNA
tgatgtcgtggatggcgccctccaccagcgtcagacgtgccagaataggcatgttgaagaaccggagaggaactatccatcatgtctgagattgccaccgtcggccttgatatcgcgaagaacgtcttccagctgcacggcgtcgacagaagtggaaagatcgtcctgcgcaaggcgctgcggcgcagccaggtgccaggcttcttcagcaccctttcgccttgcctgatcgggttggaggcatgcgcgacggctcaccactgggcccgcacgctcatggccttcgggcatgacgtccgcctgatcccgcccgcctatgtcaaaccctatctgcgccggcagaagaacgatgccgccgacgccgctgccatctgcgaggcggtcactcggccgtcgatgcgcttcgtcccggtcaagagcccgcagcagcagagcaccctcatgctgcacggcgcccgcgatctcctgatcgggcagcggacagccctgatcaatgctctgcgcggtcacttcgcagagttaggcatcgtggcagcgcaaggcgctcgcaacacgcggcaactgattgcccttatccatgatgccaccagtcccggcctccccgtcacagcccgggtcgcactccagcctttggcggcaatgctggttgagatcgaagcgcagatcgccaagctcgacaaagccattctggccgcccaccgcagcgatccggtcagcatgaggctcgccagcattcccggcattgggccgattgtggcctcctgtctctcggccagtgttccagaccccagcctgttccacggcagtcgggagtttgccgcctatctcggtctcgtgccgcggcagccctcaaccggcggtaagccgcggttgggctccatctccaagatgggcaaccggcacctgcgcaagctgctggtcgtcggcgcgcatgcggcgctctacagcctgaagtccggcaagacccgaacgcccctggcggactgggcccggtctctgctggtcaagaagccgttcaaggtggtcgccatcgcactggccaacaagatcgcccggatcgcctgggcggtgatggccaggagcacggcttatgagcctggcaacaagggagctgccgcgccggcggtatagccgccccgttcacactattcgcccctcggggcatccagttggcacggtgatgatgagatgatgtgaagccacagcggatatggaccgccagatctggcaaacccgtggtgttgtcttgcgccagtcgagcgcgataacgtgagagggaccaggttcagcggaaaacatcagggccagcggtcatgcagcaccgcgcttacaggccggagacatgactgcacccgccccgctaggcccaagcatcatcaacaagcacattgccaaacaggcgccatccagaca

SEQ ID NO: 2977 - DNA, 1207 bp, unidentified
  source 1..1207: mol_type = unassigned DNA; note = element_44690e0
  misc_feature 1..2: note = core
  misc_feature 3..193: note = LE
  misc_feature 194..1177: note = CDS
  misc_feature 1178..1207: note = RE
  misc_feature 12..199: note = bridgeRNA
cttgtatctctctcgatatactatttagctgatagtgtatcaggaagtatgatgaacttgtgcccaccctgaggcttcgagcctgtaacgtagatcaagtctcatatttcaatttctcgaataaactgaatggtatccaagccctttcatcgttgaaatgaggctgcaactacaaggtaagtggagagaatatatgaacgtcattggtattgatgtcagcaaagccaaactggattgtgcctggataaaagacagggacgccggcaaggtgaagaacaaaaactttttaaatacgcctgaagggtatcggtcattgatggactgggcaatgaaacaatgcaagggcccgattaaatctatccactttgtgatggaagcgacaggcatctatcatgaagcggtggcccatgcactttatcaagccggcgccagggtctcggtcgtgaatcccgcccagactcgggattatgccaagagtctcggcatacgaaccaaaacggataagaaggatagtgtggtgattacccgctttgggctcacgcaaacccctcgtctctggcaacctgaaccagaggagatccgtaccttaaaagccctgatatcaaggcttgaagccattgagaaggatattcaacgcgaaaagaaccgattggagaaagcgcaaatatcactgacgtcccatgacgtgatcgtctccatccaaacggtattggcgcaattggaaaaagagagaaaacggcttgagacattaattaatcgacatattgattcccaccctcaacttaaacaggaccgccaattgctggaaagtattcccggtgtcggaccggtgatctctcgcttgatgatcagcgtgatacgaagtcgggattttacatcggcaccgcagtgtgccgcttttatcgggctgataccggttcaccatgagtctggcaccagcgtgaagggacgaccgcgtttatccaaagcggggaaagccagcatcagagccaagctttacatggcggccgtcgtgtcgattcaacataatccggatattaaacgacaatacgagcgattacttaaaaacggaaaagcaaaaatgagcgccctgtgtgcggcaatgcgaaaactcgtacacatttgttttggtgtgatcaaacaccagcaaccgtatcaaccgcaagcggtgttatagcctcttgtgactggtggagggagatggtat

SEQ ID NO: 2978 - DNA, 1574 bp, unidentified
  source 1..1574: mol_type = unassigned DNA; note = element_4487e5d
  misc_feature 1: note = core
  misc_feature 2..133: note = LE
  misc_feature 134..1024: note = CDS
  misc_feature 1025..1574: note = RE
  misc_feature 1253..1547: note = bridgeRNA
agacgatatgagaaagccattgaggggaaagcctccccgcggcatgccgggtcgcgggctgggcgggaacaatggtgttgtatctgtcacctcgcggtacccgccgtaccgcacgcatgggaggaggctccccatgacccatgttacctccatcgggctcgacgtacacgcgcgctccgtgtcggcatgcgccttcgacccgttcaccggcgaggtggtgcagaggtccttcgggaccgacgccggcgagatcgccgcctggatcaaggggttcgaggagcccaaggcggtctacgagagcgggccgaccggcttcgccctctgccgccagctcagggcgctgggcgtcgactgcgccgtcggcgcggtgtcgaggatgcagaagcccgccgcggagaagaggcgcaagaacgacaggcgcgacgcggcgttcctggcccgcctgctcgccacgcgcaacgtcgtcgaggtgtgggtgccgcccgccgaggccgaggccgcccgagatgtccgagcgctcggcgcgcagggcgtcaagcgcgcacggcagcggctctccaagttcctgctgcggcgcggccacgtcttcgacgagaccgacgcgctcggccgcaggcggggagcctggacgcgcgcgttctggcgctgggccgaggggctcaggcccgacgagcccgccgcggcgtccgccttcgaccactacgccacctgcgtgcgctgcgccgagtccgacaagcgcgccctcgagaagctggtgctcgccgaggcccgctccgagcggtgggccggcgtcgtcggcgcgctgtcgtgcatcaagggcgtcgacgccgtcacggcgttctgcctcgcgaccgaggccgggtgcttctcccggttcgccacggcgggcgcctacgcgtcctggctcggcctcacgccgtccgagcactcgagcggcgagaaggaggcgaccggcggcatcaccaagaccggcaactcggcctccaggcgggcgctcgtcgaggcggcatggcactacgcctagcgctcgaccttgcccacgccgccgctggacacgacgttcgcccgcgcatcaggggcagggcggccgacgccacgaggaggctgcgcgcccgccacgaggcgctgcgcgcggccggcaagcggccgtgcgtcgccaacgtcgcggtcgcccgtgagctcgcctgctgggtctgggagatcggcaggagcgccgaggggacgctcgggtagcgcccgggaccacacgccttcccgccgggagggcccgcgcttcgacgcatcgccggggccggctcacgacttttccgatgggcagccggacggccgcgcccgagaagaaagactccaagggtttttcgaccgacggccccggacggagaatcgaaatgcggtggcgcgcggcgacataccgaacccgcatgccgcgccaggagcccgcggatattagcttgccaggcgagcgacgactaacgagcatccgcgcgggccctcccggctggaataagcgcaggtccggaatggaatttccggacctgccgcatcatgcctcttgacaatggctttctcatatt

SEQ ID NO: 2979 - DNA, 1390 bp, unidentified
  source 1..1390: mol_type = unassigned DNA; note = element_449829c
  misc_feature 1..2: note = core
  misc_feature 3..269: note = LE
  misc_feature 270..1319: note = CDS
  misc_feature 1320..1390: note = RE
  misc_feature 28..237: note = bridgeRNA
ctcctatgtttaccccgttatccgattcgacggaattatgataaatttgagtaagtatagtgaaaaagaatgagagtaaatgcgcggctaaatagttcaagaaacatattgaccctaagaaacagcctcattcttttttatcttttagagcttgaacagaatgtaaggaaacaggcaagtcccgttatccagaataaccaatcaggagaaaaagcgaaggaagattcatcactttatgaacactataatttcacttaatgcaaaaattcatgaaagtaattaaacaagtagtaggaattgatgtagccctaaaagaattagtagtaacgttaggaagaatgcaggaagattcatcgattgatctatatgcttaccaagtatttaccaacaatcatgcaggctttaaatctttgctatcttgggtaaaaaaactgactatagcccaagttcctatccaatttgtgatggaagcaacgggagtttatcatcagaaatttgcgtaccatttggatgaaaatcaatgggaagtaagcatcgtattaccgaataagatcagcaattacatgcgaacattgacgcctaaaacgattacagataaaacgtgctcacaggctattgcgcagtttggattagaacgaaagctagctcaatggcatcgccccaaaagtacgtatagaaatttgcaacagcttagtagagagcgagaccaagtagtacatgaacgaaccatggtgaaaaatcaacagcatgccgaactggccgaagctgaaccaaacgaaagaagcttggagcgtttagcaaaaagaattatatttttgagtgctcaagaaaaagaaataaagcaggacattatcaacatattaacgaatgatgcggtcttaaaacaagaggttgaaaatatttgcacgatacctggagtgggtataataactgctgtgatagtgttggcagaaaccaatggatttgagctcatcagaaataaaaaacaactcacgagttatgctggcttagatgtccaagagaaacagtctggaacctctgttcatggcaaaccaagaatctctaaaaagggaaacgtaagtttacgaaagtctatgcatttgcctgcattaacagcggtaagatgcgatgaaaacttcaaaaaaagatataccagattagtagctaaacatggtataaaaatgaaagcattagtagcagtacaacgaaaaatattagaactaatttacacattacataaaaataaaactccgtatgacaaagattttaccactgagatacttgcgcaaaaaaatagtgtgcaagctcaaatggcttagcacactatacagtctagctccttgaccgacttaaacaaatttacgtttttatttggaaattaacacagaat

SEQ ID NO: 2980 - DNA, 1420 bp, unidentified
  source 1..1420: mol_type = unassigned DNA; note = element_449a8c8
  misc_feature 1..3: note = core
  misc_feature 4..81: note = LE
  misc_feature 82..1155: note = CDS
  misc_feature 1156..1420: note = RE
  misc_feature 1168..1407: note = bridgeRNA
tgatggggtggacggcgccccgaacggcatcagcgtgccaagatggtcgttgtcgaaaccccatctgaagggaagccgtccatgggcaagtttatcgggaattctggcgttgtcacgcgggtcgggctcgatctggggaagaacgcttttcaggttcacgccgtcggcgcgaagggcgaggtcgtggttgcgcgcaagctggcgcgaggtcggctcgtcgccttcttcgctcggttgccgccatgcctggtggcgatggaggcgtgcggctcggcgcaccattggggtcgccagctcgccgcgctcggccacgaggtgaggctgattccgccggcgcatgtgaagccctatgtgcggcggaataagagcgacgcggccgatgcggcggcgatctgcgaggcggcggggcggccggggcaacggttcgtgccgttgcgctcgatcgacaaccaagcggcgctgatgcgccaccgcgcgcgcgaactgctggcgggccaacgcacggcgctcctcaacgccttgcgtggacatatggccgaaatcggcctgatcgcgccgcagggggcgcagcacgcctatgagctgaagcgcctggccgccgacggcttcgacgagaacggcgagatcgtggtccccgactgcgtgcgggcggcgctgagccggctcgtcgctcacatcgacgcgctcgacgaggcgatcttggcgatcgaccaggagcttgcggcttcggtcaaggccgacgcgacggccaagcgtttgacgaccattcccggcgtcggcccggtcgccgcctcggcgatcgtcgccacgatccaggacatgagcgccttcgcgtcggggcgcgacttcgccgccttcctcggcctgacgccgcgccagagctcgaccggcggcaaaccgcggctcggccgcatcaccaagatgggcgaccgctatttaagaaagctcctcgtcgtgggggcctgcgcggtcctcggccggcgcaagggccacaaagacgccctgcgcgtgtgggcgagcgcgctgctcgaccgcaagacggtcaaatacaagttcaagctgaccgccgtggcgctcgccaacaagctcgcgcgcgtcgtctatgtcctgatgaccagaggcggcgaatacgacggccggccggtggcggcctgaggccccgacgaagcgatcggcctcggcggaatacgacgaaatcgagggcgccaacgaggtgatgcgaaccaacggctaggtccggaagcccgagtcgacctcagcgcggaaacagcgcgcttccatgatggggcaagggaccgcagcggacataacatcagggccagcggggctcgcccccgcatcaacaggccgaagacatgaccgcgtccgagacgttcacaagcctcaaaagcacccttgaccaaggggcgccgtccagaca

SEQ ID NO: 2981 - DNA, 1187 bp, unidentified
  source 1..1187: mol_type = unassigned DNA; note = element_449acf1
  misc_feature 1..2: note = core
  misc_feature 3..218: note = LE
  misc_feature 219..1172: note = CDS
  misc_feature 1173..1187: note = RE
  misc_feature 3..194: note = bridgeRNA
cttgtatgttctggttgtcggggtggagggaccctgcggtgcatcggcaacgatcgttgaccgaccacgcgagttttctcccgctccaccttccaacgtcgatcaggaactgcgcggcgctgcgcccttgggcgctgcgaccaccgatctgaaggcaagccaacgtagttggtgggctgtaccccgacacggctcattgtccaatcggaggtgtcatcatgcaagagtccaatttgtacatcggcgtggacgtatccaaagccgaactcgtcatcgccatgggtccacagcgacgaccgtgcagcgtcgccaacgatgcgccgagcatcagtcgctggctgcgggaagtccccgcgcatgcactcatcgccatggaatccaccggccggtatcacggcttgctggcacacctggctagccaagcgggctttcaagtgttcgtgctcaatgcgcgagacgtcttcttctacgcacgtgccttgggcacacgggccaagaccgacggcgtagacgccggcgtgattgcccgctacttggctgagcaccacgatcagctgcatccctggcaaccggcaaaccccttgcagcagcgcctccaagacctgctcacacgcagggcgcaagtggccacacaccgatcggccttgcgccaagtcttcgccgatgtcgaccaacaggggattgagacggacaagctgcaaaaggccttcgacgccttgctccattccatagacgaccaggtgcgcgccttgatcgccagcgatgcgcagatggccgagcgatgcgagcggctgcgcaccatcaccggtatcggaccgcagaccacagcggtgctggcagcgctgctcagccgcttcgagtttgccaattctgatgccctggtagcttacagcggtctggacccgcgtcccaacgattccggcaccaagcgcggcaggcgccgtctgagcaagaaggggccagcgctcttgcgcaggcagatgtacctgacgggtatgtccgccagtcacagcaaagccctcaagccgctgtaccagtcgatccgggccaagggctttgcgacaaccgaggcgtttgtgatcttaggccgcaagttgttgcgagtggcatttgctgtctggaaggggagcgagatctttgatccgacacggttgatgccaaaaaccgcttgacgaaaaacatagaac

SEQ ID NO: 2982 - DNA, 1201 bp, unidentified
  source 1..1201: mol_type = unassigned DNA; note = element_449b15a
  misc_feature 1..2: note = core
  misc_feature 3..223: note = LE
  misc_feature 224..1186: note = CDS
  misc_feature 1187..1201: note = RE
  misc_feature 6..199: note = bridgeRNA
cttatatcttgatctctttcctcataggatcgatgatccccgactgatcatcgggatgtcatgggtgagattgcgagtgcccgtgggtttaagcctgtcacctagattaatcccccatggcatatctcatcgccttaaaggccgtacggtatcttgtgcttcgagcacgtattttataaggaaggtcctggcgatttattttattctctagagggctcctgcaatgacagcattcactcccgttggtattgatattgcgagcaaaaaatttgatgccgctatctggattgaagggaaaaaatataaaaataaggtgtttgccaatacaccgactggatttcacgctttcttactgtggctcgcgccttatgggccatgtcatatctgtatggaagcaaccggggcttatagcttgccattggccacttatctctacgatgccggttatccagtcagtgtggaaaatgcggcacgcatacatgcctttggtcagagcgaacttatccgcaataagacagataaaggcgatgcaaaaatgattgcacgctattgccatcttcataagccacctgaatggaagcccgtcccagtcaacgaacgaaaactacaagtattgattaacagactgaatgcactgaaagaaatgaaacgaatggaagaaaatagagcgctgacgtctgaaactatagtgcaaggctcaattcaaaaagtgattgcggcacttgatgaagaaattaaagaaatagaacaggccatcaaaaaacatattgataacgatccagacctgaaaaagaatcaagccttactggaatcgataccgggagtcggtgaaatactcagtacaacccttttgggatatgtgggtgatatgtcgcgatttagcagtaataaagccctggttgcctatgctggtctcaatccgatgctaaaagaatcagggtgttggaaagggagtaccaagctgtcgaagaaaggcaatgccctgttacgaaaagcactgtatatgccagcaatcacggccttgaaatataatccggtcgttgctgcattatgtaagagactgaaagagaaaggaaagcggggtaagtgcctagtgtgtgcagcaatgaaaaagttgttgcagttagcttatggcgtattgaagtcgggtaaaccatttgcggccgaaataccgcttgccagatagctggcaagacggtat

SEQ ID NO: 2983 - DNA, 1583 bp, unidentified
  source 1..1583: mol_type = unassigned DNA; note = element_449e35c
  misc_feature 1: note = core
  misc_feature 2..261: note = LE
  misc_feature 262..1461: note = CDS
  misc_feature 1462..1583: note = RE
  misc_feature 42..232: note = bridgeRNA
cgttacctttcttatagcccctgaacgagcaagaatcggggttgctggcctgtcggtcccggcatggttcttacccccagtcgaccgtatgatccggggggtgttgtcaccggggtgcgataggcgccaggggatcgctgatggggacaagaccagtcgcagactcgaccgtggcaggccggaccgtaacgtggatgccgagctctggggccgcaggacagaccggcgttctcttattgggtttcatgactggaggtagcggtgatcaaggaccaccatctcgtcgatgtcttcatcggcgtcgacgtcggcaagaccaaccaccacgcggtggcgctgaaccgggagggcaagaagctcctcgataaggcgctgccccaggacgaggcgaaactgcgctccatcatcggttccctgaccaaacacgggacgctgttgctggttgtggatcagcccgcgaccatcggcgcccttcctgtcgccgtcgcgcaggccgccgggatcatggtcggctacctgcccgggctggcgatgcgccggatcgccgacctgcaccccggcgaggcgaagaccgatgcccgcgactcgttcatcattgccgaggccgcccgcaccatgccgcacaccctgcgctcgatcgcggttgccgacgaacagaccgcggaactgtccatgctctgcggcttcgacgacgacctggcccaacaggccaccgcaacctcgaaccggatccgcgggctcctgacccagatccaccccgccttggagcgggtcatcggcccgcacctggaccacccggcgatggccgagctgctgatcaagtacccgaccccggcggccctgcgtaaggccggccagaccagggtcggcgagtacctgcgcaaatgggcgccgcgggccggcacgggctgggctgcagaaatattcaccgccctgtccgaacagaccgtagtggtcgccggcaccggtgccgccggcatcgtcctgccgcgcctggccgcacagctggcccaactgcgcgctgcccgcgccgaggtcctgacccgggtcgaggccatcgtggaggcccaccctcttcacaccgtcctgacatccatgccggcggtcggcgccaggacagaggcaaggatcatcaccgaggtcatcggtaaggacttcaacaccgccggacacctggcctcctactccggattagccccggtgacgtggagatccgggacgtccatccgcggcgaccacccctccaggaaaggcaacaaaatcctcaaacgcgccttcttcctctccgcgttcgccgcgctgaaggaccccgcctcacgggcgtattacgaccgcaaacgagccgagggtaaacgccacaaccaggccctcatcgccctcgcccggcgccgctgcgacgtcctgttcgccatgctccgcgacatgaccctctacgaagcacccaagcccaaagccgcctgaccctcccgctccctgcagctggcaggcatcctcgccagccaacaccccctggccccaaacccgctgccacacagaccagaaaaatccaccccgaacgcttgacaaagaacatagggacaccc

SEQ ID NO: 2984 - DNA, 1386 bp, unidentified
  source 1..1386: mol_type = unassigned DNA; note = element_44a4a42
  misc_feature 1..2: note = core
  misc_feature 3..85: note = LE
  misc_feature 86..1132: note = CDS
  misc_feature 1133..1386: note = RE
  misc_feature 1150..1372: note = bridgeRNA
gatgaggtggatggctcccgctcacggcatctgagtgccaagctgggttgctgtcaggcaatcccgagcaaaggagccatccgccatggaaattaccacgatcggcctggatctggcgaaacgtgtttttcaggtccatggagttgacgcagcaggcggggtcgtcgtccgcaaggcgttgcggcgcgcacaggtgctgccgttcttcgccaaactgccgccgtgccttgtcggcatggaggcgtgcggcacgtcgcatcattgggcgcgcgagctgatccgcctcgggcatgaggtgcgactgatgccgccggcctacgtgaagccctatgtgaaacgcggcaagaccgacgccgcggacgcggaggcgatttgcgaggcggtgacacggccgacgatgcggtttgtggccgtgaagtcgcgcgaacggcaggcggcgctgtcgatgcatcgcgcccggaacctgctggtcaagcagcgaacccaactggtgaacatgatgcgcgggctgctggcggagttcggcgtcgacatcccccaaggtcttgagcgggcgttgctgatggcgcaacaggtggtcgacggcgccgccccagacgtcccggcggaggcggtaaagattattggcatgctgtcgcaacaggcgctcgacacgcatgcgcagatacgggagatcgatcgctctctcgtcgccttgctgcgaaccgacgacgtggcgcggcgccttgcgaccatccccggcattggccctgttggcgccacagcgctggccgccgccgtcaccgatcccggacagttccgctcagggcggcaatttgcggcctggcttgggctgacgccgcgtcagaactccagcggcggcaaagagcggctcggccgcatcaccaagatgggcgacaaatatcttcgcaagctcctcgtcgtcggcgcaacatcgctggtgcggcgcgccaggagcaaacctgagagcgtgaacccacgcctcgttgacctgctcgcccgaaagcccgtgcgggtggcgacggtcgccatggccaacaagacggcacgtatcgtctgggcgatcatgacgcgcggcgagatctaccgggcgttccatatgccgatgctggcgtcatcgactgaggcttagccgacgagatcagcttcacgaggttgggagagcgatgcgatgtgatggcgaaaccggtcagaccgggaatagggacaacccacatagtgtccaaggcgttacagcctgataagcagaatgggaccccgttcgcggactccatcagggccagcagtctccttaccgactgcattgacaggccgtacagaagactgcacccgaccaatgcgccagatcatcaaatcgcacttgcaacgcgggagccatccacagag

SEQ ID NO: 2985 - DNA, 1314 bp, unidentified
  source 1..1314: mol_type = unassigned DNA; note = element_44a6a9c
  misc_feature 1..2: note = core
  misc_feature 3..267: note = LE
  misc_feature 268..1101: note = CDS
  misc_feature 1102..1314: note = RE
  misc_feature 1087..1308: note = bridgeRNA
ttaattagatggtccgcctcacctctaagctagtcttagagtttggcaaacaaagaggcgaaccatcatgtctacaattaaagttcttggtatcgatttaggcaaatcatcttttcacgtgataggccgtgattattctgataaccaagttatccgtaaaaagttttctcgttcagcattagtccactatcttcaccaattaaagcctgcaccattgctttcgaagcttgtggcggtgcgcattggcttggcaggcaatgtgagttgatgggacataaagtcagattaatccctccgcaatatgtaaagccctttgttaaaagtaataagaatgacttcattgatgcagaggccatatgtgaagcatcaataagacctaatatgcgctttgtcagcgtaaagtcagaagaagctcaagttatttcagcaattcataaggcgagacacggctatatcaaagaccgaacggcctgcatgtcccgcatcggttcattactgctggagtttggtattgctcttcctacaggccatagcgtgatgaagcaactgttcaactggcttgctcagcaaaggcaggtgctgccaatgttactcatgcaagagctaatggagctgcatgagtattacctgtttctcaatggcaacattgagaaacaagataaaaagctaaagcaactggttgaaacgaactcgataggtcaactcctgaaaaccataccgggtattggagatatgacagcaagtctttgtcttgccaacatcagcagtgctactgattttaaaaacggtagaaacatggcagcgtggttaggacttattccagcgcaatactcaacaggtggtaagcccaaattattaggaataagtaagcgaggtaacaaagcacttcgaaccttgtttattcatgccgccagagccgtgatgtcgaggccggataagacaggtaaggtttatggggagtggctgataaacttgcgagcgactaagccatttaatgttgtcaccgttgcattggctaacaagcttgcccgaatagcctgggcagtcatgaagacgaaacaagcatttaacagtaaggcgttagcaccgagtttgcaatgagaatagagatgacgaaaacggtagaaccactggattaaaacctgacataaaaaacagcttataaaagctttcggcttttttgaggataatccagcgcggaactcatcgtggagcaggtggcgagagcgcctaattagactccgaatacattagcgcataaccaaccccgttatcgaaaattattatcattgcaataacgaggcggaccataca

SEQ ID NO: 2986 - DNA, 1644 bp, unidentified
  source 1..1644: mol_type = unassigned DNA; note = element_44b0c00
  misc_feature 1..2: note = core
  misc_feature 3..276: note = LE
  misc_feature 277..1476: note = CDS
  misc_feature 1477..1644: note = RE
  misc_feature 13..296: note = bridgeRNA
ctgttataatatatataccggcaaaaccctacaagccacgcagggatagaccgggctcaaagtttaagctataatggaagcagtagttggactgacgtgtgcctccttgggcgaaacgcccgttttttagaccgtcatccacgcttccattacagcgttcggttcagcaggttgagctgccacaacaaggtatgttcgaatcacccaacagattgaataggcaatgggcaaaagcgtgacaccaattacgcaaatccaaaatgaggagagatgttaatgaatgcggttggaatcgatgtttccaaaggcaaaagtacggttgctgtcatgcagccgctcggtgttgtagcagcttcaccttttgaggtagctcacaacgaaagcgaactcagagaactggcaaaattcctgaaaaggcttccgggcgagactaaggttgtcatggagtacacaggcagctattatgaaccaattgcccggttcctccacaacgagggaatctatgtttccgtagtcaatgcgattctgatacataactacagcggaaactctgttcgcagagccaagacggataagaaggattccgtgaggatcgctcagtatgcgcttgaccgctggctggacctgcgtgaatatataccggctgaggaaacacgcagtacgctgacgctgctcaatcggcagtattcagccatttgtaagcataagacccagctcatcaataacctgatttcactgattgatcagtcctttccaaatgcaaatgagtttttcgattcgccggttcgacagtctgatgggcatatgaaatgggtagattttatcataaaatttcctcattgtgactgcgtttctggtatttcacgtgcggcttttaaggataaatacagccgctggtgcaagaagcagaattacaactacgctgatggtaaagccgatgagatatacgatcacgcccgttcctgcgttgcaacgcttcctgacagtgaatgtgtcagagccatgatacagcagtcagcaaagctgcttaacagcactctggaaaccgccgaatcacttcgcaagttaatgaccgccactgccgagcagcttcctgagtacgataccgtgctcggaatgtatggcgtggggagagttcttgctccgcagctcatggctgagattggtgataccaggcggtttcacagccgtaaagcgataaccgcttttgctggtcttgacgctcctccgtaccagtcgggcacggttgacgtaaagtcaaggagtatttccaaacgtggctctccgcatctgcgcaggactttattcttggtggtcgaaacatacctcaaacgaaaaccggctgacgaacccgtgtaccagtttctcgaccgaaaacgctccgagggcaagctctacaaagtctacatgactgccgccgcgaacaagttcctgcgcatttattacgccaaagtaaatcaggtacttaacgcctgagtgctttcgcaaattccacaggctgtcaattccttgcacttggcagtcagctttgctattcctgcttgcttccaatggaaagttttccgcagcgcagcggaggaaatctttccattggaattattttttcagaaagccttttttagggcttgacttttcttagcaggt

SEQ ID NO: 2987 - DNA, 1329 bp, unidentified
  source 1..1329: mol_type = unassigned DNA; note = element_44b9bdf
  misc_feature 1..3: note = core
  misc_feature 4..80: note = LE
  misc_feature 81..1094: note = CDS
  misc_feature 1095..1329: note = RE
  misc_feature 1105..1326: note = bridgeRNA
tgatgtaatggtctcctccctatacggcatctatgtgccatgattaaagtggttacaataatcaaagggagaagaccaaaatgaagattacaacaattggtttagacatagcaaaaagatttttccatgtggtgtgctgcaatgaacaagggcgcttagttaaaaagaaaatgttaaagcgtgcgcaagtgttatcttttttccaacaacacactacgtgtttagttgctttagaggcctgtgcaacttctcatttttgggctcgagaaatcagaaaatgtggtcatgagataaagcttattccacctcagcatgtaaaagccttcttagttggcaataaaaatgattataacgatgctttagcaattagcgttgcttcaaaacaacatcatattaaaagtgtctgtataaaatcagttgagcaacaagataaccaagcacagcacaaagcgagagaattagcggtcagacaaagaacggcactatgcaatcaaatccgaggcttaactgctgaatacggaattattttaaatcagggtgtaaacacaatacgcaaaagtatccccctaattttagaagatgaaaataccggattatcaggcgcatttaaagcggtactaaagcagttagaaacacaattgaataacttagacagctgcattgaaacttacagtacattaatagttgaaacagcaaaacataatgatatttgccaacggctccaaacaatacctggatttggtcctatggtatcaagcgcctatttcaatgaagttggaaatggcagtaactataaaagaggccgcgatgtttcagcgtctttaggtatcgttccgcgtcaacacagtagtggcggaaaagatactttacttgggataagtaagcgaggaaatagctacttaaggtgcctgttgatccaaggagcaaaagcggttgtctccagagcaaaaacgaagaatgataaattaagtcaatggataaaccgactagttcaaactcgagggcataatcgagcatgtgtagcttatgccaacaagatggcgagaatggcttgggctattagcgcttcaggtgagagttactcacccgtataaatactcttcaaagaattgcgtaagtgactaaaacgatgacataacaggtcaaacctgcatattgaaaacctatagagttcagtggtagtaaataccgataacctgatcaggacaatatgcgcggattacatcaaggtcagaagtaataatcttcactaaaagaccgtatatatgacagcaaacctgtccctgctatcgttgaatgacaccttgcaatactggaggagaccatata

SEQ ID NO: 2988 - DNA, 1435 bp, unidentified
  source 1..1435: mol_type = unassigned DNA; note = element_44bef2f
  misc_feature 1..2: note = core
  misc_feature 3..481: note = LE
  misc_feature 482..1420: note = CDS
  misc_feature 1421..1435: note = RE
  misc_feature 10..224: note = bridgeRNA
tccctaccttgttgatcgggctgagcgagccattcgtagggttggctcacccaggggtgccgggtgtggctttcagtcgtctgccgtagttgtggcttccaccgattcgccgcccggcgccccacgacgactcggctgctcattaggaattgcggcactgatcgctcagtagggactcgacagcgaggtcgtccgtggtacctgtacgaacacgacctgcggagtagcgagtgacagcgatctgggccggtatcgacgccgggaagacccatcatcactgcgtggtgatcgacgacaccggcaaacggctgctgtcccgacgcgtcgccaacgacgagagcgagctgctcaagctcctcggagacgtcctcgcccggacgacgaagctgtctggggcatcgacctggccgacggcggggcagccctggtcatcgcgatcctgctcaaccacggccagcaactgctctacatccccggacgagtggtaaaccgggcctccgaaggctaccggggcgacggcaagaccgacgcgaaggacgcggcggtcatcgccgaccaggcgcgcatccggcacgacctcacgcccttgcgggccggtgacgagctggtgtccgagctgaaggtcctcacccggcaccgccgggacctcagcgacgaccgcacccggaccatcaaccggctccgtggccacctcaccgagatcttccccggcctggaacgcgaactcgacctgggcaacataggccccctggtgctgctgagcggctaccagactccggccgccatacgccgcaccggccgacggcgtctggccacctggctgcgcaaccgcaaggtccgcagccccgacgaactcgccggcaaggccgtccaggccgccgaagggcagcacaccgctgtccccggcgaggacatcaccgcccacgtcgtgcactccctggccggggaggtgatggccctcaacgagaagatcgcggagaccgacaagctcatcgagggccggtttcgccgccaccgcaacgcggaggtgatcgcgagcatgcccggcattggtgtcctgctgggcgcggagttcctcgccgccaccggcggagacatgggcgcgttcgcgggcccggaccggctggcctccttcgccggcgtctccccagtacctcgtgactccgggaaggtgagcggcaacctgcaccgtcccacccgctacagtcgccgcctccaacgcgtcttctacacctcggcgttgatcagcatccgctgctgcgacgaatcccgccgcttctacgaccgcaagcgcgccgaaggcaaacgtcacagccaggccgtcatggcgctcgcccgccgccgggtcaacgttctgtgggccctcttgcgtgacggacggtgctacgaccccacaccgcccgtcaccctggccgcttgacatctccattaggaa

SEQ ID NO: 2989 - DNA, 1360 bp, unidentified
  source 1..1360: mol_type = unassigned DNA; note = element_44c8f89
  misc_feature 1..2: note = core
  misc_feature 3..74: note = LE
  misc_feature 75..1103: note = CDS
  misc_feature 1104..1360: note = RE
  misc_feature 1079..1348: note = bridgeRNA
tgatggtgtaaccgccccccgacggcatcgatgtgccaaggtgggatcgcaacaatccattctgggaggcggtcatgtcggagattaccactgtcggactcgatctggcgaagaatgtattccagctccacggagcagatgctcgcggcggcgcattgcttcgaaagaagctgcggcgcgcgcaggtgttggctttcttcgcgacgctgccgccttgtgtggtggcgatggaggcttgtggaggcgcgcacttctgggggcgggaattggtcaagcttggccatgacgtcaggctcattccgcccgcctatgtgaagccgttcgtcaagcgtcagaaaaatgatgcgaacgatgccgaggcgatctgcgaagcggcgcaacgaccgagcatgcgcttcgtcccgatcaagagcgaggaaacacagggcgctgccagcgtcttccgtgttcgggaactgttgatccggcagcggacccaggcaatcaacgccctgcgcggacatctgggcgaatatggccatgtcgtgcctcaaggcgtgaggaacgtgggccggttgatcgcactgatcgaaagcgaggcttcggacctgcccgccactgcgcgggcctcactggatgtgctggcagggatgctcgccgagcttgaccggcagatcggagttctggacgccgagatcgatcgccgcgcgcgagagagcgaagtggtgcgccgtctcatgaccattccgggcatcgggccgctgattgccacttcgcttgccacactggcgccgcctccggagatcttccgcagggggcgcgactttgccgcctggctcggcctcaccccgcggcagcattcgacgggcgggaagcagaggttgggggctacaaccaggatgggcgagcgttctctgcggaggcttctgatcatcggagcgaacagcgtcatcatcaagcgacactgccatgccgcggcgcagccgggcacgtggctcggtaacatgctgacgcgcaagccaccgatgttggtcagggtggcattggccaataagatggcacggatcgtctgggcgatcctgaagacgaaggaggtctaccgggctccggccatggcggcataaaccccgtcagcggtcgcgagacgtcggagcggaagagggctgagagcagtttggcgcaacggtcgtgagacggggtcaggagaaccagttgtgcaacacgtgcctttgagcacgcggcgttgatttggacctgatccgcgaacaccatacgggcccgcggcatggagacggtcgcatcatgaggccggatacatgtcagcacccgacaccgcgcaaaacagctctgaaaaccctcttgcgcaaggggcggttataca

SEQ ID NO: 2990 - DNA, 1387 bp, unidentified
  source 1..1387: mol_type = unassigned DNA; note = element_44d02c3
  misc_feature 1..2: note = core
  misc_feature 3..261: note = LE
  misc_feature 262..1302: note = CDS
  misc_feature 1303..1387: note = RE
  misc_feature 34..238: note = bridgeRNA
ctcctatgtttgcgaagttattgatttgagttttaaaagtcaatagatttgaattatgaagtgaaaaagaatgtgagtaaattatttataaaataactccaagaagtatattcgatataagaaattacctcattcttttttatcttttagagtctgaacagaatgtaaggaattaagcaagacttaatatccagaatatccagtaggagaaaagacgaagggagattcatcactttacaagtaatttaaaactaaaaagtaatgacaaaaaaagtagttaagcaagtagtaggaattgatgttgctcaaaaagagttggttgtaactatagggcgcaagctggatgatttttcgatagaattgtttggctataaggtttttaagaacagtgattcaggtattttgtcattagttgaatgggtaaaaaaaataagtgacattggagttactgttcgttatgtaatggaagctacaggcgtatatcatcaaaagtttgcttattatttaagtgaaaataattatgaagtaagtattgtattgcctaataaaatcagcaattatatgcgcacgttggaaatgaaaaccattaccgataaaagctgttcacaagcaattgctcaatttggattagagagaaatttagatccttggagcaaaccaaataatgtgtataaagaattacagcaattaactagagaaagagatcaaattgttcaagaaagaagcatcgtcaaaaatcaaatacacgctgagaatagtgaagcccaacccaatttaaaaagtttagaccgtatgacatcgaggataaaatttttaaattcacaggaaaaagaaatcaaagatgatattgtagttattataaaagaaaaccctgatttacaacaaatcataaacagagttaccacgatacctggagttggagcattgacagcagtaatcgttttggcagaaactaatggttttgaattgattagaaataaatcacagttagcaagttatgctggtcttgatgttaaggagaaacagtctggaacttcagtcaagggaaaaccaagaatatcgaaaaaaggaaatcgaaatttaagaaaatcaatgcacttaccggcgttgacggcagtaaaatgggatgaaaattttagactaagatacgcaagactaatatccaaacaaggaataaaaatgaaagcattagtagctattcaaagaaaaatattagaattgatatataccttattcaaaaatgaaactatctatgacaaagggtatctcgaaaaaaatagcgtgcaaacacaaatggtttaaacacgctatagagactagttctatgactgtcttgagcaacaaaattaataaaaaataagattttagttggaaatcaacacagaat

SEQ ID NO: 2991 - DNA, 1499 bp, unidentified
  source 1..1499: mol_type = unassigned DNA; note = element_44d6a45
  misc_feature 1..2: note = core
  misc_feature 3..243: note = LE
  misc_feature 244..1479: note = CDS
  misc_feature 1480..1499: note = RE
  misc_feature 15..240: note = bridgeRNA
ctaatgagtcttagggagccggccgtctggcagactccgggtgtggtggccgccggcaggtgagcactctgggttcctgggcttcgagccctggagaaagaccgtgcccctgccggtgaccgggaggattgatcgctgctggggtgtcgtgccctccgggtggagtgagcacagtttcattaggtcgccggtagttctcccgctggctgctgacatgtttcgacattgctgacgggagaacttgtgcggctgttcgtaggggatgactgggctgaggaccatcacgacatcgaggtgatggaccaggccgggaaggtgctggcaaggcggcggctgcccgagggcgtggcggggatggcccagctgcacgggctgatcggcgcgtgcctgggcgaggacgacgaggatgcggaggtgatcgtcgggatcgagacggaccgcggcccgtgggtcgcggcgctgatcgcggccggctacctggtgttcccggtgaacccgctgctcgcgtcccgctaccgggagcggcacggggtctccggggccaagagcgacgccggggacgcgcacatgctggcggacatggtgcggaccgattcccaccagctgcgcccggcggccggcgactcgccggaggcggagggcgtcaaggtgctggcgcgcacgcacaagacgctgatctgggagcggacccgggcggtgcagcggctgcggcaccagctgcgggagtacttcccggcggcgctggaggcgttcgaggacctggatgcccccgacacgctggagctgctggggaaggcacccgagccggcgcgcgcggcgaggctgacccgcgcgcaggtcagcgcggcgctcaagcgcgcccgccgccggagcatcccggacaaggccaccgcgatcctcgcggcgctgcgcggtgagcacctgggccagcccgaggccctgacagccgcttacgctgccactgtccgggcgctgctcgcggtgatcgccaccttgaacgagcaggtaaagatcctgcaggggcaggtggaggagcattttggccagcacccggacgctgaggtcatcctgtcccagcccggactgggaccggtcctcggtgcccgggtgctcgcagagttcggcgacgaccctcgccgctaccgtgacggcaaggcccgccggaactatgccggcaccagcccggtcacccgcgcgtcggggaagaagaaggtcgtcgccgcccggttcatccacaacgaccggctcgtcgacgcgctgaacgcccaggccttcgcatccctgaactcctcgcccggcgcccgcgcctactacgacgagctccgcgcccgcgggatcgagcacaacgacgccctgcggcggctggccaaccgtcttgtcggcatcctgcacgggtgcctcaagacacgcaccctctacgacgaggcaacggcctggggacacaggcaaacctcctctcaatcttccgttgcagcttgacatctaagctcctggggtgt

SEQ ID NO: 2992 - DNA, 1447 bp, unidentified
  source 1..1447: mol_type = unassigned DNA; note = element_44d7cb6
  misc_feature 1..2: note = core
  misc_feature 3..222: note = LE
  misc_feature 223..1440: note = CDS
  misc_feature 1441..1447: note = RE
ctcctaccatgaattggtatagaatgatgtataatgggtttgtgcggatataggtaatgttcatgggaaggcaggaggactttgtgcttcctgggcgttagagccctcacttcagtatgtcccaagcctctgtgaaccataatcggttggttggatcattgaatccttgtcacgctggaggattggtctggaggcgacggcacctgcttctcccctcttttgatgggaggtgattcgatgtcaggattaaaaggcagttttgatggttttgtcggaatcgatgtttccaaggacaagttcgatgcctgtgggataacaggcgatgagaccaagctttttcagttttcaacgaccatggatcgaaaaggttttgaaaaactgaaaggacatcttgccgcggtgtccatctcgtctgttttaatcgggatggaatctacggcatcctatcatgtcaatctcttctcttaccttgtttctgagggttacagggtcattctcatcaaccctctgttgatttccaattacgtgaagatgcagctcaggaagaccaagacggacaaaaaggatgcggttgtcattgcccagtttcttcttaccaatggggataccctgattcagcgggcgaccccgtccttgatttcggatcttcgggatctttcccgtcagcgggagagcctggttgacgagatgacatctctgaagattgagatcaagcagctcctgaatatcacctttccggaacttgagcacatggcggggatatttacgaagtctatcctgaagcttttacagcaatacccttctgcatttgcgcttagagatgcagatcttggtcaattgtctcagatgttgattgcagattcctatgggcataaaagagaggcgtttgcagcagcattaatcaaggcagcccggtcgtcgataggcagcaagagcttcgccaaggagatgattctgaaacagaagatagcactgctccttcacatcgaagatgcccttcaggagataaccggcatgttcattgaaatgagccggaaactgatggacgaagaaatagaccttatgacttccctaaagggtatcggagagaaggccgccgccaattttcttattgagatgggtggcgacatcaatcagtttgaacgttccggcaaaatcattgcgatggcaggattggatccggctgtttaccagtccggtaaacatgaaggcaagggccggatcacgaagcgaggtaatcgtcatctgcggaagatcatatggttgatgacaaccaaagtgatccaatataccgatactttcagcgtttattatctcaagcgcagaaaggagggattgccttacaagatggctgtgctagccactgcacacaaattgatccgtgtcatctatgccatgctgacacatcggacaactttttgtgcgcaggtgaattcatgatagttga

SEQ ID NO: 2993 - DNA, 1334 bp, unidentified
  source 1..1334: mol_type = unassigned DNA; note = element_44de54c
  misc_feature 1..2: note = core
  misc_feature 3..232: note = LE
  misc_feature 233..1078: note = CDS
  misc_feature 1079..1334: note = RE
  misc_feature 1100..1332: note = bridgeRNA
ttaatgagatggtcactccctccttcccagtactatgctgaggacaggctttcattcggagaaccatcatggaaaacattgcgcttattggtatcgatctgggtaagaactctttccatattcattgtcaggatcatcgtgggaaggccgtttaccgtaaaaaattcacccgaccaaagctaatcgaatttctggcgacatgcccggcaacaaccatcgcgatggaagccctgtgggcggttctcactttatggcacgcaagctggaagagttagggcattttccaaagctgatatcaccgcaatttgtccgcccattcgttaaaagcaacaaaaatgacttcgttgatgctgaagctatctgtgaagcagcatcacgtcccatctatggcgtttcgtgcagcccagaaccgaatctccagcaggcaatgcgagctctgcatcgtgtccgtgaatccctggttcaggataaggtgaaaacaactaatcagatgcatgcttttctgctggaatttggtatcagcgttccgcgaggtgctgccgttattagtcgactgagtacccttcttgaggacagtagtttgcctctttatctcagccagttactgctgaaattacaacagcattatcactatcttgttgagcagattaaagatctggaatctcagttgaaacgaaagttggacgaagatgaggttggacagcgcttgctgagtattccctgcgttggaacgctgactgccagtactatttcaactgagattggcgacgggaagcagtacgccagcagccgtgactttgcggcggcaacagggctggtaccccgacagtacagcacgggaggtcggacgacattgttagggattagcaagcgggcaacaaaaagatccgaactttgttggttcagtgtgccagggtattcatacaaaaactggaacaccagtcctggcaagttggccgactgggtcagggagttgttgtgtcggaaaagcaactttgtcgtcacctgtgctctggcaaacaagctggccagaatagcctgggcactgacggcgcgacagcaaacttacgaagcataaaggcagaaatacaccagtttaaacaatcattcatctggttttgcgaaatactgatattgatgatactaacggcccaccggcctgttgaggaacctgtaaaacggaaaggctcattgaagccgtatattttctggaggttcatcaggcgcggaactcatcgaggcgcgggaataaaatcccattcagacgccggatagattcaagcaagccaacttgtcgtcaaaatcggtgttgcaaaaacgggagtgaccataga

SEQ ID NO: 2994 - DNA, 1461 bp, unidentified
  source 1..1461: mol_type = unassigned DNA; note = element_44df944
  misc_feature 1..3: note = core
  misc_feature 4..237: note = LE
  misc_feature 238..1446: note = CDS
  misc_feature 1447..1461: note = RE
  misc_feature 10..232: note = bridgeRNA
tccttaagttcgtaggtgcagttactgcgtgttgttacgttgtgctgtgacccgggtgggtcgggtgaggctgcatggtgatagccggcttgcggtgcggcttgaaaggactggccgcccggcccgcctggacttctctggccgctgattgagatctgcgatgtgatcgctttttaaggaaacgccggcggggttgtccgtgggaaacatgttggcagacaagcgaaaagagaatcgatgacaacaggccagttgtgggctggtgtggatgtcggtagagagcatcattgggtgtgcgtggttaacgccgctgggacggtggtgttgtcgcgcaagctggtcaatgacgagcaggccatccgcgagctgatcgccgaggtcgacgggttgggcccgcaggtgtcctggacggtggacctgactatgacgtatgccaccctgctgttgacggtgctggccgacgtcggcaagtcggtgcgctacctcgcgggccgagcggtgtggcaggcctcgacggtttatcgcggaggtgaagccaagaccgacgccaaagatgcccgggtgatcgctgatcaatcccggatgcgcggtgaggacctgccagtcctgcatcccgacgacgacctggtcaccgaacttcggatgctgaccgcccaccgcgccgacctggtggctgatcgcacccgcaccatcaaccggctgcgccaacaactgatcgccgtctgcccagcgttggagcgagtcgccgagctcagttccgatcgcgggtgggcggtgctgttgtcgcgctatcaacgaccgaaagccattcggcagagcggaatttcgcgactgacaaaggtcctggccgatgctggagtccgtaacgcatctaccatcgccgccgccgctgtctcggccgctaaggctcagacggtcaaactgcccggcgaggacgtcgccgccacactggtcgccgaactggcccagggggtgatcgccctcgatgaccgcatcaagaccactgacgccgacatcgagggccggtttcgccgccatcccctggccgaggtaatcaccagcatgcccggtatcgggtttcgactcggcgccgaattcctggccgccgtcggcgatcccgcgctgatcggttcggccgatcaactcgccgcctgggccggacttgcgccggtgcctcgagattcgggaacgcggaccggaaacctgcgcacccccaagcgctacaaccgtcgcttgcgccgcgtcatgtacatgtcggctctgacctcgatacgttgtgacgccaactctcgcgcctactaccagcgcaaaagagaccagggcaagcggccgatcccggccaccatctgcctggcgcgacgtcgcaccaacgtcctctacgcgctcatccgcgacaaccgcacctggcaacccgactcacccccgagcaccacgacggcggcttgacttcgtcattgagag

SEQ ID NO: 2995 - DNA, 1422 bp, unidentified
  source 1..1422: mol_type = unassigned DNA; note = element_44edb2d
  misc_feature 1: note = core
  misc_feature 2..134: note = LE
  misc_feature 135..1154: note = CDS
  misc_feature 1155..1422: note = RE
  misc_feature 1180..1420: note = bridgeRNA
atggtatggacgcctccctcccgccgaaggggcggtgagggggccggcagagaggagccctcgctatacccgacggcatcgaagtgccaaagtggaggttctgcaacaaccactgagggtaaggagggctcgaaatgaagagtacgacatttggactggacttggcaaagcgcgtgttccaactgcactgggtgaatagggaaaccggtgaaatctgtcggcgccaactcaagcgcggccaggtgctggagttcttcgctaaccgcgagccatcggtgattgcgatggaggcctgcggcagcgcgcactactgggcgaggaagctcgcggggcttggccacgaggtgcggctgatcgcggcgcaattcgtgcgcccgtttgtgaagggcaacaagaccgatgcagccgatgcgcaggcgatctgggaagctgcgcagcgccccgggatgaaattcgtggcggtaaagagtgagggccagcaaggggtgctggtgctgcaccgcatgcgcgcgcagctggtgaagatccgcacgatgcagatcaaccaattgcgtggcttgctgtacgaattcggtgcggatctgccaccgggtcggcaaaaaggcgttgagcgcattccgagggaactggaccagctggaagcggtactgccggcgatggtggtgcaaaccctgcgcagccagctgaaacgtctcgaggccttggaccaagagatcgcccaaatcgagaagcgtcttgcggcctggaagaaggaggacaaagcggccaagcggctgatggacattcccggggtggggctgctcaccgccaccgcggcggtggcgacgatcggggatgccagggccttcaagtcgggtcgggagtttgccgccttcgtgggcctggtgccccgccagagcggcaccggcggacgggtgaagctgctgggcatgagcaagcggggcgatgtgtatctgcgcaccttgctgattcacggcgcccgctcggtcctcagccacgacaagcaacgcgagccctggctcgagcagttgctctcgcgccggccgttcaacgcggtggcggtggcgctggcgaacaagacggcgcgcacaatctgggcgttgctcgcccacgagcgcacctaccagaaaggctacgcggggagcgccgcgtagacgagcaacgaaccacagggagagcggatcgctgaaaggttgcgcaggttgatgtgcgattgatggcgcgacaggtcggaccgcggggaagcaaacctgggccaccccttggactcggagtccacgtaggagatgaggtcttccccggcgaattccatcagggccagcagacttcggtctgcacaaacaggccggatataagactgcagccagatcctcaagcgccagcatcaaaacatcacttgccaaaccgggaggcgtccatata

SEQ ID NO: 2996 - DNA, 1235 bp, unidentified
  source 1..1235: mol_type = unassigned DNA; note = element_44f1b75
  misc_feature 1..3: note = core
  misc_feature 4..232: note = LE
  misc_feature 233..1213: note = CDS
  misc_feature 1214..1235: note = RE
  misc_feature 7..209: note = bridgeRNA
gctattagattagcatcgataaatttaatgggtataaattagattgatttagaacaaccaagagggtaaaggtgaactagttcgactcttaagtctaggacttatcctgagcattagtcctttaccccctttaggtcaagtgccatttagaatgttaagcgtaagggcttattaatagctttagcaaataaccttgtggttgtcctggattttaatctccaaaaccaaagttatgaaaaagtataccgtaggtatcgatgtgtctaaggataagttagactactgcattttgagtaataaagaccgttctgtgttatccaaaggggtgatagagaatgaaagaaaagagctactttgttggcttagaaagtttgatccagagcaatatgacttcgctttagaacataccgggaactatggagcaatgctagcctggttgcttagtgaagcgaactactgcttctacatgatcaatccaatgaccttaaagaagtcaatgggcatccagagagggaaaacagatgcagttgatgcctatagaatagcttcttacgccattagtaatggccatcagctcgaagcttatcagcttcctactgaagagcttcgtaggattaaagctttgatcactgctagagagcgctatgtaaagatcgtggtgcagttaaagaacagtctaaagagcaatcagatcctaaacaagaccattgatgtaaaggagctgatcaaagaagagaagcgtcagatcaaagcaatcagtggatcaatcaaaaaggtagaaaagcagatcttggagcttattaacgccacagaggatcttaagaagagctatcagaagattactaaagtaattggtgttggtcctattacagcagtaaaatgcattactgagaccaataacttcctgaactttaaagatgctcgcaagttcagctgttactgcggcttagcgcccttcccttatcagtcaggaagtagcgtaaaaggaaaaactaaaacatatcacttaaggaacaaaccactcaaatcaactttattcaaagctgccggtagcgccatacaacacgatccacaactcaaagcgtactatcaaagaaaaaccaaagaaggaaagcataaattaacagcactaaatgcagttgccaataaattagtacttagaatcttcgctgttgtgaaaagagatgagccttttgtaaaattagcagcttaaaaacttgcttttatcttagaat

SEQ ID NO: 2997 - DNA, 1185 bp, unidentified
  source 1..1185: mol_type = unassigned DNA; note = element_44f9b73
  misc_feature 1..2: note = core
  misc_feature 3..207: note = LE
  misc_feature 208..1170: note = CDS
  misc_feature 1171..1185: note = RE
  misc_feature 6..212: note = bridgeRNA
cttgtatgttcaaaccagaccagcgcgatagagtttgaccgccgtcgagacggccagaccgatccgtgcagcctggaaggttcttgggtttcgaagcccgtgactgagtagatggcgtgcggacatcgcactggtctttctcaagcccgaacggttaccggcgccggcctggccgagcgcgcatgcacaaggaagggttcgaaggccatgtctgcaatctcggtggtagcgggtatcgacgtcgccaaggggcacgtcgacgtggatgttgttggtgcccagtttgcgccgcggcagttcgacaatgaggccgaaggtcactcggccatcgcttcgacgctcaaggcgctctgcgttggcttggtcgtcatggaggccaccggcggctacgaggccgcgctggcctgcgcgcttcaaggcgcgggccttgcggtcgcggtggtcaacccttcgcagccgcgcaggtttgccgagtcccagggttaccgggccaagaccgatcgcatcgatgctcacgtgctggccgagttcggccagaccttggttcgacgccctgatctggcgcgcttcctgcggccgatggatgatgccgaccagcaatggttggcagcgttggtcacgcgccgacgtcagctcttggccatgatgacctccgagcgacaacggttgcagatcacacccaagaagctgcatcccagcctcgaggccatcatccaggcaatcaaggctcaactcgacgatgtcgaagcccagatggttacacacgtcaaggagcacttcggcaggctcgatgcgatcctgcagtcggtcagcggcattggcccgatcgccagcgctaccttcatcgccgagttgcccgagctgggcaaactcaatcgccgccagattgcctcgctggtaggcgtggcgcccttcgccaaggagtcgggtaagaccaaaggccgacgacgcgttcaaggcggtcgtttcgaagtccgtcgcgtgctctacatggccacgctcaccgcggccttccgcaacccggtcttcaaagctcactacgaccgcctcaaggctgccggaaaatgctccaaagtcgcgcctgtcgcttgcatgcgcaagctcttgaccacgcttaacgccatggtcaaaacgaactcgatgtgggatccgcagcattgtcaggcttgacttcgaagacggtta

SEQ ID NO: 2998 - DNA, 1598 bp, unidentified
  source 1..1598: mol_type = unassigned DNA; note = element_44facc5
  misc_feature 1..2: note = core
  misc_feature 3..264: note = LE
  misc_feature 265..1473: note = CDS
  misc_feature 1474..1598: note = RE
  misc_feature 12..284: note = bridgeRNA
ctattacaataaatttggacaggaaagccgggcagccagtccggctttctttccatctcgtgcctaagctacaataaggggagcaactggctgaccattaactccttgggctgctatgtccgtcggaaagactgtcagccatcctcttgttgcagcgttcgatttgagcaggttgagccatcgagttcgcgtcacccaatagattgaatcggcaacgagaaaaagatggattccggttgcagatttcgtattggaggtagatacatgaactctgttggcatcgacatttccaaaggcagaagtacggttgctgtcatgcgtccctttggagaggtcgtcatctcaccatttgaagtgcgtcacaccgacagtgaactgagcgagctggcaaggcgtctcaaaagcctggacggtgagactcgtgtggtcatggaggccacagggaattaccatgcgccggtggcttggctgctccacgatgcggggctgtatgtctccgtcgtcaatgcaaagctggtgcatggctacgggaacaacgatttgaggcatgtcaagaccgacaggaaggacgccgtaaagctggcgaactatggccttgaccgctggcttactttgccgaggtatgttccggaggaagacactcggctgctactaaagagctgctaccgccagtaccgacagtattccaaggtacaaactgttctgaaaaacaacttgatctctttgctggataccacttttccgaacgcgaatcgtttattcaatagtcctgtccgtgcagatggaagcgagaagtgggtagacttcgtggcggagttctggcactgcgggtgcgtttgtgaacgctctgaaaaggcgttcctaaacaaatatcagcgatggtgcagaaagaacggttacaacttcagtgaggaaaaggctctttacatttactctgaggccggtggacacatcggcgttatgccgaagtctgaaaccactaagctgcttgttgagcaggctgtatctcagctcagagcaacctccgctgcgctggccacacttaggcaggaaatgcaatccctggcgtcccagcttccggagtatcctgttgtcatggagatgttcggagttggtccggctctcggcccgcagctcatggctgagatcggtgatgtgcgccgtttttactctaagaaagccctcgtggcctacgccggtattgacgccccaccgaatgattcaggggatgtaacaggcagacacaagaacatgagtaaggttggggcatcctcgctgcgccggacgcttttccttgtcatgagcgtctatttgcaaaccgcgccccttgatgaacctgtctaccagtttatggacaggaaacgagccgaggggaagccttaccgcgtctacatgatggcatccgctaacaagtttctgcggatctactacgctactgtgaaaacctacttggatacactggagcagatttaaccttgttacatacccgttggctggctgccatttcaatttcgagatgcgaagcggcctggtttagtgtgctctttttttgctatcttgcgaaattcaaatttccatcttgacaaaacttagcaggt

SEQ ID NO: 2999 - DNA, 1489 bp, unidentified
  source 1..1489: mol_type = unassigned DNA; note = element_4500692
  misc_feature 1: note = core
  misc_feature 2..218: note = LE
  misc_feature 219..1472: note = CDS
  misc_feature 1473..1489: note = RE
  misc_feature 8..221: note = bridgeRNA
cgttacctttctgatcaaccccgatgaggggtagcaggccaccggccacggcatgactttccgcccctgtcgaccatgatctggggggtgttgtcaccgtggctggcggacttcgtgatcgctaatagggacctggtgaagtacatgcctgcccgtaacgtggctgccgacgcgatgtccccggctggtctgcgcgagtagctcagggaggagcgcagttgtccggaacccataacccggtctggactgggcaggaccggcccgagtacgcggtgttctgcggagtagacgtcggcaagagcgaccatcacgcctgcgcgttggacccggccggtaaacggctgtacgacaagccgctgcccaacgacgaggccgccctgatcggcgtcctgagccggctgaccgcgcacggccgggtcctggtcgtggtcgaccagcccgccgcgatcggcgctctgaccatcgccgcggcccggtccctcggcatcgacgtcggctacctgcccggtctggcgatgcgccggatcgccgacctgtacccgggcgagggcaagaccgacgagcgggacgcgttcatcatcgccgacgccgcccgcaccatgccgcacaccctgcgccgcgtgggcaccgacgacgagaccctcgccgaactgaccgtgcttgccggctacgacgacgacctcgccagccagtccacccgactcgcgaaccgcctgcacgacgcgctgctgcacatacacccagccctggaacgcttgctggccaagcaacttgaccgccccggcgttctggccctgctcgcgaccgcgtccaccccggacgccctgcgcgccctcggcgccgagggcatcgccgaggccctgcgcgccgggggctccccgaggcttgcccgcaccctgcccgccaagatcctggtcacgctgaacacccagaccctcgtcgtccccggcaccaccgcgttcggccgcgtgatcgccggggtcgcggtccagctgcgcgacctgcaccacgaacgtcacgccctggcccgcgacctcgagggcctgctggaggcccaccctcttgccgaggtcctgaggtcgatgcccggcgtcggactcaggaccgcgctgaagatcctgaccatcgtcggcgacggctctgcgttccccacctccgggcacctggccgcttacgccgggctgtccccggtcacccgcaagtccggttcctcgatcaagggcgagacccgctcctaccgcggtaaccacgccctcaagagcgccctgttcctgtcggctttcgccagtctgggcgacccggccagcagggcctactacgaccggaaacgtgccgaaggcaagaagcacaacgccgccctcacctgcctcgcccgccggcgcgtcgacgtcctgttcgccatgctccgcgaccgaatcccctaccgacacccagtcacccacgagcccaccccaaccgctgctgtggcttgacaacacccatagggaca

SEQ ID NO: 3000 - DNA, 1580 bp, unidentified
  source 1..1580: mol_type = unassigned DNA; note = element_45349ce
  misc_feature 1..2: note = core
  misc_feature 3..282: note = LE
  misc_feature 283..1461: note = CDS
  misc_feature 1462..1580: note = RE
  misc_feature 10..262: note = bridgeRNA
gtataatgtatttaggttatttattaggaaaacctataaacctattctttacatcttctatctgtcaggagataattgtcttattagattgagagaattatcgttgcctccttgagcttttatgctcgtacttgaaagactgatacctctctctaataagcagttcgcgtatgagttggatgttggttgccagtttggcttctctccgtatttaacacaaggtagtgacgcttattagatgagtggactcccaatctaaaataatttgtttgaggtgtatttatgttttttgttggtattgatattggaaaaaataatcatgtagcttctatgatggatgacagtgggaagataatttttaaggctttttctttttcaaacacttctgatggtgcagacgctctcttatctaagctttcctcttattcttccaacactgccgattttgagattggcatggaagctactggccattattggctttctgtttactcatttctctatggtaaaggtttcctgattcatgttattaaccccatacagaccgatggctggcgcaaaggtgttgagattagaaaacgcaagaacgacatcattgattctatcctcattgctgatttaatccgctacggacagtttgtggaaacccgcctttctgacgaggatattttttccctccgtaacttgacccgtttccgttcctatctggtggagtctatcagtgatttaaagcgcaaggtggtctgtgtccttgatcaggtgtttcctgaatatcaatacatattttcaaacatttttggtaagacctcaaaggagattctatgccagttttcttcaccaattgattttgaatccgtttcagcagatgctttggcacaactgcttacacagctaagtcgccaaaaggttggtgctgagaaagcaaagcaacttaaatctgctgcttctaattcttttggcatcacctttgccaaagacagtttttcctttcaactaagggctttaattgagcagatttcttttattgaacagcaagtaaaggatacagaacgcgaaatcagccgtctgatggagaaactaggctctcccataacaaccataactggtattggaaacgtcactggcgctacgattatcggtgaaatcggtgacatatctaagtttagcagccccagaaaactggtagcatttgcaggtattgatgcttcagttagtaaatccggtgaatacgaatctacacataatgtcatgagcaaacgcggttcaccatatttacgtaaagccatttttcaggctgccttgattgcttcttttaaagaccctgtattaagcgctttctatcagaaaaagcgggcagaaggtaaacatcatcttacctgtgttggtgcagtttctagaaaaatgtgtaatatcatttatgctgtcctaaagaataaccaaccttatgtgcccaaagcttaattccatgtaattatatattgtttcaggtttgtaataatacaagcctttttgtgatgcctgtttttagttggatctcatttatagtttttttacatattttatttgacttttaatagttg

SEQ ID NO: 3001 - DNA, 1361 bp, unidentified
  source 1..1361: mol_type = unassigned DNA; note = element_45367dd
  misc_feature 1..2: note = core
  misc_feature 3..162: note = LE
  misc_feature 163..1113: note = CDS
  misc_feature 1114..1361: note = RE
  misc_feature 1134..1347: note = bridgeRNA
gatggggtggacggcccctgctcactggcgtcgcaatgcgccaaagtggtcgttgaagagtccacttgaagacgggggccgtccatgaccgaggttagcacgattggttttgatctggtgaagcgggttttctaggttcacggggtcgatggggcgggtgccatgacgatccggcggcaattgcgccgcgccgagatcgtgacattcttcgccaagctgccaccctgcgtggtggggatggaagcgtgcgcctcggcccattactgggcgcggacgctaaccaaactggggcatgaggtgcgactgatcgcgcctgcgcgggtcaagccctatgtcaagcgcgggcgaaagaacgacgccgccgacgccgcggcgatagccggggcggtgacgcggccgcacatggaattcgtgccggtcaaaagcgaggaggcgcaggcggtgctgatgctccatcgcacccgccgcctgttggtgacccagcgcaccatgctcagcaacgctgtgcggtcgcatttcgccgaatacggcatcgtcgagccggagggacaaggcgggctgacgcggttggtggtctgcgcgctggatgcaccggacaccgcattgccccaggcggcccgtgaagccatggcgatgctggccgcccatatgcgcgagaccgatgccaagatcgatgcgctggatcacgaaatcctgaactggcaccgcagcaacgccgacagccgaagggtagccaccattcccggcatcggcccgctgatcgccagcgccatcgtcgccgccatcggcgatcccaagcgcttcaagaccggacgggatttcgccgcctggctggggctggtgccgtcgcagaattccaccggcggcaagaccgtactgggaccgatcaccaaggccggggaccgctatctgcggtcgctcctggtggtcggggctaccagcacgctatggcgccgccgccaggagcaaggcacatggctggcggcgatgatggcgcgcggcaagacgccacggcagatctccgtcgccctcgccaacaaaatggcccgcatcgcctgggccatcctggccaagggcggcacctacaccgaaccggcggcgatggccgcctgagcaaagagcgcgagaaacaaacaaattgcgagggcgatgaagcgtgatggcgaccggtcaatccaaggaacggcaaaacccaacaactgtcctagcccgcaaggccgtaaacctgatcgggagccgtcccgcggatcacatcatggccagcggtcacagtgccgcgcaaacaggccggacacatgactgcacccgaccggggcggcaccacgcaaaatctccttgcaacgcaggggccgtccacacag

SEQ ID NO: 3002 - DNA, 2133 bp, unidentified
  source 1..2133: mol_type = unassigned DNA; note = element_453a15a
  misc_feature 1..2: note = core
  misc_feature 3..358: note = LE
  misc_feature 359..1642: note = CDS
  misc_feature 1643..2133: note = RE
ctcactgaaggacctcgccgacgtgtgctgccgggaagcgggctatgttgctgtccgcaatgagcggttacgcatgtttaacgtggtgtggttgcggtgagctgggctggagggccagtgttgtccgggtcggtgaccatgatcaccgatgcaccccaggtgccaccagtcaccgcctattactgcaagacccttcagtgaggtccagaaccagttttgcgggtctggtggttacccgggacgcgccgatcgtcgacagggccttgcgcttcgagcgccgcacagtgagctgacgacggcgtcccggttccgtgaatgagggtgcctccccactgggcttagcagcgaggaggctgtgatgaagtatgccctaatccaggttctgcctgacgatcctcccggcggcgtggtggccggcattgactgggccaccgctgatcacgtggcgtgcgtggtcgatatggccgggcggatcaccgaccggttcagcgtctgtcatgacagggcggggatcgatgcgctgatctcgcggctgcggaagtccggggccgccgagatcgcgatcgagcggggcgacggcgtgctcgtcgaagcgctgctggccgcgggcctgaccgtggtggtgatcacctcccggcaggtgaagaacctgcggtcgcggtaccggtcagccggcgccaaggacgaccggttcgattcgttcgtgctggccgacacgctgcgcaccgaccgggcccggctgcggccgctgatcccggacacgcccgcgacgaccgcgctgcgcgccgcggtgcgggcccgcaaggacctggttgcgcaccgggtggcggcatgcaaccagctgcgtgcccacctggccgtggcattccccgccgcgatcggattgttcttcgacctggacagcccggtcagcctggcgttcctggcccgcttcggcagccaggacgccgctggccagctcgatgagcaggccatagacggctggctgaagaccatcccggcgcggggcaacacggccccggccagcgtgctgtgcgcgcggctgcgggccgcgcccggcggcgtgaccggggaagacggggccgcccatgcccgcatcaccgctgccctgaccgcgacggtgagcatgctcgccgcccaggtcaagaccctggagaccgggatcggcatccagctggccgcccaccccgacgcgcacatcttcgcctccctgcccagggcgggcatgctgcgcgctgcccggctgctggccgagaccggggacagccggtcccggttccccgacccgcagtccctggccgccctcgccggggtcgccgcggtcacccgccagtccggcacccacatctcgcacgccttccggtgggcggtcagccgccagctccgcgacgccgtctgcgacttcgccgacggctcccggcacgccagcgcctgggccgcgtccgtctacgacgcggcccgcgcccgcggcaaagaccacccgcacgccgtgcgcatcctggcccgcgcctggatctacgtcatctggcgctgctggcaggccggcaccgcctacgatcccgccaagcacaacgccctccagcgcatcctgcagcagcaagcggcaaacgcggtggctactgactccggggacacccggtgaccgccgcgatcaccgccgcactgcgcgcctgcgcggccggcctttacccggacgaagccggagtcgaactgctcatcagccacggcggattcctggaccgccgcgacttcgccggcttcgtgcacaccggcaccagcatcagcgacggccagaccccgatggcccagatcgactgggatgccgtcatcaccgccctccacgacgggcacctgccagtctccggcggcgaacggcgcctcctccagctcgccgccagcatcgccgccggcttccccgccagcctgcgcgacaccatccccggcctggacaaccagaacctgcacctggtgatcacagccatccggcacaccgcaggacaacgccccccgcacccgcaccgctgaccagcaccccgtactcacatcacaggccccgccggcgaccccggcggggcttactcaacgccgcgaaccggcaaacactcgccagtcgccaaggtccccacagggcta

SEQ ID NO: 3003 - DNA, 1408 bp, unidentified
  source 1..1408: mol_type = unassigned DNA; note = element_453edbd
  misc_feature 1: note = core
  misc_feature 2..78: note = LE
  misc_feature 79..1158: note = CDS
  misc_feature 1159..1408: note = RE
  misc_feature 1175..1398: note = bridgeRNA
taatgggatggacccgccgtgctcctgccccacccagccgcatagctggttcggggctaccagaatcaggagcattccatgccacacaacagcagtcgtcgccttgaagccgttgccacaatcggcatcgacatcggcaagaatacgttccacctcgtcggcctcgatagcaatggcgcgatcgttctgcgccagaagctttcacgccgccaagtcgaggctcggctcgcgaacatgccgccctgcctcatcggcatggaggcgtgcgttggagcgcatcacctgggccggcaactcaaggcgctcggccacgacgcgcgtttgatgcctgcccggtatgtccgaccgtattcgaaagggcagaagaatgacttccgcgatgcggaagcgatcgctgaagccgtgctgcgtcccaccatgaagtttgtcgccatcaaaacggtcgagcaactcgatctccaggcgctgcatcgcgtacgcgaacggctggtttgccagcgcaccagtgtgatcaatcagatccgcgccttcctgctcgagcgcggcattgcggtgcgccagggactgcgagcgctgcgtaccgagatgcccattatcctcgctatgacggacaagctgtcgccgcgcatgatccacatgatcgaggctctctgtacagactggcgccatctcgataggcgcatcgagaccgtgtcggacgagatcaaaacactgtccgagcaggatgacggagccaagcgcctcatgaccgtgccaggcattggcccgatcatctcgaccgcaacggtcgccgcgatcggcagcggcgacgcgttctccaagggcagagatttcggcgcttggctcggactcgtgccgcgacaaatgtcgacgggcgggcgcacaatcctcgggccgaatgttgttcgtccaggcagcccgagccgttctactgcgcccgcagagctgggagaagcatggcctcaaatcctggatcgaggctgcagcccgccggctcaaccggttcaagctggcgattgcgctcgccaacaaaatcgcccgcatcgtctggggtgttctccatggcggtcgcaacttcgaggtcaggccgatgaagccggcgccccaagccgcgtgaatcaggacgaagcgctcgcgatcaggagaaacgcgatgtaagcgccacgatcgttttgcccaccgaggtctgcgagagaaaaacaagagatggagaaatggtctttccagcgcatccgagaactgatgacccacatagccctttggaggcatggccgctaatgagctcgggcgcgcgcggatttccatgatggtccggagcataagctccaacacgaggcctgatacattggtgcaagaccgtactctccagctcacgttttcccttgcaacgcacggcgggtccatacat

SEQ ID NO: 3004 - DNA, 1154 bp, unidentified
  source 1..1154: mol_type = unassigned DNA; note = element_45409b7
  misc_feature 1..2: note = core
  misc_feature 3..206: note = LE
  misc_feature 207..1142: note = CDS
  misc_feature 1143..1154: note = RE
  misc_feature 13..212: note = bridgeRNA
cttgtcttatcaaaaccgcaggcttccgaaggattggaggccactgcacgccacgccatttatggcgtgcagtggcggcggttggatcgtaaggtgctgggtcttttgaaggaccgttctcgagtttgatcgaccgccgtcttccccctgggcctgaacggatacgcgtgtggctgcacgcatgacaagcataggacgtggagaagatgacagaccataccatcggcgtggacatttcgaaatcccatctggatgttttcgacgcagaacgcggcgctgcgacgcgttttgacacctcgaccagcggatttcgggcgtttgaagaatggctgggcaaggcgcccatcgcccgtgtggtgtacgaacccaccggcccgtatcatcgcgctttcgaagagcggttttgcgacaggcttcccctggtaaaggtcaacccgctgcaggcgcgccggttcgccgaggcctgtggcacacgggccaagaccgatgcgttggatgcgcaaggcctggcccgcatgggggtggccctggagctggaaccggacactccggttgcgaaaacaacacgtgttctcaaagacctgcaggttgcgcgcacggccctgatcaaggaccgcacgcgcttgaaaaaccgcgcatatgtgcaaacgaacacagtgttgaagcgccagacgaaagcgcgtctggccttggtggaaaagcacattgccgagcttgaccgggaaatcgatgccctgatccaggccgacaaaaccaccgcgcggcgccgcgagatcgtcacctccattcccggtctgggaagcgtcgccagcgccgcaatcgtgacctacctgcccgagatcgggacgctggaccgccgccaggtgggcagccttgcgggcgtggtgccctacaatcgcgattcagggcagtggaagggcaggtccttcatctgcggcggacgcaaacccttgcgcgatgccctctacatgccggcgcttgtggcaatgcgatacaacccggatctgaaggcaaaatacgacgccctgcgcgcggctggcaaacccgcaaaagtcgccatcgtcgcgatcatgcgcaagctgatcgaaaccgcaaacgcactcgtcaaagcagaccgcgtttggacccccaaaactgcttgatcaagacggata

SEQ ID NO: 3005 - DNA, 1351 bp, unidentified
  source 1..1351: mol_type = unassigned DNA; note = element_4541207
  misc_feature 1..4: note = core
  misc_feature 5..83: note = LE
  misc_feature 84..1106: note = CDS
  misc_feature 1107..1351: note = RE
  misc_feature 1113..1339: note = bridgeRNA
atgatggggtggacggcccccacccggcatcggtgtgccacactggttccgctggaacagcaaccagtcaacggaggccgtccatggaaaaggctagcatgattgggctcgatatcgcgaagaccgtttttgaagttcacggccgcagcgcggcgggcgaggtggtgctgcggcggagcctcaagcgaggccaggtcgagaagttctttgccaagctgcccaaagccacgatcgggctggaggcgtgcggctcggcccattactgggcgcgcgtgctgtgccagcttggccacgaggtgcggctgatgccgccggcctatgtgaagccttacgtcaagcgcaacaagagcgacgcgatcgatgccgaggcatgctgggaggcgatgagccggcccaacatgcggttcgtgcagatcaagaccgccgagcagcaggcttcgctgtcgctgcaccgcagccgcgacctgctggtgcgccagcgcacccagctcggcaacgcgctgcgctcgctgctgtcggagttcggcatcgtggcggccaagggccgcgccggcctggcgtcgctggtcgacgagctgcgcgccgcaacgctggcgctgccgcaggaggcgaccttcgccgcgctgacgctggccgaccaacgggccgctctcgagctttcgatcaagcagctcgagcggcgcatcacggcccaggccaaggccgacgaccgagccgccctgctgcaaaccgcccccggcgtcggccccctcggtgcccatgccgcgctggccaccgtgcccgatccaacggtcttcaagagcggccgcgcctttgccgcctggctcggcctcacgccgcgactcgacgggaccggcggcaggatccgcaccggtcacatcaccaggcagggcgatcagaccctgcgcaggctgctggtgctgggcgccaccgcctggctgcgccaggtccgcgcccatcccgagaaggccagtccgtggctgcgcggcatgctggcgcgccggccgttcaaggtcgtggccaccgcccaggccgcgcgcaccgcccgcatcctgtgggccatgctcacccacaaccaaccctatcgcgcgccggccatcggctgacgcgccaacccttcgcaaggagcacgcaacgacagatggcgaaatcggtaggcataccggaccgcgaacactccgttccgtcatcgtgcatcacagcacgtcgggatgatgggagagcgcggccacggataccatcggggccagcggtctttagccgaccgcacaaacaggccggatacatgaccgctcctactgcttcgccgaagacgctgccgaacaccttgcgaaacgggggccgtccatac

SEQ ID NO: 3006 - DNA, 1480 bp, unidentified
  source 1..1480: mol_type = unassigned DNA; note = element_454e464
  misc_feature 1..2: note = core
  misc_feature 3..242: note = LE
  misc_feature 243..1460: note = CDS
  misc_feature 1461..1480: note = RE
  misc_feature 8..235: note = bridgeRNA
ctaatgagtgttagcgagtcgccatccggcagactcgggactggtgccaccggcaggtgggcactccgttctcctgggcctcgagccctgatgaaagacagtgcccctgccggtaaccgggtaagttgatcgctgatgggatgtcgtgcccgccgcctggacgtgagcactgatttattaggttgctgatggttctcccgaacggctgccgagatcgatcgacatcgcagacgggagaagcattgctgttcgtcggagacgactgggtcgaagaccatcacggcgttgaactgatggacgatacgggccgtcggctggccaaggcccggctgcccgaaggcgtggcggggatggcccggctgcacgcgatgttcggtgagcagctcggcgaggacgccgccgatcaggtggtgatcggcatcgagaccgaccggggcccgtgggtgcaggcactgatcgtcgcggggtaccgggtgttcgcgatcaacccgctgcaggcgtcgcggtaccgggagcgacatggggtgtcgggcgccaagagcgacgccgccgatgcccacgtcctggccgacatggtccggaccgactcccatcagctgcgtccggtagccggagacagcgcccaggctgcggcgatcaaggtggtggcccgggcgcacaagacactgatctgggagcggacccggcacgcgcagcggctgcggcattcgctgcgggactacttccccgccgcgcgggaggcgttcgaggacctgacggccgctgacactttggagctgctggccaagcctcccgatccggcgtcggccgcgaagctgacggtcgcgcagatcgccgcggtgctcaagcgtgctcgccgccgttgcatcgcggacaaggccgcaaagatccaggccgcgttgcggaccgagcgtctgggccagcctgagatcgtggtgagcgcctacgccgcgagggtacgctcggcggccgccgtccttgccgtgctgaacgagcagatcacagccttgcaagggcaggtcgaggcgcattttggccggcacccggacgctaagatcattcttagccggcccggcctgggaccgattctcggcgcccgggtgcttgccgagttcggcgacgaccgcacgcggtacgtcaacgccaaggcccgcaagaactacgccggcacccgcccgatcacccgggcctcgggcaagaagaaggtcgtcctggcccgatacattcacaacgaccggctcgtcgacgctctcggcgtccaggccttcgctgcgctgcaagcctcgcccggcgcccgcctctactacgacgagctcagagcccgcgaggtcagccatcacgccgcgcttcgccagctcgccaaccggctcttcggcatcctgcacggctgcctcaaaaccggcacgctctacgacgaagcagctgcttggtcgcatcgtgtcgaaaagctggcagcttgacattcaagctcctgggatgt

SEQ ID NO: 3007 - DNA, 1469 bp, unidentified
  source 1..1469: mol_type = unassigned DNA; note = element_454f743
  misc_feature 1..2: note = core
  misc_feature 3..235: note = LE
  misc_feature 236..1279: note = CDS
  misc_feature 1280..1469: note = RE
  misc_feature 17..183: note = bridgeRNA
cttgtatcttctccacagaggcgtgaggatggaatcacgtcttggcggcaaggccgttcggacctaaggccagcgcaagcggagcctgttcccagatcggccgccgcccctctgccagtacgccgtggagaatcgaaggccttttgagcctgcatgttcaaggtcggcgcagcagtaagtccgttgacgcggataggggcggcagccaagaccatcctaacgtcgaaggaggtctatgaacaagcccgtaacaaccccgacagcaacggtgttttgcggcattgacgtcagcgcggcgacgctggccgtagccgtaatcgagcaagatcaaccctttcaacaacgtgaattcgccaaccgggccagcggccacaaggcgctgatcggctggctggcgaagcgcaaagcccaagtgcgcgtgtcactggaagccaccggcatttattcgttggacttggccttggcgctggacgcgtcggatggcatcgaagttgcggtgctgaatccgaagatggtcaaccattttgcccaaacgctgcgccgctccaagaccgacaccgctgatgcgcaagtgctcgccgagtacagtcggcgcatgcccttcacggcctggcaaccgcccagcctgaatgggcttcgactgcgcgtggtgggccggcatatcgccgctctggttgcacagcacacccgcgagcagaatcggctgcatgcggtggctggttctcaggctgcgtcgcgctgtgtacttcaggatctgaagcgttcgctggtctcgttgcagcagcgcatcgtgaaaatgcgccgtgccgccagggaactgattcgagccgatgcccagatcgagcagcgattccggttgctgaccagcatgcccggcatcgcagaaacaagcgcggtgcagatcctgggcgaactggtattgctggctccgcaactgaccgtccgccaatgggtcgcacatagcggactcgacccagtgcatcaggactccggcacctcggtgcataaacgctcccgtatcagccgctgtggcaaccgtcatctgcgccgcgcactctatatgcccgctctatccgctgtgcgttgggacccgcacatgaaagccttctacgaagctctccaactgcgtcacaaaaccaagctacaggccatcatcgccgtggcccgcaagctgctgcacgccatctatggcatctttaaatgccgaacgccctacgacggaagcaagctcttcccgcagttgatactctcaacggagttacaatcggcttccaggtgaaacagaagctggctctgctgggaagcaaccatgccgagggatagcctggcgggctcatcctgacgatgaaccggtgggtaagcggggacatcctcgcttgcccgcacagaacatcggagggatagacccgtcatgcctgaaaaaatccaaagcatactcagataaaaatgcttgcattgcaagagagaat

SEQ ID NO: 3008 - DNA, 1442 bp, unidentified
  source 1..1442: mol_type = unassigned DNA; note = element_455a4e0
  misc_feature 1..2: note = core
  misc_feature 3..121: note = LE
  misc_feature 122..1159: note = CDS
  misc_feature 1160..1442: note = RE
  misc_feature 1195..1396: note = bridgeRNA
agatggggtaatcggccgacgagcttgtggatagctgaagattttgggtgctgcgcttcaggctgatggtgaaacgaggtctcgctttcgcggcctcaagcatcagaaggagaagcgcagcatggaccattttgctggactagacgtatcggtcaaggcgaccagcgtctgcattgtggatgacgcgggcaaagtcgttcgggaagtgaaggttacgagcgaacctgaagcgttgttggcggtgctgaagaaccccgcctaccacttcaagcggattggcttggaagccgggccgctgtcgcaatggctttacagcgctctcgccgaagcagagttgccggtggtctgtgtcgagacgcggcacatgcaggcggtgttgaaggcccagatcaacaagacggaccgcaacgatgcacgcggcattgcgcagatgatgcgggtgggactttaccgtccggtgcatgtcaagacgctacgcagtcagaaactgcggatgctgctgacccatcgcaagctgctgcagtcgaaggccattgccatcgagaatgacctgcgcggcaccctgcgtaacttcggtctcaaggtcggcatggtggggacggtgaagtttgaggcacgcatcaaggagctggtcgagaacttgcccgacctggcggtgctggtcgaaccgctactggtcgtccggcgggtgctgcgcgaacagatcgaaatcctacaccgccgcttgctgaccatcgtgcgggacgatgaggtgtgccggcgcctaatgacggtccccggtgtcggccccgtggtggctctgacctatcgcgctaccgtcgatgtgcctgctcgcttccgtaaatccaagtcagtcggggcggtgtttgggctaacgtgctccaagtatcaatccggcgagatcgatcggagcggcagaatatcacgctgcggagacgagatgatgcgggtcatgctctacgaagcggcccaggtcatgctgacccgcactaataagtggtcctggctcaaggcctgggcgatgcagatcgccaggcgccgcgggatgaaaaaagcaatcgtggcgctggcacgccggttggccgtgatcatgcaccgcatctgggttgacggcaccgagttccgctggacccgggaacaagccggggcagcagcatgaaaaccacgcaggatcaaacccgataggaggacactcgagatccgccgcatggtggaatgatgtccctcgcgggacgatggatgaggtgagttcgcaatgtcgcttggacctgccgttcaactgacggcaaggccgtccaatagattgttccacctcgtcttcgaatcccatgatggaagggccttggtgccgattccgaagagaagcgcgagcccgtgagcgacatcgacactatagtggtggatggtctgaaagcgcttgaccccgaatggccgattagaga

SEQ ID NO: 3009 - DNA, 1458 bp, unidentified
  source 1..1458: mol_type = unassigned DNA; note = element_455c1d5
  misc_feature 1: note = core
  misc_feature 2..110: note = LE
  misc_feature 111..1136: note = CDS
  misc_feature 1137..1458: note = RE
  misc_feature 1178..1396: note = bridgeRNA
gaatgaaagggacttccccgtcccgtggcagcggtggaagccgtaaattggcatcaacgtgccatgatgaagtttgaacgcccaacgaacgccaacataaggggaagtccatgcctgttgtcaccgtcggaatcgatcttgccaagagcgtctttgcggttcacggagtggatgaagccggcaaggccgtattgatcaaaccgcgcgtctcacgcgatcaactgcccacactgatcgcccagttgccgccctctctcatcggcatggaagcatgctcaggtgcacatcattgggcgcggatattccagcagtacggccacacggcgaagctgatggcgccgaaactcgttgcgccgtaccggatgtcgggcaagcgtggcaagaacgacgcagccgatgccgcggcaatctgtgaggcagtaacgcgccccagcatgcgtttcgtgccgctgaaggatgaacaccagcaggccacgctctgcctgcatcggacgcgtcagggttttgtcgaggaacggaccgcgatctacaaccggacacgtggtctgctctcagaattcggcgtggtgctaccactgagcccggaacgcctgcgaaaagagatcccaacccatctggacacgttgcctggctgggcccggcgctgcatcagtgatctgctcgagcacgccagcaacatcgaagccagactcgccgaatacgatcgtgcaatcagcgaaatcgcccgagacgatgagcgcagccgacgccttatgcatctccgtggcattggcccgaccaccgcaagcgctttgcttgcgagtctcggcgccggacacgacttcagaaatggccgccaggtggccgcgtggataggcctcacgccaagccagtacagcagcggagggaaggaacggctgggcgccatcacgaagacgggagatgcgtacctacgcaatctgctgatactcggagctcgctcagtgatggcgagtctgggcgacaggcaggaccgtttcagccgctgggtgagaagtctagtcgagcgtcgcggctactggcgggcagctgtcgccatcgccgcgaagaatgcgcgcatggcgtgggcgactctcaagtacggcgacgccttcaaatacatatcggcgaccgcatgaaggaacactacgcccgataggcaagcagcccgaggcatccgagcaaccacgagggaattgacgatcactttgcactgccagcggtgatgtgaagcgggttggacccgcgcagggtgtgcctgtcagaagaacggggattactatcccgtccaaagaatgaggtccttgcgcgcgtctttcatcagggtccgggccagcggcccaatatgaccggttgtagtacagcagtccttcaccttctcacacgcaccgacgcagcatcgcagaatgtatcaacatccgtacttcgattgagcttgtgctcaacggggaagcccttgta

SEQ ID NO: 3010 - DNA, 1383 bp, unidentified
  source 1..1383: mol_type = unassigned DNA; note = element_455f098
  misc_feature 1..2: note = core
  misc_feature 3..84: note = LE
  misc_feature 85..1116: note = CDS
  misc_feature 1117..1383: note = RE
  misc_feature 1096..1370: note = bridgeRNA
cgatggggtggacgcctccatccgacggcatcgcaatgtgccatggtggtgttgttgaaacccccaatgggaaggaggcatccaatgaaggaggttagcatcatcggggtggacctgtcgaagaacagctttcagatgcacggcgcgtattcggacggctcggtggcgttccgtcgcaagctgtcgcggggtcgggttctggcgtttctgttgtctcaacctcgctgcacggttgcgatggaggcgtgcgggggtgcgcattactggggccgggagatcggcaagctgggccatgaggttcgtgtgatcccgccgatttatgtgaagccttatgtgaagcggcagaagaacgacgcggcggacgcggaggcgatctgcgaggcggcgcagcgcccgaccatgcgcttcgtggcggtgaagagcgaggagagccaggcgggggcgatgcagttgggggtgcgcatgcttctggtgcgccagcgcacgcagacgatcaacgcgctgcggggccatcttgcggagttcggccttgtggcacccaaggggccggcgcatgtggcgcgtctggcctgggcacttgagggcgaggagggggcgtctctgccggcgctgacgcgcgcgatgggggcgctgctgctggagcggatcgctgagctggacgggaaggtcagggaactggaccgggtgctgcgggccgccgcgcgcgaggacgaggaggcggtccgcgcgatgaccgtgccgggggtggggccggtcaccgcgctggcgctccaggccctggccccgccgctcgaaaccttccgcaagggacgcgacttcgctgcctggctcggcctcacgccccgccagcacagcacagccggcaaaccgcggctcggcaagatctcgaagatgggccagaaggacctgcgccgcctgctggtggtcggggcgatgtcggtgatccagaacgccatccgccggggcaagtgcgacgatccctggctggcgcgcctgctggcgagcaagcccgggaagcgcaagctggtcgccgtcgcgctcgccaatcgcatggcgcgcatcctgtgggcgctggccgtgaagaaggagacctaccgggctcccgcagccgcctgagaaggcggtgcggcgagccgtcggaggatgcaggcaggccgaggcaaggggtaagggcaaacggtcaatgagacgggatcgggaaaaccaggctgagccggcgcgccgcgagcgcatgaccccgatatggacccgatccgcgtatctccatactggcccgcggcaactcaagtgccgcactagggaaaccggacacacgactgcgcctgaccgcataggcccgaccaagccgaaaaaactgcttgcatccagggaggcgtccacaca

SEQ ID NO: 3011 - DNA, 1407 bp, unidentified
  source 1..1407: mol_type = unassigned DNA; note = element_4571131
  misc_feature 1: note = core
  misc_feature 2..65: note = LE
  misc_feature 66..1103: note = CDS
  misc_feature 1104..1407: note = RE
  misc_feature 1174..1398: note = bridgeRNA
taatgagatggtccgccgccgagtaaattacaactcggcagttcatatcaaggaggatcatcgccatgcagatcgcatccatcggcatcgatttgggcaagaccaactttcacctggttgcattgggagaacgtagcaaagttctggtccgcaagaagttttcccgtgcgcaactgctggcctatacagcgaatctgccggcctcgctgatcggcctggaggcgtgttccggagcacactttctgggagccgcactccgagaacaaggtcacgaagtgcggctcattcccgcccagttcgtgaagccttaccgcaagtcgaacaagaatgacttcctggatgcggaagcgatcgccgaagcggtaaccaaacagaacatgcgctttgtgcagatcaagacacaagagcagctcgatgtgcaggccatgcaccgagttcgggatcgacgggtgcagcgtcgcacggccctgatcaacgagatccggggctttctgttggagcgcggtatcaccttcccggcgcagcccattcacctgcgcaagaacttgcctacggttgtggaagatgccgagcgaaacttgagcccacgcttgcgctggctcctggatcggctgtggcaggagtggaagcaaaccgagatcgacatccagagcatcacggacgagatcgagcgcattagcaaccaggatgagcgctgtcaacgtctacgccagatacccggctttggaccgttgatctccactgccatggtggcggctattggcaacggggcagcgtttcgccgaggtcgagatctcgcggcctggcttggggtcgtgcctcgacagtactccacaggaggcaagcagaagctgttcggcatgagtaaacgcggcaatatctatctgcgtcgcatgctgatccacggtgcccgcgctgtgctgtttcgcgtcaaatacgatactgcaggattgggccagtgggtgcgccggctgagtcagcgtgctccgcgcaacaaggtcgtagtggcgatcgccaacaaactggcgcgcatcgcctgggccgtgctatccagcggccggaactatcgccatcagccgctgcaacagcgggcggctgcttgatggccatggaaaactggaaagcacaaaccgctttccacttttccaccgccacgacgacggctacatcgcattccaccaaggtctgctgaggagagaagaagacgaaagaacagtccaacggcgtgccggaaaacctgaacgctcaaatgcgtccttagggaccgagggatttaataggaccggcacgtgcggatcatcatcgagcgcccggagagatcgattctccactaagaggccggatacatttacgcggactgcccttcgtcaacttcaaacctcttgcagttcggtggcggaccataca

SEQ ID NO: 3012 - DNA, 1174 bp, unidentified
  source 1..1174: mol_type = unassigned DNA; note = element_4571adf
  misc_feature 1..2: note = core
  misc_feature 3..179: note = LE
  misc_feature 180..1154: note = CDS
  misc_feature 1155..1174: note = RE
  misc_feature 34..200: note = bridgeRNA
cttgtatctcgaaagtggattactatgaacaggcttagatttggcaaggtctgtgtagtccgattcctcccggggttattgaagcccgcagcatagcgattgatgcacaggctgagtcgttcatatgaagcacgaacagtcgtccggacttcaaatcttatttgcaaggaggggtatagatgagcatgtcaaatcaccgttgtgcaggcatagatgtttcaaaaggtactctggatattgcaatcagcaatattgccagcaagttcactgtacccaatggaagtgacggttttactcaaattatcggaaaattagtgcgaaatgagacaagattgatcctaatggaagcaacaggagcgctggagttaggtgttgcttgtcatcttcaatcagaaggctttgacgttgtcgtcattaacccccgtcaggttagagattttgcccgtgcaatgagctatcttgcgaagacggatcgtattgatgccagagtattgcttcagatgtctgaagtgattaaccagcacccggaacgggaaaaaaacatccgtcccttacctgatgcacacacgcagattctgtcagcgatggtggtcagacgtagacaactaataatcatgcttacagccgaacgaaaccgattccattcttcgcatcctcagagttatgaaagcatcagatcaattatttcggccctgaagggtgagctggctcgcattgaaggtgaaatggcaattcacatcaaggaccatttcagtgagctatctgatctactgagtgcagttaaaggtgttggtgttggggctgcgactgttgctgtattgctggctgaagttcctgagcttggttcactctctcgacgtgaaattagcactcttattggggttgctccagtaaacagggattccggtacgatgcgcgctcgccgaacagtattcggagggcgagcctccgtccgttcagttctctatatgtcagctctggttgggacaaggcacaacccggtaattaaagagttctatacacgcctggttgccacgcgaaaacccaaaaaagttgcactgacggcctgcatcagaaaattgctgactgtcctgaatgcaatgctgaaaaacaatgaagcatgggatcccatgtatcaccagcgtgcttcatagtctcgctcaaaagacagttg

SEQ ID NO: 3013 - DNA, 1827 bp, unidentified
  source 1..1827: mol_type = unassigned DNA; note = element_4573a46
  misc_feature 1..3: note = core
  misc_feature 4..512: note = LE
  misc_feature 513..1688: note = CDS
  misc_feature 1689..1827: note = RE
  misc_feature 143..425: note = bridgeRNA
ctcgtataatagattttagggtagtttcaagagtaccccaatgaacctctgccacgctcagttgagagaggcagcattgaaatcgaaatgagcgtagcgaatggagatttcaatgctgcggcggagttccgccgggtttaatcaaacaatcaacaggcattcacatacccatgatataatagctgtgatcagcaggaacaagttctggttttccttagtcgagccgcaaggcttcttccacatggagtctgttccccagagctgtgagttagctgcttacacgtaggctgtttatccgggatgtgttccatccgtttttacaggcagtacggatcatcgcatcggagcgtcccggagtggattctgataagcgaggttgatgatgccacagtatcatgggtagctgaatgcctgttgattgcaaatcccgatgaagggaggtggaaaatgtgaatcaagacaaactttatgttggcattgatgtcagcagcaagaataacgtctgctatctcatgtattccgacggcagtaaacatagttcgttttctgtaccgaacaacaggaacggtgcgaagcttatcgttgacagagttacctctgtgcttctctcgcaggacattccacaggttgtgatcggtatggaagctacatccgtttacggcgacaatctcatgcgttttcttcgtgaaagcggcagtcttggacgatttgaacgaagcctgcatatgctcaatccaaagcaggtcaaaaagttccatgatgcctattccgatcttccgaaaaacgattatgtcgattcctatgtcattgctgaccaccttcgcttcggcagaatcaataaggaggtctacatggacgattacaagtaccaagcgctcaaaatgtataccagagcgcgtcaccagctcgtacaggaactgacacgggaaaagcagcgtcttctgaacactgttttcatcagcttttccggactgacacaggagaagatcttctccgataaattcggcgcaacgtcaatggctctgattgaggagttctcttcgctcgatgagcttgcgtacatgagtaccgatgaacttgcggattttatccgtgagcgcggcaaaaatcactttgagaatccggaagagatcgcgaaagctgttcagcgtgctgcgaagaattcataccgcccgccgcaggtcattgcagatgccgccaagcagatgatcgccatctccatgaacaccattcgtctgcttcaaaaacagatcaaggagtatgacaaagcgatcgaaaagatgctggaagctttcccacagacactgacctcggtcaaaggtattggcaacatttatgccgccggaatcattgctgagatcggtgatattaaccgtttccccagtcaggcaagccttgcaaaatatgccggtcttgtctggactcagcaccagtccagtgactttgaagctgaggacaagcgcatgatccagggcggtaaccatcatctgaaatactatttgtgcgaagctgcaaacgctctgagaagatgcgacccggagttcaagcgcttctacgccctcaaatacaaagaggctaataagcacaaccacaaacgcgcactcgctctcactgccagaaagttggtcaggttagtctatacactgctgaagactaaccgcctgtatatcccgccggaggagtattgatccggcacctccagcccgtcgaaaaaatttttcggcgcaggctttagtaggagataccctttttgtctcttcttaggcagaatgtatggatttcttacttgtttttctactttttgcctattgacattttaccgtagga

SEQ ID NO: 3014 - DNA, 1491 bp, unidentified
  source 1..1491: mol_type = unassigned DNA; note = element_4576a61
  misc_feature 1..2: note = core
  misc_feature 3..240: note = LE
  misc_feature 241..1470: note = CDS
  misc_feature 1471..1491: note = RE
  misc_feature 7..241: note = bridgeRNA
ctaatgggggtgtaccggccggtttggtgtaaggctggtaccgatcctggcatcgagtacttgaagaatgccggagctgttggaagggctcctgcggtgaggctgtgccggtgccaggtgggtcggggtttcgttggtagcgctgatggggtggcgtgccggccaggggccgagtactggatccattagcacgcagcccggcgactgcttcgacccgctgatcagggaaaggagcggtagatggatgtgttgttcgttggtgatgactgggctgaggatcaccacgatgtgtgcctgatggacggcgagggcagggtggttgcctcccgcagactccccgagggcctggtgggcatggagagattccatgccctggtcgcggatcgggtcgatgacccgagccaggtgatcgtcgggatcgagacggatcggggactgtgggtgcaggccctggtcgcggccggctaccaggtgttcgcgatcaatccggggtcggtgtcgcggtaccgggatcggcatcacatcggcggcgggaagtccgatacctctgatgccaggatgctggccaacgtggtgcgcaccgaccgtcacaatcaccggccggtggccgctaacagcgaactggccgaggcggtcaaggtgctggcccgtgcccatcagagtctggtgtggtcgcgttccgcggctaccaaccggctgcgagctgggctgctggagtacttcccgggggcggtgcaggccttcgaggacctcaccgaccgggacacgctggccgttttggccgcggccccggatcccgatcaggcggcccggctgtcacggtcatcgatcaaggcggcgttacgccgcggtgggcgtcaacgcaacctggactggcgtgccgagcagatccaggccgcgctgcgggccccgcagccacgcaccagcccgctactggggcaggcacttgccgcggtcacccgctcacacgtggcggtgatccgggaactaaacacccagatcgccgagctagccgccgaactgcaaccgcattttgagcagcatccggacgccgcgatctacctatcgctaccaggcctcggcgtcatcctcggcgcccggatgctcggcgagttcggggacgacccgaaccggtacgccaaccgtaagtgtcgcaagaactacgccggcacctcaccactgaccgtggccagtggacgcaagaagacggtgcatgcccggcatctgcgcaacaaacgcctggccgatgccacccacctgtgggcgttcgaagccatcagcaccagccccggggccagggcctgctaccagcgtcaccgcgacgccaaacagggccaccaccaggcactgcgcgcggtggccaacaaactcgtcggctgcctacacgcctgcctgcgagaccgggtgccctacgacgaaacaaccgcctgggccaaccagcccaaaccctcaaacacccgagccgcttgaccagttacacccatggggtgt

SEQ ID NO: 3015 - DNA, 1840 bp, unidentified
  source 1..1840: mol_type = unassigned DNA; note = element_4576b6f
  misc_feature 1..3: note = core
  misc_feature 4..564: note = LE
  misc_feature 565..1455: note = CDS
  misc_feature 1456..1840: note = RE
cttatatgttactattttttcagaccctctcgacgaagggtcagtagggaaaatccctgcgcgatagacactgccggggaaagacttgatcctccacacggcttgaccgatagaaaaagatcgtgcttcccttggcctgtttcctgggccaatcgatgattggagggacgttgcttcgagcacccgttatataaggacccgacactcccaggagttgcgctagacaaggaaagacgaacatgtggtacgttggactggactgggccgacacccatcatgacgtggaggtgcaggatgaggcgggcaagcgtgtggcagcacgacgctttgcccacagccacgacggcttgaacgagttgcaagcgtttctgctcggcattgcggcgtcgcccgaggaactggcctgcattgtcgaaaccaaccatggcttgctcatcagcttcctgctggaagcgggcatccccgtgtatccggtgaaccccaagagcgccaatcagttgcgtaaagcggccggagcccgcgcccgatcgcattgatgcgcatttgctggccaaactgggtcgtgtggacctggcggaactgcgccgcctggagccggatagccccatggtggccgagttgaaaacgctcacccgcgatcaggacacgctgatccagacgcaaacgcgcctggtgaaccagttgacagcctgcctcaaggagtactacccggcggccttgcagctgtttaccaagttgcagcagcgctccaccttgctgtttttgcaaacctatcccaccccagccgccgcagcatccgcttcggtagcagagctcacggccaccttgcgcgcaggcaaacacaccaaccccaggcgcgtggctcccaagctctttgaggaactgcatcgtccccagttggtggcaagcgagatcatcgtgcgcgccaagtcgcgtctgatgatctcgttggtcaaacaactgctggtcgtgctcgaggagatcgccacctatgacaaggccatccgtaccctttttttgaggcataacgaccaggaactgtggagttcgctgcctggggctggcaagcgcctggctccacgtctgctggccgaatggggcgatgatcgcagccgctatgccaatgccaactccgtccaggccctggccggtaccgcacccgtgccctatgaaagcggtaattacgccaaagcgcacaaacgcttcgcctgcttgaagccgctgcgcaacgccttgcaccagtttgcctggcaatcgacgcagcaagaagcctgggcgcgggattactaccagcgcaaacgggcgcagggcaagacccacagtatggcgatccgcgccctggccaacgtctgggtgcgcatcatctatgcgatgtgggtgagcaggaccagctatcagaccgcgacctttgaagcggcgcagcaggctcacgcgccccggcaacacgtcgcctgagtccagaccgcttctttccgtcatgccccgttgggcaccctcaacgctgcgaaggccttcgccagtgcagggagcctgtgctccaacggagtcgcccaagcggttcccgtcttctgctttctgccgaccgcgaacctcccccgctgcaggtgctgtcgctccaacgtctgccgcagcccgccaccgcgttcccgactcccggtgtgggttgctgctcagagaccacgccgagtcaaggccgcgcaggaggtggaaaggtcgggtgcgggcgcgctcgtcttggccttgaccggtgtggtagactggcaccaccacacgggaggcagcttcacccactttcatcttgcttcctcctttccgcgttttgactcttgacatagagggt

SEQ ID NO: 3016 - DNA, 1394 bp, unidentified
  source 1..1394: mol_type = unassigned DNA; note = element_45774a2
  misc_feature 1..2: note = core
  misc_feature 3..87: note = LE
  misc_feature 88..1125: note = CDS
  misc_feature 1126..1394: note = RE
  misc_feature 1151..1392: note = bridgeRNA
tgatgtgatggacgactcccgctaccgagcgaggggtttatgccaaagtggaaaagtcgtgacgtccacggcaaaggagcgttcatcatgaatatagcgactgttggactggatctggccaagagcgtgatgcaggttcacgcagtgaattcgcaaggcgaaatcgttgtgcgcaaacagctcagacgcgcgaatgtacttcggtattttgctacgctcgaaccgtgtgtaatcggcatggaagcgtgcgcctcgtcgcactaccggggccgtgagctcaccaagctcggacacaccgttcgactgatcgccccgcagttcgtccggccttacgtaaagagcaacaagaccgacgcggccgacgccgaagcaatctgcgaggcgataacgcgaccgaacatgcgctttgtaccgctcaagacgcaggcgcaacagacagtgctgtcgctgcatcgcgcacgcgccggccgggtcaaatcacgcatagcacttgccaaccaaatccgcgggcttcttggcgaattcggcatcgtgctgccacagggtatccaactgcttggccaacgggccatggccgctctttccactcgtgacgatgggcattctgagccgttccgggcgttaatccagatgctcgtcgagcacttgcgcgaacttggcagcaaggtggctgagctcgaaggtcgtatccgcgcgatccgtcgcacggatgcgcccggtcggcttctcgaaacaatacccgggatcgggccacttaccgcgtcggcccttgcagcctcgatcggcaacgccggatcttttcgcagcggccgcgaacttgctgcatggctgggtttggtgccgcgtcagcattcttcgggcggcacgccgcgtctgctgggcatcagcaagcgcggcgatacggcattacgaacacttctgattcacggcgccggcgcggttattcgtatggcagcgagcaaacccgaaatggccgattcctgggtgttgaaactgtttcgtcgccggcacaaaaatatcgctgctggcgctcgcggcaaagaatgcacggcgtgggccatactgatacgaaatcagccctttcaggcggaccatgtgcctacgcgatccagcgtgacggattgacaggtcccgccattagcagtgaaacagcgttcacttccagaggttgcttgagcagacttcaattcgatggcagaacggtcgggccgtggtgggccaaacccgctttgcaccaagggcaaccgagcccgaggctctgatggggtacccattcgcggatattcatcgtgggcccgcagcgagtgctgccaactgagcccggatacatggctgcaacctcgacctgatgccagaaaaccaagactgcttgacaacagggagtcgtccataca

SEQ ID NO: 3017 - DNA, 1282 bp, unidentified
  source 1..1282: mol_type = unassigned DNA; note = element_45857ca
  misc_feature 1..3: note = core
  misc_feature 4..215: note = LE
  misc_feature 216..1166: note = CDS
  misc_feature 1167..1282: note = RE
  misc_feature 1..176: note = bridgeRNA
gcttgtgtcttcaaggtctcttaaactcgaaagggtgagagcagtggatggcagactgaaagccaggtgtgctctaaagcacgagtgggagcctagtcgccatccacctctcactctgacctaagcccgaacagttgaatgagtggcgaactcgcagtcacaagctagggctaagtcagagtgctctcacttcttgagtgtaagagggcttggcgatgatttcctacttcgttggtctcgacgtttcgaaagcgactctggatgtgggctttcttcctgaaagtattccccagttccaggtcaggaatgactctgagggctttgcgcaactgatcgcatgcctgaacgagcttgaggtcgaacgggtcttgctggaagccactggtggctatgaacaagccgtattcaaagccttgcgactggagggtttgaacgtcatcagggtcaaccccaagcgctgtcgggactatgcgagtgccatgggcaaaattgccaagactgacaagatcgacgcccagatgctggcgcggtttgccagggacttcgagggcttgccgcagatagagcctaatcaagatcgagatgaactgggagagctcatcaaactccgtggcaatcttgtccagcatcgggatgatgacaagcgtcggatgaaacaaaccacttcagctacggccattaccgtttataccgagcatgtcgcttacctgaacgatcagattaaggccttggacaaggcgattgagcgtgcctcgaacgtgctggatcgcacgacagccatgcggctaaggtctgtgaaagggattggcgtcatcagttgtggcaccttcatggcctacctacctgagctgggaagcgtgacggggcgcgaaattgcagccttggctgggttagcgccgtacaacaaagacagcggcaagaagagtggcccgaggaagatcgaaggcgggcgttacagagtccgcaaggcggcctacatgtcgatctggtcaatgatccagcatgtcccagaagttagagcccgctatgaagccctgatagcccgaggcaagcgcgcaaaagttgccgcagtggcgtgcatgcgcgtgttgctggtgcgcctgaacgcaatgctgcgtgacggaacggagtggaaagagctcaagcctcaggtacccgcaccctgatcacgaacgaggatcgattttctacaaatgcgggcttcgccagcgacaccgctacgcggtatcgagcgaagccctgcccgaatggcacgcttgaaaataaatttctaaagacagtt

SEQ ID NO: 3018 - DNA, 1366 bp, unidentified
  source 1..1366: mol_type = unassigned DNA; note = element_45c3620
  misc_feature 1..2: note = core
  misc_feature 3..75: note = LE
  misc_feature 76..1101: note = CDS
  misc_feature 1102..1366: note = RE
  misc_feature 1130..1354: note = bridgeRNA
tgatgccgtggacggctctccacccccggcggagtcggacctagtctgctccgctcatgatggaggagaagcgccatgtcggatgttcgtgtcatcggattggatatcgcgaagtcggtttttcagttgcacggtgtcgatgatgccggggcgaccgtcttgcagaagcggctgacgcgagcgcgactactgccgttcttcgagaagctgcctccctgcctgatcgggattgaggcatgcgccacgtcgcacttctgggcgcgcgagctcaccaggctcggtcacgaggtcaagctcatgcccgctcagtacgtgaagccgtacgtcaagcggcagaagaacgacatggccgacgcggaggcgatcgccgaggcggtcacccggccgagcatgccctttgtcgggcccaagtcgccggacgagcagagcgcgatgatgcttcacaaggtccgactgatgctcacgcggcagctgaccatgattaccaacgcgatccgcgcacacatggcggagttcgggattgtcgcgccggtcggcagaggtggcgtcgatcgcctgctcgccatcgtcgacgacgacaccgatgagcggatacctatgcaagctcgatcctgcctccagatgctggttgcccagctcaggctcgtcaagctgcagattctcgataacgaccgccaggtcctcgcgctggcccgatcgaccgaacttggctgtcgcttgatggaagttcccggcatcgggccgctggtcgcttccgcgctgatcgcgtgcgtgcccgatccgtcgatgttccgctgcgggcgcaacatggcggcgtggctcggtctcgttccaaagcagaactcgtccggtggcaaggagcggttgggctctatcaccaaggccggcaaccgctatctgcgtcagatgctgttcgccggcgctatggcggtcattcgccgggcgatgcagggcacgcgccgtacttggctgatccgattgctggaacggcgccgacccaagatcgcagcgatagcgctggccaacaagaacgccaggatcgcctgggccatgatgatgagcggtgagcactatcgggaaccgatggcgatcgcagcctgatgacatcgcgcggctgagaggcagcgcctagaggttggaaagggcagaggaactattgcacgaaagccggtcgacaccgccagatcagaccaccccatttgcgccccgcacctcgagtgcgcgaaattgattggggaccagatctgcggaaggcattatggccagcggcgatgacaaggccgcacaacaggccggacacatggccgcaccgaccacctagtgcagatgctcaactagctcttgccaacggagggccgtccacaca

SEQ ID NO: 3019 - DNA, 1453 bp, unidentified
  source 1..1453: mol_type = unassigned DNA; note = element_45c3842
  misc_feature 1: note = core
  misc_feature 2..174: note = LE
  misc_feature 175..1203: note = CDS
  misc_feature 1204..1453: note = RE
  misc_feature 1240..1425: note = bridgeRNA
gtagatggggtaacgggccccggtctgcccttcaagcaagccgcgcttgctacggcgctattgatggcgcgctgcgcgcggcttgcttgaagggcgggcggtcgtccctcacactgatggtgtgacggagtcggagggatcagcctccgctccaaacatcgaggagagacgaccatgaaccattatgcaggaatcgacgtgtcattggaatgctcgagcgtgtgtgttgttgatgccaacggcaagattttgcgcgaggccaaggtggcgagcgagccggcggcgctgatcgcctggttccacttgctgggcttcggccttgagcggatcgggctggaagctggaccgctgtcgcagtggctttttgccgcgatgcgggaagcggggctggcggtcgaactgctggagacgcggcacgtgcgcaaggcattcgaggcgatgcccgtgaagtctgatcgcaacgatgcgcgcgggattgcgcaactgatgcggctgggctggttccggccggtacactgcaaatcgatgagcgcgcaggagacccgaacgctgctgacggcgcgcaagctggtgcaatcaaagcttcgcgacgtcgagaacagcttgcgcgggatcctgcgcggctttggactgaaggttggcaagacgacggaacttaagttcgccggccggatcgaggagcttgtggcgggccatccgcatcttcaggtggtcgccgaagcactgttggcggtgcgtgcggtgctgcggagcgagttcgcagctttccagaagcagacccgcaagatggctcaatccgacgcgcggacacggctgctgatgtcgacgccggcagtcggcccgatcgtggcgctgacctatgccagcgcgatcgacgatccggcccggttcaaatcgtcgaagcaggcaggagcccatttcgggttgaccccgaagaagtatcagtccggcgagaccgactacaccggccggatcagcaagatcggcgatagctcggtgcggacggcgctctacgaggccgcccacatcatgttgaccaagccgctcaagggctgcacgcaactgaagagctgggcaatgcggatcgccaggcgcgccggcatgagcaaggccaaggtggcgctggcgcgtaggcttgcggtgatcatgcatcgtatgctcgccgacggaacacccttcaacgcggctgccgcagcagcctaacagggagaggcgcaacagttttcgggcgggtcacgacaccaggccttctcgaagcgaagtcccttcgccgggacgatggatcaggtcaggccgttgcccaccaggtagcttcgtgagcacgcgaacgtagattggtcgacctatcctcttccgaccccatcaggtggcggccctgcgccgaccccgtacagaagcgagaccccggcgagtggataacgcaaaagggattgactaatcgaggcccgttaca

SEQ ID NO: 3020 - DNA, 1330 bp, unidentified
  source 1..1330: mol_type = unassigned DNA; note = element_45c5e6b
  misc_feature 1..2: note = core
  misc_feature 3..255: note = LE
  misc_feature 256..1317: note = CDS
  misc_feature 1318..1330: note = RE
  misc_feature 27..228: note = bridgeRNA
ccgacttatgttcgtgtcatcggtccgtggtcgggttagctgcccgtagcgttccgtagcagaccggaaggattgactcctgaggttcctgtcaccctatctttcgggttgacttttcgggggtgtgtcgccccttccggcctgcgttcgcggagtgactcaagagaggcgtgaccccaagctgctgtgagaggtacttgaagtcggattgtcctccgcggatccccatcctgacagagaagggaaccgtcttccatgatcgtcatcggtatcgatccccacaagtccacccacaccgcaaccgcggtcgacccggccaccaacaccgacctcggctcgatccgcatcgacgccaccatcaccggctacaagacgctgaccgcgtgggccaaggcctggcccacgcgcaagtgggcgatcgagaacgccgagggactcggccatcacctcgcacagtggctgttggtcctcggcgaactcgtcctcgacgttccgaccacctccaccgccaggatccggcaactctcccgcggcagccgacgcaagaacgaccgcatagacgctgccgcggccgcatgtgtcgccgccctacagggcgacgcccgaccggtcgaccccgagggcccgaccgatatcctggcgctgctcgacgagcgccgaactaatctgtcaggcagtcgaactcgtctcgtcaatcagctacacgcgttgctacggcagctgctcgccggcggcgccccgacctcgctgaccgcggccgcggcaacggcactgttgcggggctaccgggcccgcagcgaggtcgaccgagtccgggtcgggctgtgtcgcaacctggtcgccgacatccaccgcctcgatggtcagctcgccgagaacgagaagcagatgacccgcgcgctcgacgagcacgggacacgtctgcgggaggtcgacggaatcggtccggtgaccgccgcctgcctgatcggccgcaccggccgcgtcagccgcttcccgaccgccgcggcgtacgcgaactacaacggttccgcaccggtgcaggtcgccagcgccgacgccgaccgccaccgcctctcccgctacggcgaccggcagctcaacagcgcgctctacaccgtcgcgatggtccagatccggatgcccgccagcgccggccgcacctactacgacaagaaaatcgccgagggcaagagtccccgcgccgcgacccgcagcctcaaacggcacctctccgatcacgtctggcgcatcatgctcgccgacgagaaacgcagctaccggcaacacgagaaagaatcagaaagggcggcttgacaatagagaggca

SEQ ID NO: 3021 - DNA, 1577 bp, unidentified
  source 1..1577: mol_type = unassigned DNA; note = element_45c6df7
  misc_feature 1..4: note = core
  misc_feature 5..261: note = LE
  misc_feature 262..1464: note = CDS
  misc_feature 1465..1577: note = RE
  misc_feature 1..224: note = bridgeRNA
ccccattaccatgtttagtaggtcctgatggtcgggaccgggccgccggttccggtatgactttcccgccctgtcgttgatgatccggggggtgttgtcgccgggagcggggacgctcgctgaccgctgataggaaccaggccggccgcatggacgcgctggggcgcatggcgcaggtctcgtcgtaatgtggatgcggcacgggcgtcaggactcctccgagcccgcggcggccgcgcagccttcatgacgggagagacgatgatgactccggacgacatcgacgtgtgggtcggcctggacgtgggcaagagcgcgcaccacgcctgcgccctcgaccatgacgggaacaccccgtacgacaagccggtcaggcaggacgagaaggccatccgcacgatgctgggcaagctctccaagcacggccgcgtgctgctggtcgtggaccagcccaacaccatcggctccctgcccctgaccgtggccagaagcatggggatcacggtcgcctaccttcccggcggcgcgatgcgcaggaccgcgcagctgctgcccggagccgcgaagaccgaccaaagggacgcgcacgtgatcgcgtgggccgcgctcaagctgcccgagacgctcagggacgcgggcccggacgacgagaccctcgccgcgctgaagatgctctccggccacgacgaggacctcgcccacgaatccacccgccacgtcaaccgcctgcggagcctgctgctgcagacccaccccgcgttcgaacgcgcgctcaagggagagagaatcacgcgcgacgccacgctcgccctgctcgaacactacggtgggcccgcgggcatgaaaacgatgggcatcgaagaggtcagggcgtgggccaaggccaacggcctgcgcgccggcgccatcatcgacgacatgttcaaggcgatcggcgagcagaccgtcaccgtgcccggcaccctcatggccgagaccatcatcccctccatcgcccacgacatcaaggcgatcaaggaccggcggcgcgaggccggccgccaagtcgaggctctcctggagggccaccctcttcccacggtcctgacgtcgatgcccgggataggcgccgggaccgcaagcagcatcctcctcggcatcggcggcgacatcgccaacttcaaatcgtccgcccatctggccgcatacgcgggcatatcgccggtcaccagccagtccggcaccagcatcaaaggcgaacggccctccaggcggggcaacaagcgactcaagaacgcattatggcagacggcgttcgtcgcatccaccaagcacccgccgtcgatcgcctactacaaacgcaaacgcgaacagggcaagcaccacaacgccgccgtcatctgcctcgcgcgccgacgccgcgacgtgatctacagcatgctcaaaaacggcaccctctaccaggaacccgacctcgcagcctgaaacccgaacggccagcaagaacaccggacccaccggcaaggcgaagcacgcccacaacaacccgccaaaatcccgacatcaacccctacagagttgacaaaaacataggaaca

SEQ ID NO: 3022 - DNA, 1290 bp, unidentified
  source 1..1290: mol_type = unassigned DNA; note = element_45cb15b
  misc_feature 1: note = core
  misc_feature 2..138: note = LE
  misc_feature 139..1017: note = CDS
  misc_feature 1018..1290: note = RE
  misc_feature 1062..1282: note = bridgeRNA
caatgggatggacgcccccactcgtaacggcatcgatgtgccaaagtggaagcgttacttcaaccactgaaccgagaggggcgtccgagatgaagattacgacgatcggcattgatttggcaaagaacgtgtgtgggcatggaggcctgcggcagcgcgcaccactgggcacgcaagctgcagggtttcgggcacagcgtgcggctgatggcgccgcagttcgtcaagccttacgtgaaggccaacaagaacgacgcggccgacgctcaagcgatctgcgaggcggtggcacggccccacatgcgctttgtggcaatcaagaatgtcgggcagcaagcggtgctggccctgcaccgggtacgccaggggttcgtcaaatcacgcaccgcccaggcgaatcagatccggggactgctcggcgagtacggtctgatccttcctcaaggcatcgcccacatcgccaaacgggtgcccgagctcatcgaagatgcgagcaatgagttgccaggcgcgttccgggtgctggtggatcggctgatggatcacctcaaggccctcgaccaacaggtcgcgcagctcgaagctcagatcaaggcttggcaccgtgagaatgacgccagccgcaagcttgagcagattcccggcatcggccccatcacggccagtgcgctggtggcgagcatgggcgaggcgaagaacttcgataacggccgccaggtggcagcgtggctgggcctcgtacccaggcagcactccagcggaggcaagcccaccctgctgggcatcagcaagcggggcgactcgtacctgcgaacgctactgattcacggggcgcgctcagtgatcctggccgccgggcgcaaggccaatctggggggctggctgcaggagctgctcaagcggcgcaatcccaatgtggccgccgtcgcgctggccaacaagaatgcgcggatcgcctgggcgctgctcgcccaccaacgcaactaccgcgccgattacgctgccgcggccgcctaatcaggccggctcacgcaacacaacatccgcaggaggtacaaacccaagattgctcaggcaatcacgcagtgatggcaagacaggtaagaccgtggttggtaaagcccgctttggccgaagcacctagagtgcgcgctttcgattggggcgccaaccagcggattccatcagggacagcggctacgccgcaccaaaagtccgaatgtacggctgcaatctttaccttcacgtcatcgcgaactgaacgcttggcaaaccgggggcgtccatgta

SEQ ID NO: 3023 - DNA, 1143 bp, unidentified
  source 1..1143: mol_type = unassigned DNA; note = element_45cd6fc
  misc_feature 1..2: note = core
  misc_feature 3..189: note = LE
  misc_feature 190..1134: note = CDS
  misc_feature 1135..1143: note = RE
  misc_feature 28..194: note = bridgeRNA
cttgtgtgtttggcttctggcataatggtgtcgccgccgatcattttggtttgaccggcgacgacggccgcgagcccgtgccccctcaggtggcgaaaccgcggtggagcaggggaccggccgtcttcttcctgaacccgaacagttgccaggggcaagcccccgcacagcaaggatgggacgacgaagatgacaggggatgcgattgtgctcggtatcgacgtggccaaggactggctcgacgtggcggtgcttgcgagcggcgagggcttccggctcgacaacgaccgggctggctggagcgaactggtgcggcggctgaaggggcgcgcggtcgcggccatcggcgtggagccgagcggcggttatgagcgcggcctggccaaggcgctgcacaaggccggcctgccggtcaggaacgtcaacccgcacaagctgcgccattatgcccgcgcccatggccgcctggccaagaacgacgccatcgacgcccgcatgatcgcccgcttcgccgccgagatgccgacgcggccgctccaccgcgacccggtcaccgagcaactcgccgacctcgtcaccgcccgccgccagctcagcgacgacaaggtcagcctcgccaaccagctcgaacaggtgcgtgaccccaccgtgcggcgcatcttccaagcgcggtgcaggcgcatcgaagccgacatgctgctcctcgacaagcgcatggccgatctcgttgccagccagagccaactggccgaacgcgaccggctgatccagtccttccccggcgccggcccggtgctgagccggaccctcatcgcgctcgctccggagatcggcagcgcaacgcgtcgacagatcgctgccctcgtcggggtcgcactctatgatcacgataccggcgtcttcagaggcaagcgcagcatccagggagggcgcgccgaggtgcgcaaggtcctctatatggccgcgctggccgcgagccgctccaaccccaccctcaaggccttccatcagcgcctcctcgccgcaggaaagcccccaaaggtcgccctcgtcgccgtcgccagaaagatcctgacaatcctctccgcaatgctgcgaaaggatcaaccctggacaccacaccaccaagcatgaacacagttg

SEQ ID NO: 3024 - DNA, 1411 bp, unidentified
  source 1..1411: mol_type = unassigned DNA; note = element_45d09ec
  misc_feature 1: note = core
  misc_feature 2..90: note = LE
  misc_feature 91..1134: note = CDS
  misc_feature 1135..1411: note = RE
  misc_feature 1182..1397: note = bridgeRNA
taatggaatggacgcccccgcttttaccggcatcagttgtgccacagtggaagtgtcaagcaaccactgaacaaaacgggagcgtccacgatgaaccttacgacgatcggaatcgatctggcaaaaaatgtgttccagatccatggagtcgatgggcaaggcaagactcggcttcgcaagcaactcaagcgcagccagataagggcattctttgccaacctgccgtcttgcctgatcggtatggaggcgtgtggcggcgctcatcattgggcgcgcgagttgcagaagcacggacacacggtgaggctgatggcgccccagttcgttaagccgtacgtgaagacgaataagaatgatgtggccgatgccgaagcgatctgcgaggcggtggggcggcccaacatgcgctttgtaccgatcaagaacgtggatcagcaagcgcttctggcattgcatcgagcgcgccagagctttgtacaggcgcgtaccgcccaggtgaatcaactgcgtggactgttggcggagtttggcctgacgctaccgtcagggattcatcacgtcctgcgacagctgccggggatattggaggatggcgagaacggtttgccgggcctgagccgcgagctatttcagcgcttgtacgagcactgccgggagttggatcgtcaggtcaaagaaatcgaagcgcagatccagtcctggcatcgaaccaacccgatgagtcagcgtctggaagcgatcccggggatcgggccgatcacggcgagcgcgctggtggcgagcattgggaatgcgggttcattcaagaacggtcggcagttggcggcctggttgggcttggtgccgcgccagcactcctcgggcggcaaggagcagttgctgggaatcagcaagcgcggtgacacctatctgcgcaccctgctcatccacggggcgcgctcggtactgtggcacgtcaaaggtaaaaccgatgcctgctcgtgctggctggaacgtttggtggcacgacgaaacgccaatgtggcggcggtcgcgctggccaataagaacgctcgcatcgtctgggccttgctcaggcgtgagtgcgacttcaaggccagttactgcgtgtcaccgcagcgggccacggcctgagcgattttaacggttgagcgatgaaccttgaggtatccacccttctcagaggctgcgcaggcgattcgattgatggcatcacaggtcagaccaggatcgactcaaccttatcccggctggggacctttagagtccgagaagctgattaggcgtcgatcagcacattccatcagggcccgcggaaacgctccgcacttggaggccgaatgtatggctgcactctgtcgtgatggcatagatgaagaagtgcttgcacaggggtgggggcgtccatgta

SEQ ID NO: 3025 - DNA, 1383 bp, unidentified
  source 1..1383: mol_type = unassigned DNA; note = element_45d0df0
  misc_feature 1..2: note = core
  misc_feature 3..242: note = LE
  misc_feature 243..1286: note = CDS
  misc_feature 1287..1383: note = RE
  misc_feature 11..221: note = bridgeRNA
ctatgtttgttatccagataaaaagcaaataaattagagtaataagtgaaaaagcgtgagagtagagaagccttcaaacagcttttaaagcatgtacttcagcagataatacctcacgttttttacccttaagagtcagaacagaatgtaaggaatatggcaatgctgtatatccagaatatccaaccaggagaaaagacgaagaggggttattcacttgttgatatcctaaatataatatgatgacaaacattttaaagcaggtagcgggtattgatgtagctcaaaaagaattagttgtatctatggggcgtatggatcaggaactgacattggaaattttcgccttcaaaacattccccaataacgaaaaaggatttaaagctttgattcaatggtcggcaacgatcactgatgacaaagttaaggtccgttatgtaatggaagctacaggcgtttatcatgaatcgttagcttattatctggcagacaatggctttgagttaagtatagtactacctaacaagatcagtaattatttcagaacgctggatataaacaccattacagataaaacagcttcgcaaactatagcccggttcggcctggaaagaaaactggaggtatggctgaaacccaaaaagatattcagagatcttaaacagttaacccgtgaacgggatcaactaattgctgaacgaaccctgttgaaaaatcagctgcatgcagaactggcggaagccttccccaatcagagaagtgttaacagaattaatagcaggatcaggttccttaacgaacaggaaaaagagattaaaggagatatagctgaaattgtgaagcaagacaacgaattacttaaaaaggtacagacgatcacttctatacccggagtaggtaagctaacggctataattgtattggccgaaacaaacggctttgaattaatacgcaataaaagacaattggctagttatagtggattggatattagggaaaaacaatcaggtacattagtcaagggaaaacctagaatatcaaaaaaaggaaaccggcatctacgcaaagccatgcacttaccggcattatctgccattaaacataacgagcagtttaaagtgatctttactcgattggtatccaggcatggcataaaaatgaaagcagcagtggcattgcaaagaaaattattggaactgatcttcgtcatctggaaaactgacaaacctttcgctaaagatcatttggagagcgctaacaaattaacaatactacaaaatacttagggcagccattacgaaaaatgaaccgccctaatcaggctaacttaaagccgcctttaataaatcaaatttattaaatatttggatcgcatcacagaat

SEQ ID NO: 3026 - DNA, 1422 bp, unidentified
  source 1..1422: mol_type = unassigned DNA; note = element_45d67e0
  misc_feature 1..3: note = core
  misc_feature 4..84: note = LE
  misc_feature 85..1119: note = CDS
  misc_feature 1120..1422: note = RE
  misc_feature 1146..1380: note = bridgeRNA
agcatgggtaatcgggctgaccgggttgatgggtcaggctcttgatagagttgcaggatgtttctgcaatttgaggagaacgaaatggattactatgcgggtttggatgtgtcgttgcggtcggtggctgtctgtgtggttgacgctgatggcaaacacatcttcgagcgttctgtcgcttgcgagattgaggatatcttggtctgcttgcgtgatgtgcccgctggtcagtgtcgggttggatttgagtccggtgcaatgagccaatatctttactttggcctgcaggccgctggctttgatgttgtctgtatggaagcacgacaagtgaacgccgccctttcagccatgcgcaataagaccgacaagacggatgcgcgtgggattgcacaggtgctgcggtcaggatggtacggcaaggtctttatcaagagccgcgaagcgcacgcgctaagagcgctcctgagcagtcgcaaggcggttcagaagaaatgcatcgacctggccaatgaagttcgtggcttgttccgggtctttggcttgcgcttaccaccccgtgtcgatcaggggtcattcgatgagcgggtccgtccgttgatcgaggcagacccggatttgtctcatgcacttttaccactgctagatgcgcgggctgtgctttacaaaacctatcgcgagttggaccgccgtgtgaagcaggcggcaagtcatgacgagatctgtctgcgcttcatggcgatccccggtgtcggcccgattgcggccctgacgttccgtgcggctgtcgatgatccagcgcggtttaccagctctcgcaccgttgccgctcacttcggcctaaccccgcgacgatatcaatccggggagatggataacccaggccgcatctcgaaggcaggcgacagagatgtacgtgcgacgctctatgctgcggccaatgcgatgatgatgcgctctgttgcgagttccgaaatcaagagctggggcctacgcctgatgcgccgcaaaggccgccgccgtgctctggtcgccgttgccagaaagctggccgtcatcatgcaccgcatgtgggctgacaacaccgagttccgtcatgggaaaatggagggaattgcatgacctgataccccttcctgaagccaaagacgggatcgtccctcaccggacgaggtctgtgccctctcgggcatctgaacatgccctgcctggtaatagatgacgccgaaaaagctcactgcgcaacttgaagcgcgagactaagtggggcgctccatacccaatccgacacatgcatgcagcggtccaaccgaaccggaccatcaatgactgcgaagagaagtgtgacccggatgagagacaacaatccctacagcacggaaatgaaaagatgaaatgaacttgacccaaacgcccgattagaga

SEQ ID NO: 3027 - DNA, 1500 bp, unidentified
  source 1..1500: mol_type = unassigned DNA; note = element_45d6faf
  misc_feature 1..2: note = core
  misc_feature 3..244: note = LE
  misc_feature 245..1480: note = CDS
  misc_feature 1481..1500: note = RE
ctaatgagagttagcgagtcgccatccggcagactcggtgcctggtagccgccggcaggtgagcactttttgttcccgggctttgagccctaacggaagatcgtgcccttgccggctggccgggagagttgatcgctgctgggatgtcgtgcgcgcccgctgggcgtgagcactgtttcattagggcgctgattgttctcccgcaggctgccggccagatccggctcttgggacgggagaatttatgcggttgttcgtgggggatgactgggctgaggatcatcacgacgtggagctgatggacgagcagggccgggtgctggcccgcaggcggctgccggagggcgtggcagggatggcccggctgcacgtcctgatcggggagcagctcggcgaggacgcggacgattcggaggtggtgatcgggatcgagacagaccgtggcccgtgggtggccgccctggtcgcggccgggtacacggtgttcgcggtgaacccgctgcaggcctcccgctaccgggagcgccacggcgtgtccggggcgaagagcgacactggtgacgcgcacatgctgacggacatggtgcgcaccgattcgcaccagctgcgggcggtggcgggcgacagcgcggacgccggcgcggtcaaggtggtggcgcgggcccataagacgctgatctgggaacggacccggcaggtgcagcggctgcggcaccagctgcgggagtacttccccgccgcgctggcggccttcgaggacctggacgccccggacgcgctggagctgctgggcaaggcgagcgacccggcgcgggccgcgaggctgacccgcgcgcaggtcagcgcggcgctcaagcgcgcccgccgccgggacatccccggcaaggccactgcgatcatggctgcgctgcgcagcccgcagctgggccagccaccggccatcaccgccgcctacgccgccaccgtccggtccctgatcgcggtgatcaccaccctcaatgagcaggtcaaggccctgcaagggcaggtggaggcggattttggccggcacccggacgctgagatctacctgtcccagcccggcctgggatctgtcctcggcgcccgggtcctcggcgagttcggcgacgaccccggccgctacgccagcggcaaggcccgcaagaactacgccgccaccagccccatcacccgcgcgtcggggaagaagaaggtcgtcgccgcccggttcatccgcaacgaccggctcaccgacgcgctgatggcccaggccttcgccgccctccaggcctcccccggagcccgcgccctctacgacgctgagcgcgcccgcggcgccgagcacaaccccgccctccgcaagctcgccaaccggctcaccggcatcctgcacggatgcctcaagacccgcaccctctacgacgagacaaccgcctggtcgcaccgggaaaagacccctcaatcgggtatcgcggcttgacatttaagctcctgggatgt

SEQ ID NO: 3028 - DNA, 1404 bp, unidentified
  source 1..1404: mol_type = unassigned DNA; note = element_45dfb2d
  misc_feature 1: note = core
  misc_feature 2..226: note = LE
  misc_feature 227..1390: note = CDS
  misc_feature 1391..1404: note = RE
  misc_feature 12..232: note = bridgeRNA
ctacttaacactggtgccaggacctgatcccggccaggatcgggtccaggtacccggcgagaagctctataagcggctgcccaccagcatcattggtgtggctctcacatggcttgcctctcaccgggtgccgtgccgggaatggctgaagaggggtctgcccagctcgaagtagcggtgccttcccgcacggacctcacacgccgagaccggaaggacaccaccggtggcagtcatcatcggaatggacccgcacaaacgctcagccacgatcgagatcatcgaccccaccggcaagatactggccacgggccgatacggcaccgacaacaccggctacaccgaaatgctcaccgccgcacagcgatacaccgaacgggtctgggcgatcgaggggtgcaacggcatcggccgacacatcgcccaccgcctggtccacgacggggaaaccgtgatcgacgtgccagcgaaactctcagcccaggtgcgagtgttcgccaccggcaacggccgcaagaccgatccggtcgatgcgcattcggtggcgatggcggcgttgcgggcaccggatctgcgccgtgtccaggcggattcggagttgatcgcgttgggcatgctggccgatcgccgagacgaactcggccgggctcgcaccgacaccgtcaaccggctgcaccgactgctgctggaactttttcctggtggcgcaaagaagttcctgacggccacccaagcccgaaagctggtggcgaccgtcaaaccgcgcgacccggccggcaaggtccggcgccgcctggtcgtggagttgataggcgagctggcaaccatcgaccgcaaaatcaaagccgcggacaaagaattgcgccaactcgtcaccgaccgcggttccacgctggccgatctgcgcggcatcggaccggccggcgcggctcgactgctggcggatgtcgctgacatccaccgcttccgggaccggaatcggttcgcgtcctggaacggcaccgcaccgctagatgcgtcctcgggtcagcagcaacggcatcggctctcgcgcgccggaaaccgcaagatcaaccgcgtcctacacacgatggccatggttcaactgcgccgtcccagcgccgggcgcacctactacgaccgccgcagagccgacggcaagacctcgatggaagcgatgcgggccctgaaacgacgactgtcgaacgtcgtctacacccgcatgctcgccgaccagcaaaagtgggaaaaggtaagcccgagagggcaatcgggggcggctactgactccagcgcgaccggctcaaccccgcacaccggcacttcggacaagccacaacccggactcaccaccaaccagaataacgtcgacctgcaacctgcgccttgacacgagaggggagc

SEQ ID NO: 3029 - DNA, 1155 bp, unidentified
  source 1..1155: mol_type = unassigned DNA; note = element_45e47d8
  misc_feature 1..2: note = core
  misc_feature 3..207: note = LE
  misc_feature 208..1143: note = CDS
  misc_feature 1144..1155: note = RE
  misc_feature 12..209: note = bridgeRNA
cttgtcttatgattttggcagttcctatgcgaagctggaacagctgcccggcacgtcatttatgtcaggcagcggcggaggttggatcgttcccctcttggtcgttgtggaccgtcgctgagtaaggtcacctccgtctttttttgaaacctgaacggatacttgggctttgggcccacatgacaagacaaggttaggaagagacacatggaagataccattgggatcgacatttcgaaagacacattggacgcttattggttgtcctcgcgagagcacaggcagttttgcaatgacaaagctggcgctaaggcactcgcatttcgggcgagaaaaacagaagtttcccgcgtcatttttgaagcaaaaggcatttatcacaggtgcatcgaaacgggcttggctcaaaacgggatcagctttgcacgggtcaatccgcgtcaggcccgccggttctgcgaagggactggccagctggctaaaacggaccgggtggacgctgcgctattagctaaaatgggcgcacttctggaattgagagcggaccaacccaaaagcgaaacacttcatgatctcaagcagttggcgactgccaggcttgcattgatcaaagaccgaactgcagcaaaagcacgacttaccgcgacgacgcacaggatgctttcccagcagatcaaacgacgtctaaaacagatcgaacgtgacttgtcgcaagttaccgaggcaatcgataccatcgttgcggcagacaaagatctcgctgtacgcaccgaaattcttacaagcattccgggcatcgcaaagataacagcctgtgcgatcctaaccgaaaggcccgaactcggacatttgagtggcaagcaagcagcggcgctggcgggccttgcaactatatcgaggcaatcgggaaagtggcaaggcaaggaacgcatccagggcgatcgtgccagcgtcaggcgcgctatctatttgccggatattgttgatacacgcttcaatccagacatgaaagcaaaatacgaacagctgatatcggccgggaaatgcaagaagctggcgatcacagccgttatgcgaaagctgattgtcaccgcaaatgcccttctgcaggatcagcgaaaatggggcgaatatccagcttgaccaatacggata

SEQ ID NO: 3030 - DNA, 1504 bp, unidentified
  source 1..1504: mol_type = unassigned DNA; note = element_45e635b
  misc_feature 1..5: note = core
  misc_feature 6..297: note = LE
  misc_feature 298..1389: note = CDS
  misc_feature 1390..1504: note = RE
  misc_feature 53..267: note = bridgeRNA
ctgctataaataagatgtgtagaatctctcgataattatccgttttccttgcgcatttaccgtatgctatcctcgtccaacggtgacgatgatataatttcctcatgcagacagaggttccctgctttatccctgcggcaccgtccgctttacagcagtatgggacctctcccttatgggatttcatgaatgagccggatgcgggagtgatctttccgcagatttctatgcaggatatgactcataaggacatgaggaactgtctgtacatcaacaggaaaggcaggtgccaacgctatgttcattgtcgggatcgacattgccaaacggagtcacgaagccatcatcatcgctgaggatggccaggttgtccgcaaggcattcagcttccggaataactgtaccggctacaatctgttactggaacaggtacggagactgacccttgtaaagagccagatcgtattcgccatggaatccaccgcccactattggctggcactctacgccagacttttgaaagacggatacacagtcctggttctgaatcctatccaatccagcaacgtgcctcaggacaaaatcctggctctgcgagagctgtgccgcagtcgcgcctatctggtagacatggccgctgatctgaaacggaagctgattgccttattggacagaatatttccggagtacgaatccctgtttgagtctgttttcagcaaggcttctattgccgtactaagcaaatactctacaccccaaaaagtgaaaaatgcgcatctcggaaaattgacggatatccttatggaaagcagcaacggacattttggcgagtggaaggcccatcaactgaaagaggccgcctgcagcagctttgggatcgatgacagcggcggcgtgtattccacgttgcttgggatgttccttgagcagatcctgtctttaactgcacaggcagattctctggaaaaacagatatccgtattcttccaagagtttaataaccctttaacctctataccgggagttgggactgttctcgccgcaacaattttaagcgagatcggtgacattactcgcttttcttctgccgataaactgttggcttacgcaggacttgatccatccgtgaagcagtccggcgaatttaagagcaaccagaatcgtatgtccaagcggggatcaccttatttacgtcgtgccatttggttggcgtccacggtagcagtgcatcgtgatccgatgtttcaaacctattacgaaaagaaaatatccgaaggtctgcattacatgaatgtgattggtcatgtcagcagaaagatgaccgctgtgatcttcgctgtcctccgggatggacaaccgtaccaacccattttgcaatctgccggttgaccgagctgcatcattttcatccggcccgcaaagggtctggttctttgcgcccttttccgatataccccttatacacgcgaactgtaattttatcccttgacaaacccatagccga

SEQ ID NO: 3031 - DNA, 1464 bp, unidentified
  source 1..1464: mol_type = unassigned DNA; note = element_45e6907
  misc_feature 1: note = core
  misc_feature 2..252: note = LE
  misc_feature 253..1449: note = CDS
  misc_feature 1450..1464: note = RE
  misc_feature 44..223: note = bridgeRNA
cgttatgttgttgagagctccttaactccgaggaatataggagctgtcggccgaccaatctcggcatggtgtcttgcccctgcttatccaatagtccggggggtgttgccaccgagattgggatggcagcaaggtgattgctgattaggggcgcggcgccaaaaatggacgcctggcataacgtggatgtaagactttgctaccggcggttggtcgaccttgaacacaaactagttcaaaggagcaacagtcatgaacaccacggacatcgatatttttctcggtctggacgtcggaaaaaccgatcactgggcctgcgccgtcaccaacgacggcaagaaaatctggaacaaaaccctacccaacgatgaagccaaactcatcgtcgtctaccaaaacctcacagctcaaggcaccgttctaatcgtggtggaccagccggccaccatcggtgccctggcagttgccgtagcccaacagctgggtattcaggttgcctacctgccagggctgaccatgcgacgcatcgcagatatgtatcccgggacggccaaaaccgacgaaaaggacgcgttcattatcgctgatgcggcacgcaccatgccccataccctgcgcagcctccaactcaccgacgaagaagaagccgcgctaggcatgctcaccggatttgatcttgatttggcacgtcagatcacccaaaccagcaaccggatccgtgggctcttcacccagatccacccacctttagagcggctcttaggtccacggctggactatgacgccattctagaagtcctcgctacatggcccaccccagcagcgttgaagcatgctggcacagcgcggatcgatgcgaaactcaagaaacacggagcccgccggcacaccgcctgggctacggccatcagggatgcgctagacgagcaaagcgtcaccgtggtcggcaccgatgcggcaggactagtcatcccgcacatggctcgccagctgatctcattgcacgctcagcgtgctgacgtcgctaatcacctcgaagccatggtggaggcccaccctctttacccggtcctgacttccatgccaggggtcgccgtcaggaccgccgcgatcatcatcgccgagatctccggcaagactttcgccagcgccgccgcgctggcctcctacgctggattggctccgaccactcgccagtcagggacctcgatcaaatctgaacgcgtcagccattcagggaacaaacgattgaaacgagccctgttcctttcagcgttcgcgtccatccgttttgatccgaccagccgggaatactatgaccggaaacgggcccaaggcaaacgccataaccaagcgctcatcgcgttagcccaccgccgactcactgtcctgttcgccatgatccgagatggctcactttatgatgttccggagctgaagattgcttgactttcaacatagggg

SEQ ID NO: 3032 - DNA, 1586 bp, unidentified
  source 1..1586: mol_type = unassigned DNA; note = element_46018df
  misc_feature 1..2: note = core
  misc_feature 3..249: note = LE
  misc_feature 250..1422: note = CDS
  misc_feature 1423..1586: note = RE
  misc_feature 3..227: note = bridgeRNA
ctcgtattatatagtagtagtgtttatagatcctctccaaggtctttatgctatactgttggagatactgtggattgtttttttcttcctaccactcgatggtttcagaaaggctacaaccacagtctctttgtatcgttgttaatcagttagataccgcatgacggttgatttagaacgaggttacaatcgcaaagagtaccagtggttctaaaacagtatcaaatatctattcaaaggagtactgccatgatttacgtaggaattgacgttgccaaagacaagcatgtttgttttattacaaactcggatagagaaatcttatttcaatcttttcctatctcaaataataaagaaggatttgaaaccttatttcatagaattgaatcggttgctgaagatttgaacaaagtaaaagtaggactcgaagccactggacactacagttacaatcttctgggtttcctccttgataaaggtctgaccacctatgttaccaatccgttacataccaatctttacagaaaaagtctcagccttagaaagacgaaaacggataaagttgattcccgtaccattgccactatgatgatgtctgacatggacttgaagtcctactcagatacattttaccacaacgaggaattaaagtcactcacccgttatcgttttgataaggtaaaagcaaagctcaaatcctctgtttccaggctagtaaacatccttttccctgaactggaaaaacttgttccaacgcttcatctggcttctgtttacaccctattatccgaatttcctggtgcttctcttatagcagctacccaccttacaaggctgtcaaatctgctttctgaaagctcaaagggtcattatggcagggatagtgccactcttttgcgtgaagctgccaaaaactccatcggctctgttatgccagcaaaatcgatggaacggaaacataccatcaagctcatccaagaattaaccagccagattgatgaaattgaaacagccatcaaacagatcatggatgaagaaatcaaatcccctatccttactatccctggcatcagttaccagatggaagcaatgattattgccgagattggcgattttagtagattcgattcccctgataaaatacttgcatatgcaggaatgtcaccatccacctaccaatctggtcaactagacaacggttattcccacatggaaaaacgcggctccagatatcttcggtatgccctttacaatgccacaaaatatgtctgtcattgggataaatcctttggttcctatctggaaaagaaacgcttggagagcaagcattacaatgtcgcattatcgcacgccgcaaaaaaacttgtgcgtctgatttttgcattagaaaaatcagggcaggcatacatatcggcagtttaacttattctacaaatagtttttttcgagtgccagcaatgacactctgttcgtcatgcagttttcaaggttcatcgaaccatttcctggttctttttgtatctgaaatgccttttagcagttcattcaaaaaattttaatttagatcttgacttttaatagttagt

SEQ ID NO: 3033 - DNA, 1500 bp, unidentified
  source 1..1500: mol_type = unassigned DNA; note = element_4601f95
  misc_feature 1..4: note = core
  misc_feature 5..259: note = LE
  misc_feature 260..1282: note = CDS
  misc_feature 1283..1500: note = RE
  misc_feature 80..238: note = bridgeRNA
atagctatctcttaggtttgcagtgtgaaaataattttgagaagcaaggttgatttctttcttttgttgtaggaaagcaaggaattaaccgactgtcagaggtaaactatcgatagctataaattaaatttatatcccgaataagaccctgatagtctggctaagagacgccagatagagtattggcacattgaaggccattaagagtagtagcgcataagccattggttaattccaagccaaagaacacaacaaaaatatgaaaaaggcttttattggaattgacttctcgaaattaaaattcgacgtcgctgtttatcttgctgatgcaaaagagattgtatcaacaaatatatttgaaaatcagccatctggctatcagcaactgattgcctggttgaaagaggttttagactttagcaaatcagatatattgttctgtggggagcatacaggatattattcgagtaatttatctgtatatctacacgaatcaggttatgatttatggttggtttccggtcttgaaatcaagctttctcagggaataaagcgcaaaaaaacggacaaagcagattcctgctatattgcacaatatgcctgtcggtttcaagataaagtaagcctataccaaccaatgccagcggccttagaggaagtaaaagatttgctttcgtaccgcgagcgtctagttgagcttcggaagatacttctgacttcagccagagagttgaaacgagtaaggataagcaaatcaagtctttatatttatgacgagagtctggcgcaggtccgggagctaagcaagaaaataaaagagtgtgagaagcagattgaggaaataataaagcaggataacacactggagaccaattataagctaatgaatactgtaaaagggattggtttggtaaacgctgctttaatattggtcactaccgggaatttcacgttgtttactgacccgaggaaatttgggtgctatagtggtgttgttcctttcgaacataattcaggaaccagcgtccgtggtaaaacccgtgtaagccatatagctaacaaaaagataaagtcgcttctcactcaggctgcaagaaatagtgttagatatgatccgctgcttagagactattaccagaggaaagttgcagaaggtaaggcgaaagcgctggttttaaataacgtaagaaataaattgatacatagaatttttgccgttgttagaagtggacaggagtatgacttaaattacatcaacccactgctgcgacaggctatataacaatttttcttcgtcgtttctgactttgtaaacgtcaagaaaatggagaaaataatgcgagcaagatttattggaaaaatactaccaaacgaagtttgtgtggagattttttcaataaccgaaggcttgatcttgctcgtgttattttcggaatttaaatttgtgagcaaagacagagtgataaaacattcttttaacacatataacttggaataacc

SEQ ID NO: 3034 - DNA, 1177 bp, unidentified
  source 1..1177: mol_type = unassigned DNA; note = element_4605604
  misc_feature 1..2: note = core
  misc_feature 3..206: note = LE
  misc_feature 207..1154: note = CDS
  misc_feature 1155..1177: note = RE
  misc_feature 3..181: note = bridgeRNA
cttgtatggtaggacttgaagggaggagaagggacaaggctcgattctgactgttgacgcagtacagaccgtgggagagttcgcccctcctcctttcacccaagcgccgataaagaatgcatcgggcctagaccgacgataggaacaagcctgcgcccctgggtgagcccttcaagtgcttaaaaccatatcccggaggaaatcctatggcaatgccggtttctgcttcaaagccgatcgtgggcgtggatgtcgccaagaatgagttggtgatttatcacgccgaactgagcctgcttgaagagattcccaacaacaaaacagccatcaagaagtggttgaaggccttgccgagcacggtggccattgccgtcgaagccaccaatatctaccacttggagttcgccgatctggcctacgaggccggatgcgtgatttacatggtgggcggctatgaactcaagcattaccgcgaaggtgtgaaggtccgtgccaaaaccgatgcactggatgccaagctgcttgctcggtatctgaaaaatgaacatgaagagcttcacccatggaccccgccatccccgctataccgccagctgctgagtcttttccgccgccgggcggcgttggtccaggcaagggtcggcctggtgcaaagctgggccaatgagccgctgctcaagaccgcttttgccgaacaagtgaagtccatgcaacagcttgagatgctgatcgagaagacgatcaacgatcagctcaaagaagccggtttgctgggccagttaaaacgttgcctgaaagtggaaggcattggttttttgacaggtgcgcgtttgatcacggcgtttcagcggggtgacttcagaaacgcggatgcctttatcgcctttctgggaatggatctgcgggtatcaaaatcagggcaaaaagatggccgccgcagtttgaccaagcgcggtgacccggaagctcggcggctgctgcacaatgcggcaatgtcggcgagtcgcaccgaggcctggaaagatttttatcaagaacaaagagctcggggtttcagcacgactcaagcattggtgatgctggctcgaaagctcgctcgggtggtattcgctctgctaaaggggcaggacgaataccaaccgaaagtcagttgagggcttcccctcaaccatagaat

SEQ ID NO: 3035 - DNA, 1408 bp, unidentified
  source 1..1408: mol_type = unassigned DNA; note = element_46099e9
  misc_feature 1: note = core
  misc_feature 2..69: note = LE
  misc_feature 70..1101: note = CDS
  misc_feature 1102..1408: note = RE
  misc_feature 1188..1402: note = bridgeRNA
taatgggatggtccgcctcctctcacccgcaggagcgggactataagagagatacagaggaggcatcctatggaacagcacacaatcggcgttgaccttggtaagacagtatttcatctggttgggctcaaccgacttggcgagatcgttgtgcgcaaaaagctgtctcgacctcaactgcttcgctttacagcaaacctgcacgtgcagttgattgggatggaagcttgtggcggagctcactttttagggcgtgcgctgcgagagcaggggcatgaagtacggctaatcccggcccagtatgtgaagaccaacaagagtgactacatcgacgcggaagcggtggggcgaccgacgatgcggcggttcgtgccgatcaaaaccgaccaccagttggatctacagtcgctgcatcgggtgcgagagcgctgggtgatgcgacgtacggcggtgatcaaccagactcgcagcttgctgctggagcgcggcatcaccttgcgcaggggacgatgtcatctcgaaacggcattgccagaaatcatcgaagacgccacggcgaagctttccggcgcactccgcattttgttgactcagatgaaactggagctcgaccagctggtcacgcgcatcgaagaggcagatgccgggattaagcaggtcgcacaggagaacgaagcctgccaacgcctgattaccataccgggcgtgggcccggtcaccgcgactgctctgattgctgcaatcggaaacggcgctgccttccgcaagggccgggagtttgcagcctggatcggggttgttcctcgcgaatactctacaggaggcaagcaaaagctcctaggcatcagcaagcgcggtaacccttaccttcgaaggctatttgtacagggagcacgatccgtcatgatgcacaggaccaagcagtcctccggtctcagccagtggctcgaaaagctctcgctgcataaacatcacaacatcgctctcattgcgttggccaacaagctggcccgtatggcatgggccgtactcacttcaggacaggtttaccaacctcctgtcttgactgatattggatccgcaaaactggtctgcagatgaagcttggctcgccaagcttggaaatcgcttcacgtgattcccacatcttcagcctagcgacgacgtcaacgttttcagctttcctgccaggtctgctggcgaatcgtaagatggcacaacggtcgaaccggcactctctaaacctgatacgccaaacagccctcgaagctgaattatttaataggaagagagcgcagcgcattccatcatggccaggagtcgcacactccaatcaaggccgcatacattggcgcagaccattcggccaccttcactttttacttgcaacagggcggcggaccataca

SEQ ID NO: 3036 - DNA, 1491 bp, unidentified
  source 1..1491: mol_type = unassigned DNA; note = element_460b044
  misc_feature 1: note = core
  misc_feature 2..252: note = LE
  misc_feature 253..1476: note = CDS
  misc_feature 1477..1491: note = RE
  misc_feature 43..223: note = bridgeRNA
cgttaccttttcggcggcgcctggatcgatcaggatgagcaggtgccggccagccggtcctcggcatgatcgttgcccccagtcgcactcatgatccggggggtgttgtcaccgaggaccggtctggtgatcacggatcgctgatagaggcgggagctcttcttcgggagggcctttgtaacgtggatgccgagcgtgatcacctctgagctggccagcacgaccatggcctagctgcccaggaggaacgccatgaccaccccagcaccggccgtgtacatcggcctggacgtcggcaagtccgatcaccacgccgtcgccctcaccagcaacggcgagacggtctacgacaaggccctgcccaacgacgagactcgcctgcgagccatcctcgacgaactcttgaagacccatgggcccgtgctgcttgtcgtcgatcagccggccacgatcggtgcccttccggtcgccgtggcccagtcatgtgccggtgttgaggtggcgtatctgccgggactggccatgcgccggatcgcggatctgcacccgggctcggccaagactgatgcccgtgatgccgcgatcatcgccgaagccgcacgcaccatgcctcatacgttgcgcgccattcgcgtcgatgacgagcagatcgctgagctggccatgctcgccggcgctgacgatgatctcgccgcccagatcaccgcggcctccaaccggctgcgcgggctgctgacccagatccacccggccctggagcgggtccttgggccgagaatcacccacccggcggtagctgatctgctgggccgctacccgaccccggccaagctgaagaccgcaggaccaggccatgtgcgcgcccggctgcgcaagcacgcaccccgactggcagcaccgctcaccgaggagatcttccaggcattgggccagcagaccgtggtcgtggctggcaccgaggccgcagccaccgtggtgccgatcctggccgaacagctcgccggactgatccaccagcgcaacaagctcgccacccaggtcgaagctgtcgtggaggcccaccctctttacccggtcctgatctcgatgcccggggtaggggtcaggaccgctgcacggatcctcaccgaggtcgtcggcaaggacttcgccgatgccgggcacctggcctcctacgccggcatcgccccgatcaccagacgctccgggacctcgatccgcggcgaacacgcaccccgcggcggcaacaagcgcctcaagcgagccctgttcctctcggccttcgcctccttgcatcacccggcctcgagggcgtactacgaccgcaagcgcgctcagggcaaacggcataaccaagcactgatcgctctggcccggcgccgcaccgacgtgctctacgcgatgctgcgcgatggcaccctgtacgaagacccgaccatgcctcagaccccgtcgacagtcgccctagcggcttgacgaaaaccatagagg

SEQ ID NO: 3037 - DNA, 1390 bp, unidentified
  source 1..1390: mol_type = unassigned DNA; note = element_461dd5d
  misc_feature 1..2: note = core
  misc_feature 3..85: note = LE
  misc_feature 86..1114: note = CDS
  misc_feature 1115..1390: note = RE
  misc_feature 1091..1377: note = bridgeRNA
agatgggatggttgccgccctccccaaacggcatcgcaatgtgccagaagagtggcgtagagccacgaaacggagagagcggcaaatgaaggatacaatgatcggcgtcgacctggcaaagaatgtcattgtgcttcatggaacctcgctgacgggcgaaatgagatttcgcaagaagctgtcacgtggacaattcattcagttcatgcaacgtcaaccggccgctgtctttgttttggaggcatgcggcagtgctcactattggtcgcgcgagttgatggcatacggccatgaagtcaagctgatcgcgccgcaatacgtccgcccctttgtcaagcggcaaaagaatgatgccgctgatgccgaagcgatcgccattgctgcacgacagccggaaatgcgcttcgtggagcccaagacgccagaccagcaagcgaaggcggttctcttccgggcgcgggaacgcgtcgttcgtcagcggacggagctggtgaatgccctgcgggccgtgctttatgaatttgggcagaccgttccgcagggcattgttcatatcaagagacttgaggcggtcattacggatgacgcaatcgacttgccagatctcgtgcgagaagagtgccgggatctactcgcacaaattgacgcgaagacaaaccgtatcgaggcgaagacgaaacagctcgccgagctttccagaaccaacgtcacggcacggcgccttcagaccgtgccgggtgtcggaccaatgattgccctggcaattgaagccttcgtacctgctatggggaccttccgttgcgggcgtgattttgcggcgtggcttgggctcgtgccacggcagttctcttccggaggcaaagagcggcttggacgcgtatcgaaggcaggccaggctgacatacgccgacttctgatcatcggtgcgatgtcgcatgtgagagcggcaagccgcaaaccgcccgcgccgggttcatggctggcccggatgctggcgaggaagccgaaaatgctcgtggcggtcgcgctggcaaacaaaatggcgcgaagactctgggcaatggtggcgaaacaagaggattaccgggagcaagcgttgatgggggtcgtatgatttatactgagctgaatgcgctgacacaccggtaaaagaggtgtgaaaagtcgataacctgaatgggcgcatgatcgaaccgatccggatcaggaaagccagtttagcactaagagcgtagcagctcggaaagtagatttttggagcccgatccgcagatcaccataccggccagcggtctttggaatgccgcaatcaaaggcctgacagaagaccgcactcgatcacacgttcaatcggtcagaaacttcttgcataacgggcggcaaccacaga

SEQ ID NO: 3038 - DNA, 1412 bp, unidentified
  source 1..1412: mol_type = unassigned DNA; note = element_462994f
  misc_feature 1: note = core
  misc_feature 2..92: note = LE
  misc_feature 93..1127: note = CDS
  misc_feature 1128..1412: note = RE
  misc_feature 1183..1404: note = bridgeRNA
caatgggatggacgctcccaccttacgcggcatcgaaatgtgccaaagtggagatgcgatttcatccacctcaacagacaggagcgtccgatatgaaggttacaacagtaggcatcgatctggccaaaaatctcttccaattgcacggtgtgaacgagtacgggaaggttgttttcaaaaagcaattgcgccgcgatcagatggccgagttctttgtgaatttaccagcctgccttattggcatggaagcctgcagcagtgcccatcattgggcacgcaagctgcaacagtttggtcacaccgtcaagctgatggctccgcagttcgtcaagccctacgtcaagactaacaagaacgatgcagctgatgccgaggcgatctgtgaagctgtgactcggccaaacatgagatttgtgcccatcaagaacgtcgaacagcaagctgtccttgcgttgcactgcgtacgtcagggctttgtcaaagcgcgcacggcccaagccaatcaaattcgtggactactcggcgagttcggactgatcgttccccaaggcattgggcacatcgccggtcgggtccccgagttgatagaggatgccagcaacgatttgcctggctcatttcgattgcttgttcagcgcatgctcgatcacctaaaggaattgggtcgccaagtggatgaactggagatgcaaatcgttaaatggcaccgccagagcgacgccagcagcaaacttgccaaggttcctggaataggtcccatcaccgccagcgcattggttgcctcgattggtgatgccaagagttttgacaatgggcgtcaagtagcagcgtggctaggcttagttcccaaacagcattccagcggaggaaagcagaacctgctgggcatcagtaaacgtggtgacacgtacctgcgcaccatgctcatacatggtgcgcgtgcagtcatctattgggccgaaaagaagcctgacaactgtagctggatcaacagaatcgtcagccgccgaaataggaatgtggcctcggtggcactggctaacaaaaatgcccggatcgtgtgggcattgctggcccatgaccgcgaattccgacctgactacacgaccgcgaaagcgtccgcgtagtcaggtcggctggaagaagtagaacgaaagcaaagaaaacagggagaactgaacgtccgattgctcaagcgagcaggaaatgatggcaagacaggtaagaccgtggttggcaaagcccgttccattgcgagcacttcgagtgcacacgaccgattggggcgtcaaccagcaaattccattagggacgtgatcgaagatcacacacatagtccggatatacgggtgcaatctttaccttcaagtcgtcatcgaatgagagcttggcaaaccgggagcgtccatata

SEQ ID NO: 3039 - DNA, 1465 bp, unidentified
  source 1..1465: mol_type = unassigned DNA; note = element_462d3c4
  misc_feature 1..3: note = core
  misc_feature 4..295: note = LE
  misc_feature 296..1450: note = CDS
  misc_feature 1451..1465: note = RE
  misc_feature 11..236: note = bridgeRNA
tccttaagtttgtaggtgcagttgctgcgtgttgttacgttgtgctgcgacccgggtgggtcgggtgaggcatccatttctgttgccggcctggtggtgcggcttgagaggactggccgcccggcctgcctggacttcctcgggctgctgattgagatctgcgatgtgatcgcttgtttaaggaaatgctggcggggttgtccatggggatcgtgttggcagacaagcgaataggagatcgattgcaacggaccggttgtgggctggtgttgatgtcggcaaggagcatcattgggtgtgtgtggtcgacggtgcgggcgctgtggtgttgtcgcgcagactcgtcaacgatgagcaatcgatccgtgcactgattggcgagatcgagttgttgggtgatcaggtgtcgtggacggtggacttgaccacggtgtatgccgccctgttgttgacggtgctggctgatgccggtaggtcggtgcgttacctggcgggccgggcggtctggcaggccgcgacggtctatcgcggtggggaggccaagaccgatgctaaagatgcccgggtgatcgctgatcagtcgcggatgcgcggtaatgatctgccattgctgcaccccgacgatgacttgatcaccgaactgcgcatgctcacggctcatcgcagcgatctggtcgctgaccgcacccgcacaatcaaccgactgcgtcaacagctggtggcggtctgtcctgccctggaacgggtcgcccagctgagctctgaccgcggctgggtcgtgctgctggcgcgctaccaacgccccaaagcgattcgccagagcggtgtttcgcggctgacccggatcctgaccgacgccggcgttcgtaacgccgcaaccattgccgcggctgccgtggcggcagccaagacccaaacggtccgactgcctggcgaacaagtcgccgctgggctggttgccgaattggccaagggggtgattgccctcgatgaccgcatcaaacaaaccgatgccgacatcgaggaccgatttcgccgccatcccctggccgaagtgatcaccagcatgcccggcatgggatttcggctcggcgcggaattcctggccgcggtcggcgatcccaaactgatcgggtcggccgaccagctcgccgcctgggccgggctcgcaccggtatctcgcgattcggcaaaacgcaccggccgactgcacacccccaagcgctacagccgccggttgcgccgggtgatgtacatgtccgcgctgaccgccatccgctgcgacccggcctcccgcacctactaccagcacaaacgagaccaaggcaaacgaccgatcctggcaactatctgcctggcccgacgccgcaccaacgtcctctacgcactcatccgcgacaaccgcacctggcaacccgactcacccccggccacccagtccgcggcttgacttcgtcatagagag

SEQ ID NO: 3040 - DNA, 1386 bp, unidentified
  source 1..1386: mol_type = unassigned DNA; note = element_463975c
  misc_feature 1..2: note = core
  misc_feature 3..246: note = LE
  misc_feature 247..1293: note = CDS
  misc_feature 1294..1386: note = RE
  misc_feature 33..224: note = bridgeRNA
ctcctatgtttgtcatcaaataaaaaagggaataaattagaaatcttaagtgaaaagaatgagagttgggtcgcgtctaaacaacttttatagtatgtacatgtagagatcaggcctcattctttttaccttttagagtctgaacagaatgtaaggaatacagcaggtctgtatattcaggatatccgaccaggagacaagacgaagaaaggttgttcacttaagaaaatacaaacctaataagtgatggcaaaaattttaaaacaggtagcaggcattgatgtagctcaaaaagagttggtagtttctcttggacgtatggatgattctattgaaccagatatctatgctttcaaaacatttgccaataaaccatctgggttttctgctttagaagtatggataaagaaacatacggataaacaggtaaaggtccggtttgtaatggaagcaacgggcgtttatcacgaaaaattagcgtatcatctttcaggcctgggctatgaagtaagtattgtacttcctaataagatcaacaattatgctaagtcactcgaaacaaaaacggtcaccgacaaaacagcatcacaggctatctgccagtttggactggaaaagaagattagtttatggcaaccaccaaaaaaaatattcagagaccttaaacaattgacacgcgaaaggaatcagataatcgcagaacgtacggtagctaaaaatcaactgcatgcagaaaatgcagaagcgtttcccaacgaaagaagcatagccaggctacaccaacgcatccggttattcaatgaacaggaaaaggaaattaaagcagacctcgctgaaataatcaaaaaggataaggaattggttgaaaagataaacaatatcagcacaataccaggggttgggaagcttacagccataattaccatggcagaaaccaatggctttaacctgattaaaagtaaaaagcaaatcgaaagctatgcgggatttgatgtaaaggaaaagcaatccggctcatcggtaaaaggaaaatccaaaatatcaaaaagagggaacaggcacttacgtaaagccatgtatatgccggcattagcagccatcaggcatgacgatcgctttaaagctgtatttattcggctggtaagtaaacacggtattaagatgaaggcagctgttgcggtacaaagaaagctactggggctcatctatatcgtttggaaaactgatattaaatatgatcccaaattcctgaacaaagtaacagagaacgaaaaagtagttataaatagttagagcggtgacatcataagatgaaccgccctaatctggctggcttgtgccgccttaataaacaaatctaaaaattatttgatgttaacacagaat

SEQ ID NO: 3041 - DNA, 1408 bp, unidentified
  source 1..1408: mol_type = unassigned DNA; note = element_464b5bf
  misc_feature 1..2: note = core
  misc_feature 3..272: note = LE
  misc_feature 273..1388: note = CDS
  misc_feature 1389..1408: note = RE
  misc_feature 14..240: note = bridgeRNA
ctaatgagttctgggagcccgccatccggcagactccgggcggtagccgccagcaggtgagcactcggtgctcctggactttgagtcctgtcgaaagaccgtgcccctgctggttggccgggagagtcgatcgctgatgggatgtcgtgcccgctgctcgcggcgtgagcactgtgttcattaggccgctgatggttctcccgctggctgctcacggtgatcggcatgaagggtgggagaggcgttgcggctgttcatcggggacgggttgggtggaagaccaccacgatgtggaggtgatggatgcctcggagcgccggctggcgaaggcccggctgcccgagggagtgaccggcatggcccggctgcacgcgctggtcggcgagcacgccggcgacgccgccgatgaggtcgaggtgttggtcgggatcgagaccgaccgcggcccgtgggtgcaggcgctgctcgccgctggctacaccgtgttcgcgatcaacccgctgcaggcgtcccactaccgggcgcggcacgccgtgtcgggcgccaagagcgacgccgccgacgcacacgcgctcgcggacatggtccgcaccgactcccaccagctgcggccggtcgccggggacaccgccgccgtcgaggcggtcaaggtcgtgacccgcacccacaagaccctgatctgggaacgcacccgccacacccagcggctgcgacacgcgctgcgggactacttccccgccgcgctggccgcgttcgacgacctggacgccgccgacaccctggaactgctggccaaggcaccgaccccggccgaggcggccaggctgaccgtcagccagatcagcgccgcgctgcgccacgcccaccaccgcgacgtccccaccaaggccgcggcgatccaggccgcgctgcgcgcggagcacctcgaccagcccgacgtcgtcaccgccgcctacgccgcctcggtccgcgcgctgatcgcggtcctggccgtgctgaacgagcaggtcaagaccctgcaagggcaggtggccgagcattttggcgacgaccccgaccggtacaccacggccaaggcccgcaagaactacgccggtacgtccccgatcacccgcgcctccggcaggaagaagaccgtctccgcccggttcgtccacaacgaccggctcgtcgacgccctcatcacccaggccttctccagcctgcaggcgtcccccggagcccgcgcctactacgaccggcaacgcgaacgcggagccaaccacaacgccgccctgcgccagctcgccaaccgcctcgtcggcatcctgcacggctgcctcaagacagccacgccctacgacgaagcgaccgcctggccgcgtcacgccgaacagctcgctgcttgacacatcagctcctgggatgt

SEQ ID NO: 3042 - DNA, 1301 bp, unidentified
  source 1..1301: mol_type = unassigned DNA; note = element_464b821
  misc_feature 1..3: note = core
  misc_feature 4..177: note = LE
  misc_feature 178..1215: note = CDS
  misc_feature 1216..1301: note = RE
  misc_feature 35..196: note = bridgeRNA
cattgtatcttcttttttttagtatatttgcataaagtttcaacatcaagtgtggaataagaccgaattttcattagtcatttagactgtgaactatgttctgcccccacacttccttacatcagaaaccggatagttcattgggctttgaccccgcatttgcaatgatggctcacgatgttcgatgttgttattttaaaattaatattgactatgacttacataggaattgatgtcagtaaggcgactttcgtggtcgcttattcttctgccaaggacagtaagacaaagacttatgccaataccgcttcaggtatccacaagtttatccagactcttccttcagaagcacattgtgttatggaggcgactggcaattacagtatgctgcttctctatcttttggacaaagcgaacataacggtaagtatggagaatccacttaagatcaagaactttgcccgcgtcatgctctcagttgtcaagactgatgaaatagacgcaaaactcattgccctatatggagagaggatgcagcccaagccattcaagatgcgtagcgattctctaatgctgcttaaacagaagaggaccgtgcttcgtcagcttaaaaagcagcttgttgccaacaccaaccttcaagagtcaatggaggctctgccttttgtcgactccatcagcaagaaggtcctggagaagaccatcaagttcctacagaagcaaatcaagcaaatggaggaagaactggcatctctagccaacatagaatacaagaagcagatgagcctcctcacttccatcaagggaataggcgttactcttgctactgcactcatcgttgctactggcggctttacttactttgataatgccaagcaactcacccgctatttgggcttgtcgccgacatatcagcaatccggtacttcagtcaatgtcaaaggtcgaattaaccacaatggcgattcttatctaaggagccagctttatgtggccgccttctcatctcttcgttgtaacaaagagtgcaaggcctgtttcgatcgcctgcggtctaacggtaagcctggcaaagtggctgtcgtggctgttgccaacaagctagtcaggcaggcttttgccgttgtcactaagaacaagccgtatattgatggctacaagtctgtcaagccagaaaacacccctgctgagggagcgcctgcggcaaggggctgagcagtcagccccgacgagcaacaacacgactgtcttgcatatttatgctaactatcgttaattatattcaaaaatctattatagtt

SEQ ID NO: 3043 - DNA, 1507 bp, unidentified
  source 1..1507: mol_type = unassigned DNA; note = element_464bfb5
  misc_feature 1..2: note = core
  misc_feature 3..204: note = LE
  misc_feature 205..1482: note = CDS
  misc_feature 1483..1507: note = RE
  misc_feature 6..204: note = bridgeRNA
ctgatggctctaccctcctctcttgaggtcttccccggggaacgctttccttgcttgtccctggaggactgatgtgagacggcgtcctcggggaacggcctcagaggtccgacgtccacaagggtgtcgtcccacgaggactggtccatcagcacggcgccgagcctctgccctaacggcttccccatgacggaaggagtcgatgtgctcggagtggggatcgactggtccgaggagttccatctcgtcgcgctgggccgccccggggaggacgtcatcgaggtcacccgcgtggagcacagccccaaggcggtcgacgcgttggtggcgaagatcgcggagctcgagcccgacccgggtgaggttcgtgtcgtgatcgagacccgccacgggctgctcgtcgagcgtctcgtcgacgcgggctacaccgtggtcccggtgaacccggatctcgtcgcgcgccggcgcggcccggccaagtgcaaggacgacgccgaggacgcccgcatcgcatgcctgatcgcgctcgatcggcacgaacggctgcgcccgctcatcccacacggggagatcgccggcgagcttcgcgcgatcgcgcgcgacgacgagcgtgccgcccgggatgagcggcgtctcggcaaccggcttcgccaggacctgatctcggccttccccgcggcgcttcagatcggcggtgatgacctcggtgcgccgacgttcctgcgcatgctggagcgctggcccaccacgaacgccctggtaggcgcatccagagcagagctcgtggtgttcgcccgctcgtgccgtcacgggtggccggagcgcttcgccgacaaggtcgaggtctcgctcgccgcggagcacttcaggcccaaggactacctggtgcgggccaaggcagacgccatccgcctggcggcgagccagctgctgttgatcggtcagcaaagaaggagctgggagcgacgcatgggcgagctcctgctgggtggccctcggcgaggacgagaccgcgggccaaggggagacgagctggggaagggctttcctggcggcgagatctacctgagcttcccggggctcggtgaccgcctcgccgccaggatcgccggtgagatcggcgatcaccctgaacagttcgacacgccgaactcgctcgcatgctacgcgggaaaggctccggtcacgcgccgctcgggcaagtctgagctcgtcgtggcgtgccggctcgcgcacaaccgctacctcggcggggccgtgcagcagtgggcgttctgctctctcagatgctcggtgtgggcgcgggagttctacgacttgcagcgagcaaggggaaagggacaccatgccgcactccgggcccttgggaatcgctggctcgagatcctgtggcactgcctgcacaagggcgccctctacgacgaagccgtccacgtgggcaaccggaaccgcgcgctcggaaggacggcccaggccgcctgacgcagtggtggttgacaaagggtgt

SEQ ID NO: 3044 - DNA, 1479 bp, unidentified
  source 1..1479: mol_type = unassigned DNA; note = element_46507e0
  misc_feature 1..2: note = core
  misc_feature 3..205: note = LE
  misc_feature 206..1459: note = CDS
  misc_feature 1460..1479: note = RE
  misc_feature 7..237: note = bridgeRNA
ctaataggggttgatcgtcgtggccggtgctggtgggccaggatggttgctgagccgccagcgggtgagcactgctgccagctgggctgtgagccctgcggttagatcgtgcccctgctggcgggtgaggccccctgtgatggctggtgggatggcgtgctgcgagcactgatctattagctggctgctggggtccttgtgctctgtgtcgcaggagggctgccgggaggagctggagttgatctttgccggggtggactgggcggagactcaccacgatgtctatgtccaggatgagcacgggcagaagctggccagcgggcggctgcctgagggggtgcaggggatcgcccggttccatgagctggccggcgcgcacgccggtgagccggggcaggtggtgatcgggattgagactgaccggggcctgttcgtgaacgccctggctgcggctgggtacctggtgttcgcggtcaacccgatgtccgcgtcgcgttaccgggaccggcactcggtgtccggggcgaagtctgaccccggcgatgcgaaggtcctggcggacctggtccgcacggaccggcacaaccaccggccggccgccaccgacagcgaccaggtcctggcggtgcgggcgctggcccgggcgcatcagtcgatgatctggtcgcggcgccggcaggcgaaccagctccggtccgcgctgcgggagttctaccccgccgcgctggccgcgttcgatgacctgaccagcggtgaggcgatcgcggtgcttaaggcggcgccccggccggatcggggcgcggcgctgtcccgcacgcaggtcaccgcggctttgcggcgcggcgggcgggcccggcggctgccggaacggaccgccgcggtccaggccgcgctgcgctccccgcaactggcacccgcgccgggcctggccgcggcgatgggtgccacggtcgcggcgatggccgcggtcatcggtgagatgaacacgcagatcgcggccctggaacgcgagctgtccgcgggttttgagcagcacccggacgccgaagtggtccgttccctgccaggactggggaccatcctgggcgcccgggtgctcagcgagttcggcgatgcgccggaccgctacccaacagctaagtctcgcaaaaactacgcaggaacatcaccgatcacccgggcgtccggctcgaaacgggccgtgctggcccgccatgtccgcaaccgccgtcttgccgacgcgatctacctctgggccttcgcggccattacagccagccccggcgcccgcacgttctacgaccagcaccgcgccgccggcgccacccaccacgccgccctgcgcgccctcggcaaccgcctggtcggcatcctgcacggctgcctgacccaccacaccagctacgacgagaacaccgcctgggcccaccgcagctgccaacccgccacggccgcttgacacctacagccgtgggatgt

SEQ ID NO: 3045 - DNA, 1559 bp, unidentified
  source 1..1559: mol_type = unassigned DNA; note = element_465393c
  misc_feature 1..3: note = core
  misc_feature 4..398: note = LE
  misc_feature 399..1433: note = CDS
  misc_feature 1434..1559: note = RE
  misc_feature 7..255: note = bridgeRNA
attcataatgtaagagtaaggtctatccggccttgctcttttcctttaaaatggaggtatggtctgacgaactttccgattgggacaccacgcccgcagacaaatgtgtcagccagcctccattgttttgtgctcgattcagcaagttgggacatagctcccgtttcacgattgaatatgtgcgtactttggaaaagctggatagccataaatcgaaacgaaagaaggaatgtcaatgctcgcagtaggaatcgatatttccaagtcaaaaagtgtagcagccatcttaaaccaagacggatcaatgcacacaagcccttttgaattccaccatacgcagcctgaactagacgctcattaagtatattttgaatagcaagcaatctgcaaccatcttaatggaaaataccgggcattaccactatcctgttctgaaagcgtttcaggaagccgggctccctgtttgtatggttaatgcctatcaaatcaagaaattcggagacatggatcttcgcaaggccaaaacggacaagaaagatgcagtgcggattgccagatatgcattggaaaagagttattctctggttccatacacatctatggagcagaaatacgaagatttaagatttttggcacgacagtataatcagcgaatgcttacgctgaaaaccaacaaagtatttctacttaatctattggatgaaacgatgcctggcataaccaacatcctgcctctaacgaccagaacgccagaaaccagtctttccgttctctttatcaatcgttttaaatcctacgatcgtataaagaaaatgggaaaaagtcgttttcttgacgcatttgaaaaaatcgcaaggaaatctcgaaatcgccaaaccaaaacatatgggttggcaatttacgaagctgcattacgcaatatcacaacaaggggagaaaacgaatacactcttgcggctcaagatcaatgccttgaacttgtctgtgaatcacaaaaggccgctgattcaattattctaaaaatgcaaacattagctgaaacgttgcccgaatacgctgttctgcgctctatggctggtgttggggatcgactcggtccccttatccttgctgaaattggagacatccgccgctttcacagtggaaaagcactcaacgcttatgctggtaacgatgcgcctccatatcagtctggaacatttgagagccacaatcgccacatatcaaaacgtgggagtgcggctctcagaaagtattgctttgaggttatgcaggcactcaaacttacacgacctcaagatgaccctgtctacctttttctgctcaaaaaggaacaggaagggaaaccgtataacgtagctaaaatggccggagtcaacaagtttctccgcatctactacgcgagagcgatggaaacgctcaagcaacagtaaccactgactctattatatagctttttcaaaaaaatccacaactgctgtgggttcaatttaatgcacccttttaccaaaagaaaatcggaaaatctataaaaaactcttgacaaatacattagcaag

SEQ ID NO: 3046 - DNA, 1364 bp, unidentified
  source 1..1364: mol_type = unassigned DNA; note = element_4663210
  misc_feature 1..2: note = core
  misc_feature 3..87: note = LE
  misc_feature 88..1116: note = CDS
  misc_feature 1117..1364: note = RE
  misc_feature 1128..1350: note = bridgeRNA
gatggggtggatggctcccgctcccggcatctgagtgccaaagacgtggttactatcagagcaccacaatgaggggagccatccgctatggagactagcacggtcggcctcgatctggccaagagcatctttcaagttcatgcgatcaacagtgcgggggaggcgatcgtccgcaaggcactgcggcggtcgcaggttgtgccgttctttacgaagctgccgccgtgcctggtgggtatggaggcgtgcgggacatcgcattactgggcccgcgagctgatgaagctcgggcacaacgtgcagctgatgccgccggcttacgtgaagccctatgtgaagcgcgggaagaccgacgccaacgatgccgaggcgatctgcgaggcggtaacgcggccgacgatgcggttcgtaccggtgaagtcgcccgagcagcaggccgcactggcgctgcaccgcacgcgcagtcttctggtcaagcagcgcacgcagctggtgaacatgatgcggtccctgctcggcgagtttgggatcgcgatgcctcgggggctacgccatgcgcttgaagtggcaaggcaactgacggacggcagtgctccagacgtgccgaagcttgctgagcggctcgtcacgagcctcgcgcgccagatcagcgctgcccacgaggagctcgccctgctcgagaaggaactgctggcgtggcatcgatcgaacgagctgtcacaacgcctggcgacgatccccggcattggtgtcgttgctgcgacagcgctggccgcatcagtgaccgaccctgaacgcttccgttccggccgccagttcgcagcatccttgggcctcaccccgctgcagaagtcgagcggcggcaaagagaagcagggacggatctccaaaatgggcgatcgttacctgcgccagctgctggtggtcggcatgacctcgctcgtgcgacgtgcgaggactgcaccaggctcggtcgatccgcggataacggcgatgctccaacgacgtcccgctcgcgtcgtcaccgtcgccgcggcgaaccgcgcagcgcgcgtcgcctgggtcatcatgaccaggggagaaacctatcggaagccgctggccgcggtggtgtgagacaggagcttacgaggttgtgaggacgatgagatgtgatggcgcaccggtcagaccgggagctgggacaccccgcctagtgtccaaggctacgcaaagcctgcaaaacagaatgggacccagctcgcggactccatcagggccagcggtcacgaaaagaccgcatcaacaggccggacacaagactgcacccgaccaaccgtcacaacatcaaatcgccgcttgcaacgcgggagccatccacacag

SEQ ID NO: 3047 - DNA, 1224 bp, unidentified
  source 1..1224: mol_type = unassigned DNA; note = element_4666120
  misc_feature 1..2: note = core
  misc_feature 3..222: note = LE
  misc_feature 223..1203: note = CDS
  misc_feature 1204..1224: note = RE
  misc_feature 12..193: note = bridgeRNA
cttgtatcttaattctcgttatggttagctaccatggcacagagacagaagaaacttgtgcccacccttaaggattaaaccttgtcgcgtagattaagtcttctgtctcgcttctgatgccagctaagacactgaacggtagccaagggcgttgaccctgtatgcacaaggcaagtgggctcagttggtctgttttagctttattcattacggtctatgattatgttttttatcggtattgatgtttcaaaagccaagctggattgctgtttatcactcgatgttgaaggcactaagcgccgcgccaaatctgttccgaattctaagcctggtatccttgggctattggcgtggtgtgccaagcaccagttagccgcccaagacctccacgccatcatggaggggactggtgtctatcacgaacaagccgctttggccttgaccgatgcgggtgtcaccgtctctatcgtcaatccagcccaagccaaagattttggccatagcctgggaattcgcactaagactgatggtgtcgacagcctggtactggcccgttttggagctttgcttaatcccaggccttggacgccacccgccaaggaagcccgtgttttgcaagccctattatcacgccgtgaggcgattgcccaagatttacggcgtgaacgtaatcgcctggaaaaagcagatgccactgacacaccagcgtccattcgccaatcaattgttgacgccattattttcctggaaaagcaactggccaaactacagcaagacatcgacaaccatatccggaaatgcccgaaattgaaggctgaccgcgacctcttggtcagcattccggcagttgggccacgagtcggaaaccacttgcttgcggtgattcataaccaccacttccagtcagccggacaactggccgcctatttgggcttggtgcctatcgagcggcaatcaggctcatccatcctgggacgtccacggctatccaaggccggcccggccagaattcgggcggtactttacatggctgctgttgtcgcaaccaaacataacccgcatatcaaagcgttgtatcagcgattgcaagagcgtggaaaatctaaaatgtcagccttgggtgctgccatgcgtaaactggttcatttatgcttcggtgtcttgaaaactcgtcaaccttatcaagcaaattatgctttttaaagttgactttcaagacggtat

SEQ ID NO: 3048 - DNA, 1362 bp, unidentified
  source 1..1362: mol_type = unassigned DNA; note = element_46670cf
  misc_feature 1..4: note = core
  misc_feature 5..82: note = LE
  misc_feature 83..1102: note = CDS
  misc_feature 1103..1362: note = RE
  misc_feature 1096..1350: note = bridgeRNA
atgatggggtggatggccccctttcacggcatctatgtgccaaagttgggtcgttggaaaccaacttaaacgggagccatccatggacgaggttagcacgatcggtctcgatatcgccaagagggtctttcaagtgcatggcgtcgattccgccggcgccgtttcggttcgccgcgcgctgcggcggtcgcagatgctggcatggttcagcaagctgccgcactgcctggtggggatggaggcctgtgccacggcgcactattgggcgcgcgcgctggcgaagctcggccacgaggtgcggttgatcccgccggcctatgcgaaggcctatgtgcggcggaacaagaacgacccggcggatgcggcggcgatctgcgaggcggtgagccggccggcgatgcgcttcgtcgcggtcaagagcgagcggcagcaggcggcggccggcatccaccgggtgcgcgatctgctgatgaagcagcatacgatgctgaggaaccagcttcgcggcctgatggcggagttcggcatcgtgacggccaaggggcggcgcggcgtgagcgagttggtggcgatcctgaccgatgccgaagaccagcgcatcccgagcccactgcgcgacgggccggtcatgatcgcggagaccctgcgcggcatcgaccgcaagctcgagggcatcgaccggcagctcgcggcggcggggcgcgcggatgcgacctaccgacatctgatcaccgcgcccggctacgggccgatcttgtcgagcgcgatggcggcgatggtggtcaatcccgctgccttccgccgcagttccgacttcgccgcgtcgctcggcctggtgccgcgccaagaaggcaccggaggcaagctatggctcggcccgatcagcaagcgcggcaacggctacttgcgccggctgctggtgaacggcgcaaccgcgctcttgaacagcaagcgagccaaggaggatccctggctggtgaagctgctcgccaccaagccgcgcaaggtggtggcagtcgcgctggccaacaaattggcgcgcatcggctgggcactgatgatgcgccaggaggacttccgcagcccgccagcggcggcctgaacggccacgtccggcaggtccggaaggcttgcgagggtgaaaacgcgtgatggcaatgtcggtcaatccggcgatcgagagcagcctgccactgtcatcggggcattgcgaccccgccgcaatgattgggtctcgatccacggttcccatcagggccagcggccatggtcgtgccgcgctaacaggccgcacacatgaccgcaactggccgcacttccatacgcgcgaaaaatcccttgccagccgggggccatccacac

SEQ ID NO: 3049 - DNA, 1136 bp, unidentified
  source 1..1136: mol_type = unassigned DNA; note = element_466b676
  misc_feature 1: note = core
  misc_feature 2..199: note = LE
  misc_feature 200..1120: note = CDS
  misc_feature 1121..1136: note = RE
  misc_feature 13..196: note = bridgeRNA
tgtaacttccctttgtccgctcctggcgctgtaatgcctcttgcggtggcggatggaagaccgatgcacctttgggacaccaagcccgtgggagagcgtgggtctccgtccgccgttccattgaacccgaacagtcgccagggccgcttgcgaaggcaaagcccgattaggcaaggatgggatcagatggagattgttgttggaatcgacgtttcgaaagagcgcctggatcgcacaatggcccctgccgcaagaagaggtctttgccgtcggcaacgaccatgccggcatcgatgaactggtcgcgcggctcaaagccatcggtgccgatgcgattgcgctggaagcgaccggcggcttcgagatgctggcggttgccggactgtcatcggcgggattgaccgtcctcgtcgtcaatccggcgcaagtgcgcgcctatgcccatgcgatcggccgcagggccaagaccgatccgatcgatgccgccgtcatcgccgccttcgttttggcgacgaagcccgagatccggccgttgcgcgatgccgagacacaggcgctttccgagcttgtggctcgccggcgccagatcgtgcagatggtcgtggccgaggagaaccggttgcgcatggcgctggcaaagcaggcgcagaaaagcatcaagcgcttgctgaaagccttgcggcgcgagctcgaaagcctcgatgccgatctcgacagccatatccgcaagtcgccggtctggcgggtgcgcgaggcgctgttgacctcggtgccgggtgtcggagcgacgacagcgcgcacgttgctggccgaactgccggagctcggcagcctcgaccggcgccagatcgcatcgctggctggtcttgccccatggacgcggcagtcgggaaaatggaaaggcaagagcttcatcggcggcggccgaggcaaagtgcgcgccgtcctattcatggccgccctcgtcgccagccgatacaaccccgacctcaaggccttccgcgacaggctggtcgcggccggcaagcccaagatcgtcgccatcgtcgcaaccatgcgcaagctactcaccatcctcaacgccatcatcagggacggacgaccatggcaaaacgcttgacaaacaagacagtcgc

SEQ ID NO: 3050 - DNA, 1505 bp, unidentified
  source 1..1505: mol_type = unassigned DNA; note = element_4679907
  misc_feature 1..4: note = core
  misc_feature 5..238: note = LE
  misc_feature 239..1489: note = CDS
  misc_feature 1490..1505: note = RE
gtcactagggcaccctctttctcatgggcaccgctacggtgctcgatgtagggactcggcgggagccggggtgacggtctgtggcggtcgccggaaaacggccggcatgacaccaccgcccccggctttcccggggacacggactggcaacagggagacgcgccgcagagcgccggttagtgaccgcccggtagctgtcctccgcgccgggtcgtcgctgccatcctgaggagtttctgtgtcgcttgcactgcctgaagcgctgttctttaccgggatcgactggggcgccgagattcacgcggtgtgcgtgacggacaccgccgggaagatcgcggcgagcttcaccatcgagcactcggcagacgggatcgcgctgctgatccgccggctcgccaggcacggcgaggcgggcggcatgccagtcgcgatcgagcggccgaacggccgcctggtggacctgctgctggaggccgggcacccggtggtgccggtcagccctaacgcgatcaagacctggcgtgagggcgaggtgctgtccggggccaagtccgacgcgggggacgccgcggtcatcgccgagtacctgcggctgcgccagcacaagctgaagaccgccgccccttactccgacgagacaagagcgctgcggaccgtcgtgcgtgcccgcgacgacctggtcgacatgcgggtcgcggccaccaaccagctctcggcgctgctggacgcgcactggcccggcgccagggccatcttcgccgacatcgagtccccgatcagcctggagttcctcacccgttaccccaccccggccgccgccgtgcacctcggcgagaagcggatggccgcattctgcgtcaagcacggctactccggccgccgcaccgccgcgcagctgctcgcccggctgcgcgccgcgccggcaggcaccggccgcgaggcgctcaccgaggcactgcgcgacgccgttctcgccgcggtcggcgtcctcgcggccctgaacgcgtcggtgaagaacctcgaccgctccgccgccgcccacctcggcgagcacccggacagcgcgatcttcacgtcgctgccgaggtcgggtcagatcagcgccgcccaggtactcgccgagtggggcgactgccgcgaagcctacgccggccccgactccgtcgccgcactcgccggctgcacccccgtcaccaggcaatcgggcaagcaccgcgacgtccacttccgctgggcctgcaacaagcgattccgcaaggcggtcaccaccttcgccgacaacagccgccacgccagcccctgggccgcccagatctacgacaacgcccgcgccagcggcaaggaccacccgcacgccatccgcatactcgcccgcgcctggatccgcgtcatctaccgctgctggctcaccggcattccctacgaccccgccgcccacggagccgccgcaataacggccaggccagcaaccaagcaaatcgcggcctgaggttgacacagggagt

SEQ ID NO: 3051 - DNA, 1553 bp, unidentified
  source 1..1553: mol_type = unassigned DNA; note = element_468c2b8
  misc_feature 1..2: note = core
  misc_feature 3..86: note = LE
  misc_feature 87..1118: note = CDS
  misc_feature 1119..1553: note = RE
  misc_feature 1146..1357: note = bridgeRNA
cgatggaatggactcctcctgccgatgcggcatcatcgtgccaggttgattcggcctcttgagggccacggacaggaggaatccaaatggagcatacgaccatcgccgtcgatctcgcaaagtctgtgtttcagattgctgtttcgcatcgcccgggccacgtcgatgaagagcggcgcctctcccgcgatcgtttcctgcccttcttcgcacagcagccggccgcgaccgtcgtcttcgaggcctgcggatcggcgcactattgggcgcgccagctccagccgttcgggcacacgctgcgcttgttgcccgcccacgacgtgcggcgctacgtccggcgcaacaagaccgatcgcaccgacaccaaggggatgttggaagccaatcgcaatgaggagatccaccccgtccccgtgaagtcgattgagcaacaagcgatcgcctcgttgcatcgcctccgctccacgtggctcgcgacccgcaccgcacggttgaacacgctccgcgggctgctccgcgaattcggcgttttcattcccgttggtgcccaacacgtggtgccacgcctgcgcgcgttactgggagagccgaccgacaccgtgccgatcgccgtgcgaggcaccttggcccatgcgtgcgccgaactcgacgtcctcgagacgaatatgcgggacgtcgaacggcaactcacggcgatggcccgacaactcccggacgtgacgttgctccagacggtgcccggcgtgggcgtgctgacggccaccgctctggccgcgctggtgggcgacattcgacgcttccgctcgggccggcacttcgcgagcttcctgggcctgacgccgaaggaagactccagtgccgggcgccggcacctcggcgcgatcagcaagcagggcgacgtctatgtgcggatgctcctgacgcacggcgcccgctcgttcgtgtggcacgcgaaaaccgcgtcactgcccacgtcgctgcaacggtgggcggtgcacaccgagcagcgccgcggccacaacgttgcgacggtggccgtcgctaataaactcgcccggatcgtgtgggccgtctgggtgcggcagcgccccttcgcggccgaacatcggcccgggtaatcacggattcgaccgtcgctcacccggaggactgcaccgagcgcatcgcaccatggcgcaccggtcggaccggcgcggggctacgccgataacttggctggccgtgagggggcgcgcatgcgattggcgccccgcgcgcggatatgtccatgatggcccggagccgagacggctccaccgacgaggccgaagatacgactgcagtccgactcatcgcgcagtcatccgggaacgacgaacggccacggcgctccgcgcgcgtcaaggccctgcggccgcctgcggcggtgcgctgcgcgccgccttgacccgtgctctcgccgcggcctgagtaccgctatgcgacgaaggcacgccttcgtcgccgatcatcaacgggaggactgagcggaacgtcttactcgacgctttctacttgacggaggagtccagata

SEQ ID NO: 3052 - DNA, 1400 bp, unidentified
  source 1..1400: mol_type = unassigned DNA; note = element_469162f
  misc_feature 1: note = core
  misc_feature 2..223: note = LE
  misc_feature 224..1387: note = CDS
  misc_feature 1388..1400: note = RE
  misc_feature 14..238: note = bridgeRNA
ctacttgtttcattgaagtacgaccacagcccggccaggcttggtcgaggtgaccggtgggatcgctcgctcgcggctgtccaccgcaagtttgggtgtgactcacacatggcatgcgcctgccggtcaccgcggcgcggagtggctcaagaggggtatgcccagctcaaagtagcgctgccctcccgccgacccagcgtcggatcgagggagaggcaagcacatgggccaagtcgtcatcggcgtagacccgcacaagcgttccgcgaccatcgaggtcatcgaccatcgtgagcgtgtgctcggcaagggccgcttcggcaccgacagcgacggctaccaggccatgctcaccgccggccgtgagcacaccgaccggatctgggcggtcgagggctgcaacggcatcggccggcacgtcgcccagcgcctggtcgccgacggtgagaccgtcctcgacgtgcccgcgaagctgtccgcccgggcccgggtcttctccaccggccaaggccgcaagaccgaccccgtcgacgcccacagcgtcgccgtcgtcgccctgcgcacccctgacctgcggcaggtcaccgccgatgacaccaccgtggcgttgcggctgctcgtcgaccgccgcgaccagctcggccacgcccgcaccgagatcatctcccggctgcaccacctactgctcgaactcatccccggcggagccaagaagttcctgtccgcccagcaggcccgagcgctgctcaacaccgtccggccccgcgacgtcgtcggcaaaactcgccgctggctggcctccgaactgatccacgaactcgtcaccatcgacaagaagatcaaagtcgcgaacaccgagctcaacgacctggtcgcgtcgaccggcagccgactgcaacagctgcacggcatcggcccgtccggcgccgcccgcctgatcggcgacatcgccgacatcagccgattcgccagccgcggccacttcgcctcctggaacggcaccgcacccatcgacgcctcctccggcgaccagaaccggcaccggctgtcgcgagccgggaaccggcgcatcaaccgggtcctgcacatcatggccgtcgtccagctccgcaacgacaccgaaggacgccgccactaccggcgcaaactcgccgaaggcaagaccaccatggaagccatgcgcgccctgaaacgacggctctccgacgtcgcctaccggcaaatggtcgccgacgccaagcggctaaggacgggcccgggaggacacgtgggggcgactctgcaatccagcgcggacgacccgaaccccaaggtcgacacttcggagaagtcacttcccggacccgttgaagaccagcttagagcaccgcttctcaccgcctcttgacacagaggggtgc

SEQ ID NO: 3053 - DNA, 1496 bp, unidentified
  source 1..1496: mol_type = unassigned DNA; note = element_469f6df
  misc_feature 1..4: note = core
  misc_feature 5..238: note = LE
  misc_feature 239..1468: note = CDS
  misc_feature 1469..1496: note = RE
gtcactagggcaccatccttattgcggatgcctgatgggtgttcgttgaagggactcggcgggggccgaggtgacggccaggtgcggtcgctcgtagagggccagcatgacaccgccgccctcggccctcccggagtcgcagaccggcatcaggaagacgcgccgcagagcgccagttagtgaccgtccggtggtcgaccccctcgccgcgtcgtcgctgccaccttgaggagattcgttgtccgaggaaaccgcagaaatcatctacgtcgggttggactgggctgccgccactcatgccgtgtgcgtgctgtccgcagtgggaaagatactggcgcagttcatgattgaccatactgccgatggcatcgccacactgattcgcaaactgtccaagttcggcgatcccgccgatgtgcacatcgggatcgaacgacccaatgggcggctggtcgacctgctgctcgaagccggccacccggtcatcccggtatccccgaacgccatcaaaacgtggcgggacggcgaagtcatctccggcgccaagtctgatgccggtgacgccctggtgatcgccgaatacctgcgcttgcgccaccatcgactgcgccccgcagccccgtacagttcgtcgaccaaggcgctgcgcacggtggtccgcacccgcgacgacgttgtcgccatgcgggtggcggccaccaaccaactcagcgccctgctcgatgatcactggcctggcgccaaagcgatcttcgccgacgtcgaatctccaatcagcctggcgttcctgcgtcgctatcccaccgcggccagcgccgctcgactcggagagaaacgcttggctgcgttccttgtcaagcattcctattccggtcgacgaccagtcaaagaactgttgacccggctgcgcagcgcacccgcaggcaccaccgatcccgtcctgactatcgccgtccgcgacgtcgtgctggccctcgtcagcgtcatcgaggcgctcaacagcgcaggcaaggccctcgaccgatccgtcatcgcccgcctcggggagcacccggacgccgaggtcttcacgtcgctgccaaggtcgggtcagatcaacgccgcccaggtgctcgccgagtggggcgactcccgtgcagcctacgacggtcccgacgccgtggccgccctggccggggtcactcccgtcaccaaatcttccggcaaacaacacgccgtgcacttccgctgggcatgcaacaaacgcttccgccgagcactgaccaccttcgctgacaacagccgacaccaaagcacttgggcagccgacatctacaaccgagcccgcgcgcgcggacacgaccacccccacgccgtgcgaatcctcgcccgcgcctggattcgcgtcatctaccgctgctggcacgaccaaagcccctacgaccccgcccggcacggtgccgtacaaaaactgcacaccgcagcatgaaaactgcgtaggggttgactcaggaagt

SEQ ID NO: 3054 - DNA, 1350 bp, unidentified
  source 1..1350: mol_type = unassigned DNA; note = element_46a2894
  misc_feature 1..2: note = core
  misc_feature 3..75: note = LE
  misc_feature 76..1110: note = CDS
  misc_feature 1111..1350: note = RE
  misc_feature 1139..1345: note = bridgeRNA
tgatgtgatggacgcacctcctttctagcgtcgctgtaccaaactttaggtacagtcagaacaggagtaatgaacatgtctatcaaggtcgttgggattgatttagccaaaaattcttttcaagtatgcgtattgagttcctctgattcgattttatccaatcggaaagtaaaccgaggctctttacttgataccatccgtcaattgcctgaaaagacgactattgccatggagtcgtgtgcaacatcacatcactgggctaggatcttccgaggaatggggtttaagattgcccttatccccgcacaacatgttaaaccattcgttggaaggcaaaagaatgatgccaacgatgcgagggcaatatgtgaggcgttttctcgcccagacattcactttgtacccgttaaatcggtagagcagcaagatctcaaatctctccgctgtgttcgagcccgattagttgaacaacgcactgcacttgctaatcaaattagaggcttatctgccgaatatggcattacatttccgttatcaataaaggcactgcacagtcatttacctctgataatcgaagacgcagagaatgaactgtctcatgtcatgagggggttactgcacacgttgtatagcgaccttatagatatcggtgaaaggattgatgagctcacctgcaaaatcacgatgcttgggcaacagcaccctcgatatgatgccatcaagagtattcctggttttggtcctattttaacaaccgcactgctcagtgaggttggtaccgggaaccaatttcaaaatgggcggcagttttcagcttggtgcggattggttcctaagcaacatagctctggagggaaaagctctctcggtcatttatcaaagagtggtaatcgagatttaagaaccttgcttatccatggtgcacgggcggttatgcggtgcgggataaacagaaccgatgtcatgggcgattggctaagaagtatcattggaagacgtggtagagcaaaagccatagtcgcattggcaaacaagcttgggaggatagcttggcgggttttagcgacagatagcagttacaatatccataaggcttttaaggctgtataactggggaattatgattttgaattgcaactgagtttgcaattgctgatgaagaaacggtgaaccatccttactgcactctgattaggaaacaggtcatacagaccggggctttgaatagacagtaaggtgcgtattacatcatggcgcaggccatttatttattggccaaaaatgacgtcggatatatgttagcgaccgtaccctttaattggctattgcatcatgaggtgcgtccatata

SEQ ID NO: 3055 - DNA, 1432 bp, unidentified
  source 1..1432: mol_type = unassigned DNA; note = element_46afaed
  misc_feature 1: note = core
  misc_feature 2..234: note = LE
  misc_feature 235..1419: note = CDS
  misc_feature 1420..1432: note = RE
  misc_feature 14..237: note = bridgeRNA
ctacgtgtttcattgactgcaggatcgggcccggccaggctcggtcccaggtgaccgggacggtcgttctctttgcggctgcccacgcccctggcgtgaggctcacaattggcgtgcgtcgtcccggtcaccgccagggctgcgagaggctcaagaggggtatgcccagccgtacgtagcggtgccctcccagctcgacaccacatgttgtcgcgagcaatgggagcacgagcaatgaacgagcaggagcccctgcgggtcgtcatcgggatggacccgcataagcgcagcgtcacgatcgaggtcatgaccgctgatgagtccatcctcggtggcggccggttctccaccgacgccgacgggtacgcccggctgctggcctacgcacgggcgtggccgcaccgggtctgggcggtcgagggctgcgccggcatcggcaagcatgtcgccgaccgcctcgtcgccgacggtgaggacgtggtcgacgtgccggcgaagatgtcggcccgggtgcggatcttcaccaccgggcagggccgcaagaccgacgccaccgacgcccactccatcgccctggtcggggtccgcatgtccgggctgcgccccgtcatcaacgatgaccaactggaagtgctgcggatgtgcgtggatcggcgccgctccctgggcgaggagcacacccgcaaggtgtgccagctgcacaagctgctgcttgagctgatccctggcggggccaagacgtccctgtccgcggcccaggccaaggagttgctgaagaaggtccgcccgaccaccgcggcgggcaaggtgcgcaaggctcacgcggtcgagctggccgaggacctggcgaagatctacgcccgcaccaaggccgccgacaaggagctcaaggccctcgtcgaggcgaccggcaccaccctgatgagcctgcacggcatcggcccctcgggcgcggcccggctgctggtcgaggtcggtgacgtcacccggttccccgaccgcaaccacttcgcgtcctggaccggcaccgccccgatcgacgcctcctccggggagcacacccgccaccggctctcccgaggcgggaaccggcagatcaaccgtgtcctacacatcatggccgtggtgcagctgcgcaccagaaccaccgagggccgcgcctactacgaccgcaagaaggccggcgggaagacgtcgatggaagcgctgcgctgcctcaaacggcgcctgtccgacctggtgtacaaggccatgctcgacgacctcgccgggcacacaaagacgggcccgggagggcacaagggtgacgactctgactccagcgcgaccggctcacaacccgctgccggctcttcggacaagccacttcccggacccgccaccaccaagcctacgaccaccctcccagccgcctcttgacacagaggggtgc

SEQ ID NO: 3056 - DNA, 1437 bp, unidentified
  source 1..1437: mol_type = unassigned DNA; note = element_46b837f
  misc_feature 1..2: note = core
  misc_feature 3..85: note = LE
  misc_feature 86..1123: note = CDS
  misc_feature 1124..1437: note = RE
  misc_feature 1202..1422: note = bridgeRNA
agataattggactcccctacaccattaccaacgtgtaggctaatatcattgttaccacacaaaaatattaaatggagtccaatagatgaataatactagaattggtgttgatttagcaaaagatgttatccaagtttgtatttatgcaagaaataaagtgctttctaatactgaaatgacatatcaggcgtttgctctttggttaatcaataccaaacctaccactattatctttgaggtttgcagtacatcgaactactggaaccaggtcgcattatcattaggctacgatgcaaaattaatttgtccgaagtttgtgtcttcaattagaaagaaacaaaaaacagatgctaatgatgcgcttgcaatcgtacaagcatcatttgtaaccgatataacttttatttctggaaaaagtattgagcagcaacaattacaatcaattatgcgattacgcgacttagcaacaaagcagaaaacagccttgagcaatcagttaggagcgctactactggaatttagtattcgctgctccccaaagttaggtggattaagaggcgctattgaaagcgtattagaaaatgctgagaatgaattttcatgggcacttcgtgcttcactgaaagcagcatgggatcactacttaatgatatgccagtctgttgcaacctatgacgaatcactcataaaggcgattaatgagcatcctgaatgtaagaaacttttaaaattagaaggtgttggtgtcattaatgcagttaatttatacatcgcattaggctgtagtgagataggtgtttttgctaagggcaaagatgcagcggcgtgtatagggttaacaccaatacagcattcttccggaggaaaaactaagctgggctcagttgggaagtatgtaaaaaacagcatactcagaagtcaattggtagttgggtctatggctgcgattagaatgatagttaaaagagacgcaaaaacaaaaaaagaacgttggatacaagagttagtatctcgacgtggtatacgttgtgctgcagttgcacttgccaacaaaaatgtacgtacggcgtatgcgatgatgactaaaggaactgattacaaagcggaattacttgccgtgtaaaaacgttcaaacaataaaagaataactaagataaaagccagtaagaaaatatgcgatgttcacaaaggaattgacgaaatagtagaattatttttctgcgtaaagaagttcaaacaataaaagcaataactaagaaaaatcagcaagtaaaatcagtgaacaaccaagagactttgatctcgcttaatagatgtgattacttgtgcgcgtaaatatcagagagcctgagttagctactcaatgagagctcgtacataagtgagtgctttattcttagttactaattttgttgttgacacaggggagtccacata

SEQ ID NO: 3057 - DNA, 1368 bp, unidentified
  source 1..1368: mol_type = unassigned DNA; note = element_46c6593
  misc_feature 1..3: note = core
  misc_feature 4..258: note = LE
  misc_feature 259..1287: note = CDS
  misc_feature 1288..1368: note = RE
  misc_feature 36..240: note = bridgeRNA
tctcctatgtttgctaagttatagattttaatatttaaagtcaataattttacaagtttaaagtgaaatagaatgagagaacaaatgtgtctaaatagttcaaagaaacatattctcacatagaaatatcctcattcttttttatcttttagagtctgaacagaatgtaaggaattaagtttagcttaatatccagaatatccaataaggagaaaagacgaaggaagattcatcactttattatttaaaattaaagttatgaaggaattaaaacaggttgttggaattgatgttgcacaaaaggaattggtggtaacaattggaaggttattagaggacttatccgttgatttattttcttataaggttttcaagaataatgacaaaggatttttaagtttggttgaatgggttgctaaattagttgaaaatcccaaagaagtccattatgtaatggaagctacgggagtttatcaccaaaagattgcttattttttagataccaatcaattgaaagttagtatcgttttaccaaacaaaataagtaattattttagaacattagaagtaaaaactattacagacaaaacatgttctcaagtaatagcaagatttggtctagaaagaaaattagatttatggaaaagaccaaagacggtttacaaaaaattacaacaattaactagagagcgagatcaaattgtagcggaaagagtaattgtaaaaaatcagttacacgcagaaaaaatagaagctgagcccaacttaatgactttaaaaagaataagcgaaagaatgaaattactgaataaacaagaaaatgaaattaaaaatgacatctctcaaattctgaaaaacaatgcagagttgaaaaaagaaacagatagaatgatgactattccagggataggagaattgactgcggtaataattttagcagaaacaaatggatttgaattgatacgtaacaaaaaacaactaactagctatgctggccttgatgtaaaagagaaacaatcaggaacatcaataaaaggaaagcctaaaatatcaaaaaaaggaaacagaagtattagaaaagcaatgcattttccttctttagtagctgtaaaatgggatgaaaacttcaaagaattatatgcaagattagtatcaaaacatggaataaaaatgaaagcattagtatcgatacaaagaaaattattagaaatgagttatgttttgtataaaaatcaaaccatatacgataaagaatataaaaatagcgtgcaaacacaaatggcttaacacgctatagagtctagttttaaactgacttaaaacaaaattataaaaaaatatagatttttgttgtaaatcaacacagaa

SEQ ID NO: 3058 - DNA, 1396 bp, unidentified
  source 1..1396: mol_type = unassigned DNA; note = element_46df353
  misc_feature 1: note = core
  misc_feature 2..72: note = LE
  misc_feature 73..1098: note = CDS
  misc_feature 1099..1396: note = RE
  misc_feature 1160..1393: note = bridgeRNA
tactgagatggacccgacaccaccgatcggagcaaactagcatttcatccactttgtgtacggaggcctgctatggatatcgatattctcgggattgatttggcgaagcgcgtgtttcaacttcacggcgcggatcggcggggtcgactattgcatagttccaaggtaatgcgcaccgaattgctcagcatagtgcgtaagctcagcccccatgttatcgccatggaggcctgcagttcggcgcatcactggggccgatgcttccaggaaatgggtatcgaagtgcgtttgatcagcccacaatatgttagcccttttgttaagaccaacaaaaatgacgccaatgacgcggcagcgatcgttgaagccgccagccggccaacgatgcgatttgttccagtgaaatcggttgagcagcaggacatgagagcggtacatcgcgtgcgcgaattgctcgtgcatcaacgtacagccttgatcaaccaggtcagaggactgctaggcgagcgtggagtaatcatcgcgcaaacgcccgcggccttcaaacgtgctctacctgaaatactggctaaatgcgaaggcgagatgaccagaacctgccaggcgatattaactgagcttctagagcaaatgcgagttctagaggaacaaatcgcccgcactaataagttgattgccgcattcatgaagagttccgcgctatgtcagaagatagcggccatagacggggtaggcccgattaccgctacagcaatggtcgccgcggtgggcgaagccaaagagtttaagaatggccgccacttatccgcctggcttggtcttgtgccgcgacaatactcttccggaggcaagtcaagattgcagggaatcagtaagcgaggcgacacttacttgcgaaccttattgattcatggcgcgcgtacggtattgcgctacgcgatcggcaaagccgactcgcgcagccggtggttgcaagagctgatcgcccggcgagggcataaccgcgcagctgtcgcattggcgaataagaatgcgcgagtgattcaggcattgttgagcaattcggataattaccgcccgccaatagtggcgtgctgagcggaaagatgaagaaggaatttcgacttgattgctttatgaaaggtgacaagacccatctctagtttgcgacgcttcttagagtgatgacgaaactggtaagaccaacactcaacaacctgctttcggtgcgggctaccctaaagggctaagccgatgatttgctaaggaatgggtgtgcggatctcatcaaggctgcgggcaggtatctgacatgagcccaatagcaagccggatacatgcatgcaaaccgtttcaattcataaaaagagcttgcaaaaggtgtcgggtccataca

SEQ ID NO: 3059 - DNA, 1250 bp, unidentified
  source 1..1250: mol_type = unassigned DNA; note = element_46e7e8c
  misc_feature 1..2: note = core
  misc_feature 3..244: note = LE
  misc_feature 245..1234: note = CDS
  misc_feature 1235..1250: note = RE
  misc_feature 6..214: note = bridgeRNA
cttacgtcttgacattccccctttccccggggaatgttctccggctgatccccggagcgatggctggtcaggctgttaggagcctgaggtctatgaacctgttcgacagataagccgccagccatcaccttgatcacgagttcgaacagtatccgaggctgtatcttgagatgcaagcctgcacatgtaaggtggaacggatcaggtcaggggcatttgtgagtcaacagtggagcgtatgaatatgagcgatgaactgacccaaccggtcacctgggtcggcgtggatatctccaaaaagaagtttgatgtttttcttgaacgcgcaaacggccgaggcaagagcaaggtgttctccaataatgccgcaggtgttgcgcagcttttgacttggggccaggcccagggcttggactggacacgcacgggcgtgtgccttgaagccaccggcccctacgggacgctcttggcgcgtacgctgcacgaggccggagtggtgatcgcgatcgagaatccagcccgtatccaagcctttgcgcgcacgctgggggtgcgggtgaagaccgacaaggccgatgcgcagtggattgcgcgttatgccaaacagcatccgccgcgccgctggcagccgcccagtgcccaggaagaacgcctgcaagcgctggtcggtcgtctggacgacctgatcgtcatgcgcacgatggagatggctcgcgcgcagcaactcacgggcgaggccttggcatcggtcacgaacatactcaaagcgctggaagaggaaatcgagcgcctgcgtgcggccatctgtcatcatatcgaccaagatcccaccctgcgtcaacctgcgcaactgctcggtagcatccccggcatgggccaagaaaccatcagccgagtactggctcaccttggaacactgacacggtttgaaaacgtacgccaactggtggcctttgtcgggctcaacccacgggtacgacaatcgggccaatggatcggcacaagcccgatcagcaagcaaggctcgagcgccatacgcagagcgttgtacatgcctgcactggtggctaaacgatataaccccatcttgcgtgactttgctgaacgccttgcagccaacggtaaacgccccaaacaaatcgtcgtggccatcatgcgtaagctgctgcacatgatgtggggcatcctcaaatcaggacgccccttcgatccggccatgggcttgcaagggtgagtgaaagacagtatca

SEQ ID NO: 3060 - DNA, 1825 bp, unidentified
  source 1..1825: mol_type = unassigned DNA; note = element_46e89aa
  misc_feature 1..2: note = core
  misc_feature 3..345: note = LE
  misc_feature 346..1692: note = CDS
  misc_feature 1693..1825: note = RE
  misc_feature 118..288: note = bridgeRNA
ctagtataataatggtgtagtcaataatgactacgagttaatagttacaaaatctaaatgaataactgaaggagggattccctctccatcagaagttattgtttccttactgtgtctgtggcttccataatgcaccagatcagatcctgaggtataatcactgaggcagggcgattgacgacgcctccttgggacccggccttccgccgggaaaacctcttagaaagtctgtctgtccattcggtggtgatttatggtttggctggttgggaagcctcaggctatacctgtataagccgctaggttgtgtatccgccttatggaaatggatgcctgccggaaaggatgtttatcatgcattacaaaagattacttacatttattgacggcgtttcttcttacctttctgtcggccttgatgttggcgctgattttacctggatgtcaattgctctccccaatggttcttttgtcgggaagccctttaagatcatccattctgattctcggtccagagatctcgctgtcacaaaaataaaagaagcacaagagacgtattctctcaaaagccgctgcttccttgagtctaccgggatctaccacatcccgctcctgtgcttccttcgtgataaggggtttgactgctcggtcataaatcctatcatcactaagaatagcacaaatatcaacataaggaaactgcataatgataaattcgattcaaaaaaggctgcccttgttggactgaacgtttctctcaagacttccatcctcccggatgattccgttgtcgatctgagaaacctggtccgtgattattattatttcaaggatctccagtctgctgtcgctctgaagctcactgcggaactgaaagtatctttccctgcttatgctaaggtcttcagcaaagtcaccacacagtcttccttaaagctgttaagctcttatcctcttcctgcggacatgcttgccgcttccaaagaggacattgtggatatcatccgcagtaccgcacgttttggcgaagcttatgccctgcgtaagtatgacgccattatcgctgccgcacaggatgccgctgttttcagcagggctcttcctagcaatgctgttcgcatccgtctttatatcgacacttatcaggaataccagaagcatctggacgcgctcctgaaagcactccatgagacggtagagaaactgcaggataccctgatctacgatcagatctgccttctgcagtccctgcgcgggattggattcttaagcgcagtcgtcctgattgcagagatgggggattttaaacttttttcttccccgaaaaagctttatgcctactttgggcttgaccccgctgtcaaacaatccggaaaactcaatggcgataaagtccatatgtccaaacgtggctccagccttgccaggcgtgttcttcacatggccgcgctcaataacgtaaaggttgataaagggagcggcacacctgtgaatcctgtgatctacgactattacacccggaagtgctccggcaagaaaaagccagtagcaatgggcgctgtcatgcataagatctgtaacatcatctttgccatgcttcgggataacaaaccttttgaaatcatcactccggaagaacactgcagacgctttgccacagaacatcccgacaagataaggaaggctgcgtaatcaacacggtattctgaatatttagtttctgaccagtcctatattggggaatggtctgttaaggttaccctttttcgctctactgtaataaatttaattttttcatatcacctcttgacatttcttagctgga

SEQ ID NO: 3061 - DNA, 1155 bp, unidentified
  source 1..1155: mol_type = unassigned DNA; note = element_46eec83
  misc_feature 1..2: note = core
  misc_feature 3..207: note = LE
  misc_feature 208..1143: note = CDS
  misc_feature 1144..1155: note = RE
  misc_feature 12..213: note = bridgeRNA
cttgtcttatgaatttctgagcttttgtgcgaaacaagagccacagatcagcattttagaatgctgatctgtggtggtggttggatcgtgaagcgcttggtctcttgggaccgtttttgagtaggatcaaccaccaccttcgccaaaggcctgaacggatacagagcggcataaagccctctaggacaagcataggatatgacgaagatgaccgacgataccattgggatagatgtttccaaagccactttagatgttcaccggctgagcgacgggaaaatgacgtcgtttagcaacgatacagcggggttcaagcagctttctagtctctgtaaagagacagttgtaatccgcgttgtttatgaagccacaggagcctatcacaagggacttgagcggactttaggtgcacatttgcctctggtgaaggtcaaccctttgcaggcacgacgttttgcacaagcgcagggagtgcgggcaaaaacggatgctgttgacgctaaaatgctggccatcatgggggaagccttcgctttggtgccagacaaaccaatatcacaaacacatcacgttctcagggagttacgtgcatttcgaagtgggttgatcaaagatcgaacccgcatcttgagccgtcaaaaaacgcaaacgctgcctataacccgccgccaaagcacagcccgcttggcccaaattgacaaacagattattgaaattgataccgaaatagagcgtctgatacaatccaatgacgtaatggcgcgctcaatggaaattctacggtctattccaggcatcggtgccgtcagtgcagccactattttgattgagatgcccgagatcggcgacatggagcgcaagcaggtcgccagcttgaccggagttgcacccatgacccgtcaatctggtcagtggcgtgggaaatcattcattcaaggtggccgtaaagttgtgagggacgccctctacatgccagcacttgtcgcgatgagattcaatcccgacctcaaggccaaataccaagccatgatcaaagcaggtaagccaccaaaagtcgccattactgccctcatgagaaagatcatcgaactcgctaacacactcatcaaagcaaatcgtctttgggaaaataaaagggcttgatcaagacggata

SEQ ID NO: 3062 - DNA, 1288 bp, unidentified
  source 1..1288: mol_type = unassigned DNA; note = element_46f8701
  misc_feature 1: note = core
  misc_feature 2..223: note = LE
  misc_feature 224..1276: note = CDS
  misc_feature 1277..1288: note = RE
  misc_feature 4..228: note = bridgeRNA
cagggatgttcaatggcgacgtactcccgcccggtctgacccggagaacgcccggcgccttggctgccttgtaagcgatcagtcgaccgggcgggagtcgccattgggcacgttgcctgtcgtgagtgacctggtaggagcctgccgttaacgggcccgtccctggactgtccgaccgacttcgcaccgtgcccgtcctgaagtgcgaccaacaaggacgaacatgaccacgatcgcagcaccagcacggttcgtcacgggcggagtcgacacgcacctcgatgtgcacgtcgcggccgccctcgattcgatcggtggcgtgctcggaacggcgccgttcccgaccacgaccgccggttaccgacagctgttggcctggctgcgcaccttcggtgaactcggccgggtcggggtggaaggcaccggcagctacggcgtcgcgttgagccgacacctcaccgcgaagggcgtggcggtgatcgaggtgtcgcgtccgaacaggcaggtccggcgccggtacggcaagaccgatgtggtcgacgcgatcgcggctgcccgtgcggtgctttcgggtgaggccaacgcaacaccgaaaacgcatgacggctcggtagaggcgttgcgggccctgaaagtgctgcagcgcagcgcaaccaaggccaggacgcaggccctcaaccagctgcggaacctgctcgtgaccgcacccgacgaactccgcggccggctgcgggatttacgcaccaaagagctgctcagcgaatgcgccgccttccgggtcgccgccgacgacgacaccttgaacgccatcacacgcttcgcacttcgtgaactcgctcagcggatactcgacctcgaccagcgccgcgagcaggtccgtgcccgcctgcaccgcatcaccgccgtcatcgccccgcagctcgtcgcgctcaagggcatcgggcccgatgtggccgcgaccctgctactcaccgccggcgacaaccccgaaaggctccgcaacgaacggtccttcgccgcgctctgcggcaccagccccgtgccagccagcagcggcaaaacccaacgccaccgcctcaacagcggaggcgaccgtcaagcgaactcggccctgtggcgcatcaccctcgtccgaataggcagcgaccaacgcaccaaggactacatggcaaagcgcgtcagcgagggcaaaagcaagaaagaagccatgcgctgcctcaagcgctacatcgctcgagaagtcttcaacgtcctacccaacgcagcactcagttgacagtaggagcat

SEQ ID NO: 3063 - DNA, 1537 bp, unidentified
  source 1..1537: mol_type = unassigned DNA; note = element_46f989e
  misc_feature 1..3: note = core
  misc_feature 4..245: note = LE
  misc_feature 246..1424: note = CDS
  misc_feature 1425..1537: note = RE
  misc_feature 8..223: note = bridgeRNA
tttcgtattatcaggtcaaccagagatttctggttggcctatttttataggcgttctatgatggcggtagccgggagaacgtggctctttttggggtagtgaccccgtaataaaaactgttctcccactacctccaatgaccatgtttgagctggttggggcaattgacctcgcatcacaagcgaagctatgggtttggaaccatcgtgggattgccggctaattttacatcaggaggtgctgacatggaaccggttatcggactggatgtatcaaaaggagcgagcgtatttcaagcgtttgtcagacgaaatgaagcacacggaaagccggaaacaattcggcatacagaaaacgggttcagcagacttggtaacgtgattcaagagcttaaggagcgtaccaaaaaggaacctgttgtcatactcgaggcaactggtcattatcatcgcattatcgtagcgtatttggcggacatcggagttaaacacttcatcatcaatcctttgctgtccaaacgcgccaagagcgcgcaactccgcaaagtaaaaacggatgcagcagatgcttggcatctagccgaaatgtactatcgaggcgatgtagagccgcatcggagctggaacgagtgctatacggagcttcagcatgtgactcggcaacatgaattcatcacttcgctatatgtacaggcaaagctcaatatgcgtgcgttgttggatcaggtgtttccaacctttgagagtgtgttttacgatttgttttcagttacagcgcttgctacattgcaggtttgtttgtccggtcaggatcaagaatgggaagaagccattcgaaagcaagcaggtaaatcgcgctcgacatcctggattcgaacgaaagtcgagcatttagaggtcatctatgagcaatggagcaagagcaagaaaagcgctactcagatacagatgctgagaagcatggtatcgttgcttctctccatgcaggagcaactcgaagcgattgagaagcagatgaaacagctagcagaacaactgccagaagtggggcttgttaagagtatcccaggggtgggcgataaacttgctgcaacgatcatatcggaagttggggacgcacagcagttcggggatgcaaagcaactggtcgcatatgcggggctagatccaggtgtttacagctcaggacagtttgtggccacaagcaatcgaataacaaagcgaggttcaaagcggttacgcagagcgttatatctggccgtacagtgcggactcaggggaagtacgaacgagagacttcgaggatattatgacaaaaaaagagaagagggcaagccctacaaggtgacggtgattgcttgcgccaacaagctactgcatcacatctacgccatcttgaagaagggccagccctaccaagcataaaccatatttaaccaaaaccctccacgccaatggaggttatttggtgtgcggtaaaattatatcaggttcttgctgtccggccaacacactaaagcttgacaaacattagctgg

SEQ ID NO: 3064 - DNA, 1359 bp, unidentified
  source 1..1359: mol_type = unassigned DNA; note = element_46fbe06
  misc_feature 1..2: note = core
  misc_feature 3..312: note = LE
  misc_feature 313..1107: note = CDS
  misc_feature 1108..1359: note = RE
  misc_feature 1080..1347: note = bridgeRNA
tgatggggtggacgcccccggcggcatcgatgtgccaaagtggaggtgttgaacacaccacttgaggaggcgcccatgtcggaagttaccacaatcggtctggatatcgcgaagaacgtttttcatgcgcatggcgcagatgccagcggcaggccgctgttcagtcgcaagatcagccggaccaagttgctggagttcttcgccaaacagcccccttgcctggtggcgctggaggcctgcggcggtgcgcatcattgggcccgggaactggcgttgctgggtcatcgggtcaagctgatcccacccgcctaagtgaagcccttcgtgaggcggaacaagaacgatgccgtcgatgccgaggccatctgcgaagcagcgcagcgacccaacatgcgatttgtggcgatcaagagcgaggagcaacaggcctcggcgctggtgtttagaacccgcgatctgctggtgcggcagcggacccagttgatcaacgcgatccgcggtcacctgaccgagtatggatgggtggcacccaagggtccctcgcacatagctgtgctcggtgacctactcgatggcgagatgggcacgtcgcttccggatgtggccacgcccatgttccgcacgatgctcgatctgcttgaggtgctgaacagcaagatcgtcgaactggacaaggagatcgctcggcgcgcccgagaggatgtgattgccaggcggctcatgacgataccgggcgtgggtccgatcaccgctacggcgattgccgccctcgcgccaccagccgagacgttcaccaaagggcgggactttgcggcctggttgggtctggcgccgcgtcagctctcgagcgggggcaagcagaaactgggatcgatcaccaagatgggcgaacgaacgctgaggcgtctgctcatcatcggatgcagcgcggtcgtcctgcaggcgagcaaacgtggtgcgcctgcaggctcttggcttgagcagatgatggccagaaagccgcgcatgctggtcaccgtcgcactggccaacaagacggcgcgcatcatctgggcgctactcatcaagaaagaggaatacaaagctccggttgcagccgcggcataggccaaggcggaccagaggtcgtcggagacgcagtcggtcgaaggaaggttggcacaacagtcggtgagacgggatcggaaaaccagggcttcccactgtgccttgagcacgctgtgggtgatatggatccggtccgcgaactcccatacgggcccgcagcctctggtgctgcatcagaggccggacagatggcagcatccgactacgggccaaccttcaaaaaccgcttgcgtcttacggggcgtccacaga

SEQ ID NO: 3065 - DNA, 1224 bp, unidentified
  source 1..1224: mol_type = unassigned DNA; note = element_4702b37
  misc_feature 1..3: note = core
  misc_feature 4..231: note = LE
  misc_feature 232..1194: note = CDS
  misc_feature 1195..1224: note = RE
  misc_feature 48..213: note = bridgeRNA
catcctatgtttgcactaggaaaagatattgagtataactaaatttatttcaacagaagaagagaaagataaaagctgatatgagtcattggtcttaaaagactgttcgcaatgctagttcctttctctctctgcttttgaacttggacagttcattggtcattaagaccgtatttaggattgataagtcttaagcagattcttccgtttactttcttaaaaaacaaatgtatgaaaaaaagtaaaaattatgttggaattgacctctcgaaattaagttttgatgttgctctttgtaattctgaaaacaagtatacctatcacaaatttgctaataatgaaaaaggcttcagttcattattgagtcttttaaataagtcagaatgtatttgtgtcatggaagccagtggttcttattacttaaagttagctacttttttatcaactcatgagattaatgtctgtgtaataaatgcactggtaatcagaaggttttctcagatgcgaatgagtagagcaaaaacggataagaaagatgctatgctgattgcagaatacggtagaagtgaaaatcctggcttgtgggaaccagaggcgaatcatactttagaacttaaacagatgcaggcttatctggaacagttgaataaaaacaggacagggtttattttacaaaaagaagcatttgctcaaaaccctgttaagagtgaagccattgaagcaagtataagttgtgttttagaaaaaatagagcaagctataaagacaatagaatgtcaaatggaattgatcataaaaacacatcatcaggaaatgtttgatcaattaagaagtattccaggaatgggaggcaaaacatctttgcttttaattgtaatttccggtggatttacaaaatttgaaaagtataaacaacttgtttcttatgttggaatctcacctagaatattcgagtccgggacaagcgttagaggaagatcaaaaatatgtaaaatggggatgagtaaggtaagagcaatgctttatctgtgtgcctggtctgctaaaaggtgtaataaagcatgtaaagacttatacgatagactcgttgaaaaagggaaagcaaaaaaattagctttaatagcagtggtaaataaattattaaagcaagcttttgccattgccactaaaaaagaatattattcattaaaataatctaaaataaatttggaaataaacacagtt

SEQ ID NO: 3066 - DNA, 1437 bp, unidentified
  source 1..1437: mol_type = unassigned DNA; note = element_4707936
  misc_feature 1..2: note = core
  misc_feature 3..231: note = LE
  misc_feature 232..1422: note = CDS
  misc_feature 1423..1437: note = RE
  misc_feature 11..196: note = bridgeRNA
gtcctaccgttcaagcgggccggatctgatcattcgtaggatcagggaagcccaggggttccgggtatggctgtgagcgtgtcgccgtctgatggctcaagagacttggccacccggagccccgcgacgactcgaccgctaattgggatacgcgacttgatcgcttcgtaggacagcgccggcgaggtcgtctgctgggagtcacgcgacgacgagctggcggaggtgaccgtgccccagatatgggccggagtggacatcggcaaggaacaccaccactgcgtggtgatcgacgcccagggaaaccggctcctgtcgcgccgggtcctgaacgacgagacggtcctgctggagctgattgccgacgtgctcgcactctccgaggacgtcctgtgggcggtggacatcaatcacggcggcgcggccctgctgatcggactgctactcgatcacggccagccgatggcctacctcaccggcctggcggtgcaccaggcatccgccggctaccggggccaggggaagacggacgcaaaggacgccttcgtcatcgctgatcaggcccggatgcgcaacgacctcggccgcctgcggcccggcgacgagatcgcggtcgacctgcgcaccctgacccgacgccgcaccgacctggtttgcgaccgcacccgccagatcaaccgcctgcgggcccaactcctggagatttttccggcgttggagcgaaccctgacagtgacaaacaggggcccgatcatgctcctgaccgcttaccagaccccggccgcgatccgccgcagcggcgtcaagcgcatcgagacctggctcaggaaccgcaaggtcaggaacgccgcggccatcgccgccaccgctgtcgaggcagctgttgggcagcaggcgtccctgcccggcgagaagctggccgccgccatggtggcccgcctcgcgaaggcgatcatcgccctcgacgaggagatcgctgagctcgacgccctcatcgaggcccgcttccgcgagcacccgcatgctgagatcatccgcagcatgcccggcatgggcaccttgctcggcgccgagttcatcgccgcgacgggtggcgacatggccgcgttcggcactccggaccgcctggccggcttcgccggcctggccccggtcccacgggactctggacgcgtcagcggcaacatgcgtcgtccccaccgttaccaccgcggcctcctgcgggccttctacctctcctccatggccagcatcaaatcgtgccccgcgtcgagggtctactaccagcgcaagcgccacgaggggaagggccacaagcaagccgtactcgccctggcccgtcgacgggccaacgtcctctgggcaatgatccgtgacggagcgttctatcaaccggcaccgtcagtcactctggcggcttgacttcctcattgggaa

SEQ ID NO: 3067 - DNA, 1620 bp, unidentified
  source 1..1620: mol_type = unassigned DNA; note = element_470aea5
  misc_feature 1..2: note = core
  misc_feature 3..437: note = LE
  misc_feature 438..1499: note = CDS
  misc_feature 1500..1620: note = RE
  misc_feature 13..312: note = bridgeRNA
ctactacaatatatttatggttaatatcccttacagccagtaaggaattatccatcttgttgcttaagctgttaaaatgtatggagcaatcggtatatcgtcttattcatcttggacttcgcgtccgttaccgagactgataaccagctcctcatttgcagcgttcgttttatgcaggttgaactgccttcggtacgttcgtgtcacaccacagtagatggaataggcaatgagtaaaactggtctttatccattgcataatctgattttaaggagtgacaaatttatgaatatgaatgcagtaggtattgatgtttccaaaggaaaaagcatggttgctatccttcgtccttatggtgagatcatttcaaaaccatttgaagtcaaacacacagtcagtgggattcgctctctcattgagcagatccaatccattgatggcgaatctcgtattgtcatggaacaacaccggtcgttattacgaacctcttgtccgtgaactttcgaaagctgacctttttgtatctgccataaatcccaaactcatcaaagattttggagacaactatctccgcaaagtaaagtccgataaagcggatgcagtaaaaattgcacgctatactcttgacagttggacggaactcagacagtatagtctcatggatgaaattcgtaatcaactgaaaaccatgaaccgccagtttgatttttacatgaaacacaaaaccgctatgaaaaataatctaatcagcatccttgaccaaacttatccgggagctaacacttattttgacagccccgcccgtgaggatggaagtcaaaaatgggttgacttttcagccacctactggcatgtggattgtgttcgtaaactctctctaaacgcctttatcgaccactatcaaaagtggtgtaaacgcaggaagtacaacttcagccgttcaaaagctgttgaaatctatgaagcatctaaggagcttgtttctatacttccaaaagacgatctgacaaagttaatcatcaaacaggctgtagaacaattaaatacggcttcacagactgtggaacagcttcgtaccatgatgaatgaggctgcttctaaactgccggaataccctgttgtcatggctatgaaaggtgtaggtaaatcgcttggtccacagcttatggcagagattggtgatgtctcccgatttacccacaaaggagccattacagcctttgcaggcgttgatcccggcgtaaatgaatccggttcatatgagcagaaaagcgttcctgcttccaagcgcggttccagtactcttcgtaagactctgtttcaagtcatggatgttctcatcaaaacaaagccacaggatgatcctgtctacttgtttatggataagaaacgagcacaaggaaagccttattacgtctacatgacagccggtgcgaataagtttcttcgcatctactatggtcgagtgaaagaatatctgtcttcactcccagaataaatatctcgtcaatacctttattttagaccagcgaatatcggtggtcttattttaatgttcaaaatcttgcaaaaatttttgcctgaaatcatcaatttgctattgactttttatttgcagg

SEQ ID NO: 3068 - DNA, 1365 bp, unidentified
  source 1..1365: mol_type = unassigned DNA; note = element_4712f23
  misc_feature 1..2: note = core
  misc_feature 3..79: note = LE
  misc_feature 80..1105: note = CDS
  misc_feature 1106..1365: note = RE
  misc_feature 1081..1352: note = bridgeRNA
tgatggggtagacgcccccccaacggcctcgctgtgccaaagtggaggtgttgatgagcaccacttgagagaggcgtctatggcagaggttagcacgatcggactggatctagcgaagaatgtctttcaggttcacggcgctgatggatcgggagcagtgctgttccgcaagaagctgcggcggcatcaggtcctcaccttctttgcggcccagccatcttgcaccgtggccatggaggcctgcgccagctcgcactattgggcacgcgagatcggccggctcgggcatgcggtccggctaatcccgccgacctatgtgaagcccttcgtcaagcggcagaagaatgatgccgccgatgccgaggcgatttgtgaagcagcccagcgcccgaccatgcgctttgtggcgcccaagagcgagcaagctcaagcctcagccgtcgtattccgagcccgcgatctgctggtgcgacagcggacccaaatcatgaacgccctgcggggccatctggccgagttcggcatcgtcgtggccaaaggcccggctcacgttccgcaacttgtgcaggctgtcgaggatgaggcagaaccaatcccggaacttgctcgaccaatcctccagctactgatcgacacgctccatcggctcgacgagcagatcgccagtctggaccgcgaggttgcccagcgggccaaggagaatgagacggcgcgtcggctgatgactattcccggtgtgggcccagtgaccgcagtagccctggtggctcttgccccgccggctgagaccttcaagtgcgggcgtgactttgccgcctgggtgggcctcacgccgctgcagcattcgaccggcggcaaacagaaattgggcgcaacctcgaagatgggcgagcgaacgctacgccgcctgctcatcatcggagccaatggtgtcttgctgtgggtcgctcgcaacggcgctcccgcagggtcgtggatcggccgcatgctggcgcgcaagccgccgatgctggtgcgggtggcactcgccaacaagatggctcgcatcgtctgggccctgatggcgcgaggtgaagtgtatcgggctccggctgcggtggcataagccgtcgcggccgaggggctgttggggcgtgggaagagcgaaggagaggtatggcgcaacggtcaacgagacgggatcagacaaaccagcttgggaacgagcgccttgagcgcgtagatctgattgggacctgatccgcgaactcccatccgggcccgcggcatgtgaaaagccgcatttaaggccgaacacatgtcagccctgaccacgcgctgcaccaacccaaagattcttcttgcgtcaccaggggcgtctacaca

SEQ ID NO: 3069 - DNA, 1395 bp, unidentified
  source 1..1395: mol_type = unassigned DNA; note = element_4715a53
  misc_feature 1..2: note = core
  misc_feature 3..88: note = LE
  misc_feature 89..946: note = CDS
  misc_feature 947..1395: note = RE
  misc_feature 1090..1382: note = bridgeRNA
agatgggatggttgccgccctacctgacggcatcgtaatgtgccaagatagtggtgattacagccactgagcagaaaggacggcaaccatgatgaaggatacaatgattggagtagatctggcaaaggatgtttttcagctacacgcggcctcaatgacggggcagccacagttctgtcggaagctgtcgcggcagagttttcccgggttcatggcgaagcagcctcccgcggtggtcgtgatggaggcctgcggcagtgcccattactgggcccgtgagatggtcaagcttggccatgaggtgaagatgatagcaccgcgttacgttaaaccgttcgtgaagcgccagaagaacgatgcggcagacgccgaggcgatcgtgatcgctgcccagcggcccgagatgcgcttcgtccttccaaagagtgctgaacaacaaagtcgggcgattttgttccgtgcccgggaacggctcgtccaccagcgcaccgagctggtcaacgcactcagggcaagcctttatgaatttggttacgtagttccccaagggttccgccagatcaaacggatcgcagagatcctggaggcgccgaatagtgatttgcccgatctgatgcgggaggaatgccgcgatatggtggagcagatcgccgagcaaacaaaccgcatcaatgcccggaccgcgaagatccaggcgctggctaatgaagctgacaccgcgcggcgtttgcaaaccatccccggggtcggcccaataactgctctggcagtcgaagcttttgcccctgcgatggagaacttcagctgcgggcgcgactttgcggcttggctcggcctcgttccacgcagttttcctctggtggtaaagaacgacttggccgtacttctaaggctgggcaagctgatatccgcagactgctcatcattggcgcgatgtcacgtctgaactggatgggccgtaaatcaataccagaggactcgtggctggcacggatctcatcccggaaaccgcgaatgcttgtggctattgctttggccaacaagatggcgcggacgatctgggcgctaataattagaaatgaggattatcgagttccggcacaggtggtggcaacatgagcaacaagccgcaaaatctgcctgacgtcggataagggaggtgtgagaaggcgacgaccagaatgggcaaaatgatcgaacagatctgggtcagaaaaaccagttagggactctgagcatagaagctcgctaacgagatttggatctgacccgcaaatcaccataccggccagcggcttctaacaatgccgcattcaaaggccttacagaagaccgcattcgatcacttgtacagatggatcaaaaacctcttgcattatgggcggcaaccacaga

SEQ ID NO: 3070 - DNA, 1401 bp, unidentified
  source 1..1401: mol_type = unassigned DNA; note = element_471ceb1
  misc_feature 1: note = core
  misc_feature 2..224: note = LE
  misc_feature 225..1388: note = CDS
  misc_feature 1389..1401: note = RE
  misc_feature 14..239: note = bridgeRNA
ctacttgtttcattgacctcaggtgcgggtctggccgaggctcgtgctgaggtgtccggggtggtcgctctcactgcggctgccgccctttcgggttggctctcatttggcctgcgcagccccgggcaccgccgggccgggagaggctcaagaggggtctgccctgctcgaagtagcgttgccctccctgctcaaccgaacacacaggttgaagggagaacatcgtggagcatgtggtgatcgggatggatcctcacaagcggtcggtcacgatcgaggtgatcaccggcaccgagcaggtgctggccaagcaccgcttcgacaccaccgccgaggggttcaaggacctcctgcggtacgcccggcagtggccggatcggctgtgggcggtcgagggctgcaacggcatcggtcggcatgtcgcgagccggctcgtgatcgccggggagacggtggtcgacgtgccgccgaagctgtcggcgaggttgcggatgttcgacacccgccagggccgcaagaccgatcccgacgacgcccacgcgatcgcgctggtcgcgctgcggatgaacggcctccggccggtggtcaacgatgagcagcaggccctgctgaggatcctggccgaccggcgccgcgccctgggtgaggaccacacccggatggtctcccagctccaccagctgctcctcgaactcatccccggcggcgcgaagaaggacctgtccgccgcccaggcccgagtcctgctctccacggtgcgtccccgagacgtggtcgggaagacccgcaaacgcgtcgcgctggagctggtgggtgacctggagaagacctatcaacgatccaaagccctcgacaaagaactcaagcaggccgttgccgacaccggctcgaccctgatggagctgcatggcatcggcccctcctcggcggcccggctgttgatcgaggtcggcgacatcgcccggttccccgaccggaaccacttcgcctcctggaacggcaccgcacccctggatgcctcctccggtgaccagaccaggcatcggctctcccgtgccgggaaccgacagatcaaccgggcgctccacgtcatggccgtcgtccaactccgcaaccccaccgaaggccgtacctactacgaccggcgcaaagccgccgggaagacctcgatggaagccatgcgcagcctgaaacgccgcctttccgacatcgtgtaccgcaccatggtcaccgacgccctcgccaaaggagcgagcccgggagggcaacggggagcgtcagcgacatccagcgcggccggctcacatccccacaccagcacttcggaaaagccacttcccggacccgccacaccaagcctacgaccagccctccccgcggccagttgacacagaggggcgc

SEQ ID NO: 3071 - DNA, 1324 bp, unidentified
  source 1..1324: mol_type = unassigned DNA; note = element_47227ce
  misc_feature 1: note = core
  misc_feature 2..56: note = LE
  misc_feature 57..1073: note = CDS
  misc_feature 1074..1324: note = RE
  misc_feature 1088..1322: note = bridgeRNA
taatgaaatggacacccctttatactgacctagtcagttaatacggaggtgtaccaatgaataacataaatgtagttggaattgatttggctaaatcaatatttcaggtctgctgtgcagataataaaggaaaaataattcttaacagatcacttcggcgtgcgcaaattttaaagttcttcagtaacttaaaacctgttctagttggtatggagtcatgttctagttctcattattgggcaagagaacttacaaagctaggtcatgaggtaaagttaatgccacctcagtacgtaaagccctatgtaaaaaccaataaaaatgacgctgctgatgcagaggccatttgcgaggaagtaacgagaccaaatatgcgctttgttagcgtgaaaagccctgagcagcaagcattgctactgattcatagagagcgagaaggtgtgatccgggatcgaacatcgttaatcaatcggattcgggctagtatgcaggagtttgggataagtgttcctgccggacggtatcaattggcaaagtggttccgaacggactttgctgatgctgaattacgcatgccatcattactgtttgatcatatcaggtccatggaagtgcgcttaagggaactggaagaatatataaaacgtttggatacgttaatagatacgaccagcaaagatagctacctttgtaaaagtcttatcgagatacctggcgttggtcgattaactgcttcggcgatagtagctagtgtaggcgatgccaaaagtttcaagtctggtcgacaattttctgcttggttggggttagtaccaaaacaacattcaagcggtgggaaaaataccttaatggggattagtaagagaggtgatacatatatgcgacgaatgctcattcatggagcaatagcagttattcgtcacataaaacctggtaaaccattttatgaatgggtaaacgaattactatcaagaatgcataagaataaagtagttgtggctttagcgaataagttagcaagaatttcttgggcaatattagtacacgacagagcattcgctagcaacaattgaacaatcaaagataatgatacttcatggttttgcgaaggaaaatagaattgatgacaagataggtaggaccgtgatctagaaactctgtgcctaacatcgttcgttcagagaacgtaaaaatgattagagctagatcagcgaatttcatcaggggtataggtattaaaaatatcttattaaaacccggatagatggatgcataacctttcaatcgtcaatatttttcttgcaaaagctggggtgtccataga

SEQ ID NO: 3072 - DNA, 1388 bp, unidentified
  source 1..1388: mol_type = unassigned DNA; note = element_472c41c
  misc_feature 1: note = core
  misc_feature 2..240: note = LE
  misc_feature 241..1371: note = CDS
  misc_feature 1372..1388: note = RE
  misc_feature 1..225: note = bridgeRNA
cgttacctttattgtcgtccccagccggggaccctcggtcgcccggcctggtatgactgcttgcccctgtcgtttggatgatccggggggtgttgtcgccgggtcgggtggcgtcggtggaccgctgatagggacacggtcacccgtgttggggtaggtctcttcgtaacgtggctgccggcagtccgacgcctggaccagcggccggggccacgggatcgatgcgtggaggcgggtctggtgagcgacggatacggtgtctacctcggcttggacgtcggcaaagagggtcaccacgcggtcgggttgagcccggacggcaagcggctgcatgatgcggcgttgccgaacacggaggctcggctgcggcaactgttcgacaagctcgcccgccatgggcgggtgctggtggtggtcgaccagccggcctcgatcggcgccctgccggtcgcggtcgcgagggcggccgggcatcaggtggcctacctgcccggcttggccatgcgccgtatcgctgacctgcaccccggtgcggcgaaaaccgacgcccgggacgcgtttgtgatcgctgacgccgcccgcaccctgccccacacgctgcggcgggtcgacgtcggtgacgagaccttggccgagctggaggtcctcgtcggcttcgacgacgacctcgccggcgaagccacccgcgtgtccaaccggatccggggcttgctgacgcagatccatcccgctctggagcgagtcctcggccccaaggtccaccacaaggcggtcctggagttgctgtcccgctgcggcggcccagtcgggctgcgcaaggccggccgccgcaagctggtctcgatcgccgctgttcatgcgccacgcatgggcgaacgcctggtcgagcagatcatgaccgccctagacgagcagaccgtcaccgtccccggcaccgccgcggccgagacgatcctgcctcgcctggctgacagcctccgagatgtcctgcgacaacgtgaccaggtcgccggcgaggttgagaggatcctcgatgcgcaccctctcgcttcggtcctgacctcgatgcccggcatcggcgtcaggaccgcagcccggatcctgctcgaagtcggcgacggcaccgccttccccacccccgggcacctcgccgcctacgccggactcgcccccgtcacccgacgatccggcagcagcatccgcggcgagcacccaccccgaggcggcaacaagaacctcaaacgggccttcttcctcgccgcgttcgccgccctcatctgcctcgcccgacgccgctgcgacgtcctcttcgccatgctccgcgacaagatcccctaccagccgcgccccaccagcccggtccccgcttgacgaaacccatagggaca

SEQ ID NO: 3073 - DNA, 1285 bp, unidentified
  source 1..1285: mol_type = unassigned DNA; note = element_472dd94
  misc_feature 1: note = core
  misc_feature 2..59: note = LE
  misc_feature 60..1052: note = CDS
  misc_feature 1053..1285: note = RE
  misc_feature 1054..1278: note = bridgeRNA
taattagatggtacgccccacacctaaactacactcagcataatcgctgcacttcagtcatgtcagctatcaaaacaatcggtatcgatcttggtaaatctacctttcacttggttggtcacgaccattctggtcaagagctttatcgacataagttctcaagggctaaattaattcaatttatctctgcacatgaacctgtaactatagtgatggaagcttgttgtggtgcaaactggctagctagacgttgccaagaatttggccacaacgttaagccttatgttaaaagtcacaaagatgacttcattgacgccgacgccataaccgaagcagcgacaagacctaaaatgaggtttgtaacacctaaatctgagcaagcgcagttaggaagcgtaattcgtcgaattcggacttgctatataagggaaaggacggctgtgatgaaccgaatttcttcaattcttgttgaatttggttttagcttccctcgtggtcatgcaaatatgaaacggctttttcagtggcttgctgacactgggcagtcacttcctccactacttgtttttgagctacgagaacaactcgatcattacaacgaactcaatgataagattaaaaaacaagataagaagattgaaactcttaatcatgagaatgaactgtttactttgctgcaatctattcctggagtaggtccaatgactgctgcttgttgtctgtctgccgtgtcagatcccaaagatttttccaacggtcgtaattttgctgcctggataggagtagttccatttcaatattcgacagggggtaagccgaggcttcttggaatatcgaaacgaggtaacaaagaacttcgcgaactgtttgttcacgcagcaagatcagtgctgtggcgagatgctaccgcggagaaatattttggtacgtggttattagacttgaagcgtcgaaaacctttcaatgtagctttagtagcattggcaaataagctagccaaaatcgcttggtcagttatggcaactcataaaactttcgagatcagaacataaatcaagtttgcatatgaaaatgaaagatgacaaaacggttagaccaccagattgaaaacctgatgtccagaacagcaaccaatatgctttcacatttttgaggacaatctggcgcggatctcatcgtggagctggggctaaagataaagtctcaattagactccgaatacattagcgcaaaccagctcccgttattttgaatttttacttgcaaaacggggcgtaccatacat

SEQ ID NO: 3074 - DNA, 1355 bp, unidentified
  source 1..1355: mol_type = unassigned DNA; note = element_472eeb5
  misc_feature 1..2: note = core
  misc_feature 3..74: note = LE
  misc_feature 75..1100: note = CDS
  misc_feature 1101..1355: note = RE
  misc_feature 1124..1351: note = bridgeRNA
ttaatgagatggtcacccccacaccctgtcagggctaggctttgacagggtgttttatttcggaggccatcatcatgagcactgtaacgctggtagacatagatctcggaaagcacagcttccatctgcacgggcaggacaaggccgggcgagaagtctttcgcaagaagacgacacgccagcagatgatgcgattgctgggcaacctgccgaactgcacggtggtgatggaggcctgtgcaggatcgcacttcctagcgcggcagctaatggcgttcgggcatgaggcaaggctgatctcgcctcagttcgtgcggcccttcgtcaagggcaacaagaacgacttcattgatgccgaggcgatctgcgaagccgcctcccggcccgctatgcgcttcgtgacaccgaagaccgaaacccagcagacgttgtcggtattgcaccggatgcgcgaatccttggtgcgtgaccggacgaagacggccaaccaggctcatggtttcctgctggagttcggtatcagcctgcccaaaggcctatcgttggtcaggcggttgccatgcacgttggacgagcacgagttgccccctcggctgaccatgctgttgaaacgcctgcacgagcacttctgctacctggacgagcagatcaaggccctggacaaggaaatggacagccaactggccgctgacgatctgggcagccgtctgctgagcatcccctgcgtggggccgatcacggccagcctgctgtgtgcagagatgggcgatggcaaacagtatggcggcagtcgtgatttcgcggcatcagtggggctggtgcctcgccagtacagtacgggcggccgggccaatctgctgggaatcagcaagcgcggcgacaagaacctgcgacgacttctggtgcagtgcgccagggtttacctgcagcgcctggagttccagcaaggagccctggccgactgggtgcgctcgctacgtgagcggcgccactcgaatgtggtggtgtgcgccttggccaacaaattcgcccggatcgcctgggctatcgcggccaatcattcggagttcgaaacggagccaggcgctgctgctgcctgacccctccattaccgctgtaccacgaaacaccctttcaggttttgcgatgctgaacaactgatgacatgaacggcccaccggcctggcgaagaacctgacattaaaatcggctctcgaagccgccgggtttttcaggatcgccaggcgcgactctcatcatggcgcggggcataccccataaagacgccggatagatttaggcaagccatccattcatcgctgatcagtgttgcagaaacgggggtgaccatagat

SEQ ID NO: 3075 - DNA, 1397 bp, unidentified
  source 1..1397: mol_type = unassigned DNA; note = element_473209b
  misc_feature 1: note = core
  misc_feature 2..88: note = LE
  misc_feature 89..1114: note = CDS
  misc_feature 1115..1397: note = RE
  misc_feature 1166..1389: note = bridgeRNA
taatgggatggtcgcccccttctgagacggcatcgatgtgccaaagtggagttgtgacacaaccacttgaacgaaaggggcgaccgagatgaagcttacgacgattgggattgatctggcaaagaacgtgtttcaggtgcatgggacggatgacaaggggcgggcggtgctgaggaaacagctcaagcgagcgcagatgctgccgttctttgccaacctgccgccgtgcaggatcggcctggaagcctgcggcagcacccactactgggcgaagaaactgcaggcgctcggccacacggtgcaattgatcgcaccgcagtatgtgaagcccttcgtcaggcggaacaagaacgacgcggcggatgcggcggcgatctgcgaggccgtgacgcggccggacatgccgacggtgccgatcaagagcgccgagcagcaggcgatcctgagtgcgcatcgtgcccggcaaggcttcgtcaaggcacgcacggcacaggccaaccagattcgcgggttgctggccgagtacggaatcgtcctgccgcaggggataggccatattgcccaacgggtgcccgcgatcatcgaggacggccagaacgacctgcctggcagtttccggctgctcattcaacgcctgcttgatcacatgaaggaacttggccgccagatcggcgaattggccgccgaaatccaattgtggcatcggcagaatgccgccagccagaagttggcggcgattccggggctgggcccgctcaccgccacggcgatcgtggcctccatcggggatgcccgcaacttcaagaatggccggcaactggcggcttggctgggcatcgtgcccaggcagcactcgaccggcggcaagccgacgcttcttggcatcagcaagcggggcgatgcgtacctgcgcacgctgctcatccacggcgcccgggcggtcatccgaacagctgaacgcaaaccggatgccggtccgtggcttacccaactgctggcgcgccggaacaagaacgtggcggcagtagcgttggcgagcaagaatgcacgaacaatctgggcgctcctggcgcatgatcgtgagtacgagccggattacggcatgacggcatgattaacaccgcggcgtaatgctgcgacgagaacggcttcgaaaggagaacctccaccgattgcacaggcaatcacgacatgatggcaagacaggtcagaccgtggctccgccaacctgcgaaaagtcgggcgcttcgagcgcgtgagactgataaggacggggccagcgcattccatcagggacagaggcttgtggcctcgattacagtccggatctatggccgcaatctctacctacttaccatcatcgagtgaaggcttggcaaaccgggggcgaccatcta

SEQ ID NO: 3076 - DNA, 1196 bp, unidentified
  source 1..1196: mol_type = unassigned DNA; note = element_4737d4e
  misc_feature 1..2: note = core
  misc_feature 3..187: note = LE
  misc_feature 188..1168: note = CDS
  misc_feature 1169..1196: note = RE
  misc_feature 12..197: note = bridgeRNA
cttgtatcttgaagttttggatgattagctaccctccaagctctaaaatcagtgaggatgtttgaccacgtaatgtttaacattgagttgtagattatcccctgattttactttctctaatactggatggtatctgagcgcttagttgttaactaatgacgctgtatgcacaagtggagtcgttgatatgagagtaaatgttggaattgatgtgagcaaagattctttagatttctgtttattactaaatcaaaccaagagaggtcgaaaatttaggtgttttaaaaatcggaaaatcgattatttaaacatcaatgattggttgttaaagcaagctagatgcccacccgaagaaatcgtcattacgatggaatctacaggcgtttatcatgaagctattgctttatatttacacacatcaggttttcaaattattatttcaaatccaggtagagcgaagaaattctctcaatcgctagggttaattcataaaactgataaatcagactcatatatgcttgcaagatacggtgatgcacaatatgaacatgcttctttgtggaagccagatgcggagaacataagatcaatcaaagcgttagttcgtaggctatcagcgttggaaaaagatcgtttgagagaaagcaaccgacttgaagcttgcataatcagtggttcttatgagcgagttctgttatcaattaaacgaattgtccacattttagatgatgaaattaggacattgaacgtgaaattgatgtcttgtcccttcatgagtaaaaatcatgatttacttatgagtgttgtaggtatcggcaaggtaatgtcgagagagttagtgtatttattttcagccaagagcttttcaacagccaagcaagcggctgcatttgtaggtcttacgccaaggcttaatgagtctggttcatttaaaggtagaaccacattgagtaaaattggcccatctcgaattcggtcaaaaatatttttggctgcagttagcgctggcaaatacaatcccgatatcaaagcacaaaaaaagcggccattagccgctggtaaaacaaaaatgcaagcgttaggtgctgctatgagaaagctaattcaaatctgttttggcgttataaaaaatcagacaagatatcagtctgcattaactttaaattaagtttgtggttgtgtcagatagatggtat

SEQ ID NO: 3077 - DNA, 1542 bp, unidentified
  source 1..1542: mol_type = unassigned DNA; note = element_473aaa7
  misc_feature 1..2: note = core
  misc_feature 3..239: note = LE
  misc_feature 240..1250: note = CDS
  misc_feature 1251..1542: note = RE
  misc_feature 3..219: note = bridgeRNA
cttgtattatagagtagtagtgattagagtccctctccaaggacttgtgctacactgtaaaggatgctgtggattggttgaacgctcctaccgcaagacggttcgtgaaaggctccaaccacagtcctttacaagtttgttgatcagttagataccgccagacggtttatgtggaacaaggttacaagcgtaaagtgtcctgtggacccagcatcaaataacccgttggaggtaccgttatgatctgtgttggaattgatgtggcaaaggacaagcacgactgctttatcctcagctcggagggcgaaatcctggcagacgtgttcaccatcccaaacaatgcagaggggtttgaccatcttctgcaaatgattcgtaactgttcccgccctcaagacaaaataaaagtaggacttgaggcaaccgaacactacagctacaacatcctcggatttttgcttgacaaaggtatgcccacctacgtcatcaatccgctgtacaccaacctttaccgaaaaagcctcagccttcgtaaaacgaagacagaccgtgtcgatgcacgaaccattgcaactatgctcatgtctgatgtggacctcaagtcctacacagacacagcataccacaatgaggaactaaaatcattaacaagatatcgatttgacaaggtcagagagcgagccaagctgaagcaatctgtctctcgcttggtcaccatcctgtttccaaaacttgaaaaattggtatccactctccatatggcctctgtttatgccctactggaggagcttccgggtgccaaacagattgctggaacccatctgacacacttgaaatcgcttctacagactgcttccaaaggccgctgcagacgagagatggcgatggcgctcagggacactgccaggtgttccatcggttcagtcatgcctgccaagtcgcttggattacagcatacgatccgtctgattcgagaactggacgcagagatcgacgacatcgagacggccatccaagccatcatggaggagaaccgatctcctattacgactatccccggaatcggcacccgcatgggagctatgattttggccgaaatcggtgacttttcacgatttgattcgccagataaggttttggcttacgccggtatgtcaccttctacttatcagtctgaacaactatccctatccggcacctattctcacatggagaagcgaggctccagatatttgagatacgctctttaacaacgcaactaaatacgtttgcctttgggacccaacctttgctgaatatctggccaagaaacgggcagaaggaaaacactacaacattgcgctctctcatgctgctaagaagttagtgcggctgatttacgctatagagaagtcccgacagccatatcacgccgctgcataacagctcagcttcatatcctcgaccggcgtccaaagggacgtctgtttcgctatgctcttttgagccatctgcaagttgataccaatccactctctttagacttgacttttaatagttagt

SEQ ID NO: 3078 - DNA, 1441 bp, unidentified
  source 1..1441: mol_type = unassigned DNA; note = element_473d6f5
  misc_feature 1: note = core
  misc_feature 2..230: note = LE
  misc_feature 231..1424: note = CDS
  misc_feature 1425..1441: note = RE
  misc_feature 1..234: note = bridgeRNA
ccgttaccttcctgctggccccgcgccgcggggttcgtggtcgccgggctcggcatgactgaccgcccctgttgttgatgatccggggggtgttgtcaccgggtctggtggcgtcggtggaccgctgatagggacctggccgccgttgcaggtggtctcttcgtaacgtgggtgccggcagctgacgcctgatccggcgaccacgtggctcgatgcgaggggaggccgcgatgacggtcgactacgcggtgttctgcgggctggacgtcggcaaggacacccatcacgccaccgcgctggaccacgctggcagtcggctgcacgacggggagctgccacaggacgaggcacggctgcgggctctgttcaccgggttgcagtcccgtgggcccgtgctggtcgtggtggatcagcccgccacgatcggtgcactgccgatcgcggtcgcccgtgcctgcggctgccaggtggcctacttgcccgggcttgcgatgcgccgcctcgcggacctgcatccgggtcaggccaagactgatgcccgcgatgcgttcgtgatcgccgatgcggcccggacgcttccgcacacgctgcgcagggtcgatgtcggcgaggaagcgctggccgagctgaaggtgttggtgggtttcgacgacgaccttgctggtgaggtgacccggctatccaatcgggtccgtggcttgctcacccaggtccaccccgcccgggagcgcgcgttgggcccacacgtgcagcagaaaggaggactggccttgctggccaggttcggtggcccggacggcatgcgccaggctgggcgtcgccggctggtcgctgctgcgtcgaaagcctctccgcgtgccggagcagctctcgctgagcgggtctgggaggcccttggtgagcagacggtgaccgtgcccgggactggcgcagccgaggccgtgctgccccgcctcgcccgctcgttggccgaggtcttggaccagcgtcgccagatcgccaccgaagtcgagaaagtcctcgatgcccaccctctcgcagaggtcctgatctcgatgcccggtgttggggtcaggaccgcagcccggatcctgctcgaggtcggcgacggatcctcgttcccgaccgctggccacctggccgcttacgcgggccttgcgccggtcacccgacgctccggatcgtcgatccgtggcgagcacccaccccgcagcggcaacaagcatctgaaacgagcgttcttcctgtccgcgttcgccgccctgcacgacccaacctcccgcgcctactacgaccggaaacgagccgaaggcaagaagcacaacgccgcgctcatctgcctcgcccgccgacgctgcgatgtcctcttcgccatgctccgcgaccagcagccctaccggcccccaatgccatccgcggcttgacgtcaggcatagggaca

SEQ ID NO: 3079 - DNA, 1370 bp, unidentified
  source 1..1370: mol_type = unassigned DNA; note = element_474417a
  misc_feature 1..2: note = core
  misc_feature 3..77: note = LE
  misc_feature 78..1103: note = CDS
  misc_feature 1104..1370: note = RE
  misc_feature 1136..1366: note = bridgeRNA
ttaatgagatggtcagcctgaccgaaacagcccgatcggcttacgctgatcgggctgtttccttatgggagatcgtcatggacaccatctcgttgatcggaatcgatcttggcaagcattgctttcacctgcacgcacagtccgcatcgggccgcatggtgttccgcaagaagctgacgcgcagccaaatgttcacgctgcttgccaatgtgccgagttgtaccgtggtcatggaagcgtgtgctggggctcactgggtcgcccggcgcatccaagaactcgggcaccacgcgaagttgatctccccgcagttcgtcaaacctttcgtgcaaggcaacaagaacgacttcgccgatgcacaggcgatctgcgaagcggcatcgcgcccgagcatgcggttcgtcagtccgcgcaacgaggtgcaacagacgatctcggcgctgcatcgcgtacgtgaagcgctggtgcgcgaccgtactggcactgtcaaccagattcatgcctttctgctggaatttggggtcagcctgcccaaggggatggccgtcattcgtcggcttccagccgtgctggccacacacgctctgccgccgcggctagttgaattgctcgagcgtctgcaagcgcatttcaagtacctcgatgaacagatcacgcagatcgaaagcgagctgatacggcagctgcgggaggacgaacgcagccaacgcctgttggagattcccggcatcggtccaatcacggccagcgtgttggcaactgaattgggcgacgcccatcagttcgcttgcgctcgccagtttgcggcatccatcgggctggttccacgccaatacagtaccggcggcaagacaacgctgctgggaatcagcaagcgcggcgataagcatttaaggcgactcctggtgcagtgcgcgcgagttctcatgctgcacatcgagcggcgcaccgatcgcctgggcgcctgggtccgcgacctgctggcccgacggcattccaacgtggtggcttgtgcgttggccaacaaattggcgaggatcgcctgggccatcctcgccagcggaacacactaccaaggtggtcaggttgtggcagcagcctgacacggtgcgccgcctccgttaccctttttacccagtcatttcctggttttgcgacgcgagatacgtgaagacataaacggctcaacggccgggcaagcaacctggtaaaacaaacagcactctgatgctgcgggttttttgaggtttgcccggcgcggctctcatcatggggcgggaacctgttcccacaacgaccccggatagatttgcgcatgcccaatttacgtcaacaccgcctcgcttgcaaaagtcaggctgaccatagat

SEQ ID NO: 3080 - DNA, 1396 bp, unidentified
  source 1..1396: mol_type = unassigned DNA; note = element_475097c
  misc_feature 1..2: note = core
  misc_feature 3..88: note = LE
  misc_feature 89..1120: note = CDS
  misc_feature 1121..1396: note = RE
  misc_feature 1091..1383: note = bridgeRNA
agatggggtggttgccgccctcttcaaacggcatcgcaatgtgccaggatggcggcgttgaaaccccatagctgaaaggacggcaaccgtgacagagaatattatgattggcgtggatttggcaaagcaagttttccaactgcacggtgcaacgatgaccgggcatgtgcgatttcgcaagaaactgtcccgggcacagtttgttcggttcatgacggatcatgcgccagctctcgttgtcatggaggcctgctccagcgcgcatcactgggcgcgtgaactggaccagcttggccatgaggtgaggcttatcgcgccacaatatgtccgtcccttcatcaagcggcagaaaaacgacgccgccgatgccgaggcgatcgtgatcgcagcacagcgcccggagatgcgctttgtcgagccaaagtcagagcagcaacaagcccgctccatgttgtttcgtggtcgcgagcgactggtacgacagcgcacggaactgatgaacgccttgcgctccaacctatacgaatatggctatgtcgcgccgcaaggggccactcacctcaaccggatcgctgagatcgtcgaggatccggacaccatcctgccagaaatcgcccgcgaggaatgccgcgatctgatcgaacagatcgccgaaaagacggcccgtatcgaggcgcgcatgaaaaagatcaaggctatggcctccgaaacggacatggcgcggcgcctgcaaaccatgccgggggtcggcccgctcacggccatggcggtggaggctttcgcgccagatatgagccatttccgcagcgggagggattttgctgcctggctagggctcgttccgcgccagcattcctcggggggcaaggaacgacttgggcgtgtatccaaggccgggcaggccgacatccgcaggctgctgatcatcggggcaatgtcacgtctcaactggatggggcgcagatcgattgccccaggatcatggctggcacgaatgatggccaagaaaccacgcctgttggtggcggtcgctctcgccaacaagatggcacgcgcgatctgggccatgctgacacggaatgaggattatcgagctccggcgcaggtcgcgcctgcatgagtgacatgcatcgcaaaatgacctgactccggtgaaagaggtgtgagaaaggcggcgacccgaatgggcgaaacgatcgaatggatctggaccggaaaaaccagcaggaggcgatgagcattgaaactcgaacgccagatttggacccggtccgcagatcaccataccggccagcggcatctgaaacgccgcgacgaaaggccttacagaagaccgctcttcgatcacaagcacacagggtcaaagacatcttgcacctcgggcggcaaccacaga

SEQ ID NO: 3081 - DNA, 1503 bp, unidentified
  source 1..1503: mol_type = unassigned DNA; note = element_4752046
  misc_feature 1: note = core
  misc_feature 2..265: note = LE
  misc_feature 266..1465: note = CDS
  misc_feature 1466..1503: note = RE
  misc_feature 10..265: note = bridgeRNA
ccgttaccttttaggagtccccgcaagggggacgatctggcctctgggcctggtatggctcctccaccctgtcgccgccgttggcggtatggccttgtgtgtgttgccgccgggcttggagcactgcttgaccgctgataaggggcctggtctgctcccgtgcccggtgcaagaccgggggtgtagggagtggcctgtgtaacgtggttgctggcgcgcggtgcatgggtttaggccaggtcggcacgatggatggagggtcttcgtgtacgacaccagcggcatcggcgtcttcctcggtttggacgtcggcaagggcgagcaccacgggcacgggctgaccccggccggaaagaaggtgttcgacaagcagttgccgaacagcgagccgaggctgcggcaggtgttcgacaagctcaaggccaagttcggtaccgtgctggtgatcgtggaccagccggcgaacatcggggcgctgccgctgaccgtggcgcgggactgcggctgcgaggtcgcctacctgccgggtttggcgatgcgccggttggccgacacctacgagggcgaggccaagaccgacgcccgcgacgcgttcgtcatcgccgacgtcgcccgcaccaacccgcgcaccctgcggcagatcaccgtcaccgaccagaccgaggccgagctggccatgctcgtcgggttcgacgacgacctggctggcgaatccacccgcacctccaaccggctgcgcggcctgctcgcccagatccacccgtccctggagcgcgtcctcggcaagcggatccgccacccggccgtcctggaactgctgagccgctacggctccccgcagcagctgcaccaggccggaggcgaccagatcgcggcggtcctgaagccgaaggcgccgcggatggccgcccgcctggccgctgagatcaccaccgcgctggccgagcagaccgtcgtcgtgcccggcaccaccgcagccgaggtcatcgtgccctcgctggcccggcagctggccgagatcctcacccaacgcgacgcgctggagggccggctggcagccctgctggaggcccaccctcttcaccgactcctgacctccatgcccggcgtcggggtcaggatcgccgccacagtgctgatcaccatcggcgacggccgcaccttccccgacgccgaccacctggcctcctacgccggactgtccccggccaccaaatcctccggctcctcgatcaaaggcgaacacgcacccaagcgcggaaaccggcagctcaaacgggccatgttcctgtccgcgttcgccgccctgcacgaccccgcctcccgcgactattacgaccggcaccgcaacagcggcaaaacccacacccaggccctgctacgcctggcccgccgccggattaccgtcctgttcgccatgctccgcgacggctgcctctacgaatcccgcccggcatcagcatgatcaaaccgcttcccctcttgacgaaaaacataggggca

SEQ ID NO: 3082 - DNA, 1575 bp, unidentified
  source 1..1575: mol_type = unassigned DNA; note = element_4752d19
  misc_feature 1..2: note = core
  misc_feature 3..244: note = LE
  misc_feature 245..1504: note = CDS
  misc_feature 1505..1575: note = RE
  misc_feature 16..241: note = bridgeRNA
tctgactgagacttcttgcggatgctgcggttggtcgtagcgtctgagaggtgcgacgggccggctcgcgaaccgtctgccggccgcgtgcggtctggctcattaacgagctgccggcctgtcgtgtctcatccgtggcgtggctcaaaagaggcccgttcgccgacgtcgtgctgcagtcagacatgcccgccgcggtcgtttccgttgtgtcgatgcggaggtggacgaggtggctgtcgtgatgatcggaatcgatccgcacaagggatcgcacaccgcggtcgcgatcgatgggaacgagacgccgctgggcagggtccgcgttcgggccacgatgcggcaggccgaagggctcaggcagtgggcgcagcgttggccgcagcgcagctgggccgttgaaggcgcacgcgggctcgggcagctgctggcccagcagctcatcgccacgggcgaacgggtcctcgacgtgccgcccaagctgggtgcgcgggtgcggctgctcgacagcggccagatcaacaagaccgacgagaacgacgcgcgatcggtcgcggtcgcagcgctgcgtgcgcaccgccttcgcgaagtgcgcggcgaggaccagacgatggtgctgcgggtctggtcgcgccgccatcacgatctcggacgcctgcgcacgcaagccgtgtgtcgcctgcacgcggtgttgtgtgagctcctcgccggcggcgtccgcaagcatctgagcaccatcaaggcggccgcgatcgtggagggtctcagcgcggatacccctgtcgcacaagccaaactcgacctcgcccgtgatctcgtggccgatctgcagcgcctggacgcgcagcgccgcgaagtgaaacgccgcatcgcacacgccgtcgccgagaccgacaccagcatcaccgacatctacggcgtcggcccgatcgtggccgccaccgtgctcggccaggtccgtgacatccgccgcttctccgaccgggaccgcttcgcctcctacaacggcaccgcaccgatcgaggtctcctccggcgaccgcaagatctatcggctgtctcggcgcggcaaccggcacctcaaccacgccatccacgtcgtggccgtcgcccagatcagccaccccgagaacccgggccacacctactaccagcgcaaacgcgccgagggcatgaccggcaagtgcgcgctgcgcgcgctcaaacgcaagatcagcgacaccctctacaacgccctgctgcgagacagttacccgcgcgaggacccgggagggcaatcggggaacgacgctgtcgccagcgtggccggctcacaccccgataggccggctcttcggagaagccactcccgggtcgccaccaactctaagaccgcggggacgtcaccgcctacgaccgaactgcggcctgctcccgaccggcgccgaaccagccggagcgcagccggagtcaaggtggagccccgcccgcgcccgctccgcgggcacgggcaggaacgaccttgacgccagcgagcaccggccacactcaccttcatcgggagcaggccgccacaccccttgacacaaagaggtcc

SEQ ID NO: 3083 - DNA, 1155 bp, unidentified
  source 1..1155: mol_type = unassigned DNA; note = element_4783c0d
  misc_feature 1..2: note = core
  misc_feature 3..210: note = LE
  misc_feature 211..1143: note = CDS
  misc_feature 1144..1155: note = RE
  misc_feature 13..213: note = bridgeRNA
cttgtcttatgcagatcccggctcttatgcgaagaaagagccactgcacgccacgccattcatggcgtgcagtggcggtggctggatcgtcccgggcttggtcgtgaaggaccgtcttagagtgtgatcagccatcgtcttcgcctggggcctgaacggatacagagcggcgcaaagccctctacgacaagcataggacacgcgaagacaatgaaagataccgtcggaatagacatctcgaaagccacccttgatgcttaccgcctgagcagcggagaggcggcgcaatttcccaattccgcagtcggtctgcgcgcgttgcgtcgctgggtgggcgagcaaattccggacctcgttgttttcgaggcgaccggtgcttatcacgctgcgctcgagcgccattttgccggcgttttgcctctggtgaaggtgaacccagtgcaggctcgccgttttgcgcaagcccgcggaacgcgggccaagaccgacgcggttgatgctcggatactggccattatgggggcggcactggatttggtgccggacgctccacaggacaaaggtcagcctgatctcaaagagttgcagatcgcccgcatggcgctgatcaaggagcggacacgcctgctcaaccgatccaaaacgcagaccctcgtcctcttgaagcgtcaatccaaggcacgccttgagcaggtcaagcgccagctcgtcgaactggaacaggccttgctggacctcttgctccagtgcccgaaacgggctcgcgccttcgaggttctctgctcgatccccggattggggcaggtcaccgccgtggccattctcgtggagtgcccggaaattggcaccatgacgcgaaagcaggtcgccagcctcgcgggccttgcgcccatgacacgacaatctggtcagtggcgcggcaatgcgttcatccagggcggccgcaagttcctgcgcgacgcgttctacatgccagcgcttgttgccgcccgccataacccggatctgcgtcagagataccagaccatgatcaacgcgggaaaacctgcaaaagttgccctgaccgctctcatgcgaaagctgatcgaactggccaacgcactcgtccagcaagaccgcagatggacgccgaaaacggcttgatcaagacggata

SEQ ID NO: 3084 - DNA, 1349 bp, unidentified
  source 1..1349: mol_type = unassigned DNA; note = element_479a713
  misc_feature 1..2: note = core
  misc_feature 3..152: note = LE
  misc_feature 153..1091: note = CDS
  misc_feature 1092..1349: note = RE
  misc_feature 1067..1337: note = bridgeRNA
tgatgatgtaaccgcccccgacggcatctctgtgccaaggtgggattgcaacaatccacataggagtgcggtcatgtcggaagttatcatcggggctggatctggccaagaatgtttttcaggcccatggcgcggatgggtcgggtcgagccgtgtttcgcaagaagttgagacgggcgcaggtgctggcatttttcagccaggtgccgcgatgtgttgttgcgatggaggcttgtggtggcgcgcatttctggggccgtgaaatcggcagcctggggcacgaggtccggttgatcccgcccgcctacgtcaaacccttcgtcaaacggcagaagaatgatgcagcggatgccgaggcgatttgcgaagcagcccagcgcccgtcgatgcggttcgttccggtgaagagcgaagaaattcagggagcggcctctgccttccgggtccgggagttgctgatccggcagcggacccaggcgatcaatgccctgcgcggtcacttggccgagttcggacaggtggtgccgcaaggtgcggccaacgtctcgcgtctaatcgctattgtcgatgatccggataatggcctgccagaccaggccgttgcgacattgcgggtgctggccgaaacccttgcaggcttcgacacacaaatcgcgaagctcgacgccgagataagacatcgggccaagcagaatgcagtggcgcgaaggctgatgacgatccctggcattggcccgctgatcgccacagcactggccgtcctggccccgccgccggaaacattccgccgcggccgcgactttgccgcgtggctcggcctcgtaccgcgacaacattcaacgggcggcaaacagcgcctcggggcgacaacgaagatgggtgagcagtccctgcgccgcctgctaatcatcggggcgaacagcgtcatcatcaaacagcgcgcagcgcgaccaggcacctggctggcaggaatgttgtcgcgcaaaccctcgatgctggtccgggtcgcgttggccaacaaaatggcgcgagttgtctgggcgctgatgctcaagggcgaagattaccgggctccggctgcggcggcataagccgaccgtcagtcgagaggcgtcggagcggaagagggcaaggagcagtttggcgcaacagtcgtgagacgggatcgggaaaaccagtgtgcaacaaagtgcctttgagcacgcggctttgatctggacccgatcttcgaacaccatacgggcccgcggcaggtgtaaagccgcatcagaggccggacacatgtcagcacccgacagcgcgtcagatccagttccgaaaatacctcttgcgcttggggcggttacaca

SEQ ID NO: 3085 - DNA, 1462 bp, unidentified
  source 1..1462: mol_type = unassigned DNA; note = element_479ce47
  misc_feature 1..2: note = core
  misc_feature 3..170: note = LE
  misc_feature 171..1211: note = CDS
  misc_feature 1212..1462: note = RE
  misc_feature 1228..1457: note = bridgeRNA
agatggggtaacgggcccgggtctgccctccaagcaagccgcgcttgctacagcgctattgggtggcgcgcttcgcgcggcttgcttggaggggggcggtcgtccctcacatgatggtgtgacggagtcggagggatgagcctcgctccaagcatcgaggagagacgaccatggaccattatgccggaatcgacgtgtcattggaatgctcgagtgtgtgcgttgtggatgcgagcggcaagattgttcgggagggcaaggtggccagcgagcctgaagcgttgatcagctggttcatctcgttgggctatgagctgagccgaatcgggctggaagccgggccgttgtcgcagtggctttttgcggcgatgcgggaggcggggctggcggtggaactactggagacacggcacgtgcgcaaggcctttgaggcgatgcctgtgaagtcggaccgcaatgatgcgcgcggcattgctcagctgatgcggcttggctggttccgcccggtgcattgcaagtcgatcggagcgcaagagacacgcacgctgttgaccgcccgtaagctggtgcagtcgaagctgcgcgatgtcgagaacagcctgcgtgggatactacgcggatttgggctcaaggttggcaagacgacggagcggagctttgccggacggatccgggagctggcgtcaggtcacccgagcctggagacgattaccgagggattgttggcggtccacgctgtgctgctgcgcgagttcaacagttttgagaagcaggttcgtcgagtggcgcgaagcgacacgcggacacgattgttgatgtcgatcccgtgcgtcggcccggttgtggcactcacctatggctccgcgattgacgatccggcccggttcaaatcgtccaagcaagtgggagcgcattttgggatgaccccgaagaagtatcagtccggcgagaccgattacactggccggatcagcaagatcggcgacgcttgggtgcgcacggcgctatacgaggccgcgcacatcatgctgaccaaaccggtcaaaggttgctctgagctgaagagctgggcgatgcggatcgccaggcgagccggcatgagcaaagcgaaggtcgcgctggcgcgcagactcgctgtgatcatgcatcggatgctggtcgacggaacactgttcaatccagccagcaagcaaaccgcggctgcggcttaaacaaggagaacaaaaagttttcgagcgggccacgacaccagcctctcgaagcgaagtcccctcgccgggacgatggatcaggtcagaccgcaacccatccggtggccttgcgaccacgcgaacgtagattggtcgacctatcctcttcaaaccccatcaggtggcggccgcgcgccgaccccgtacagaagcaagaccccggcgaacggcatgacgcaaaaagggattgacctttcgaggcccgttacaga

SEQ ID NO: 3086 - DNA, 1362 bp, unidentified
  source 1..1362: mol_type = unassigned DNA; note = element_479ffd2
  misc_feature 1..3: note = core
  misc_feature 4..82: note = LE
  misc_feature 83..1105: note = CDS
  misc_feature 1106..1362: note = RE
  misc_feature 1101..1348: note = bridgeRNA
tgatggggtggacggcccccgctccgagcggcgccagccgtagactggccgcgtggaattgcaatcagaggagccccctaccatggaaatcgccaccattggtctcgatctcgcgaagcattggtttcaggttcacggtgtggatgccgaaggccgtgccgtcgtgcgcaagcgccttcggcgacgggaagtcatcccgttcttcgcatccctgccgcgatgtctggtgggcgccgaggcctgcgcaaccgcccatcactgggcgcgcgagctgaaagacctgggccacgaagtgagactgatgccgccgggctatgtgaaacccttcgtcaggcgccaggcgaagaacgacgcgaccgatgcggctgcgatctgcgaggcggtgacgcggccgaatatgcgcttcgtgtccgtgaagagcccggagcagagaggctttctcatgctacaccgggctcggggtctgcttgttcgtcagcgcaccatgacggcctgcgcgatccgcgcccacctggccgagttcggcgtggttgccgggcagggccggcagcgggtcgaagggctgatcgcattgctcgaggacgaaaccgcgatcgcgctgccggcctttgcgcgcgaggcgctcgacgccctgatcgcccagctcggaaacctcgatcgtcagatcgacgccatcgagcgccgtctggcggagatccatcgctcgcatccgatctcgcggctcctggcatcgatcccgggtgtcggcccgatctcagcaacggctttcgccgcaaccgtgccagatcccgccatgttccgttccgggcgcgagttcgccgcatggctcggactgacaccgcggcagaactcgactggcggtaaggaacggctcggccggatcaccaagcagggtgacgcctatctcaggcatctccttgtgatcggagcacggaacgtggtgcgctatcccaaagcgcgggccagggtcggcgccggttggatcgacgaactcctccaacggcgcaggccgatggtggtcgcggtggccgtagccaacaagctcgcgcgcatcatttgggcaatgatgacgacaggagaactcttccggccggcgaccccctgatcgggcggtgacaccgaacggacaagatggtgtgagggcaaagacagcgtgatggcgaatcggcggagccgaggatcgaagcagcccgtagagcttgaagcgcgttccagcgcgacccgttgatgtggcctcgatccgcgaactccatcagggccagcggccatgaacccggccgcgcgaacaggccgtatacatgaacgcacccgaccgacgcccgaagctgtcttcttccttgcaccgcgggggccgtccataca

SEQ ID NO: 3087 - DNA, 1543 bp, unidentified
  source 1..1543: mol_type = unassigned DNA; note = element_47b5154
  misc_feature 1..2: note = core
  misc_feature 3..284: note = LE
  misc_feature 285..1523: note = CDS
  misc_feature 1524..1543: note = RE
  misc_feature 99..250: note = bridgeRNA
agcgtgtgagcgccgctggcgcgccgtggggccgggaaagtgtacggggtggctcgccagggctctggcggactctggccttccgggtagatcattgggctgtccgtctcggtgaacgccgacccaacttggtgccgcgagtccgtgacccagcgtggtgtggaggacctccacgggaaccgtggattgttgcccttgagcacgagtattagattcctgaatattcccagtcctccccgagacagacactgtcatcaccgtcaaacagtgttggagggaagaagatggacatcgttaatgaacgggccgcggggatggatatctccaaacgcgacgcgaaggtctgcgtgcggatcccaggcgccagggccgggacctacacctcaaaggtcacgacctggggcgcgaccacgcatcagatcttggaactgcgggagttcctcgaacgcgaacatgtcaccgtggtggtgatggaagcgaccagcgactactggaaaccgttcttctacctgctcgaagaaaccctgcccgtgatgctcgtcaacgccaaagctgcccggaacatccctggacgcaaaaccgatgtctccgacgccgcctggctggcccaactggccgcgcacgggctcctgcgggcctcgttcgtgccgcccgaacccatccgcgagctacgggacctgacccgggcgcgcgccatcgcgacccgcgaccgggcccgggagatcctcaggttggagaagttccttgaaagctccggaatcaaactttcctccgtcgtttcggacctgaccggagtctcctcccgggacatgctcgaagccctcatcaacggtgaacggaaccccgaagtcctggccggaatggcccgcggaatgctgcgttcgaaaatcccggccctcgtcgacgccctgaccggccggttcaaaccacaccatgccttcatggccaggctgcacctggaccagatcgacgcccacacccgaaccatcgataccctcacgacacggatcgaggaggcgatggaaccctttcgtgacgccagggaagccctggccaccatccccggagtctcccaccgcgtcgccgaagtgatcatcgccgaaaccggggcggacatggcagtcttccaaaccccgggccggctcgcgtcctgggcaggggtctgtcccagcgccaacgaatccgccggacacatcaaatccagccacatcatgcccgggaacaaatacctcaaagcagcgctcggcaccgcggccatgtccgccacacgatccaaaaacacctacctcgccgcgaaataccggcgcatcacaacccgcgccggacgcaacaaagccctcgtcgccgtcgaacattcgatcctcaccgcagcctggcacatgctcagcaccggagaaatctacaacgaccccggcgccgaccactacacccgcatcaacccgaccaaagccaagaaccgcgccataaaacaactcaacaacctcggctacgacgtcaccatcaccccggtcaccgccgcctaacccaccactactttcgtatt

SEQ ID NO: 3088 - DNA, 1639 bp, unidentified
  source 1..1639: mol_type = unassigned DNA; note = element_47bc693
  misc_feature 1: note = core
  misc_feature 2..227: note = LE
  misc_feature 228..1619: note = CDS
  misc_feature 1620..1639: note = RE
  misc_feature 11..239: note = bridgeRNA
ctaattgtgactgaggatgctgcggttgtgtcgtagcgttcgtgaggtccgacgggctggctcccgaaccgcctgccggccgcgtgcggtctggctttagaacgaggtgccagcctgtcgggtctcgccgtggcgtggctcgaaagaggtgcgagtcctagcagatctggaattaggcatgcccgccacgttctcccccttccccgcggatgacttggaggatgctgatggcggcagtgatgatcggcgtggatccgcacaagggctcgcacacggcggtggtggtcagcgcgtcggaggagccgctgggtgagctgcgggtgcgcgcctgcgccgctcaggccggggagctggtcgcgtgggcggcggcgtggccagagcggacctgggcggtggagggcgccggcgggctgggccggctcctggcccagcagctggtcgcggccggccagcgggtgctggacgtacagccgaagctggcctgccgggtgcggttgctgcaggctggtgacacgaataagaacgatccgaacgatgccctgtcggtggcggtcgcggcgctgcggtccagggcctgccgtcaggtgaccgccgatgactacccggcggtgctgaaggtgtggtccaaacggcaccgcgacctgggccggacccgcaatcaagtcgcctgccggctgcacgctgtgctctgcgacctggtccccggcggtcactcgaaggagatctccgcagctcaggccgccaagattctggagcaggtcacgccgtcgggtgccgtcgcccgggcccgcgccgagctcgccgccgagttcctggccgacctgcgccgcctggacgcccagctgcgcggcacccgcaagaagctggccgccgcggtcaaggactccggcactaccctcgcgcaggtcttcggcgtcggccccgtggtcgccggcaccatcatcggtgacgtcggcgacgtggcccgcttccccggccgcgatcacttcgccgcctataacggcaccgccccggtcgaggtgtcctccgggaaccggaaggcctgccggctgtcgctgcgcggcaaccggcgcgtcaaccatgccatccacatggccgcgatcacccagatccggcaccggcacagcgacggccgcgcctattacgagaagaagctggccgaggggaagacgcacaaggaagcgctccggtccctcaagcggcggatcagcgacgccatcttcgcccgcctgcaggccgacgcccggcgagccgcggaagcctccgtcacgggcccgggagggcaaccggggaacgactctgcatccagcgcggccggctcacaccccgcacgccggctcttcgggcaagccactcccgggcctgccaccaccataaggcccggcgctacggccggcataccttctggcccccggtccagccgggcggagtcccggggcagggctgggcattccccggtcgctgccactcagccgtcggcgaagcggcaggcccaggtggagcgcccggagcgaagcgcggacgaacgacctggaggtacggcgagacgacggccacactcggccgcgaggaaggccccggtgggtacgacttcaaagaaaaacccgacacccacttgacaccaccagcaaagaggact

SEQ ID NO: 3089 - DNA, 1326 bp, unidentified
  source 1..1326: mol_type = unassigned DNA; note = element_47be464
  misc_feature 1..2: note = core
  misc_feature 3..73: note = LE
  misc_feature 74..1114: note = CDS
  misc_feature 1115..1326: note = RE
  misc_feature 1086..1311: note = bridgeRNA
agataattagactccccgcacctaaccttttgatgtgctgtacacttgttattatcacatgctggagtccactatggaaaatactattgtcggtgtcgatttagcgaagaaagtaattcaagtttgtaaaactacaaaccgtaccgtgcgttcgaatgaagaaatgacacctcacgaatttaccttatttcttgttaactcaaaacctatgacagtggtatttgaagcctgctcaacatcaagttactggaaacagcaagccttacgtaacggtcacgatgcaaaacttgtttctaccaaacttgtagcttctgtcaggcaatcccagaaaactgacaaaaatgatgctttagcaatcgttcaagcggctttgctacccgatgttaatttcattttaggaaaatcaattgagcagcaacaacttcagtccacaatgcgtctgagagagctttgcagtaagcaaaaaactgcgctcagcaatcaacttattgcattattagctgagtttaatgtcagctcaagtaatcgtaacggtggcttgcgcggcgcaatagagtcaacccttgaagatgccaacaacgacttctcaggtgaatttaggaaagcactaaatgaagcttggaagctgtacttaacggtctcagaatcacttgtgatctatgatgaatgcctagaagcatcaattgaagtccaccccgaatgtaaaaaactactgaagctagaaggtgtcgggccaataaatgctatcaatctatatattgctctgggttgtgcagaattaggtagctttactaaaggaaaagacgcttccgcctgtatagggttaaccccgctacagcattctagcggaggtaaaaacaagataggttcaattggtaaacacgtcaaaaacacaacgatccggagccagttgattactggtgccgcagcaagtgtcaggcacgttatcagacgagatgctaaaacttacaaagaaaaatggatacaggacttagtcgctaggcgaggcataaaatgcgctgctgtggccttagcaaataaaaccgttagaaccgcttttgcaatgctgacccaaggcacagagtacaaggccaaaatgatattgacttgttaatgtgtttaaacaataaaatgctagatcgaagatgaaaatcaaccagtaaaaacagtggctcgcaaagagcatcaagctcgtaaagtagaattgtttactggtccgcgtaaatatcacagagtctgggttcgctaccctgtcgaaactcgtacataagcacgcattaattcatcgatggcccattttgttgttgacagcggggagtctacata

SEQ ID NO: 3090 - DNA, 1396 bp, unidentified
  source 1..1396: mol_type = unassigned DNA; note = element_47d8656
  misc_feature 1: note = core
  misc_feature 2..86: note = LE
  misc_feature 87..1121: note = CDS
  misc_feature 1122..1396: note = RE
  misc_feature 1167..1388: note = bridgeRNA
caatgggatggacgctccctccttaacggcatcgaatgtgccaaagtgggggcgtaacaaccacccgagcgaaaggagcgtccgctatgcaagttatcacatttggtatcgacctggcaaagaacgtctttcagattcacggcgttgatgcggcgggccataccgtcgtcaagaagcaactcaagcgcgatcagcttgccccctactttgccaacgtagcgcctgcgacgattggcatggaagcctgctccagcgcgcactactgggcacgcaagctccaagggatgggccacagcgtcaagctcatggcgccgcagttcgtcaaaccctacgtcaagggcaacaaaaacgatgccaacgatgcagaggcgatttgcgaggctgtcgcacgcaaatccatgcgctttgtaccgatcaagaatgtcgagcagcaagcgctgctgagtctgcattgcgtgcgccagggctttgtcgctgagcgcacggcctattccaaccgcatccgaggcctgatgggcgaattcggatttgtcatcccccaaggtatgcactacatcagcgagcgcgtgcatgatctgatcgaagatgccaacaatgagctacccggcatgttccgcgaaaacgtagaccgactgctgcagcatctgcaagagttgaatcgccatgtgcatgagctggaaatgaagatccaaggctggcaccgcagcaacgaagccagccagaagctcgcagccatccccggcataggccccctcaccgccagtgcgctgatcgccagcataggagacgcaaagaacttcaagagcgggcgggagttgtcagcctggttgggcctggtacccaggcagcactccagcgggggaaagcaaaacctgctgggcatcagcaagcgcggtgatctgtacctgcgcatgctcttggtgcagggagcgcattcggtcatcaatgccagctgccgcaaaggtgtagaggccggctggttgccgggtctgctcaagcggcgtaatcacaatgtggcagcagtggccgtggccaacaagaacgcgcgcattgcgtgggccctgttggcccgagagcgccagtatgagacgagatacagccgagatacagcgctgacctgagggcggtgctggtacaacaagatcgtaatcagggagaacagaaccaccgattgctcaagcaatcatgcagtgatggcaagacaggtcagaccggggtcggaaaaacccggagagaagggggcacttcgagtgcgagtatccgatagaggcgccgaccagcgaatcccatcagggaccgtgatcacaaggtcacaacaagtccgaatgtacgggtgcaatcgacacagtcttaccagaatgaattgagagcttggcaaaccgggggcgtccatgta

SEQ ID NO: 3091 - DNA, 1446 bp, unidentified
  source 1..1446: mol_type = unassigned DNA; note = element_47e65c7
  misc_feature 1..2: note = core
  misc_feature 3..236: note = LE
  misc_feature 237..1442: note = CDS
  misc_feature 1443..1446: note = RE
ctcctaccatgaattcgtatatggagatataaataggtttcggtagtttgggatagaatcattgaaaggcaggaggactcataagcttcctgggcgttagagccctcatttcagtatgtcccaagcctctttgaaccataataggttggttggatcattgaatccttgtcacgctggaggattggtctggaggctgcggcacctgcttttcatttcttctgttgggaggtgatgcgatgtcaggaataaagggaagttttaatggttttgtcgggatcgatgtttccaaggataagttcgatgtttgtggaataacaagcgacgaggccaagctttttcagttatctgcgaccatggatcgaaaaggtttcgataaactgaaggggcatcttgcctctgtttccgtctcgtctgttttaatcgggatggagtccacggcgtcctaccatgtaaatctcttctcttaccttgtttctgagggttacaacgtcattctcataaatcctttgctgatttccaattacgtgaagatgcagctcaggaagaccaagacggacaagaaggatgctgttgtcattgcccagtttcttcgtaccaatggtgatagccttattcaacgggttacttcctctttgatttcggttcttcgggatcttgcccgtcagcgggaaagtctggatgacgagatgaacgctctgaagatggagataaagcggctactgaatatcacctttccggaacttgagcatatggtagggatatttacgaagtccattctaaagcttttgcagcgttatccttccgcatttgcgcttaaagatgcggatcttgggcaattgtctcagacgttgattgcagattcctatgggcacaaaagagaggcgtttgcgacagagttaatcaagactgcccatacatcgataggtagtagcagtcccgccaaggaaatgattcttaaacagaagatagcgctgcttctccaccttgaagacgcccttcaggagataaccgatgtgctcattgaaatgagtcgaaaactgatggaagaagatataaacatcatgacttcaataaagggtatcggggacaagactgccgtcaattttctcattgagatgggttgtgacatcaatcagtatgatcgttctggtaaaatcattgccatggcgggattggatccggctgtttaccagtccggtaaccatgaaggcaaaggccggattacgaaacggggcaatcgccatctgcgaagggtcatatggctgatgaccaccagggtgatccattacagcgatattttcaaggcgtattatctcagacgaagaaaggagggattgccctacaaaatggctgtgctggccactgctcacaaattgatccgggtcatctatgccatgctgacacaacggacatctttttgtccgcaagcgaattcattatagttga

SEQ ID NO: 3092 - DNA, 1756 bp, unidentified
  source 1..1756: mol_type = unassigned DNA; note = element_47e78f8
  misc_feature 1..2: note = core
  misc_feature 3..369: note = LE
  misc_feature 370..1611: note = CDS
  misc_feature 1612..1756: note = RE
  misc_feature 55..336: note = bridgeRNA
ctcgtattatataaattgtaattagtcatattgtgataattaatcaaattagtatttgctttttgatcttcacatgttagcctctaattgtcattggctttggtcaactggtctaggttatcacctcctgcagttttgtctgctttataagtctgccacccagacagttcctttatgctctaactcacatgctgtattgattgcttctttttgctagtccttgagcaattgggattaggtgcagctttcaaagaagcaaccagtgaatacttatactggcgagattgaacttaagaactgtaattaggggttaacatgtgaagatcaaaatctatgatcagaaatttgaaagaaaggaggccatttccaatgaaattatttgtcggtattgatgttagttctaaagatttacaggtcgttgcacttgattcagaagatcaaaacaaacgcttaattaacgatagctttgtcaatgatctttatggtgctagtgaactgaaaaaacaaattttagatctagctcaaaataaacactatgatcaaatcattattggcatggaagctacatctatttacagttttcatcctgcttactttttccaaaatgacgaagatttacaaaagctcaatgtagagactgatgtaattaaccccaaagaaaccagcaggtttcataaagtctttgaagaaagtaaaactgatcctctcgatgcttattacattgctttgtatctaagctttggacattatcgagtaagcattgccagacaagacaactatcttgctttagagcgtttaacgcgtaccagatatgaattagttcaagaactgactcgtaccaaacagcacttcattgaagctttatattatcgggttaataaactaatcactgtcgataaagataagattaatactcctcttttcggtgctacaatgatgtctattgtaaccgatagtaaaactctggatgagatcgcggatatgcctaccgaagacttaatttcttacttacaggttaaaggcagaggacgcttttccgatccagataccttggctaaagcaattaagaaagctgttagaggttcatatcgcttaggcaaagtaatgactgattcaattgatgcagtgctttctgttcattacaacatgatccaaagctttaatgaatctattaaagatctagaaaaagcaattgatcgtatcgttgatgcattaccagaaagcaaaattctggaatcaattcccggtattggcaaaacctatacagctggtattatcgctgagatcggaagtatcgatcgctttgataaagaagaacagctggctaagtatgccggcctaacctggaatcaatatcaatcgggagatcacagcaacgaacatactccaatggccaggactggaaacagatatctaagatattacttgattgaagctgccaatctagcaagattacatgatcctgttttcaaaaaatattaccaaaagaagtatgatgaagctgtctactcgccgcataaacgtgcttgcacattaactgcaagaaaattagtacgagttatctttaaattgctcaaagatgacaaactgtacaggacaccgaggtcttaatttcaaaaattggtctaaatttaaaagtaaacaaaagtttaacattaaaaaaatcaacctttaccaaggcttagtttcatatactcaaatttatgatcaaaaagaacaaatatcatcgcctttcatttgacttattaccacatga

SEQ ID NO: 3093 - DNA, 1484 bp, unidentified
  source 1..1484: mol_type = unassigned DNA; note = element_47ecc3a
  misc_feature 1..2: note = core
  misc_feature 3..243: note = LE
  misc_feature 244..1464: note = CDS
  misc_feature 1465..1484: note = RE
  misc_feature 6..239: note = bridgeRNA
ctaatgagagttaccgggtcgccgtccggcagactcggtcctggtagccgccggcaggcgagcactccctcgatctggaccgtgagttccgacgaaagaccgtgcccctgccggtgaccgggagagctggatcgctgctgggatgtcgtgcccgccgggtgggcgtgagcactgtttcattaggtcgctgatggttctcctgctggctgctgacggattccggcatcttggacgggagaggcgatgcggctgttcatcggggatgactgggctgaggatcatcacgatgtggaggtgatggacgcggggggccgggtgctggccaagaagcggctgcccgagggagctgccgggatggcccggctgcatgagctgatcggaatccagctgggagaagatgcccaggacgcggaggtgctggtcgggatcgagaccgaccgcggcccgtgggtggccgcgctggtcgcggccgggtatgtcgtgttcccggtgaacccgctgcaggcttcccggtaccgggagcggcgcggggtgtccggggccaagagcgacggcgcggacgcgcacatgctggcggacatggtgcgcaccgattggcatcagctgcgcccggcggctggggacagcgcggaggccggggccatcaaggcactggcccggatgcacaagacgctgatctgggaccgcacccggcagctgcagcggctgcggcaccagctgcgggagtacttccccgccgcgctggaggcctttgacgacctggccgctcccgacgcgctggagctgctggccaaggcgccggacccggcccgggccgccaggctgacccgggcgcaggtcagcgcggcgctcaagcgcgcccgccgccgcaacatcgcggacaagacggtggcgatcatcagcgcgttgcgcagcgcccagctcggtcagccgccggccgtaaccagcgcctacgccgccaccgtccggtccctgatcgcggtgatcaccgccctggaggagcaggtcacggtcctgcaggtgcaggtggaggcacattttggccagcacccggacgctgagatctacctgtcccagcccggcctgggatccctcctcggcgcccgggtgctagccgaattcggcgacgacccgcaccgctacgccagcagcaaggcccgcaagaactacgcaggcacctccccgatcacccgcgcgtcggggaagaagaagaccgtcatggcccggtacatccgcaacgaccggctcatcgacgcgctcatggcccaggccttcaccgccctgaacgtctcgcccggcgcccgcgccttctacgaccagcagcgagccggcggcgccgggcacaacgacgcgctccgccgcctggccaaccggctggtcggcatcctgcacggatgcctgaaaacccaaaccctctacaacgaagccaccgcctggtcacaccgccggaaactcgccgcttgacaattaagctcctgggatgt

SEQ ID NO: 3094 - DNA, 1355 bp, unidentified
  source 1..1355: mol_type = unassigned DNA; note = element_47f4f2f
  misc_feature 1..2: note = core
  misc_feature 3..1094: note = CDS
  misc_feature 1095..1355: note = RE
  misc_feature 1104..1342: note = bridgeRNA
tgatggggtggacggctcctgctcccggcacggatgtgccaagattagagctgcaatcgtcagtaggagcatcccatggcaaacgtcagcgtcatcggcccgatctggccaagagcgtcttcccggtacatggcatagacgccgcaggaaatattctcgttcgccggcaactgcgaaggttagaagttattgcattctttaagaagctctcgccgtgcctcgtcggcatagaagcgtgtgctacggcgcatcactgggcacgagaactgatcaagctgggtcacacagtcaaactcatgccgccaatctatgtgaaaccctacgtacagcggggcaagaccaacgctgccgatgctgaggctatcgctgaggccgtgacccggcccaccatgcgtttcgtcgccgtgaagacggtcgatcagcaggccgtgctcatgacgcacaaggtgcgtgaactccttgtccggcagcggaccgccttgatcaacgcgctgcgcgggcacctcgccgagttcggcatcgtggcggcgcagggctcagccgggctcaaggacgccatcgcgcagttccgcgccgagcaggccagcctcccggcggtggcgcggtcggctctcctgcgcctcatcgagcggatccgccagatcacggacgaggtgagaaagacagagaaggagatcgtcgcttggtgccgggccgatacggccagccgccggctgatcacgatccccggcgtcgggccgatcacggcgagcgccatctcggcctcagtgcccgatcccgccctgttccgctcgggccggcagttcgcagcttggctcgggctcacgccgaagccgcacagcagtggaggcagggaacggctggggcgcatcagcaaacagggcgacggctcgatccggcgccttctggtgatcggcgccacgtcgatgattcatcgagcgcggcaggacaacccgggcaaggcctgggcgaagcagctgctggagcgtcagcccgctcgcgtcgtgtccgtggccctggccaacaagactgcccggatcgcatgggcggtgctgacgcggggcgaagtgttcaaggcggccgcggccgcctgacgagatcccgcttgtcggcgttccgacgtcgacgggcgggtgtgcaaggtgctgagacgtgatgacgaaccggtcgacccgggatcgagggcaacccgaaatacccaggcgcttccagagcgcgatccattgattgggacctcgatcgcggacttcatcaaggccagcggccatatgcgccgcaccgacaggccggacacatggctgcaacccgaccgaccgccgtcacttttcgcttgcaccgcaggggccgtccacaca

SEQ ID NO: 3095 - DNA, 1677 bp, unidentified
  source 1..1677: mol_type = unassigned DNA; note = element_47f5c3b
  misc_feature 1..3: note = core
  misc_feature 4..247: note = LE
  misc_feature 248..1462: note = CDS
  misc_feature 1463..1677: note = RE
cttatacagtaaactagatacaagccctctcgacaaagggccggaacaaggatacacttgttctctgaacctgttgaacgcgccagggaaaggctctgttctccacccggttcgaccgattgagaaagatcgtcttctctggcagtgttcctgagctgaaccgattatgagagagtcgtcgccttgagcgccacagtataagggctcgcgtgctcaggaacccaacttgcagagaggagcagtgctcatgtggtacgccggtatcgattgggcagatacccatcacgatgcgttggtcatcgatgaaaaaggccatcaggtaggttcgcttcgtattgctcacactccagccgggatgaaccagttgaatacgtttttggagcgcatcatcggggccgctgccaaggaagagatggcctgcatcatcgaaaccacccacgggttgttgattgcctctctcctggaagctggctggccggtctaccccgtcaatcctcgcaccgtggatcggaaacgagcagcctctggagccaagacggatctgatcgatgcctatctgttggccaagaccggacgtgcagatctggcggatctgcatcgtctgaccccggatagcgcaaaagtggccgagttgaagcagttgacgcgcgatcagcagacgttgattcagatgcaaacccgcctggtcaaccagctcacggcgtgtttgaaagcctactatccagtcgccttggatttgttcagcaagctccagcagcgcagcactctggtgttcctgcaaacctatcccacgccttcggcggcgatggctgcatcgagagaacagatcatgcacacgctcaagagtacaaggcatccccatgcgtcggaaacggcgcaactcatcgttgatcgcgtgcatcagccccagctggtagcggacgccgtgctcacccggaccaaatcgcgtttgatgctggtgttggtgaatcaactgctgccgctgcttgagcaaattgctcagtacgacaaggagattgagaccctttttttgacccatgaggatcatgagatctttcaaagcctgccgcgtgctggcaaacaattggctccacgactgctcgctgaaatcggcgatgatcgcacacgctatcaagatgctggcagtctgcaaaagttgggaggaaccgccccggtgatgtatgagagcggaaaatactccaaagctcaccgccgactggggtgcatcaaacccttgcgcaacacacttcatcagttcgcctggcaaacgacgcaaagtgaagcgtgggccatggcctattaccagcgcaaacgagcggaaggaaaaagccataccgtcgctgtccgtgcccttgccaacgtctgggtgagaatcatctttgccatgtggttcacgcggaccagttatgacgctgccacctttgagcgagcacaacagcaacatgcacccagggctgcttagcacgacatctcgcatgatcatcttccctgttcgtgcgtaaagagtgaacttgcttcctgttttttcgctctccacctgggatgttttgagcctgccacgcaagcaaacggcgtggactactggcttatgctcagtggcaaacaaggcttcccctcttttctctcaattttttctcctcacccatattggtccaaaaaaggcttgacatagagagt

SEQ ID NO: 3096 - DNA, 1411 bp, unidentified
  source 1..1411: mol_type = unassigned DNA; note = element_47fa3dc
  misc_feature 1: note = core
  misc_feature 2..106: note = LE
  misc_feature 107..1126: note = CDS
  misc_feature 1127..1411: note = RE
  misc_feature 1145..1372: note = bridgeRNA
gaatggaagggacttccccgtcccgagctagccgctttgcggcgaacggcaacgagtgccacgatggggttgcgaatctcatcaactcactcggaaggggaagtccatggccattttgttcgttgggatcgatctcgccaagagcgtgttcgccgtgcatggggtggacgagctcggcaagccggcgcttgtgcggccgagcgtgccaagagcgaagttgcatgagttgatcgcgacgctgccggcgtgcacggtcgcgatggaggcatgttccggcgcgcaccactgggcgaggctcttcgcggcgcacggtcacacggtgcggctcatcgcagccaagttcgtctcgccataccggctgagcggcaagcggggcaagaacgacgcggcagacgcggcagcgatttgcgaggctgtgcagcgaccttcgatgcgattcgtgcccgtcaagagcgaggacgagcaggcgcggctttgcgtgcaccgagtgcggcaagggttggtcgagcagcgtacatcgatcatcaaccgcatccgcggcctgcttgcagagttcggcgtcgtgctgcctcagacggcaagcgtcattcgccgcgaggctgcggcacgtctcgaggatctcccgggttgggtcaacatcgcagtcggcgactcgctgagcgagctgcaccggctcgacgagcggcttgccgagtacgaccggcacgtgagccgcatggcggccgaggactcgaggagcaagcggctcatggcactgccgggcatcggctgcacgaccgctagtgcgctggtctcgacgatcggcagcggcagagacttcaagaacggccggcagcttgccgcctggctcggtcttgtgcctgggcagcacagctccggcggcaagccccggctcggctcgatcacgaaggcgggagacagttacctccgcacgcttctcgtgatgggcgccaaggccgtgctgcaggcggccaaaggcaagaccgatcgaatgagccgctgggccattgcactcgaagcaaggcgtggctactggaaggccgtcattgcaatcgccgcgaagaacgctcgcatgacctgggcggtgcttgccaaaggcgaactcttcaagccgctcgatgcttgagcctacacatcgagcgcaatcgatcaccgcgtgatggcaaagcgttgatgagtcgaggttggacccgcgctgggagtgctcggctatatcggagaggcacatcaagtggcctcgactaacgtggggagccccagggcgcgtcttccatcagggtccgcagccgatcaccgctgcaacatgaccggttgtagtgacgcagtccgcactcgccttctcatccaccacaccgccgtcgcaccactcaagaaagcaatcgatgacttgactccctgggaagcccttgta

SEQ ID NO: 3097 - DNA, 1412 bp, unidentified
  source 1..1412: mol_type = unassigned DNA; note = element_47fe011
  misc_feature 1..3: note = core
  misc_feature 4..94: note = LE
  misc_feature 95..1129: note = CDS
  misc_feature 1130..1412: note = RE
  misc_feature 1154..1350: note = bridgeRNA
aagatgggatgaagcggctggccgccaccaggcgtggtggccgaagccccacaatggtgcacgcggtcgtgagccgcaaaggtggaggccagccatggagtatcttggcatcgacgtacacaaagtggaaagtcagatctgcattttgaccgagagcggcgagatcatcgaacggcgcatccgcacggagcgggagcggttcgccgcggtgctcggtgaaaggccgcgagcgaagatcctgatcgaggcatcgacggagagcgagtgggtggctcgttgcctggaagagctgggccacgaggtggtggtggcggatccgaacttcgccgccatgtacgcgacgcggagccgcaaggtgaagaccgacctgcgcgacgcccgcacgctggccgaagcctgcaggctgggagcgtatcgcccagcgcatcggacctcgaaccggcagcgacacgtgagggcgcagctctcggtgcgggaggcgctggtacaaacgcgggcccgttacatctcgctgatcggcgccctgctgcgacgcgagggcttgcgggtggcgagcgggaacgcggtgggctttacgaagcgcgttgcaagagtcgcgatgcccgggcagttgaagtcggagatcgcgccgctcctggcggtgtttgagtcgatcaaccggcagctcgtctgggtcgatacgcgcctcgagcagctcgcgaagagcgacgagacggtggagcggctctgcaccgcgcccagcgtcggcccggtcaccgccgcggccttttcctcgaccgtcgacgacgtgcagcgcttccagagcgcgcaccaggtggaggcctatctcgggctcacgccgagcgagtggagctcgggcgagaagcaatgcaaggggcacatcaccaaggcgggcaacaaccggatgcggagactgctggtgcaggtcgcggtctcgatcttgcgcctgcgaagcccgcgcaccgaggcgctgcggaagtgggccaccggcatcgctgccaggcgcggaaagaagatcgccatcgtggccttggcgcggagaatggccggagtgctcttcgcgatgatgcgcgaccggactcgttacttccaggcagcattgcccgagccgtcagcccaggttgcctgaactcgattcaatcaactgctaccggaaaaaggagacccgttacaacgatactcccgaggatacgaaaagcgggtgagcgcgaatcatagtccttggcctcagtaagagagccgcgccatagagagcgcccctgctcatcgaaacccaccatgcgccggcgaacgagcctcgccaccgagagcgcggacagaagggtgaagaacctcgtggacaatcaaaggacggagtccgattagctgggcgagtaatcaaatggggcttgacgtggagagccgcttcacag

SEQ ID NO: 3098 - DNA, 1360 bp, unidentified
  source 1..1360: mol_type = unassigned DNA; note = element_480242f
  misc_feature 1: note = core
  misc_feature 2..73: note = LE
  misc_feature 74..1102: note = CDS
  misc_feature 1103..1360: note = RE
  misc_feature 1106..1350: note = bridgeRNA
tatggaatggcccgcccctttccggacgatccgttaggatcgccttgtttgaacaaaggaaaggaacgggttgatggctatcgtggttcttgggattgatcttggcaagaattcctgcagtttggcgggtttggatagtgctggccgggttgtgctgcggcggcggttgcggcgcggtttggtggaagggttcgtcgctcgtttgccgcgttgcgttgtggcgatggaggcctgttgcggggcgcatcatctgggccgggtattttccgggcagggtcacgaggctcggctgatgtcgccggagtatgtgcgtccctacgtgaaggcgcaaaagaacgatgaccgggatgccgaggcgattgcggaagcagcgacacgcccgacgatgcgttttgttcgggtgaaaagcgaggggcaatccgatgtgcaggcgctgcaccgggctcgggagcgtttggtgacgacacgaaccggtttgatcaaccatctccgcgcgcttttgttggagcgcgggatcaccgcgccgcaaggccgtaccaagctagcggagatgctttgctgctttgccgacgaggacgacgatcgcctgggcgaccgcattcggctcctggtcgaggatctgcgccgcgaatggcgcgggcttgatgagcggattgcggcctttgatcgggagtttgtcacgatggcgcgtcaggatgaagcggcgcggcggctgaccacgatccccggcatcggcgccatcaatgcgacggccctggcggcggcggtcggtgacggggcgagctttgaacggggccgcgatatggctgcttggcttggcctgacgccgcggcaacggacgacgggcggcaagccccgattgcttgggatcagcaagcggggcaatcgatatctgcgcaagaacctgatccacggcgcgcgggcggtgttgccttatctggtcgatcgggatacgccgctgggtcgctggttgcgcatgctgtcgtcacgagcgcacaagaatgtcgtcgtagtggccctggccgccaagcttgcgcgcatcgcctgggcggttctagccaagggctgtgtgtacgacgccgggcacttggaggcggcttgagaagggattgactgggtagcgcagcgcgcgccgatcagtcgctgatgtctgcgggtggtggaaggaagatggcctgacagtcgaacggcagcatggaaacctgaagcattgaatggtctgaaaagaccgctgtgattatgagggccaggctgcgcggatctccatcttggccagggctcggccctgagaccggatacgttgatgcagattgatcagagccatatccagaaaacacttgcagacggggcgggccatacg

SEQ ID NO: 3099 - DNA, 1316 bp, unidentified
  source 1..1316: mol_type = unassigned DNA; note = element_4802c29
  misc_feature 1: note = core
  misc_feature 2..279: note = LE
  misc_feature 280..1068: note = CDS
  misc_feature 1069..1316: note = RE
  misc_feature 35..202: note = bridgeRNA
tcttaagtttacaatctctaattttatagatataatcagaaagaataaaagagagaattaaggttaatttatacggtgaagcttagactccgacaacattgataatcggctctcttttctactaaaaatcacgttcagttctgtgagacctagatctcgttttcaagcgatgtattgagcttgtcgaagtattgttgtgagtccagtaggttcttctttcataaatcagttcttatgaataaatataagtaaatttttggagttgacattagcaaagacgtgtttgatgtttatgggagcaaaagcggtcataatcaatttaaaaatgatgcatctggatttaagtcttttctaaaaagtcttcctaaagaatcattagttataatggaagctaccggctattatcattatcggttagcacagtttttatttaaacaaagtgttttagtgtctgttgtaaaccctttatcagtaaagcgtttcattcaaatgaaactagccaaagtaaaaacagataaaagtgatgccaaggctatttgtgaatatggtcaaatcaatgaggttccgttgtataccgctttaacagatgttcaaagtgaatgtttacagttgtttcgattgatggatagttttatcaagaaacgtactgctaccaagaacaaattacatggagaagaagtattaggaattccttcaagctgggtgtatcgctctttaaaaagagatcgcaaacatttagataaagagattttaggaattgaaacaaagctactatcattagtaaaacaggatcaacaagtacaattaacattattgaccagtattccgggaataggccttaaaacagcgttgtttatgattgtaataacagatggattcgagaagtttgaaaattcaaaacaactatgtagttatgcaggaataacaccaacaatacgagaatctggaagtagtgtaagaggtagaggtagaataagcaaagtcggtaatagaaagatgcgaaatcttttgtttctctgttcttttacagcctgtaaacacaataaaagggtgtcgagatgtttatgaacgaattgtaaataaaggcaagagtaagaaattagcattgatagcagtttcaaataagttgatcaaacaaagttttgcaatcgcaaaatcaggtttaccttatgatgaaaagtacgtttctgttttatcaaaataagtagtgtttacataaaaaataaaagctcaaaataccaactaatagcattttgagccaagaataagattgtctaaacttaatgaagaaaagagttgttttttacctcagttct

SEQ ID NO: 3100 - DNA, 1635 bp, unidentified
  source 1..1635: mol_type = unassigned DNA; note = element_4805c89
  misc_feature 1..3: note = core
  misc_feature 4..128: note = LE
  misc_feature 129..1319: note = CDS
  misc_feature 1320..1635: note = RE
agtaattatgtaagaaaagcatagcgcagcgtatgcggtcattctcccgatgatcaggaggagccgaaatttaatttttaagcgataacttcaagtttcgcaatgattaacaattaaataactgcgctatgccaacaacaaatttgcaaaaaaccaatgactttactggtcagaactttcatgtaggactggatgtccacaaaacatcatgggctgtgacgatacgtagcctgggtattgaagtagcccattttacacaaccgcctggagctgaagcactaagtaattatttgaacagagagtttccaggcggcacctaccactccgcctacgaagctggtttttgtggtacaggcacacacgaacaactttgtaaactgggaataaagaacatccttgtacatgctgcggacataccatcgacagacaaacagaagaagaacaaaacggacctgcatgatagccgggcgatcgccgtgcatctggaacggggaaatttgcatggcatatatgttttaagtcaggagcagcaggaattgcggagtttgtttcgtttacgggagtgcaaggtaattgataccacacgagcgaataaccggctgaaaagctttttaatgtattatgggataataataccggagactgtatccaagcgcggcgacctgaccggccgggcattggcctggctggatatagaattggggagcgccgcaggcactatcgttttacaacaatatatagccgagctaaagtaccagcgtaagcaattgttccaactgaccaagacgctgagagagcaggtaatggcccatgataagcaaacctacatcaatctgatttccattcccggtatgggctgtattacggccatagggttaatgacagagataggggatttcagccgcttcgctgacccggatgattacagcagctacctgggcttctgtccgtgggaagacagctctggtgactgtatcaaaacaaaaggcatgcaaccgcggtgcaacagccatcttcgccccctgcttatagaggcctcatggcattcgataagaaaatcccgtaagctgtttgcctattacagtaaacatgctggtggtaagaatgggaaaaaggcaattgtgaaggtagcgcgcaagctggccatgattgccagaggagtggcaacctcaggacagccttaccaggaagattatcagatgaagggctataatcaggaaccagcgaaacaagtgaaagtggaaaggttttcttcaggcattacgaaacagcatataaacaagcagccagactatgggcgaatgcctatgcctggctgatatgctttattcggctgtaatatccctggcggttgctcctcagcagagccgcttccgtttcttacagcatagtaaatttagtaaaaatattcagtaaagaaattgtatctcaatcaacataaagaggaaaacgcaccatcgaaaactgtatctaattacattacgaagtattcgtacctctttcaatttcacacaattactggcggcttttgatcgcatatagcagtttgagacttttttttgatactgaaaataaaattatatctttatgtgataaaataatatctcatacctgtcgcctgcttttctacatagc

SEQ ID NO: 3101 - DNA, 1370 bp, unidentified
  source 1..1370: mol_type = unassigned DNA; note = element_4805e5a
  misc_feature 1..3: note = core
  misc_feature 4..84: note = LE
  misc_feature 85..1116: note = CDS
  misc_feature 1117..1370: note = RE
  misc_feature 1137..1358: note = bridgeRNA
tgatgcggtggacggctcccaccaccggcatccagatgccaaattgcggtgtcgttttatgaaccgctaaaggggagccttgctatgaacgaagttaccacgatcgggattgatcttgcgaagagcgtattccaggtccacggcgtcgatgccgcggggaggactgtgatccgtaagcagctgagacgccgtcaggttttggccttcttcaggaaacagtcgccttgccttgtgggcatggaggcctgcgccacgtctcatcactgggcacgggaaatcgcggcgctggggcacgaggtcaggctgatgccgccgcgctatgtgaagccctacgtgaagcgcaacaagaacgatgccgccgacgcggaggcgatctgcgaggcggtcacgcggccgaccatgcgcttcgttgcggtgaagagcgtcgggcgacagagcgtgctgatggcgcaccggacgcgcgagctcttggtccgccagcgaaccatgctggtcaatgcgctgcgggcgcacatggccgagtttggtgtggtggcacgggtcggtctgccccaggtcaagaagctgctcgcggtgattgccgatggcgacgatgagcgcatcccggcgctggcgcgaacctgcctggaagggctggtgcggcagttgctatcgctggagcgcgagatcaatggtgccgagaagcgcatccacgcctggcaccgggcgagcgaagacagcctgcgtctcgagaccacccccggcatcgggccgatcaccgcatccgcgctggcgtctttcatcaccgatccgcacatcttcagatcgggccgcgagatggctgcctggatcgggctggtaccgagacagaactcgaccggcggcaaggtgcgcatggggcggatctccaagcagggagatcaatacctgcgctggttgttggtcgccggcgccatgaccgtgatccgtcatgccaagcgacgcggtacgacggacccgtggctggcccacattatcgccaataagccgaccaaggtggcggccgttgcgctggccaacaagaacgcccgtattgcctgggtgctgctgcgacatggcggaacatatcgcaaggctgcatctgccaaagccgtgtaggaacaggagaccaaacgaccaggagtttggcggagtgacagagacgtaatgcacaatcggtcgaaccgagggccggaaaaacccgtttgcccccacgtgcctcgagcacgtgaagctgattgggacccgttcctgcggatcgcattagggccagcggccatgcgtgccgcatcaacaggccggacacatggcagcacccgaccgtgctgcatcaacgtcacaaaatctcttgccaaaagggagccgtccacaca

SEQ ID NO: 3102 - DNA, 1169 bp, unidentified
  source 1..1169: mol_type = unassigned DNA; note = element_48209b4
  misc_feature 1..2: note = core
  misc_feature 3..203: note = LE
  misc_feature 204..1166: note = CDS
  misc_feature 1167..1169: note = RE
  misc_feature 3..179: note = bridgeRNA
cttgtatgtttagacttgaaggggtgggcgggactaaaagctcgattccgactctagccagtacggaccgtgggagacttctcgtcccgccccttctacccaaagcgccaatatggaattcatcgacaagatcgacgatagatgcaagccagcgcaaaggtagaccccgacaagcacctaaaccctagccccgaggatttgttatgacaatccttacctcgcaaacggttgttggcattgatgtcgctaaggccgaaatcgctgtatatcgctctgatctgcaaacgatagataccgttaagaatgatcgaacaaccctaaaacgctggcttaaaacgttgcccgcccaaagcgccattgccattgaagctaccaacatttatcacctggacaccgtcgacttggctcatgcgatggggcatcaggtttatgtcgtggatgcttatcgggtaagtaactatcgtcgcggcattgggcagcgagccaagaacgatccttgtgatgctcgtttgttagcgcggtatttgaccaatgaacagcacgagctgcggctctggtgtccccctccaaaggcctacacaacgctaaagagcttgcttcatagacgtgcgacgctggtcagaaatcataccgctctgatgttgagctggatcgacgagcctctgctgaaggaagcgctggccactcagcaaacagcctttgagcaagcgatcaaggctattcagaaactgctacgaaaggtcagcaaagactcaggaattgcagaaaacatcgtccgttgtaaagccatcgaaggcgtaggcgagctggtcgcaaccggactggccaccagttacatgcggggcaattttgcgaacagcaatgcatttattgcgtttttgggaatggacctgagggtggatgactctggcaaaaagaatggcccccggtatctaaccaagaaaggcgatccagagataaggcgcttagctcacatcgctgcgatgacggcctctcgctcgcctagatggaaacccttctacgagtcatacctggcaagaggcttttcaaaaactcaggcattggtggtgcttgcccgtaagctctgccgagttgcattcgctctgatgaaaaatcagagcgaataccagccgaagccgatgttgcagggttgccctgcaacatagaat

SEQ ID NO: 3103 - DNA, 1353 bp, unidentified
  source 1..1353: mol_type = unassigned DNA; note = element_4827478
  misc_feature 1: note = core
  misc_feature 2..71: note = LE
  misc_feature 72..1103: note = CDS
  misc_feature 1104..1353: note = RE
  misc_feature 1107..1343: note = bridgeRNA
tatggaatggctcgcccctttccctcggcgcatgattgcgtcgtcgatgagtctggcacggagttgagccgatgaatgagatcaaggttcttggtatagatcttggaaaggacgtttgcagcgttgtcgggctggacgaagccgggaacgtgctgttgcggcgccggatgcgtcgggacagcgtggtgaagctggcggcgggaatgccggcctgcgtgatggcgatggaagcctgttgcggcgcccatcatctcggccggcagcttcgtgagcagggccacgatgtacggctgatgtctcccgaatatgttcgtccctacgtgaaagcgcagaagaacgacgatcgggatgccgaggcgatagcggaagccgcgacccgcccaacgatgcgctttgtcgatctgaagagcgacgagcaactcgacatgcagagcctgcaccgggctcgagatcggctggttggcgagcgcacgactctgatcaaccagcttcgggcgattttgctcgagcggggaatcatgattgccaaggggcggcgcaagcttgaactccgactggaacagcttctcgccggagagatggcgatcggccgtcggatccgggttctgatcgaggacatgcgagccgagtggcgcgccctcgatgcccgcatcgtctccttcgacgcggagttcgcgaccctcgctcgcacggacgcatcaatgaagctgctctcgacgatcccggggatcggcccattgaatgcgaccgcgttcgtagcgtcggtcggaaaggccgagacgtttggccggggccgtgaccttgcggcctggcttcgactcgtgcctcgacaaatgacgaccggaggtaagcctaagcttctggggatcagcaagcgcggcaacggctatcttcgtaggatgctgatccatggagcacgagcagcgctggcgtcccttgccaaagggaagacgctgttgggcgaatggcttcgaggcctgctgtcgcgaactcatatgaacacggctgtcgtcgcgctagcggcgaagatggccaggatcatctgggcggtgctgagaagcgggcgtccgttccagatggcggcgttgccgtcggtcgaataatcagagatcggccggaagggagaccttcaggccggcgttgtctgtgagtggactgaaaagatggcctgacagtcgaacggtgtgccgacatcctgaccaaaaaaatggcgttagacgccgacgtctttatgaggatcggtacgcgcgtaagctccatcttggccggggacgatcattgccccgagaccggatacgttggcgcagactgagatgccgtcaaaaatcgcttgcaggcggggcgagccatacg

SEQ ID NO: 3104 - DNA, 1480 bp, unidentified
  source 1..1480: mol_type = unassigned DNA; note = element_482cf73
  misc_feature 1: note = core
  misc_feature 2..236: note = LE
  misc_feature 237..1460: note = CDS
  misc_feature 1461..1480: note = RE
  misc_feature 11..248: note = bridgeRNA
ctaattgttcctgagggcgcttcgggttgtgccgtagcgttcgtgaggtccgacgggctggctcccgaaccgcctgccgaccgtggccaacgggctcggtctggctttagatcgaggtgccagcctgccggttctcgccgtggcgtggctcgaaagaggtgcgagcgctagcagatccgtaattaggcatgcccgccacgttccccattccccggacgaacgagttggagcgtgcaatgacagcagtgatgatcggcgtggacccgcataaggggtcgcacacggcggtggtgatcgggcccgcggaggagccgctgggcgagatcagggtccgcgcgtcggctgcgcaggccgggaagctggcggaatgggcggcggcgtggccggagcggacctgggcggtggaaggcgctgccggggtgggcaggctgctggcccagcagctcgtcgccgccggcgagcgggtcctggacgtccagccgaagctggcgtcgcgagtgcggctgctgcaggctggcgacacgaataagaacgacccgaatgacgcgctgtcggtggcggtcgccgcgctgcggtcccggacctgccgccaggtggccgccgaggaccacccggcggtgctgaaggtgtggtccaagcgtcaccgggatctgtcccggctacgtaaccaggtcgcctgccggctgcacgccgtgctctgcgacctggtccccggcggccacccgaaggagatctccgcagctcaggccgccaggatcctcgggcaggcctcgccgtccggtgccgtcgaactggctcgcgccgagctcgccgcggagttcctcgaggacatgcgccgcctggatacccagctgcgcgacacccgcaagaagctcgctgccgcggtcagggcctccggtaccaccctcaccgaggtgttcggcgtcggcccggtcatcgccggcaccatcatcggcgacatcgccgacgtgtcccgcttccccggccgcgaccacttcgcctcctataacggcaccgccccggtcgaggtgtcctccgggaaccgcaaggtccaccggctctcgctgcgcggcaaccgccgcatcaaccacgcgatccacatggccgcgatcacccagatccggcacaagcacagcgacggccgcgcgtactacgagaagaagctggccgagggcaagacgcacaaagaagcgctccggtccctcaagcggcggatcagcgacgccatctactcccgcctgctagccgacgcccgccgaaccggacagcagccagcgcgagcggcccgggagggcaaccagggaacgactctgactccagcgcggccggctcacaccccgaacgccggctcttcggacaagccactcccggacctgggcaccacgatacggcccggcaccagggcagccacaccctcaccgtcgaagccggcttcaaagaaaactcggccagccacttgacagcagccgcaaagaggact

SEQ ID NO: 3105 - DNA, 1394 bp, unidentified
  source 1..1394: mol_type = unassigned DNA; note = element_483ae76
  misc_feature 1..2: note = core
  misc_feature 3..103: note = LE
  misc_feature 104..1120: note = CDS
  misc_feature 1121..1394: note = RE
  misc_feature 1091..1381: note = bridgeRNA
agatggggtggttgccgccctccccagacggcatcgagatgtgccaggatagtggagttagggccactgagcggaaaggacggcaaccgtgtcaaaggatacaatgatcggggtggacttggcaaagtccgtatttcagctccacgccgcgtcaatgacgggccaacccaagtttcggaagaagatgccgcgttcagccttcacagcgtttatggcagcgcaaccgccggcggtgatagtgatggaagcatgtggcagtgcacattactgggcacgggaaatgatccgacttggccacgaggtcaagctgatcgcaccacattacgttaggcctttcgtgaagcgccagaaaaatgatgccgctgatgctgaagccatcgtgattgcggctcaacgaccagagatgcggtttgttgacccgaagtcagaagagcagcaaagcagcgcgattttgtttcgcggaagggaacggctcgttcatcagcgcacggagctggtcaatgctgtaagggcggcactctatgaatatggtcatgttgtcccgcaaggcataaatcagctctctcggattgcggatattcttgacgagaaacacagcgatttgcccactttgatgcgggatgaatgccgagatctgctggcacagatcgccgagaaaactgagcgcatcaatatgcggacaaagaagatcaaagcgctggcggctgaaactgatgcggctaggcggctacagacgatcccgggagttggccctttaacagccttggcggtccgggccttcgctccatcaatggagagcttccgatgtgggcgggacttcgcggcctggctcggtcttgtcccgcggcaattctcctcaggtggaagggagcgccttggacgtatctctaaagctggtcaggcagatattcgcagattgcttattataggtgcgatgtcccgtctgaattggatgggtcgtaaatcgattccagaaaattcgtggctagcagatatgcttgccaggaaaccgagaatgcttgtggcaattgccctcgccaacaagatggccagaacaatttgggcgcttataaaaaatgggaatgactacagaattccggcgcacgcagcagttgcatgatcagcatgccaacaggcttgccgaacgtcggatgatgggggtgtgagaaggcgacgacccgaatgggcgaaatgagcgaacagatctggtccgggaaaaccagttacgaggcgtgagcatctcagctcggaaacgagatttggactcgaaccgcagatcaccataccggccagcggcttctgaaacgccgcaaccaaaggcctgacagaagaccgcactcgatcactcgctattcggatcagaaacttcttgcatcacgggcggcaaccacaga

SEQ ID NO: 3106 - DNA, 1382 bp, unidentified
  source 1..1382: mol_type = unassigned DNA; note = element_483b057
  misc_feature 1: note = core
  misc_feature 2..77: note = LE
  misc_feature 78..1103: note = CDS
  misc_feature 1104..1382: note = RE
  misc_feature 1136..1376: note = bridgeRNA
gaatgatatggactccccatccaattggcatttgtgccatattgaaagtgtaaacagtcaaaaaatggagagcccatatgtctttaattaaagttgttggcattgatttagccaaattagtttttagtatccacggtgttgataagcatgacaagtgtaaattaagaaaaactatcaaaagaaacaagctattagaggaaataacacaacttccaccctgtattattgcaatggaagcttgctccggtgcccactattgggcaagggaatttatcaaactcggtcatgatgtgcgtattatggcgtctaaatttgttattccctatcgccaaaatgaaaagaatgacgccaatgatgctgaagctatttgcgaagcagctacaagaccaaaaacacgttttgtcagtattaaaagcgaagaacaacaagccgtgctgtgtttacaccgcatcagacaaggtgcaattaaagacagaaccgcacgtataaaccgattacgcggtttactcgctgagttcggtatcatcatgccaaaaggtcgataccctgcacaaaatgccattaacggtattcttgaagatgctgaaaataacctaccttttcttgcgcgtgaattgctcaatgatttatggcaaagtattaaatctttaaatgcagaaatactcaaatacgatagaaaactgtacaaactcgccaaccaaatgaaagacgccaaaaggcttatgagtattccaggtattggcgaggtcactgcaacagccgtagtcgccacagtaaatgatgctaaacattttgataccagtcgttcttttgctgcatggattggtttagtaccaaggcaatattcaactggtggggttgcgcgattaggccgtatcagtaaacgaggtgaaaaacatattcgcacttgcctgatacatggtgctcgagcagtaatcgcaaactgcaaaaataaaacagaccgaacgagtctgtgggtcaaagacctcattgaacgacgcggttttaaacgtgcaacggttgcattagctgcaaagaatgcccgcttaatttgggcactgttacattcagaaaaagaatatcaaattgattatgtaaaataagttttaaagtaacaaagttaaataaaaaagagtttaactcaccgagtctgtgcattagcaattgacgataacacggtcagaccgagagcaagaaagcctgtttagtcgggaagaataattctttataaaagaagattctgtttaacgaatgaggcattgctcaagcgcaaatcatcagggcgatagcgtaacaaagctaaaaaacgccgaatgtagagctgctgtcagatcttcttgttatcaaaaagtgttattgcttgacaacggggagtccatgta

SEQ ID NO: 3107 - DNA, 1405 bp, unidentified
  source 1..1405: mol_type = unassigned DNA; note = element_483e47f
  misc_feature 1: note = core
  misc_feature 2..231: note = LE
  misc_feature 232..1392: note = CDS
  misc_feature 1393..1405: note = RE
  misc_feature 13..243: note = bridgeRNA
ctagtaagagactggtgtcaggatcggatcccggccaggatcaggtctaggtgcccggtgggatgctccctttattcggctgcccgcctgtcgtattggtgtggctctctaatggcttgcctcccatcgggtgccgtgctgggagtggctgaagaggggtctgccccaagctcgtactagcggtgccctcccgcacggacaccaccatgtcgactacgggaggaaccagcggtgaccgtcatcatcggaatggatccacacaaacgctcggccaccatcgaagccatcgaccccaccggccggatcctggccaccggaagatatgccaccgacaccgccggctataccgatatgctcaccgccgcacagcaattcaccaagcgggtctgggcggtcgaaggctgcaacggcattggccgccacctcgcccaccgcctggtccacgacggagaaaccgtcatcgacgtccccgccaaactctccgcccaagtccgggtattcgccaccggcaacggccgcaagaccgatcccgtcgacgcgcactcggtcgccctcgccgccctgcacgcaccgaatctgcgccgggtcaccgccgatccggagttggttgctttgggcatgctcgccgaccgccgcgacgagctggggcgcgcccgcaccgaaaccctctgccggctgcaccggttgctgctcgagctgatccctggtggcgccaaacagtttctctccgctcgccaggcccgcgagctggccgtcactgtcaccccatcggatgcggccgcgcgggtccgactgcgcctgatcatggagatgatcgaggacctggaaaccatcgaccgcaaaaccagagctgccgacaaagaactgtgccagctggtcgccgaccgcggctcgacattgatggagctccacggcatcggaccttcctccgcggcaaggcttttggctgatgcgggtgatgttcaccgtttccgggatcgagaccggttcgcgtcctggaacggcaccgcaccactggacgcgtcctccggtgatcagcaacggcatcggctttctcgcgccgggaaccggaaaatcaaccgggtcctgcacatcatggcgatcgtccagctgcgcaaccgcaccaccggccgggtctactacgacgcccgcaaagcgggcgggaaaacctcgatggaagcactgcgggcgctcaaacggcggttgtcgaatgtcgtctacgcccgaatgctcgctgatcaacgtcgtcgtgaatgggcaggcccgggagggcaatcgggaacggctactgactccagcgcgaccggttccaacccgcacaccgatccttcggacaagccacatcccggacccgccatccaggctaaccccgcatccaccccaacgccttgacatagaggggagc

SEQ ID NO: 3108 - DNA, 1415 bp, unidentified
  source 1..1415: mol_type = unassigned DNA; note = element_4842688
  misc_feature 1: note = core
  misc_feature 2..88: note = LE
  misc_feature 89..1117: note = CDS
  misc_feature 1118..1415: note = RE
  misc_feature 1184..1407: note = bridgeRNA
caatggaatggacgcctccacccacagtggcaccgatatgccaaagtggaggtattgatcaaccactcgaagcaggagagcgtccaccatgaagatcacaaccgttggtattgatctggcaaagaacgtatttcagttccatggcatcaatgaacacggcaaggccatactgaagaaacagtacagacgtgaccagatagcacccttcttcatcaacttacccccatgcctgatcgggatggaggcttgtgccagcgcacatcactgggcgcgcaagctgcaggcgatgggtcacacggtacgcctgatggcgccacagttcgtcaaaccttatgtcaaaagcaataaaaacgatgcggcagatgctgaagccatctgcgaagctgtgacaaggccgaacatgcggtttgtgcctatcaagacgattgagcaacaatccgttctggcagtgcaccgtgcccgtcagggttttgtgaaagcgcgtactgcccaagccaatcagatccggggactgctcggtgagtttggactcattatcccgcagggcatcgccagcatcgccaaacgtgtccctgcactgcttgaagaggccgccggtgagctgaccggccccttccggcaactcatacagcgactgctggcgcatctgaaagaactcgacaaacaggtggatgaactggagaaacaaatcagactctggcatcgaaccagtgaagccagcagcaaacttgagcagatccccggaatcgggccgattacagcaagtgcactggtcgccacactcggggatgcaaaaagcttcgacaatggacggcaggttgccgcctggctgggactggttccccgacagcattccagtgggggtaaaaacgtcctgctgggaataagcaaacggggtgattcatacctgaggacaatgctgatccatggcgcacgggcggtgatcttcagagcgaaacagactgtagacaagaacagctggctctacaaactgctgcagcggcgcaaccctaatgtggcagcaattgcactggccaacaaaaatgcacggatcgtttgggcattgctgacccatgacagaaccttccagtctgattatatgcctgcgcttatataaccaggctagtcagagtaaatggcgaattaagctcatcaaatataaccggagaatagttcctatcctaccgattgctcaggcagtcatgaaatgatggcaaaacaggtcagaccgtggttggcacagcccgctatacccccggcacacaaagtgtgcgcatacccaattgaggcgccagccagcacactccattagggacagcagcagcggctgcacgtaaagtccggatgtacgggtgcaatctttacctttatgccgtcaggaattgaatgcttggcaaactggaggcgtccatgta

SEQ ID NO: 3109 - DNA, 1449 bp, unidentified
  source 1..1449: mol_type = unassigned DNA; note = element_484bdaa
  misc_feature 1: note = core
  misc_feature 2..109: note = LE
  misc_feature 110..1123: note = CDS
  misc_feature 1124..1449: note = RE
  misc_feature 1194..1442: note = bridgeRNA
gaatgaaagggacttccccgtcccgaagaagcggcggtgaggccgcgcggcatcgatgtgccatgatgattgttcgcgcaaacatcaattttttcgaaaggggaaatccatgactattatgactgtgggtattgatcttgccaagaacgtgttctctttgcacggcgttgatgagaatggcaaagcggcgctgcggcgcaccgtgcgtcgtgaccagctgctggagctgatcgctacgctgcccccgtgcgttattgcgatggaggcctgctcgggggcgcatcactgggcgcgccagttcgccgcttttgggcacacctcgaaactgatcgctcccaagttcgtcacgccttatcgcatgagcggtaagcacggcaagaacgatgcggcggatgcggctgccatttgtgaagccgctacccgtccgaacatgcgttttgttccgctcaaaaccatcgatcagcagggcaccctgtgcgtgcatcgggtgcgtcaaggcttcatcgaagagcgcacttccaccattaaccgcgtgcgtggattgctctccgagttcggcatcgtgctgccacagagcgcaaacaccgtgcgccgacaggccaccgcggccctcgaggatcttcctggctgggccaatcgtgccatcggcgacttgctcagccatttgcatgcgctggatctgcgtatcgtcgactatgacgcccacctcaaggctgccgcacaagccgacgagcgttcgcgcaagctcatgaccacgcccggcatcggtcctaccaccgccagcgccttggtcgccgctatcggcaatgcccatgacttcaagaacgggcggcagttggccgcctggcttgggttggtgcccaaacagtacagcaccggcggcaagttccgattgggcggtatcaccaaggcgggcgatgcctaccttcgaacgttgttgatcctgggtgcacgatccgttctggccaacgcacctggcaagactgatcgcatcagccgatgggcactcgccgtgcagcagcgcgccggctacggcaaggcattggttgccatcgccgccaagaacgcgcgcatagcctgggccatgctcagcaaaggtgaggctttcaggtcgatcgcctgaaccgctcaacgtcacaccagccacgttcgccgaataaggatcacgtcgatgagctagcaagcatttcgtaccgatcaccgggtctgtccgcgttgatgagtcaaggttggacctgcgtggggtatgcctgatacagccaaggaggacactacggtgatcccggctaacgaatgaggccctcacgcgcgtctttcatcagggtccgcagcaatcgaactgctgcaacaagaccgtttgtagagactcagtccttcaccttgccgcaccgtcgtcggcgaaaacccgaaaagcaatccgcaggcttgacaatttgggaagcccttgta

SEQ ID NO: 3110 - DNA, 1466 bp, unidentified
  source 1..1466: mol_type = unassigned DNA; note = element_4855543
  misc_feature 1: note = core
  misc_feature 2..241: note = LE
  misc_feature 242..1447: note = CDS
  misc_feature 1448..1466: note = RE
  misc_feature 1..230: note = bridgeRNA
cgttaccttcttcgtaccccggaagctaggggtgctggtcaccaggttcggcatgactgaatgcccctgtcgttcggatgatccggggggtgttgtcaccgggcctggtggcgtcggtgtgaccgctgatagggacagggccagcgctgtggcgtgaggtctcttcgtaacgtgggtgccggctgctgacgccccgaccgtggccagcgttgctgtcaccgcgacgatgaggagacacccgatgcacggattgcctgaacgggactacaaggtctggctgggcctggacgtcggcaagggcgagcaccatgcctgtgccctggatcgcgccggcaagcgggtccacgacaagccgctgccgcaggacgaagcgcgtttgcgggcactgttcgactctctggccgtgcacgggccggtgctggtcatcgtcgaccagccggcctcgatcggcgcgctgcccgtggccgtcgcccgcgcggcgggcctggacgttgcgtatctgcccgggctggcgatgcgccgcatcgcggacctgcacccgggcaacgccaagaccgacgcccgggacgcgtacgtgatcgccgaggctggacgcacgatgccgcacacgctgcgtcgagtcgatctgaacgacgaggccctggccgatctggaagtcatcgtcggcttcgatgacgacctggccggcgaggtcacccgcgtcgccaaccgcatccacggcctgctcacccagatccaccccgcactcgaacgcgccctggggccgcggctgcagcacaaagccgttctggagctgctggcccgcttcggcggcccgaccggactgcgcgccgccggacgccggcggctgttggccgtagcccgaccccgcgcgccccgctcctacgagcgcatcgtcaacgacatccagaccgccctggaccagcagaccgtgctcgtgcccggcaccaaggccgccgaagtggtcctgcccaagctcgccggccagctcgccgacctgctccaacagcgtgctgacgccgcggcccaggtcgaggagatgctcgatgcgcaccctctttcccaggtcctgatctcgatgcccggcatcggcatcaggaccgcagcccgcatcctgctcgaggtcggcgacggcagcgccttccccacccccggccacctggccgcctacgccggcctcgcgccagtgacgcgacgctcgggctcctcgatccggggcgagcaccccagccgtagcgggaacaagaacctcaaacgcgcgctcttcctgtccgccttcgcggccctgcacgaccccaccagccgcgcctactacgaccgcaaacgagcccaaggcaaacggcacaacgccgccctcatctgcctcgcacgacgccgctgcgacgtcatctacgccatgctccgcgacggcaccctctaccactcacccgcgcccgcagccgcttgacaaagaccatagggacacc

SEQ ID NO: 3111 - DNA, 1574 bp, unidentified
  source 1..1574: mol_type = unassigned DNA; note = element_4858e27
  misc_feature 1..2: note = core
  misc_feature 3..260: note = LE
  misc_feature 261..1475: note = CDS
  misc_feature 1476..1574: note = RE
  misc_feature 14..280: note = bridgeRNA
ttggtactgtataagtgtaagtgttaaaccagatatgtctggttagcatttgcacttattttatttataattagggagtaattggtctgacgtcggtatttttggattaataacatccgtcataaaaactgtcagccatccattattataaatattcgattaagcaggttgaaaccctagaggctttcgtgtaactaaccaaaatgaattgtaataagtgcagatggagacaattacaaaaataaagttggaggttacttatgataagtgtaggaattgatgtatcaaaagaaaaaagtacagtatgtatattaaaaccatacggcgagatcgttagatctccatatgagattacgcacacagaaagtcaaattgcagaattagtatctacgataaaatgccttgatgatgaagtaagagttgtaatggaagccacagggaattatcacctaccagtgcttagttttcttaaagagcatggaatttttgtggctgttattaatccattgataatgaaaaaatatgcaagcataattcttagaaaggggaaaacggataagctggattctataaagattgctaattatggtttggataactggttttacttaattaaccatgaatctagtgaagaaatttatgtgcaactacgtcttctgggaagacagtacggtcactacattaaactccgaatagaaagtaaactatccttaactacaatgcttgactacacaatgccgggaattaaaactatgctgaaaagccgttcagataaaccagaaaaagataagctaaatgattttattgaagaatactggcattatgataatattacaaaaaaaagtgagaaccagtttattagcaattataaaaattgggcaaaaaagaagggatatcaacaaagcgaagcgaaagccataaagatatatgacttagctcagcaaggaatccctactttatcttccaatgctccatcaaccaaaatgttagtattggaagccgttcgagttctccgagaaatagataaaactcttgcattgattttatcacaaatgcaagaattagcaaagtctttaaaggagtatacagttgttcgtgaaatggcaggagtaggtgatattattgcaccaagactaatggctgagataggagatattagaagattccatagcggaaaagcattgatagcatatgcaggtattgatgcaccaccatatcaatcaggacagtttaccggaacgcgaaggcggatatcaaagcgaggttctgctaccctaagaaaaactggatttgaaataatgaaatgtttaaaaagcaataaaccagagagtgatactgtatatttgtttgttttaaaaaaggaagctgaaggaaaagcttcaaaagtagctaaaattgctggattaaataagtttttaagaatatattatgtaagagtgaagaagtatataagtaataaacaatttaataaataaaggcttggaccagaaaaacagctggtctaattagcatgcaaaaaaatagaaaaaataatttaaaaacctgcttcaaaagtattgactttcattagcagg

SEQ ID NO: 3112 - DNA, 1167 bp, unidentified
  source 1..1167: mol_type = unassigned DNA; note = element_48613b6
  misc_feature 1..2: note = core
  misc_feature 3..202: note = LE
  misc_feature 203..1138: note = CDS
  misc_feature 1139..1167: note = RE
  misc_feature 3..178: note = bridgeRNA
cttgtatgtttagacttgaaggggtgggtgggactacagactcgattctgactctgaccagtacagaccgtgggagacttctcgtcccaccccttctacccaaagcgccgataaggaattcatcggttaaccgacgatagagacaagccagcgcaacggtagaccccaacaagctcttaaaccctagctccgaggatttgttatgacaatccttacttcgcagacggttgttggtatcgatatcgccaaagccgaagtcgttgcctaccgcgctgaccagcaaaccattgaacccatcaagaacgatcgagcgaccctcaaacgttggctcaaaagattgcctgctcaaagcgctatcgcacttgaagccactaacatttaccacttggacacggttgagttggctcacgaaatgggccaccaggtctacgtggtggatgcttatcgggtgagccattaccgccgtggcgtcggccaacgagccaagaatgacccttgcgatgcgcgtttgctggcgcgttacttggagagtgagcaaaacaaattgcgggtctggagcccgccacccaaggcctacagctcattgaagagccttcttcataggcgtgcaacgctgatccagaaccattctgggctgatgttgagttgggccaatgaacccttgttgaagaaagtgcagaccgctcagcagaaggcatttaaacaagcggatcaggctattcaaaaattactacgcaaggtcagcaaagaggcagggattgaggagaatattgatcgctgtaaagccatagaaggcgttggcgaactgaccgcaaccgggttggcggtaacctttatgcgcggggcttttgcgaacagcgatgcgttcatcgcgtttctagggatggacctggcggtcgatgactcaggcaagaaaaaaggcgtacggcatctgaccaaaaaaggagacccggaaattcgacgtctgacatacaacgccgcaatggcggcgtgtagatcgtccaaatggaagccgttttacgagtcatacctggcgagaggcttttcgaaaacccaggccttagtggccttggcccgaaagctctgtcgggtggcatttgctctgatgaaaaatcagagccaatacctgtcagcctgagagctcaaggttgccgggcaacatagaat

SEQ ID NO: 3113 - DNA, 1362 bp, unidentified
  source 1..1362: mol_type = unassigned DNA; note = element_4862be1
  misc_feature 1..2: note = core
  misc_feature 3..79: note = LE
  misc_feature 80..1099: note = CDS
  misc_feature 1100..1362: note = RE
  misc_feature 1102..1348: note = bridgeRNA
tgatggggtggacggcccccgcaccgaggtaggtgtgtaagatgcggctgtcggaagccacgtctagaggagtcgtcccatgtgtcaggagattgtcgttatcggccttgatctggccaagaacctatttcaggtccacgccgttgatgcgcaaggccaccctattgttcggcgccagctccgccgggctgaggttctcaagttcttcgcgaagataccgccgtgtctggtcggcatggaagcttgcgcctcagcgcaccattggggtcgcgagattggtgcacttggccatcaggtccggttgatgccgcccgcctatgtgaagccgtatgtgaagcgcggcaagactgatgccgccgatgccgaggcgatctgcgaagcagtgaccaggccaaccatgcggttcgtggcggtgaagtccaaagagcaacaggcagcgctgatgctgcacaagacccgcgacctgctggtccggcaacggaccatgctgataaacgcgttgcgcgcgcaccttggcgaatatgggatcgtgaaggcccaaggccccgccggcgtcaactcactgctggctctggtgcaggaggctcaagatgccgtgccggtccatgcgcgatcagccctgcgaagcatcgtggctcagttccatgcgctggccaaggagatcgggcacctggagaagcagatcctcgaatggcatcgccacgacgaagttagccagcgccttgcgacggtgcccggcatcggaccgatcacagcctcggccatcgcagcaaccgtacaggatgcgtcgatcttccgatcaggccgccagttcgcggcttggttaggtctgacgccacgaccgcacagctcgggcggcaaggaacggctcggcggtataaccaaacagggtgatgggtaccttcggcgcctcctcgtcgtcggtgccacggccgtcatacgcatgacgcgcaaggatcacgcgaagcagccatggctcgccagactgctggagaccaaaccggcaaagatcgccagcgtggcgctggccaacaaaaccgccagaatcgcctgggtcataatgagtagaggagaggtatatcgatcggcagtggcctgaactctcgggagcgaagggccgcgcccacatgatggtgcggggtgaatgagtggtgatgacagaccggtcagaccggggatcgtggaagcccaaggggagcaggcgctaaccaagcgcgttgacgtgattagggaaacgatccgcggacttcatcagggccagcagccatgcggtgctgcaccaacaggccgaacacatggatgcacccgaccggtgctcatcaacgcccaaaaacctcttgcaccgcgggggccgtccacaca

SEQ ID NO: 3114 - DNA, 1572 bp, unidentified
  source 1..1572: mol_type = unassigned DNA; note = element_4863415
  misc_feature 1..2: note = core
  misc_feature 3..262: note = LE
  misc_feature 263..1468: note = CDS
  misc_feature 1469..1572: note = RE
  misc_feature 34..282: note = bridgeRNA
ttggtactctataagtgtagatatagatcataaatatatgatttaacatctgcacttattttaatttataataaagggagtaatttggtataacgagctaagaattggattttaacatccgtggtttaaactgttagccgccccttattataaagattcgattaagcaggttgaaaccgtatggctttcgtgtaactaaccaaaatgaattgtaataagtgtaggtggattaaaattacaataatttcttaggaggatttacatgattagtgttggaattgatgtttcaaaagaaaaaagtacagtatgtatattaaaagaatatggtgaagttattagtgaaccacatgaaataaatcatactgaaactgatttaaaagcattagttgaatctatttctgaattaaatgaagaaactagagttgttatggaagcgaccggtgcataccatttgccactacttacttatcttaaaaatcatggtatatttgtagccgtaataaatccattaattatgaaaaaatattctgctataggattaaggaaaggtaaaactgataaattagattctatcaaaatagctaattatggaattgataattggtttaaattaactgactatgaagcaacagatgaggtgtattctgaattaaaattattaggtaggcaatattctcattatatagctatgagaatagagagcaaacttgtactaagtaatctattagatagaacaatgccaggaattaaaaatctattaaaagatagatccgataagccagagaaagataaattaaatgattttgttaaagaatactggcattacgataatattacacagaagaatgaaaagcaatttataaatagttatttaaaatgggcaaaaaataaaggataccatcaaagtgaaacaaaagcaaaacagatatatgctttagcacaagaaggcatccctacactatcttctagtaccccatcaaccaaaatgttagtattagaagctgttcgagttcttagcgaaatagatagaactctatctatgatattatcacaaatgcaagaattagcaagtagtttaaaggaatacaatgttgttagaaatatgcctggagttggagatacattggctccacgcttaattgctgaaatcggtgatttaagacgcttttataataaaaaggctttgatatcttatacgggtattgattcacctccttttgagtcgggacagtttgttgcaaacaaacgtcgtatttctaaaagaggttctgcattattgcgaaaaactggatatgaaattatgaaatgtatcaaaagtactagaccaaaggatgatcctatatttttatatatgttaaaaaaagaagcagaaggcaaatctaaaaaagttgctaaaattgctgcattaaataaatttttaagaatatactacgctagggtaaaagaagtttataatactcaagtttaaataatatttctatttaaattaaacagaatttttttgggtttatttgtcatgcaaaaaaatatatgaaaaaaaccattagaaaagacttgatttttattagcagg

SEQ ID NO: 3115 - DNA, 1315 bp, unidentified; identical to SEQ ID NO: 84
  source 1..1315: mol_type = unassigned DNA; note = element_487b02a
  misc_feature 1..4: note = core
  misc_feature 5..61: note = LE
  misc_feature 62..1066: note = CDS
  misc_feature 1067..1315: note = RE
  misc_feature 1099..1302: note = bridgeRNA

SEQ ID NO: 3116 - DNA, 1361 bp, unidentified
  source 1..1361: mol_type = unassigned DNA; note = element_487e63a
  misc_feature 1: note = core
  misc_feature 2..76: note = LE
  misc_feature 77..1096: note = CDS
  misc_feature 1097..1361: note = RE
  misc_feature 1130..1355: note = bridgeRNA
gaatggcatggactccccctcatcaggctctgccacacttggtaatgtctgacgaccaaattacttggaggccactatgtcactctctatctatggcattgatttagccaaacatagctttagtatccacggcgaagattctgtaggcaacatgttgatccacaaaacaataacgcggtctaaagttttaactacttttgccaatatcccaccggctatcatcggtatggaggcctgtggtgcttcgcattattgggctcgtgaactgactaaactcggtcacacgccaaaaattatggcagccaaatatgttgcacctttcagaacgggcgccaaaaacgaccttaatgatgccgttgctatttgtgttgcggtcgcccgtccttcaacgcgctgcattaaaatcaaatccgcagaccaacaagccatactgttacttcaccgagcacgtgagaactgggtgcatgaacgtactggattgctcaatcaagttcgagctatgctggccgaattcggtatcatcgcccctaccggtcggcatgctctccaacgcgcaattcccgatgcattggaagatgccgaaaaccaactacctgatttatcgagggcgattatcgccgattgttacgaccatcttttaacactcaaccaacgcattgaagatcaagaaaactgcttcaatatgttggtatcacgtagccataatgccaagaaaataatgaaagtagctggtatcggcccaatcacggctacggcagttatcgccagtatcggcaagggtgagcaattcgataaaggccgcgactttgctgcttggctgggcctcgttccttcccaatactcgaccggcggtaaacctcggctagggcgtattactaagcgaggcgataagtaccttcgaacgttgctggtacatggtgcacgagcagtgattgccagtctaggtgacaaaaccgaccggcttagtctctggtgtaaaagcttagttgagcgacgtggcttcaaaagagcgactgtggcactcgcagccaaaaatgcacgaattatctggtcgatacttcgtcacgataccgactacgaaccgattaaaagctaacagctgtagaatcccatttaaaaaggagtaacaagcttcaccgggtcattgcaatagccaatgatgatatatggttaagaccatttgcgggaaaacctgataatgcggcgggcactttagatgccttctaacgaatgaggaaccgcaaccgcgtagtttcatcagggtcatggcaaatatgccaataaacagaccgaatgtagagcggcagtcccaaaccttatattacctgacgctgttgttgacaatcgggggagtccatgta

SEQ ID NO: 3117 - DNA, 1578 bp, unidentified
  source 1..1578: mol_type = unassigned DNA; note = element_487e923
  misc_feature 1: note = core
  misc_feature 2..330: note = LE
  misc_feature 331..1563: note = CDS
  misc_feature 1564..1578: note = RE
  misc_feature 25..267: note = bridgeRNA
ccgttagcttctaagtgcaccggttatccggcaggatgagtggtgttggccggtccggtccctgggcatgatcgtgtgcccccagtcatgcaatgatccggggggtgttgtcacccaggggctggtcacgggcggatcgtggatcgctgatagaggcacgacagtcccagctgcgctcttggtgttggcagagggcttgttttctaacgtggatgccgagcatgaaccgcccaccgactcactctcctgcagagggttgtggactggctacgtggccgcggcagcgccctgctgccgacggtgacccgcctgcccgtgtgggagtgattgatgaccggattcgacctgctcagtttcgccttgttcatcggcctggatgtcggcaagtccgagcaccacgccactgccctgaccactactggtgagaaggtctatgacaaggccctgcccaacgacgagaccaaactgcgcaccctgctttcggagctgacagcagcacacgggccggcgttgttggtggtcgatcaacccgccactatcggtgccctgccagtcgctgtggctcaagagaccccagagatcgaggtcgcctacttgccggggctgacgatgcgccggatggctgacctgcacgccggatccgcgaagaccgatgcccgggatgcgttcatcatcgctgagaccgctaggaccatgccctctgcactgcggcagatcgcggcctcggatgaacagatcgccgaactggccgtgttgtccggtttcgatgatgatctgctgggccagaccaccgccgcaaggaaccggctacgcgggctgctgacccagatccaccccggcctggaacgcgtcctgggatcgcatctacaccactacggtgtccttgatgccttggcgatgtggccgaccccgcagaagctgaagaccgctggtcgtggtcatgtgcgcaaccggatcaagaagcacaacccacgcctggccgggcggatcaccgaggcgatcttcgaagccctggatgctcagaccgtagtggtcgccggcacgggggccgcaaccacgatcgtgccgatcctcgccggacagctcaaagagctctacacccagcggaacaacgtgctggaacaagtcgatgccctggtggaggcccaccctcttcacccggtcctgacctcaatgcccggagtcggggtcaggaccgcagccagaatcctcaccgaggtcgtcggcaagaacttcaagacagccgggcacctcgcctcttacgctgggatcgcaccgaccacccggcgttccgggacttccattcgcggggagttcgccaaccggggcgggaacaagagactgaagtccaccctgttcaatagcgccttcgcttcgctgcatcatccgccctcacgggtctactacaacaagaagcgagcagcggggaagacccacaagcaagccgtcatcgccctagcccgtaggcgactcgacactctctacgccatgctgcgcgacggcaccttctaccaagacccagacaacgcccgcggaggctcaggccacgccctcgcagcttgacgaaaaccatagagg

SEQ ID NO: 3118 - DNA, 1304 bp, unidentified
  source 1..1304: mol_type = unassigned DNA; note = element_4882dc5
  misc_feature 1: note = core
  misc_feature 2..264: note = LE
  misc_feature 265..1257: note = CDS
  misc_feature 1258..1304: note = RE
  misc_feature 55..249: note = bridgeRNA
cctttggtttaaaggatgtccaattacttagatattgctattattaaaattgggggtttctaaggggggtgttagcaaaccagagttattgtggaaagttattataaaaggcagggtgaacttttcgactcactagctaagcgcttatcggggtaatagtccctgccttttatgattgcctaaggcccaactagaatactttctttgcgacaacaaaggtgattggcaaaaggcaatttattaacgtatttaaaggataaacgtatgaaaagctggaatgttattttaggtgttgacgtgtctaagttaacgctcgacatctgttgtgcagaacggaacctgcacatcaagattgataattgctccaaagggttcaccatacttaaaaaatggtgcaggaccaatgagatagacctgaaccaaacgctaatggtgatggaatataccggtggttacgaataccgtttcatgcagttctgcgagtcgttatctatttcttatagccggatacctggtttggagatcaaacaatcaatgggtatgaccaggggtaaaagcgaccaggctgatgccttccgtatcgggcaatatggcgaagaaaaaagtaaacgtctgaagccttcaaaaccactggataacaatatattaaaactgaagcagttgctatcattccgtaaaagactggttcgtgaaaaggcggggttggaaagcacggttaaagaaagagggcatatgtattccatgaagaaagcagatacagttactcatattgctcagtccaaaataaaagcggataaaaaatacataatcgaggtagaacaggagatcatgaaagtaatcaaaggcgacgaatcgatgttattaacctaccggatcataaccagtattaaaggcatagggccggtcaatgcatggatgaccatagcctacaccgagaactttaccagctttacagatgcgcggaaatacgcagtatatgtgggagtgattccgtttgagcacacttcaggcacgagtatcaaaggacgaaagcaggtaagtcatctggcccacaaagggttaaaaaatgagttaaaccaggcagccaaaacagcaatagctcacgatccggaactcaaggcttatgcagaaagaaagcttgaaaataaatgttacccattagtattaaacaacgttaaattcaagctgatccttagaatgttttcattagtgaaaagaggtgaattgtatgcgcaaaactataagagagcagcataaaaagaacttttttctgataaatttgcatatatggtaaacctagaata

SEQ ID NO: 3119 - DNA, 1408 bp, unidentified
  source 1..1408: mol_type = unassigned DNA; note = element_488345f
  misc_feature 1: note = core
  misc_feature 2..350: note = LE
  misc_feature 351..1394: note = CDS
  misc_feature 1395..1408: note = RE
  misc_feature 12..233: note = bridgeRNA
ctacttagcattggtgcctgggcctgatcctggccaggatcaggcccaggtgcccggtgagatgctctcgttcagcggctgcccaccatcgttattggtgtggctctcacatggcttgcgtctcatcgggtgccgtgccgggaatggctgaagaggggtctgcccagctcgaagtagcggtgccttcccgcacgaccaccacttgtgtcgattcgggaagggatgtgctggtgacggtcatcatcgggatggacccgcacaaacgctcggccacgatcgaagccatcgacggtactggaaaggtgctgcggaccggccagtacggcaccgacaccgccggttaaaccgaaatgctcaccgcggcacagcggttcggtgaccggttctgggcgatcgaaggatgcaacggcgtcggccgtcacctggcccaccgcttggtgcacgacggtgagaccgtcatcgatgttcctgcgaaactctccgcgcaggtgcgggtattcgcgaccggcaacggccgtaagactgatccggtcgacgcgcattcggtcgcgttggcggcgttgcggtcgccgaatctgcgtcgggtgcaggtggattcggcacttgtcgcgttggggatgctggctgatcgacgtgatgagctgggccgggcccgtaccgacacggtcaaccggttgcatcggctgctgctggaattggtgcccggcggggcgaagaaattcctctcggcgatgcaggcccggaaactggtcgcgactgtgaaaccgcaggatcctgcgggtaaggtccgtcggcgcctgaccgtggagttgatcgaggagctggaacggatcgatcgcaggatcaaggctgcggacaaggaactgcgtgagctggtcgtccaacatggctcgacggtgatggagctgaacgggatcggcccggctggcgcagcccggctactcgccgatgtcggtgatatccaccgatttcgagatcggggtcggttcgcgtcctggaacgggaccgctccgttggacgcgtcctcgggtgagcagaaacgccaccggctctctcgtgccgggaaccggcggatcaaccgggttctgcacacgatggccaccgttcagttgcgcaatcccagtgcgggacgcacctattacgatggtcgaaaagcggccgggaagacgtcgatggaggcaatgcgtgcgctgaaacgacgcttgtcgaatgtcgtctacgcgcgcatgatcgctgatcaacgtaaccgtgaaacggcaagtccgggagggcaaacgggggcggctactgactccagcgcgaccggcgcgaccccgaaaccggtccttcggacaagccacaacccggacctaccatcaaccagcctaacccccgacctgccaagcgcgccttgacacgagaggggagc

SEQ ID NO: 3120 - DNA, 1377 bp, unidentified
  source 1..1377: mol_type = unassigned DNA; note = element_48916b5
  misc_feature 1: note = core
  misc_feature 2..90: note = LE
  misc_feature 91..1122: note = CDS
  misc_feature 1123..1377: note = RE
  misc_feature 1144..1369: note = bridgeRNA
caatgggatggactcctgctctctttttcggcatcactgtgcccagacttgagattcggctcgagtcgcaatgagagaaggagtccactcatgaagcttagctacgttggtgttgatttggcaaagaacgtttatcagttgcacggtgtagatcgtcatggcaagacggtctggaaacgccggttgcggcgcggccagtggctgcaggcattgatcgacaacgtcgagcctggctgcgagattggcatggaagcgtgcaccggcgcccaccactgggtacgggagctgcagtctcgaggctacatggtcagactgattgcgccgcagttcgtgaagccgtacgtaaagagcaacaagaacgacgccaacgatgctgaggcgatctgcgaggcaatgagccggccgcacatgcgctttgtcacggtgaagagtatcgagcagcaggatatccaggcgacgcatcgagttcgcaccgagatcaaggatcatcgcaacgccaaggccaaccagatccgcggcctggtggcggagtacgggctggccgcaccacagaccttgctggcactgcggcgagcgatccccgagtggttggaagacgcagagaacggcctgaccgattacttccgctcgttgttacacggtctctgggacgaccttctcaccctggaggatcgtctcaaggagctcgacaaagagatcgagaagctcgctcgcagcaacgaagtagccaagaggttgcagcagctacgcggtgtcggacccatcgtggcaaccgcactggttgccaccgtcggtgatggtgcgcagtacagcaaagctcggcagatggcagcggcgttggggctgacaccaagacagaacagctccggcgacaagaaccgcttgttcggtattagtaagcgtggtgatgtttatctacgcacgcagatgatccacggcgccagggcggtagtgtcacaggcaaaacaccgcgacgatccattgagtcggtgggtgaccgacatcgccaagcgacgtcatcccaatgtcgcggcggttgcactggcaaacaaaactgctcgcatggcctgggccatgctgcgcaatgacaccgattacgatcctggcatcagcgcaagctgagtcagagaaacaaaggagaacttcaatagcgattgcttaagcaaactgcttgatgacaaacaggtcgaaccggcgtcggccaaacccgtgaatgtccgagtactaagagtacgtagaagcgattgggaactgacgcgcgaataacccattatggcccggcatcaacgtatgccaactacagaggccggatatacgtatgcagtcgtgccatgtctgccatcaacagtctgcttgcaatgaggaggagtccatata

SEQ ID NO: 3121 - DNA, 1169 bp, unidentified
  source 1..1169: mol_type = unassigned DNA; note = element_4897801
  misc_feature 1..2: note = core
  misc_feature 3..203: note = LE
  misc_feature 204..1166: note = CDS
  misc_feature 1167..1169: note = RE
  misc_feature 3..179: note = bridgeRNA
cttgtatgtttagacttgaaggggtgggcgggactaaaagctcgattccgactctagccagtacggaccgtgggagacttctcgtcccgccccttctacctaaagcgccgataaggaattcatcggtaaaaccgacgatagaggcaagccagcgctacggtagaccccgacaagcatctaaaccctagctccgaggattcgagatgacaatccttacctcctcaacggttatcggtattgatgtagccaaggccgaaatcgtcgcttatcgcgaagatctgaacagcactcaagtgatcgaaaacacccgcgaagctattggtcgctggctcaaaacgttgccagcgcaaagttcgattgccctggaagccaccagcatctatcacttggacactgctgagctggctcatggaatggggcatcgggtttacattgtggatgcttatcgagtggcccattaccgcgaaagcattgggcagcgggcaaaaactgacccctgcgatgcacgtctgctagcacgctatctgacaagtgagcaacaacggctacgtatctggagtccacctccgcatgcctacaagctattgaagagcttgctaaaaaaacgagcagaactcatcaaggcgcgcgtcagcatcacgctgagttggtcgggagagccgcttctgaaggatatcctggatcagcagatggaggcgttcaaacaaagtgagcgagccattcagaagttgatgcgtgaggtcagtcaagaggcggggattactgagaatatcaagcgctgcaaggccatcgaggggattggcgagctgacggcaatgggcttggcaactgcgttcatgcgggggcacttcgtcaacggcgatgcgttcattgcctttttaggattggatttaagaccaaaggattccgggaaaaaacatagccccaggtatctgagcaagaaaggagacggcgagctacgacgtttggcacacaccgcagctatggcggcttgccggtcccccacctggaaaccttactatgagtcctatttggcgcgaggcctcgccagaacccaggctcttgtaatccttgcccgcaagttgtgccgagtggcattcgctctgatgaaaaaacagagcgaataccggccaaatttaacggtgcagggttcccctgcaacatagaat

SEQ ID NO: 3122 - DNA, 1635 bp, unidentified
  source 1..1635: mol_type = unassigned DNA; note = element_489888b
  misc_feature 1..2: note = core
  misc_feature 3..462: note = LE
  misc_feature 463..1494: note = CDS
  misc_feature 1495..1635: note = RE
  misc_feature 14..318: note = bridgeRNA
ctactataatatatttgtcgggtaaatccatgacaagccagccatggtttacacgctcttgttacttaagctataatgaaagcagtgattggactgacgagttcctccttgggacaccacgcccgtttttgagactgtcatccatgctttcattacagcgttcgattttgcaggtagagcctgttgcgcaaatgtcctgtttgcgcccttatgcgctcgcatcactcagtagacagaataagtaatgagtaaagtgtggattcacccgatcacaaattctataattaggagaaatgttatgaacgcagtaggtatcgacgtatccaaaggaaagagtatggttgcgattgtacagccctttggggttgtcgtggcagaaccctttgaggtttcgcataacgggcaagcgctgagcgagctcgtagagcgagtgaagcgcttgcccgttatgcgaaggcagtcatggagtacaccggcacatattatgagccaattgccaacgcactccacaacgcgggtatatttgtttccgtagttaatcccttgctaattgacgactacggtacaaaccgtgtcagaaaagtcaagaccgataagaaggacgcatttaaaattgcaaattacgcccttgataaatggactcagcttcgcgagtacatacccgccgaggatacgcgcaaaacgcttaaagtccttaatcggcagtatactcagtacaacaaattgctcatcatgcagaagaacagtttaattgctctgcttgattcctgtttcccaaacgcaaatacattgttttcatctcctcgcagggaatccgacggtcacgaaaaatgggtagacttcgtgctgcaattcccacatttaaataccgtttcaaagctctgtccgtcaatatttaaagccaaatatcagagttggtgtaaagccaatcactacaaatacagcgaaaccaaggcgacacaaattcacgcctattcaaggacacaggtaagttcgctgccgattacggacgctatgatgaaagctgtagaattatccgcagcgctgcttaattccacgcttgaaacgctcgccgccatcagaaccgaaatggacaagttgtcgtcaacacttcccgaatacgaaaccgttatgagcctgtacggcgtaggtcgagttatgtgttcgcagcttatcgctgagattggcgatgtcagacgtttaaaatgttcaaaatcgctcgttgcaatcgcgggtattgatcctccgcccgatcaatcggggcagcacgattctaaatctcgaagcatatccaaacgcggctctccgctgctgcgcaaaactctttttcagatcatacaggtgatccttcagaaacagccggtcaatgaacctgtataccaattccttgatcgcaaacgctccgagggcaagccatacagggtctacatgattgccgccgcaaataagttcctcagaatctattacgcccgtgtcatggaagttataagctaaagagttacacaaaatctgtttaattttcaggctgccaaaaaaaatttttcttctttggcggcgcttttgttataccccttttttgcctttgtgaaaatttgatgaaatcttcactttgccccttgacttttatttgcaggt

SEQ ID NO: 3123 - DNA, 1544 bp, unidentified
  source 1..1544: mol_type = unassigned DNA; note = element_489b382
  misc_feature 1..5: note = core
  misc_feature 6..264: note = LE
  misc_feature 265..1482: note = CDS
  misc_feature 1483..1544: note = RE
  misc_feature 13..241: note = bridgeRNA
cccccgttatgttttccgcggtcctgcaagagggccgctggcctccgggcccggcatgactgtgtccccctgtcgaacggatgacctggggggtggtgtcaccgggcccggcaggtgccgtcggagacgctgatgagaggtccggccaccgcccggtccggcgcaatgccggacagttcgcgggcggcaggtctgcataacgtggatgcgcgcgtacgacaccactgccgaggccggcacgttcaactctcctggaagggcgcgatgttcgagatcgaagacgtgggcgtgttcctcggcctggacgtcggcaaaaccgctcaccacggccatgggcgcaccccggccgggaagaaggtcttcgacaagcagctgcccaatagcgaaccgagactgcgggccgtcttcgacaagctgaccgcgaagttcggcacggtcctggtgatcgtggaccagcccgcatccatcggcgccctcccgctcacggtcgcccgggacgcgggctgcaaggtcgcctacctgcccggactcgcgatgcggcggatcgccgacctgtatccgggcgaggccaagaccgatgcgaaggacgccgcggtcatcgcggatgcggcccggaccatgccgcacaccctgcgctccctggagctcaccgacgagatcaccgccgaactcacggtcctcgtcggcttcgaccaggacctcgcggccgaggccacccgcacctccaaccgcatacgcggcctgctcacccagttccaccccagcctggaacgcgtcctgggcccccgcctggaccaccccgcggtgacctggctgctggagcgctacggatccccggccgccctgcgcaaagccggccgccgcagactcgtcgagctcatccggcccaaggccccacgcatggcccagcggctgatcgacgacgtcttcgacgccctggacgagcagaccgtcgtggtcccggggaccggcaccctcgacatcgtcgtgccctccctggcccgctctctcgccgctgtccacacccagcgccgggccctggaagcccagatcaacgccctgctggaggcccaccctctttccccggtcctgacctcgatgcctggcgtcggcgtcaggaccgccgccgtcctgctggtcaccgtcggcgacggcaccagcttccccaccgccgcccacctcgcctcctacgccggactcgccccgaccacaaagtcgtccggaacctcgatccacggcgaacacgcaccccgaggcggcaaccgccaactcaaacgcgccatgttcctctccgccttcgcctgcatgaacgccgatcccgcctcccgcacctactacgacaagcaacgcgcccgcggcaaaacccacacccaggcactcctccgcctcgcccgccaacgcatcaacgtcctgttcgccatgctccgagacggcaccttctacgaatcccgcacgcccgcggacgtcgaactcgccgcataaccccagcaagcccgaatcaccccaaacccgacagggatgccttgacgaaggacatagaggca

SEQ ID NO: 3124 - DNA, 1402 bp, unidentified
  source 1..1402: mol_type = unassigned DNA; note = element_48aa5dd
  misc_feature 1: note = core
  misc_feature 2..90: note = LE
  misc_feature 91..1128: note = CDS
  misc_feature 1129..1402: note = RE
  misc_feature 1174..1394: note = bridgeRNA
caatgggatggacgcccccaccctcaacggcatcaacgtgccaaagtggaagtgtcagcagccacttaaacgaggatgggagcgtcggccatgaatattacaaccgtcggtattgatctggcgaagaacgtttttcaggtgcacggagttgatgcaaggggcaaggtcgtagtgcgccggcagctacgccgcgagcaggtggcgccgtacttcatgaatctgccgccgtgcctgatcggcattgaggcatgtgcgagctcgcatcactggggtcgcacgcttgagcgcttcgggcatacggtccggttgatggcgccgcagttcgtcaagccgtacgtgaaaacgaacaagaacgatgcagccgatgcggacgccatctgcgaggcagtgagccgaccgagcatgcgcttcgtgccgatcaagagcatcgagcaacaggcgatcttgtcggtacaccgcgtacgccaggggttcgtcaaggcgcgaaccgcccaggccaaccagatccgcggcttgctcggggagtttggattggtcatcccgaagggcatctaccacatcgctcagcgggtaccggcgctgctggaggatgcgagcaacgcgttgccgctggcgttgcggcagttgattgatcggctgactcgtcatctcaaagagctcgaccagcaggtccgtgagctcgagcgccagatcatcgcctggcaccgcagcagcgagctcagccgcaaactcgagaagatccctggcatcggcccgctcgcggccaccgcgttggtggcgtcgatcgccgacgccagaagcttcgacaacggccggcaggtatcggcctggcttggactggtaccgcgacagaactcgagcggcggcaagtcaacgctcctcgggatcagcaaacgcggcgacgtttacctgcgcacgctgctgatccacggggcgcgctcggccatcttggcggcgagacgccagagtgagattaagaacgtctggctggcgaatttgcttaatcgacggcacgccaatatcgcggccgtggcgctggccaacaagaacgtccgtaccgtgtgggccctactcgcgcacggtcgtgactttaaacccgactacgtgccggtcggagctacggcgtagccagaccccttaccagcgacaacgtccgcgacaggagagcacaccaccgattgctcaggcgatcacgcagtgatggcaaacaggtcagaccgtggttggataaacccagaatgtccgcagcacctcgagtgcgagaaagcgaatgggacccagccagccaatcccatcagggacagcggcacgcgccgcagcaaaagtccggatgtacgggtgcaatcgatccctgcaagccatcagaaactgaaagcctggcaaggttgggggcgtccatgta

SEQ ID NO: 3125 - DNA, 1514 bp, unidentified
  source 1..1514: mol_type = unassigned DNA; note = element_48b4921
  misc_feature 1..2: note = core
  misc_feature 3..116: note = LE
  misc_feature 117..1220: note = CDS
  misc_feature 1221..1514: note = RE
  misc_feature 1252..1449: note = bridgeRNA
agaccttatgatcgcgtccaacgtcaattagaccggtggcctctcctgcggcattctgttgcgagggttgtgccgattgttctggcgcagagcctcaagaatggaggagagaccacatgaaggatagcatgtttattgggctggacgtccacaaagcgacaatatctgtggctgtagcggatggcgagcgcgggggagaagtgcgagactggggtaagctacccaatcgaccagatcgtgtgcgcaaacttgcggagcaactgggttccaaaggtcgcaaactgtatttctgctacgaggccggcccttgcggctatggcctttaccgtcaacttgtcgaactcgggcatgattgtatagttgttgccccttcgctcatcccattgaaagcgggggaccgtgtgaaaacagatcgccgtgatgcgcgcatgcttgccaaattgcatcgcgccagcgaattgacatctgtctgggttccggacgtcgaacatgaagcgatgcgtgacctggtccgcgcacgcgcctcggccgttcgcgccgcaaatcaagcccgccaacatcttcagagctttttgctcagacatggccgccactatcccggcaagaaaagttggaccaaggcctatcggcgctggttgtcggcgaaccggtttgaccacagcgcccaacagatcgttttccaggattacattcacgccgtgaccgacgccgaagcgcgcgtcgcacgacttgaggcgcagattgctgaactgctcccggattggagtctcgcccccgttgtcgaggcgatacaggccatgcgcggagttgccttcattgtcgcggtcacggtggtggcagaagttggagacttccgcaggttcccaacgcctcgccagcttatggcctatctcggcttaaccccgaccgagcattccagtggcaacacagttaggcgcggcggcataacgaaagtcggtagcagcctcgcgcgccgcgtactgatcgaaggcgcctggagctacaggatgcaaccacgtgtcggtcgcaagcaggtagatcgaatggaagagctccctcaagccgttcgcgacatcgcttggaaaggccagttgcgcatgtgccaacgctacaaacacctggtggggtccggtaaaccgccggtggtggcgaacacagcaattgcacgagaaatggccggcttcatctgggcgattgcgcaggaggtcacccccgcctgacgctcattcatcacaaacgcaacaccccgttcagctgatgtgcaaatctgggggtggaacacggtggagaatccttgggaaacattgtgagccagtccctgaaggctgacgctcgtttccagaaagaggcagctccaggacgtaaccacggtcatgcggtatccaacccgcgcatgagagtatgctcaaccgtcgtctcagttccacctccagccttgcacatctatataatgacgcctccggcgattgggccggtcggctcggcgtgacaaaaccattgactgcgatcatgag

SEQ ID NO: 3126 - DNA, 1432 bp, unidentified
  source 1..1432: mol_type = unassigned DNA; note = element_48be344
  misc_feature 1: note = core
  misc_feature 2..98: note = LE
  misc_feature 99..1145: note = CDS
  misc_feature 1146..1432: note = RE
  misc_feature 1202..1422: note = bridgeRNA
taatggaaatgggacgaatccttcctaagcacaggacatttaggtgccaaagtggatgtgtaaggtttttacgcacgactagaaaggagcgtccgaagatgaagctgagtggcatgcggcaacttgatctggcaaaggcgggtgttttcaaggtacatggcggcgatcttcatggcaagccctgcctgcgcaggcagctcaggcgtgcggagctgctgacgtttttcgtgaacctcgagccttgcctgataggtatggaagcctgcggtagcgcccattgctgggcgcgcaagctgagccagatgggacataccgtaaagctgatggcgccgcagttcgtgaagccctacgtgaagacaaacaagaacgacgcggccgacgccgaagccatctgtgaagcggtcacccggcccaatatgcgtttcgtggcgatcaaaacagagcagcagcaggcgttgctggcgatccaccgcgcacgacagggattcgtcaaggcgaggaccgctcaggccaaccagatccgtggcctgctggctgaattcgggatcgtcattccaaagggactttgcaatctcggtcccaggttggcatcgctgtctgatgagtcggccggacagttacccggcagtttctgtagtctgctgcagcggcttgccgagaatctgaaggagttggaccgccaggttcaggatttggagaaagaaatccaactctggcacgcgcaaaatgaagccagtcgccgactggccgagattccaggaattggcccgattaccgcaagcgcactggtcgcttcgattggcgatgcgcgctgcttcaagaatggccggcagctggctgcctggatgggattggtgcccaggcagcactccagcggtggcaagcaggttttactgggcatcagcaaacggggcgatggctacctgcgcgcgctgctgatccatggtgcgcgtgccgttcttcgacacgccgaacacaaggtggagactgccaccagttggctcgggcacttgctgtcgcggcgaaacaagaatatcgcagctgtcgcgctggccaacaagaacgcgcgccgggtatgggcacttctcatgcacgacggaaggcggttccgtgcggattacgtccccgctggggcaggcacgtaatccgcaaggccaagttacctctccaccgactccaaggaagattggcaagcatctttccaccgattgcttaggcgatccagatgtgatggcaagataggtcagaccgtgaccggcaaaccctgcgtgcaacaaggagcgtcaagctcgtggctttgatcaggagccggtcagcaaattccatcagggacagaggctacgcctcgaccaaagtccggatgtatggctgcaatctacctcttttggacatcacgaatcgaaagcctggcaaatcaggatgcgtccatgta

SEQ ID NO: 3127 - DNA, 1411 bp, unidentified
  source 1..1411: mol_type = unassigned DNA; note = element_48be619
  misc_feature 1: note = core
  misc_feature 2..90: note = LE
  misc_feature 91..1134: note = CDS
  misc_feature 1135..1411: note = RE
  misc_feature 1177..1403: note = bridgeRNA
taatggcatggacgcccctgcttggcgcggcatcaaatgtgccaaagtggaagtgtcgagcgaccatttaaaccagcaggagcgtccacgatgaacattacgcaagttgggttcgatttggcaaagaatgtttttcaagtgcacggcatcgacgagcgcggcaagggtgcgctgcgcaagcaattgaagcgcccgcaggtgattcgctttttcacgcagctgccgccgtgcctgattgggatggaggcctgcggtggtgcgcatttttgggcccgcaagctcactgcacttgggcacacagttaagctgatagcgccacagttcgtaaagccgttcgtcaagagcaacaagaatgacgcagcggatgccgaggcgatatgcgaggccgtcggtcggccgaacatgcgatttgtgccgatcaagaacactgaacagcaagcgctgctcgggctgcaccgtgcgcgccaggggtttgtcattgggcgcaccgcacaggtcaaccagatccgcggtttgctggccgagtttgggctggtgataccagtgggtatccgctccatcgggagcaagttgcccgagattcttgaggatgccgagaacggcttatcgggggccagccgcgcgctctttgcccgcttgtttgagcatttccgggcgcttgatcgccaggtagacgagctggagcgagaaattaacgcctggcaccgcgaagatacggcgagccaacgcctgcaggcgattccggggatcggtccgcttacggccagcgcactcgtggcgagcgtcggggatgcgaaagccttccacaatgcccgtcagtttgctgcgtggctcggccttgtgccgcgccagaactcgtccggtggcaagacaactttgcttgggatcagcaaacgcggtgacacatacttgcgtacgctgctaattcacggggcacgttcagtgctgctgcaattgaagcgtcatcccgaccaggctgagggatggttggcacgcgtggcggcgcggcgcaatcccaatattgccgcggtcgcgctggcgaacaagaatgcgcgcaccgtctgggcgctgctggcccacggacgcgaataccgggccgggtaccggtcagcggccatcgcggcggcgatctaatctcggtattctgcgaaccgatattgacacgactctctcaccacagattgcataggcgttttccagagtgatggcatcacaggtcagaccgaggttggctcaacctgagaaatccacgggacttcaagagttcgagtaagtgatcaggcgtcaaccagcatattccatcagggcccgcgaccttaggtcgcatgcacaggccggatgtatggcagcaatcttctcctgtgaaccaagaccgaaagaaaacgctttgcaacacgggggcgtccatgta

SEQ ID NO: 3128 - DNA, 1566 bp, unidentified
  source 1..1566: mol_type = unassigned DNA; note = element_48bf9cf
  misc_feature 1..3: note = core
  misc_feature 4..258: note = LE
  misc_feature 259..1461: note = CDS
  misc_feature 1462..1566: note = RE
  misc_feature 13..278: note = bridgeRNA
ttttgtaccataaaagtgtaagtaaagagtatcaaccagatacttggaaacttgcacttatttttttactataaggagagtaattggtctggcgtactcttttttggatttcgcatccgtaacacaaactgtcaaccatctccttattggaaaccgtcgattaagcaggttggatcaagcatccgtgtaacgagcaaaaatgattggcaataagtgcaggtggaacaattgcttaatattatttaggaggaaatgcttatgcttagtgttggtatcgatgtttctaaagagaaaagtactgtgtgtggtatgcgccatttaggtgaaattgtatttggcccatttgaaattgcacatacagaatccgacttatcagagcttgcacgtatgatagtgcggttagatgatgatacacgcgttgttatggaggcaaccggaatatatcatctaccagtagcaacatttctaagggaacagggactatttgtatcgataatcaatccttatgagatgaaagtatatcgttctcaggatattcgaaaggtcaaaacagacaggagagattccatggttattgcaaactatggagtagataaatggattaatttgcgtgaattcactcctcaagaggatgtatatgcagaactaaggcttttgggaagacagtacagattctttatggaatcaagaattgaacagcttcttaatcttacacatctgcttgattacactatgccaggacttaagagctgctttagtggctggagcgagtattcaggtaaggataagctatgtgattttgttgaagaatattggcattacgacaacatcattaaattcagcgagtcgaagtttgtagagaggtatcagaaatggacaaagaaaaagggataccagttcagcgagacaaaagcagttcaaatctacagactcgcgaaggaaggtatcccaactgttccttctaacgcaccatcgaccaaaatgttgttgttagaagctacaaaagcactacgcgaaattaacagtgctttgtttgctattttaacacgcatgaaggaattagcaaagacactccctgaatatcctgttgtcagagctatgagcggtgttggagatgttctcgctgttaagttaatggctgaaatcggagatgttcgtaaatatcatagcagcaagtctctagtagcatatgctggtatagatccccctccatatgagtccgggaagttaattggaacaaacagacacataactaaacgaggatcttcaacattgcgaaaaatcggatatgaggttatgcgatgcgtaaaagcaaacggaagatcagaagctgatccagcagtatatgattttatgctaaagaaagaatctgaaggaaaagcaaagaaagcagctaagatagcagccctaaataaattcttaaggatatactacgctcgagtattggaggtttacgcatagaaaatgtattcaatatggaaactgtgactgacgtagtcagtagttttgttatacctaaaattaggaacctgctaagataaaaatctcttgacttctcttagcagg

SEQ ID NO: 3129 - DNA, 1610 bp, unidentified
  source 1..1610: mol_type = unassigned DNA; note = element_48c2df8
  misc_feature 1..2: note = core
  misc_feature 3..173: note = LE
  misc_feature 174..1496: note = CDS
  misc_feature 1497..1610: note = RE
ctcctataataggttttgtggtagttagatacctaacagccagttaggactaaccttttcattgtttaagttgtagaatgaaatggcattggtgtgacgatgtcctccttggaccccctggtgtccgttaaaaagcccgtcaaccggccattccattcgcaaccgttcgtttcatgcaggttggactgtcttgtacatgtccgtatgatacccaggagacagaatcagcaatggataaccgctggtaccatgtaaatctatctgattggagatcacttattatgtttaatgctgttggtattgatgtctctaaaggcaaaagcaccgtttcagtcctgcagcctggcggtactgtcgttaaaaagcctttcaatgttgtacactcttcccgttccctgaacgacctttccaggtttatcctgcaccttgacggacagaccagggtggtcatggaatgcaccggtcgctatcatgaacccatcctccatgccctccatgatgccggtatctttgtcagtgctgttaatccacacctgatcaagaacttttgcagcaacaccatacggaaggtcagatcggatcctgctgattccaggaaaattgtccgctatgctcttgacaaccgggcttcattacggcaatattcaactatggatactacccgcacacaacttaaaacccttaattcacagatggactttttcaccaagcagaaggtcgctgcccggacaaacctcatctcacttatggacatgacctatccgggtgtgaactccctgttttccagccctgcacgcgatgatggcagcgaaaaatggcttgattatgcagaatccttctggcatgtggactgtgttcgtaaaatcggcctcaaagcatttaccgagcgttatcaggcgttctgcaaacgcaacggatacaactttcaacccggtaaacccgaagaactatacctggcctccaaagaactggttgccgtttacccaaaggataaggtctataaggaccttattatgaccgggattgaacagcttaagtcaaccacacggcatgtggaacatatccggcatgaaatggatgcgcttgcttcgactcttccggaatatgaaaccgtgctctccatgcgcggcgtaggcaaaacgctcggcccgcagcttatggccgaaatcggtgacatcacaaactatacccaccgcgaggcactgactgcctttgccggagtggatccgggagtaaatgaatctggttccttccgttccaaaagtaatccggcatcaaaatgcggatcgtcacggcttcgaaaaacgttgttcctgattatgacgtcgctgcttcagacctctcccgcggatgaccgcgtttatcagttcctcgaccgaaagcggtctgaggggaagccgtatcttgtctatatgacagccggcgccaacaagtttctacggatttattacggcaaagtaaaagcatgtatagcttctcagagcaaagctgagtaatcgcataccttttttgagaccggcagcgatggcggtcttattgtagtaccataatctacctccgtaattttttctgaaataccttcaatttagacttgactttttattagcagg

SEQ ID NO: 3130 - DNA, 1380 bp, unidentified
  source 1..1380: mol_type = unassigned DNA; note = element_48d031f
  misc_feature 1..3: note = core
  misc_feature 4..86: note = LE
  misc_feature 87..1121: note = CDS
  misc_feature 1122..1380: note = RE
  misc_feature 1147..1367: note = bridgeRNA
tgatgctgtggacggcgcccactctacggcatcaatgtgccaaagggtggttgcgttgaagcgaaccacattgaggggagccgtccatgggcgaggttatcacgattggtctcgatattgcgaaggcagtattccaggttcacggggtggacgttgatggcgcggtggtcatccgtaagcgcatcggtcgcgcgaaactgttggacttctttgccgatctgccgccgtgcctggttgggatcgaagcatgtccgtcagcgcatcactggggccgtgagctagctgggctcggccataccgtgaagctgatgccgccgagctacgtgaaggcctatctcaagcgcagcaagaacgatgcgaacgatgcggcagcgatctgcgaggctgtgacgcgaccgtcgatgcgttttgttccgatcaagacgaagcaacagcagactgccttgatgctgcaccggacccggcaattgctggtgcgtcatcgtacgatgctgagcaatgcgctgcgtgggcaccttgccgagcttggcgtcgtgtcggccaggggcagcaatggaacggcagagttgcttaggatcattgcagatagtgcggacaaccgcgttccttcatccgcccgcggcattctcgatgtgctggcgcagcggtacatctcgattggcgccgagatcggatctatcgacaagaacatcttggcctggcatcgctcgtgcgaggcgagccggcgactggcggagatcccaggcattggcccgatcgtcgccacggctctggttgccgagatcggtgactggaaggcgttctcatcggggcgcaaccttgccgcctggatcgggttggtgccgaagcagcacacgaccggcggtaaggacaggctcggcagcatcaccaagcagggcaatcgatacttgcgatggttgctggtcgtcggtgcaacggccgtcatccgctatgctcaaaaacacgggacgaagaaccggccgtggctggctcgattaatggagcgacgaccgaccaaagtggcggctgtcgcactcgccaacaagattgcgcggatggcctgggccatcatggtccgcgacgacagatacaaggagccgaagctgttggtagcggcataacagacgctagcagatagatcggcaataccaattggcgagggcgtgacgacgtaatgcagatacggtcgttccggggatcgggagaacccgcatgggtcatcgcacttctaaaagtgcgtgttaacgattgggacccgatccgcgcagagcattagggccagcggccgtacctgccgcatcaacaggccggacacgtgaccgcacccgaccaatgctgcatctgcgtcaaaattgctcttgccagggcgccgtccacacg

SEQ ID NO: 3131 - DNA, 1508 bp, unidentified
  source 1..1508: mol_type = unassigned DNA; note = element_48d09e2
  misc_feature 1..2: note = core
  misc_feature 3..255: note = LE
  misc_feature 256..1488: note = CDS
  misc_feature 1489..1508: note = RE
  misc_feature 7..233: note = bridgeRNA
ctaatgggacctgccgggctcggatagggaaggctcggtgccggtagccgccggtgggtgagcactcgcaacgccaggacgcaggtgagtcctagggtcagacagtgcccccaccggtggtcgggaggtcgtggaccgctgatgggatgacgtgcccgcccgtgttctgggcgcgagcactggtccattaggccgcggtgatctcccgggcgctgctgatcggtgaacgcggttgggcaggtaggaggcgtggcggtggtgttgttcgtcggcgacgactgggcggaagatcatcacgatgtggaagtgcaggaccagaccgggcgccgcctgggcaaggcgcggctcccggaaggagtcgccggggtcgcccggttgcacgagctgatcgccgggttcaccggtgaggagaccagcgccgatcaggtgctggtaggcatcgagaccgatcgcgggccgtgggtagaggctctggtcgcggccggctatcgggtgttcgcggtcaacccgcgccaggtcgcccgttaccgggaacggcacggcacctcgggtgcgaagagcgatgccggggacgcgcacgcgctggccgacatggtccgtaccgacgcccaccagctgcgcgagatcgccggggacagtccgctggtcgaggggatcaaggtcgtcgcgcgggcgcaccagaccatgatctgggagcggcaccggcatatgctgcggctgcgctcgtcgttgcgggagtacttccccgccgcgctggaagcgttcgacgacctcaccgcgcccgacacgctggagctgctcggcgccgcgccggacccgcggcgcgcggcgcggctgtcgcggtcgcggatcggtggcgccctcaagcgggcccgccgccgtgatgtcgaggccaaggccgaacgcatccagacgctgctgcgcgccgagcacctgacccaacccgcggagctggtcgcggcctacgccgccaccactgccgccgccgtcgcggtgctcatcgcgttcaccacccagatcgagacgctgcaggggcaggtcgaggcgtgttttggccggcacccggacgcggagatctaccggagccagcccggcctcggtgagatcctcggcgcccgggtactgggcgagttcggcgacgactccgaccgctaccagggcgcccgcgcgcggaagaactacgccggcagcgccccgatcacccgcgcctcggggaagaagaccgtcgtgctggcccggtttgtgcgcaaccagcgcctcgccggaccgctgcagtggcaggccttctgcgcgctgcgggcctcacctggcgcccgcgcctactacgaccagctccgcgcccgcggcaccgggcaccaagccgcgctgcgccagctcagcaaccgcctcgtcggcatcctgcacggctgcctcaagacccgaaccccctacgacgagcacaccgcttggggacaccaccaaccgaaagatcaacaagccgcagcttgacatccaacgtcatgggatgt

SEQ ID NO: 3132 - DNA, 1618 bp, unidentified
  source 1..1618: mol_type = unassigned DNA; note = element_48d148f
  misc_feature 1..2: note = core
  misc_feature 3..278: note = LE
  misc_feature 279..1499: note = CDS
  misc_feature 1500..1618: note = RE
  misc_feature 16..301: note = bridgeRNA
ctcctaatataaaagtgtagtggttatactccccaacagccagctgggggtatggtcatcttgttgcttaagctgttagaatgtagtggcattggtttggacggctgcctccttgaactacgtgttcgtaagaaagtctgtctgccaaccactcattcgcagctgttcggtttacgtaggtagaaccgcttcttgtgtgttcgtttgatacccaggagattgaataagcaatgaggaatggttgacccactgcaaatctatcttcgggggtgttaattatgttgaacgctgttggtattgatgtttcgaaaggcaaaagtactgtagccgtactgcggcccgctggcgaaatcctgcgtaaacctttcaatgttactcattctgttaaggatctctcaaatctcgtctcctatgtccaaagtctcgagggcgaaaccagagtcgtcatggaaacgaccgcccactatcatgaacctgtactcaaggctttcctggatgcaggcatctttgtctctgccgtaaatcctacccttataaagcatcatgatagtgataaaaacccgcttcgcaaagtcaagtcggattctgctgatgccaaaaagatcgccaaatatactcttgacaaatgggaatatctgcgtcagcattcagttatggataatacacgatcacaactgaaaacattgaatacgcagttccactttttcatgcagcagaaggtctctttgaagaacaaccttatttctcttctggatctgacctatccgggtgcaaatgctctgtttgacagccctgtccgttctaacggaagcgagaaatgggtcgattacgtccattctttctggcatgctgactgtgtccgcaagattggactgaaagcctttacagaacgctatcagaacttctgtaagcatcatggctatatctttcagccagataaacctgaagaactttttaacgcctctaaggaacttattaccgttgttcccaaggatccggtatacaaacagctgatcctaagcaacatagaacagctgaatacggtttccaggcagatcgaaaagtttcgacacctgatgaacgagcttgcctctacgctgccggaatatgccaccgtcatgtccatgtatggtgtaggccctacttacggacctcagctcatggctgagattggcgatgtctcccgctttgaacgacgctctgcgattacagcctttgctggtgttgatcctggcgtagatcagtctggacaggtaaatcacgatagtaatcgtgcctcaaaacatggggcgccacgacttcgaaaaacactcttccagatcatgacgacattgcttcagctggcaccgaaggatgatccagtttatcgcttcatgatgaaaaagaaatctgaagggaagccatatcaagtctacatgactgctggagcgaataaattccttcgcatttactatggcaaggtcaaacagtacctggcgacccaagctgccatggaataataaatacctttgatctcctcctgatcattttttgaccagcgttcgcggtggtttttttgtgatgccttcatttcagccctttattttttcaaatttatacttgactttttattagtaga

SEQ ID NO: 3133 - DNA, 1290 bp, unidentified
  source 1..1290: mol_type = unassigned DNA; note = element_48d8946
  misc_feature 1..2: note = core
  misc_feature 3..224: note = LE
  misc_feature 225..1277: note = CDS
  misc_feature 1278..1290: note = RE
  misc_feature 2..192: note = bridgeRNA
cagtgtgaaggtgaggtgccgcgtagtgcggtggttgaatccttttcacctggtgtctggctcttagattggctgccgcctttggttggcgttcacgcgttttgccggcatcaggtgtgaaggaccggccggcgtgacttgataggagcgtggcaccgcccccaactgaggtatgtccgccgaccggcccaaccgtcacctctcagtgaatggaggcaaccaccatggttgttgttggagccgatgtacacaagcgcacgcataccttcgtcgccgtcgacgaggtaggccgcaagctcggcgagaagaccgtcaaggccctcaccggcgggcataccgaagcggtgatgtgggcccgtgagcatttcggaaccgatgtcatctgggcgatcgaagactgccggcatctgtcagcgcgtctagagcgcgacctgttcgcgttggggcagaaagtggtgcgggtcccgcccaagctgatggcccagacccgggcctcggcccgcacccggggtaagtccgatcccatcgatgcgctggcagtcgctcgtggtttcctgcgtgagcccgatctgccggtagccgctcatgacgaggtgtcgcgtgaactcaagctgttggtggatcgacgcgaagaccttgtggcacaacgcactgcgacgattaaccggctgctgtggcgggttcacgagctcgatcccgcccatgcccccaaggcgcgctcgttgaatctggccaagcaccgcagactgctcggcgactggctgcacacccaaaccggcatcgtcgccgagttggcccgcgacgagctggccgacatcagccgcctcaccgagaccatcgacgggttggccaaacggatcggtgcccgtgtccgccaggtcgccccggtgttgctggccatgccgggatgtggcgagctgaccgcggccaaactcgtcggcgaaaccgccggggtgacccgattcaagagcgaggcggccttcgcgcgtcacgccggggtggccccggtgccggtatggtcgggcaacacccgcggacgagtccgtatgacccgctcgggcaaccgccaactcaacaccgccctacaccgcatcgccgtcacccaaatccgcctccagggcctcggacagacctattaccgccaccgcatcaccaacggcgactccacacccgaagccctgcgctgcctcaaacgccgcctggcccgcgtcgtctacggccacctgcacaccgaccacaacaatcgtcaaaagccttgccaagcggcagcggcttgacataggagaaacg

SEQ ID NO: 3134 - DNA, 1475 bp, unidentified
  source 1..1475: mol_type = unassigned DNA; note = element_48e44f8
  misc_feature 1..2: note = core
  misc_feature 3..138: note = LE
  misc_feature 139..1206: note = CDS
  misc_feature 1207..1475: note = RE
gaggtggcatgaaagaggccgcgcccgctgagagaacggatcactgagatgcaggcgatgatcgagggacagtcacacttccggcctttcggcttatcctgttggggttttgcaaatctcaacaagggagttggaagcatgactgcctcttatgattaccatattggcgtcgactaccacaaatcctacagccacctggtggtccaggacagctgcggcaagacgctgagatccggtcgggtgaagaacgatcgccagtcgcttggcgggtttctcgaacgctaccgcgagaactcacatgccgtggttgaggcgacgcgcaactggatggttatgtacgactggctcgacgacatttgtgatgatgtcgttctcgcccatcccctcaaggtcaaggcgattgccgacgccaagatcaagaccgacaagatcgatgcgacggtgctggcgcatctgctcagagccgacctggtgccggaagcctgggcaccgaccgacaaggcccgtgagctgcgcgtcgcgctacgcgagcggatgttttacgtcaggctgcgcacgatgacgaagaaccggatcgtcacggtgttcgaccgttatccggagcagacggcacagctgaagaagctcggtgacctgttcggtaaggccggccgcatccagctggcgcaggtcaacgtctcggagatcgaccgcatccagatcgaccggggcctcgacttcatcggcgacattgatggccggatcaagcagtcggaggcgacgatccgggcgatgaccaaggcgaatgccaatgtgaagctgttgaagacgatccccggcgtcggcgagttctttgcaaggctgatcgatgcagagatcgacgacattgaccgcttccgtagcccgaagaagctggccgcctatgccggtcttgtgccctcgacctattcctccggcggcaagacctatcacggcaagatcatcaagcagggcaacaagtggctgcgctgggctttcgtcgaggcggttgctccggctgtcgccagcgatccgcagcttcgtgcccaatatgagcacctgaagctcagaggaaccaacaaggcgcgcgtcgcgatcgcgcgcaagcttttgacgatcgccttccagatcctgcgtgaccagcgcgcttatgagctgcgcggcgccagcaccactgaaggcgtgtcgacgatatcccggttgtcctgatggcaagctagcgaacccggcaggcctgggttgcgctcttaaaggagaatgggaaaccgggagccgaatgccactgtgtgaccgaagtcggaaacagaccggtgttagggtcacgaattggagaatggttcagaaccgcaggacggcaaagaaactgtccggcggaaagaaggactttgccgatcgcgcgattgccggtcaaaacgaaaccgaacccaaggaaaagccgcgaaatggtggtgttatgccccttgagttctttcattgga

SEQ ID NO: 3135 - DNA, 1399 bp, unidentified
  source 1..1399: mol_type = unassigned DNA; note = element_48e4814
  misc_feature 1..2: note = core
  misc_feature 3..88: note = LE
  misc_feature 89..1123: note = CDS
  misc_feature 1124..1399: note = RE
  misc_feature 1166..1385: note = bridgeRNA
gatgaggtggatggctcccgctcacggcatcgaagtgccaaggtgtgaaggctgtcaggcgttcacgagtttatgggagccacccgacatggagattagcacgatcggcctcgatctggccaagagcgtttttcaggttcacggggtagatgcggagggcaaagtggtcgttcgcaaggcgctgcgacgagcgcaggttctgccattctttgcgaaactgcctccttgtcttgtcggcatggaggcgtgcggcacggcgcatcattgggctcgcgagctggctagattgggccacgatgtgcggcagatgccgccggcctacgtcaaaccctatgtgaaacgcggcaagaccgacgcagctgatgcggaagcaatctgcgaggccgtgacgcgtccgacgatgcggttcgtcccggtgaagtcaccggagcagcaggcggccctttcgatgcatcgggcgcgcgacctgttggtcaagcagcgcacgcaattggtcaacatgatgcgtgggctgctggcggagttcggcatcgacatccctcagggtctttgtcgggcgttggaaagggcgcggaagatcgtcgatggcgaggctccggctgtgccagcggaggcagcaaagatagttgggcgattgtcacagcaggcgctcgacacccatgcacagcttcgggaggtcgacctggatctactcgcctggcagcgggcaaacgatacagctcgccgtcttatgtcggtccccggcatcggtccgatcggggcaactgcgcttgccgcgtcggtcaccgacccgagccagttccgctcagggcgagagttcgccgcgtggctgggcctgacgccgcggcagcattcgagcggcggcaaagaaaggctcgggcgcatcaccaagatgggcgacaagtatcttcgaacactgctcgttgtgggcatgacgtcgctgatcaaacgcgtgaagcgcaagccggagactgctgatccgcggctcgtggccttgctcgcgcgcaagcctgtacgggtggccaccgtcgccatggcaaatcagaccgcccgggtagtctgggccatcatggcacgaggcgaaacataccgggccgggcatcaacccaggctcgcggcataacgaattagctggcaaccgctgacacagggggagaccagcttcacgaggttgcaagcgcgatgcgatgtgatggcgaaccggtcagaccgggaacagggacaacccaacggacgtccaaggcatcatagcctgatgaatagaatgggacccagttcgcgaactccatcagggccagcagttcctcaccgactgcacaaacaggccgaacagaggactgcacccgacccttcgtcagaacgtcgatttacccttgcaacgcgggagccatccacagag

SEQ ID NO: 3136 - DNA, 1505 bp, unidentified
  source 1..1505: mol_type = unassigned DNA; note = element_48e9a25
  misc_feature 1..2: note = core
  misc_feature 3..249: note = LE
  misc_feature 250..1485: note = CDS
  misc_feature 1486..1505: note = RE
  misc_feature 14..245: note = bridgeRNA
ctaatgagttctgggagtaagccatccggcagactcctggtgggtaggtagccgccggcagacgagcactcgcgtttcctggacgttgagtcctactgaaagatcgtgccgctgccggtcggtgtggagagttgatcgctgatgggatgtcgtgcccgcccggttgcggcgtgagcactgcttcattaggtcgctgatggttctcctcctggctaccgaaggtgatcgactcgataggcgggagacgcgttgctgttcgtgggagatgactgggcggaggaccaccacgacgtcgaggtgatggacgcctccggccgccggctggccaaggcccggctgcccgagggcgtcgcgggtatcacgcggctgcacgcgatgatcggccaatggctcggcgacgacgtcgaggacaccgaggacgtcgccgcgcgggtgaagatcggcatcgagaccgatcgggggccgtgggtccaggcgctggtcgccgccgggtacacggtgtatgcggtcaacccgttgcaggcggcccgctaccgggaacgcctggcgctgtccggggccaagagcgacgcggccgacgcccacatgcttgccgacatggtgcgcaccgactcgcaccagttgcgcccggttgccggtgacaccgccgaggcggaggcggtcaaggtggtcacccggatgcacaagacactggtctgggaacgcacccgcgccggccagcggctgcggcacgcgctgcgggaatacttccccgccgcgctggccgcgttcgaggacctcgacgccgccgacaccctggaactgctggccaaggccccggacccggcgagcggcgcccggttgagcctggcacagatcagcgcggccctcaaacgtgcccgccggcgcgacatcccagccaaggcggccgcgatccaggccgcgctgcgcgccgagcacctcggccagcccgccgtggtcaccgccgcgtacgccgcgtcggtgcgggcactggccgcgctgctggtcactctcaacgagcaggtcaaggccctgcaagggcaggtggaggcccattttggccggcacccggacgctgagatcatcctgtcccagcccggactgggtgccgtcctcggcgcccgggtgctcgccgagttcggtgacgaccacgcccgctacgtctcggccaaggcccgcaagaactacgccgctaccagcccgatcacccgcgcgtccgggaagaagaggaccgtcgcggcccggttcgtgcacaacgaccggctcatcgacgcgctgatgacccaggcgttctccgcgttgaaggcctcgccgggcgcccgcgcctactacgaccggcaacgcgcccgcggcgccagctacaacgccgcgctgcgccagctcgccaaccggctcgtcggcatcctgcacggatgcctcaaaaccggcacgccctacgacgaggcgaccgcctggtcccatcacctcaacgagaccgctgcttgacattcaagctcctgggatgt

SEQ ID NO: 3137 - DNA, 1656 bp, unidentified
  source 1..1656: mol_type = unassigned DNA; note = element_48eca66
  misc_feature 1..2: note = core
  misc_feature 3..645: note = LE
  misc_feature 646..1497: note = CDS
  misc_feature 1498..1656: note = RE
  misc_feature 32..240: note = bridgeRNA
ctcgtatattgttttcgccacttctcgcgcagtggccgcgctctttaccttccttttcaaatatgggataaagggcgagtagagggcggagggcgcagaacgacctcctgggatttggccttggacgacaggattgcgcctccgacccgcagcgtgacgtggataaggcaggatggccgttcggggctggatatctgacgaggttgcgtgctgcgggaaccgaaggaagacttccgctctcgcagaaggtttcggacctcaataataggaggcacgcatgcgctacgtcggaatagacatagcaaaaaaggatcatcagatagccgccgtcgatgagtttggcaacgtcatcctcaagtcgttcagcgccggcaacaacgaatctggctttgccaagatcgccgaaaaactcgaggctgcccgcatcgagtcggatgagtgtctcgtcggaatggaggcgaccggccactactggatctcgctctgggagttcctcgacgccaacggctacgaggtcgtggtcatcaaccctatccagaccgacgcattccgcaaagtcgactcgctccgcaaaacgaaaccgacgccatcgacagcgtgctcatcgccgagtacctgcgctttgcgaaccccgagtcgtccaagatggccaatccggacgtcgagcaactccgcgaactggcacgcttcaggagctttctcgtagagcaggcgacccagcttaagaacaaggcgatccgcgtactcgaccaagcattcccggagtacggaaagttgttctccaacacgttcggcgaggcatcgaaagccctgctcaagcagtgcccgacacccgaagaggtcctcgcaactgacatccgcacgctcacgcgcatcctcaaggaaaacagtgggggcaattgcggtcgggccaaagccgaggcagtcaaggacgccgccaggagctcgatcggcgccaagttcggcgcccgtgccctgtccttcgagatcaagttgctggtgaagcggctatcgttcacccaggtccaaatcgaagaattagaggacgagatatcagagctgctgcaccgttcggatggtcactggctcacgaccatccccggcatcggagactcgctcgcggcctccatcgccggggaaatcggcgatcctgaccgtttcgagacccccaagaagctcatcgcctacgcgggcatggatgcctcgaagtaccaatctggcgcgaatcaggacacaaacgggcacatgtctaagcgcggctcctccgagcttcggcgagcactcatgctggcagccgacaaggtgcgcatctacgatccctacttcggcgagtactacgactcaatgaaagcccgcggtaaacatcactacgtcgccctgtcgggagtcgccaggaaacttgccggcgtctgcctgtcgctcatgcgcgagcagcggccctacgagtccgaacctcccgagcatcacctgccaggtcatcttcagcgccaagcctaaatttgggtaaaaatcgcggaacttataaaccgccttctccagggcggtttatatcctgatgcctcgaagcagcaaatccacgtgcctttctattccatattctattatcaacatcctatctaaaagctttggtttagttcttgacttcaaatagcaggt

SEQ ID NO: 3138 - DNA, 1877 bp, unidentified
  source 1..1877: mol_type = unassigned DNA; note = element_48ecc43
  misc_feature 1: note = core
  misc_feature 2..360: note = LE
  misc_feature 361..1365: note = CDS
  misc_feature 1366..1877: note = RE
  misc_feature 170..366: note = bridgeRNA
ctttagatttgtcatatagtatttatctataatggtgattgtgttgaaaagagggggtctgggggagactcataactttcaattttgttaataaatacaagtttggtaggtgaacttcggcgacggctaggataacgacctatatagagttttggcacctaccctttctaaaattgaaattaatcattccttgtcattaaatttaggatgataaaagaaaaaggacggggtgaacttttgcgacggccaggttcacggcctctatagcgtattagtccccgtcctttgtaaccagattgccagaaccatataggattttagcctttgctattaaaggtcttagtttaagcaatctattaaatgcaatataaaaatatggaaattattgatgttattggtattgatgtgagtaaactgactttggattgttgtatccataaaagtggacttcaaagggggtttgcaaacgatccagaaggtattggcaagatgatcaagtggtctttgagcaaaagtaaggtgaacaaggaaaatctcttgttcatattggagcacacaggactctactcggataggctcgtagaatcattggacagagagaattacttgctaaaagtagtatctggtctggagatcaagcgctcgttagggatcattaggggtaaggacgataaggcggatgccaaacgcatagccttgtatggttatcgaacccgggaagagggggtattggttaaattacccggctccaccttggttaggttgaaacggttaatgtcccttcgaagaaaattggttggacaacgggcgggacatatggcgacacttaaggagcagaaaaaagttttagaagaggatgctcttttgttctgggtacaggaggacattataaacctcttgagctggagaataagtgaccttgaacgtgaaatggacaagctattacagagcgatcaggagttaaaggaaatgatggagctattggttgggataaaaggaattggcagggttactgctcgtttcttgatcgtatatacggctggatttacatcattcgggtcgtggaggaagtttgcttcctattgtggtatagcaccttttccgcatacctcagggactagtataaaaggaaggacgaagattagccgtttggcaaaccttgaaggtaaatcactgcttcaccaatgtgccattgctgcaataaagtcaagtccagagatgaaagcgtactatgagaggaggcttgaaatgggtaagagcaaaatgagtacaatcaatataataagaaataagttggtggcccgggcatttgcggtgattgcgcgagggacaccttatgtgaatacaatgggctacttctcctaattcacagctccattcatttttcatttgcactgcaaaaaggttcaatccaagtgaacatttttagcggttagaaacttattttgcaaattctgcatagaattacttcataacgcattttgtgccgtagcgttgaaggaagcttctcttcatcttcaggcactcgacttcctggccgtccatatagcacattaactttttttggtagcgaaataacaacatccattcctgcaggcggcataaagccgcttcgctttttatacgccctatgcaggtctggatattgtaaaattatttgcatcaaaaaaaggtaatgtaaaggctctatgggaagtaagtcgaaaacaaaaaaagatgaaatcaaatccaccacaaaatatcgcaacggcacaaaagaatcaaaaaaaggaaaatgctctggatataaaaagtatgtcgatcaaaaaggctttgtgggtaaaaaggaggactatagaaaaaaattatgaagggaaatttggaattatcataggata

SEQ ID NO: 3139 - DNA, 1394 bp, unidentified
  source 1..1394: mol_type = unassigned DNA; note = element_48fa54d
  misc_feature 1: note = core
  misc_feature 2: note = LE
  misc_feature 3..1112: note = CDS
  misc_feature 1113..1394: note = RE
  misc_feature 1164..1386: note = bridgeRNA
caatgggatggacgcccccacccgacaacggcatcgatgtgccagagtggaagtgtcagcagccactcaaaccggaaggggcgtccaccatgaagattacgacgatcggcctggatttggccaagaacgtattccaggttcacggtgtaaatgagcacggcaaggccgtgctgcgcaagcagctgcggcgcgaccaggtcgcggcgttcttcgccaacctgccggcgtgcctggtcggcatcgaggcctgtgccagtgctcatcactgggcgcgaaagctgcagtcgatgggccatacggtgaagctcatggcgccgcagttcgtcaaaccctacgtcaagagcaacaagaacgacgcagccgacgctgaagcgatctgcgaagctgtgagccggccgtcaatgcggttcgtgccgatcaagaatatcgagcagcaggcggtactcgccctacaccgagctcgacaaggattcgtgaaggcacgcaccgcacaggccaaccaaatccgtggcttgctcggagagtacggtctcatcgtgccgcagggcattcactacatcgcagatcgtgtcccggcgctgatcgaggatgctgcggttgagctaccgggtgccttccggctgctgatcagcaggttgcttgatcatctcaaggtactgcaccagcaagttgatgagatcgaagcccagatcaaggcttggcatcgagccaatgacgcaagtcgtcgactcgagaaggttcctggtatcgggcctctgaccgcctcggcactggtcgccacggtgggcgacgcgaagaacttcgacaacggcaggcagttcgcagcatggcttggcctcgtgccgcggcagcattccagcggcgggaaggccaacttgcttggcatgagcaaacgcggcgatgcctacctgcgaacgatgctgatccacggggccaggtctgtgatcttccgttcgacgcagcgagccgacaccgagagctggctgttcaagctgaccaccaggcggaacaagaacattgctgccgtggccttggccaacaagactgccagaacaatctgggcactgctcgttcatgaccgggaattccggccgggctacgccgcagcgtaaaaaccggcgccaagtaccaacggcactcacgtactgaaggagattcctaccgccgattgctcaagcgatcagcaagttgatggcacgacaggtcagaccgtggttggcacagcccgcgttgaacgaggcacccagagtgcgtgtaagcgatcgaggcgccgaccagcagaacccatcagggacagcgagcatgtctcgcgcagaaagtccgaatgtacgggtgcaatcttcaccctcgtgcgtctacgaaccgaaagcttggcaaaagggggcgtccatgta

SEQ ID NO: 3140 - DNA, 1423 bp, unidentified
  source 1..1423: mol_type = unassigned DNA; note = element_48fab52
  misc_feature 1: note = core
  misc_feature 2..77: note = LE
  misc_feature 78..1109: note = CDS
  misc_feature 1110..1423: note = RE
  misc_feature 1199..1417: note = bridgeRNA
taatgagatggtccgccgcttgatcttccactgaagaatgggtgatcttgttggcaggttgaaggaggatcatcgacatgcagattcgttcagttggtatcgaccttggcaagacgacttttcacctggtggcacttggcgacgacagcaaggtgctgctgaagaagaaattcactcaaaagcagctcatcgctttcacagccaacctccagacttcgctgatcgggatggaggcatgctctggcgctcacttcatgggtcgtgtgttacgagcacagggtcatgacgttaagttgatcccggcgcagttcgttaagccattcgtgaagtcgaacaagaacgacttcctcgatgcggaggcgattgccgaagcggtcgaccgcaagaacatgcgcttcgtgccgatcaagacggacgaccaactggatctgcaggcgctccaccgcgtgagggaccggctcatcgcacgacgaacgtccgtcatcaaccaactgcgggcatttctgctcgagcgtgggatgaccttcgcgaggacgccggccaagctcaaggtggcgatgcccgagatcctcgagaacgctgacgcgaacctgacaccacgcatgcgcaacctgatcagcctcctgtggagtgagtggaaggacctcgagcagcagatcgtgaccgtcaacgcagaggtggaacagatcgcctcgtctgatgccgcctgtctacgactgcgtcagatccccggcataggcccgttgatcgcaacagcgatcgtggccgcgatcggcaacggcgcagccttccacaagggtcgtgagttctcctcatggctcggacttgtgcccagacaacactcaactggtggcaaagccaggcttttaggcatcagcaagcgcggcaacagctacctgcgtaagatcctgatccatggagcgcgttctgccgtggtgcgtatgaaacgagaacgagcaccctttggagcgtggctcgatgcgttgcagactcgagcaccgctgaatgtagtggtgaccgctacagccaacaagctggcaagaatcgcgtgggctgtgttgtcaaccggcaaggaatatcgagcgctcccgagcccgcctccagcatagagcaggcgtggaaaagacgcctacggcttggaaagcgctccgccctttccactttcccacccacgacgactcaataaagtttccccacccaaagtctgcataggaacagttaagacgaaagaacagtcccaacggcgtgccggcaacctgtcgtcagaaatggtctctcaagaccgctccgtttatcaggaacggcacgcgcgcaactcatcatggccaggagatctaacctccaacaaaaggccgaatacatttgcgcagacatgtctctcgtcctacgctttttcccttgcagtcgcgcggcggaccataca

SEQ ID NO: 3141 - DNA, 1209 bp, unidentified
  source 1..1209: mol_type = unassigned DNA; note = element_48fcad2
  misc_feature 1..2: note = core
  misc_feature 3..207: note = LE
  misc_feature 208..1194: note = CDS
  misc_feature 1195..1209: note = RE
  misc_feature 12..188: note = bridgeRNA
cttgtatctttctttccgtggtggttagctaccaccacacgaagcggaggaagcttgtttcgcaccttaaggctcgaccttgttatgtagatcatgccctctgcttcacctttcgccagcacagacactgaacggtagccaaggggcaaaccctgtatgcacaaggcaagtgggcgaagttggctaacattgtaacaggaggtcatcatgttttatctcggtatggatgtcgcaaaagccaagctggattgttgcctgctgctggacgaagccagtggccgtcgcaagaccaaggtggcaagcaacgccaagtccggcatcgttgatttgctggcttgggttgccaaacaaaatgtttctccgggggcgctgcatgtcgtcatggaggccactggtgtgtaccacgagcaagccgctatggcattggcggatgccggtatcacggtttccattgtcaatccggcgcaggtcaaagacttcgggcgcgggttggcggtgcgcaccaagaccgatggcgtggacagctttgtgctggcgcgctacggcgccctgctcaagcctgttgcctggacgccacccgccccggaggcacgaatgctgcaagcgctgttatcacgccgcgaggccatcacccaggatttgcagcgtgagcgcaaccgtcaggagaaggccgacgccaccgacacaccggatcggatacggcaatcccttgccgacagcatcgagttcctggtcaagcagcttgccgagctgcagcgggacattgaccagcacattgatcggcaccccaccctcaaggacgatatggccttgctccagagcatcccggcggttggcccgcaggtaggcggtaatctgctttcggtgatgcgcagccacgagttcagttcagccgaacaactggcggcgtatctgggtttggtgccggtggaacggcagtcgggcagttcggtgatggggcgtgccaggctctcaaaagctgggcctgccagaatacgcgccgtgctatacatggctgcggtcgtggcgacgcgccacaatccgcatgtcaaagccgtctatgaccgactacttgcccgcggcaagtccaagatgtccgctctcggtgcagcaatgcgcaagctggtgcatttgtgcttcggtgtactcaaaacacgcaagccttatcagcacaattatgcaaaaatcgtttgaccggaaagacggtat

SEQ ID NO: 3142 - DNA, 1618 bp, unidentified
  source 1..1618: mol_type = unassigned DNA; note = element_4904c28
  misc_feature 1..2: note = core
  misc_feature 3..285: note = LE
  misc_feature 286..1494: note = CDS
  misc_feature 1495..1618: note = RE
  misc_feature 14..311: note = bridgeRNA
ctactacaatatatttatggtcatagtacctaacaaccagttaggacattatccatcttgttgcttaagctgttagaatgtaagagcaataggtatatcgtctgcctttcttggacttcgcgtccgtaaaaaagactgataaccggctcctcattcgcagcgttcgttttatgcaggttgaactgctgtcctacagtacgttcgtgtcacaccacagtagattgaataggcaatgagtaaaactggtgtttatccattgcaataattttaaggagtgacaaatttatgaacatgaacgcagtaggtattgatgtttccaagggcaaaagcatgatcgctattatccgcccgtatggtgagattgtttctttgccttttgagattcgccacacttccaaagaaatccgttctctcatcaaccagatccaatccattgacggcgaatcccgcatcgttatggagcatacgggtcgttattatgagccactggcacgtgagctttctcaggcaaatctttttgtaagtgccataaatcctaagcttattaaagatttcggtgacaactctctacgtaaagtcaaatctgataaagcagatgctattaaaatagcgcgttatgctcttgacagttggaatgatttgaaacagtataatcttatggatgaaatacgtaatcagttaaaaacaatgaaccgtcagtttggtttttacatgaagcacaaaacggctatgaaaaataattttatcggcatacttgatcaaacctatccaggtgtcaatacttacttcaacagccctgctcgtgatgatggcagccagaaatgggttgatttcgctgctgcatactggcatgtagactgtgttcgtaaaatgtctcttcacgctttcaccgtccattatcagaaatggtgtaagcgaaataagtacaacttcagtcaattaaaagctgaagaaatctatggagcagcaaaggaacttgttcctgtacttcctaaagatcatttgaccaaactcattgtgaaacaagctgtcgatcaattaaacattgcttccaaaactgtagaatcacttcgtactctgatgaatgaaaccgcatccaaacttcctgaatattcaatcgtcatgggaatgaaaggtgttggatcatctcttggccctcagttgattgctgaaatcggcgatgttacacggtttacacataagggtgctcttactgcctttgcaggcgttgatccaggtgttaaccagtctggaacctatgaacaaaaaagtgtccatacttccaaacgaggttcttcgtctttgcgtaaaacgctatttcaggtcatggatgctcttatcaaaaccaagccacaagatgatgctgtttatcagtttctcgacaagaaacgtgctcagggtaaaccttactatgtttacatgactgcaggcgctaataagtttctgcgtatctactatggtagagtaaaagaatacctgctgtctctttcgtaacacttaccacagatttcctaatcttcagaccaacgatatttgctggtctttttgtcgtgcttatttcttgaatatacttttttttacaaagctctcaatttcctattgactttttatttgcagg

SEQ ID NO: 3143 - DNA, 1366 bp, unidentified
  source 1..1366: mol_type = unassigned DNA; note = element_4906219
  misc_feature 1..3: note = core
  misc_feature 4..107: note = LE
  misc_feature 108..1118: note = CDS
  misc_feature 1119..1366: note = RE
  misc_feature 1134..1364: note = bridgeRNA
agatggaatggtcgcctcccgccttaatgggccgtccgacgccgcaatctcgcgtccagagcatgcgacattgctgcttcggcagtcccgccgtcaaggagaaccagatggaacccacgaccattgccatcgacctggccacgcgcgttttccagattcactatgtcgagcctgagaccggcgcgattcacagcaaggtcctcaaacgtgcccagctcgtgccgttcttcaccaacctggctgcaagccgtgtcgtcatggaggcctgcggcagcgcccattactgggcgcgggtcctggcacggctgggccacgacgtgcggctcatcgcagcccagttcgtgcggccgttcgtgaagtcgaacaagaacgacgcggccgacgcagcggcgatctgggaagcggcccagcgacccggcatgcgctttgtggccgtcaagaccgaagaccagcaggccatgctggcgctgcaccgcatacgccagcaactggtccgcatgcgcgtcatgcaggtcaaccagcttcgtggactgctctacgaattcggcgtggtactgccgcaaggccgccggacatcgatcgaggcggccaaagcagcgctggcgtcattggctgaccagttgccagccatgctggtggatagcctgcaggaccaatgctcgcgactccgcgcgcttgacgagcagatcgcgcgcctcgaacaacgcattctcgactggcgccgcaatgacgatgcatgccgtcgcatctcggaaattcccggcgtgggtgtgctcacggcgaccgccgccgtatcggtcatcggacaggcagagacgttccgttccggtcgggaattcgccgcttatctgggcctcgtgccgcgacagaacagctccggcggcaaggtaaaactcggcggcataagcaagcgtggcgacgtgtatttacggacactgctgatccacggcgcgcgatcggtgatctcgagttcaagacatttgccagagcgtttgcgccagatgctgacccggcgcccaacgaacatcgttgcggttgcactcgccaacaagatggcacgaacaatctgggcgctgctggcgtatggccgaacgtacgaggccacacccgcgtcgtgatcacgcttcaagaccagtaaccccatccacggttgcacaggtgtattgaacgatggcaagacaggttggaccgcgcaaaggcaagcctgagacattactcggacctcgaatccgacaagtagattaggacctttgcggcgaaatccatcggggccggcgggtgcatcccgcgatcgagtccggatataagtccgcaaccaccctcctcgccacgcacaatcaccttgcaaatgggaggcgaccatata

SEQ ID NO: 3144 - DNA, 1406 bp, unidentified
  source 1..1406: mol_type = unassigned DNA; note = element_4906e9b
  misc_feature 1: note = core
  misc_feature 2..304: note = LE
  misc_feature 305..1366: note = CDS
  misc_feature 1367..1406: note = RE
  misc_feature 81..274: note = bridgeRNA
ctttaactttgcagcctaaaaagagtgtccttacgaactcttaaaataattaacattcaatttgcgaagaaaagttgaagagatattccagttttttcttacctttgttgtagaaaggaaggattaactgccggaggtcaacccatcctcccttggagaccaagagtttatcccttgttacaggccctccggatttcaagctgcaaatactaaataggaaggtaggctcgaagcctaattaaagtagtagcaactcacagcttgcctcagttaaccgcttcccgtacctattaaacgtaaagaaatgaagaaaattgtaattggcatcgacatttcgaaggaaaagatcgacgcaaccgcaatcgacgtgagagacagccagctgggagttgtcaagctggactaccaggtgtacgagaaccggcccatgggctaccgccgcatgctcgtctgggcaaggcatctgatcaagggcatcgggctggaggacgttctgttctgctgcgagacgacaggtggctacgaccgctgcctgtgcgactacatctatgccaagagccttgacatctggcgcgagagtgcactgcagatcaagcgcagcatgggcgttcgcaagggcaaggacgacaaggccgactcgctgatgatagccgagtatgccatgcggcatattgacaaggccgtcatctacgagacgcccgacgagaaggtgcgtgaactgaaggcactgttcctctaccggcacagtctcgtccaggagcgcaccaaaaagaaggtccgtgcatccgagctgaaggccaccgccgccaagagcagctccatgcgcttcatcgtgcgcgatgccatgaagggcgtccgcagcctcgacaagagcatccgcgactgcgagaagcagatactggccatcatcgacggcgacgagagcctcaagcgcaactatgggcacattgaatccatacccggcatcagcattgtcaacgccacggccttcatcgcttacagcgacaacttccgcagcatcaccacggccaacaaggcagcctcctactggggctgtgcatcgttccgagaacggtcaggcacaagcatcgacaagaaggcctatgtgaagtgctactccggttcactgctgaaggcgacactcacacaggcggcagaatgtaccatcaaggagcacggaatctaccgggaatactacctgcgcctgaaggcggagggcaagccatacggcatcatcgtcaacaatgtacgcaacaagctcatccatctggtgttctccctggtcaccaacggcatggactacgagaagaatcaccagttcctcagaaccccccaaaaagaagggaaggacatgacaataaattaagaattattaatataaaacatttgcaaattttcataggaag

SEQ ID NO: 3145 - DNA, 1499 bp, unidentified
  source 1..1499: mol_type = unassigned DNA; note = element_490b814
  misc_feature 1..2: note = core
  misc_feature 3..249: note = LE
  misc_feature 250..1479: note = CDS
  misc_feature 1480..1499: note = RE
  misc_feature 15..246: note = bridgeRNA
ctaatgggtgttagggagtcggccgtccggcagactccgggttggtagccgccggcaggtgagcactgttttctcctggacttcgagtcctgatgagagatcgtgcctctgctggttggccgggaggacagatcgctgctgggatgtcgtgcccgctctgtggtggcgtgagcactgatccattaggtcgctgagagttctcccgcgcgctgccgaacaggtgtgataccgacgacgggagaagcgcacgtggtgctgttcgtgggggatgactgggccgaggaccatcacgatgttgaggtgatggactcgactggccgtcggctggccagggcgaggttggctgagggggtggccgggatcgcccggctgcacgccatggtcggtgagcaacttggtgatgaggtcgaccagaccgaggtgctggtcgggattgagacagaccggggtccgtgggtggccgcgttgatcgcagccgggtacacggtgtacgcgatcaacccgctgtcggtggcccggtatcgggaacggcacagcgtgtccggggcgaagagcgacccggcggatgcgcacaccttggcggacatggtccgcaccgacgctcatcagctgcgcccggtggctggggacagcgctgaggccgaggcggtcaaggtggtgtcccgggcgcacaagtcgctgatctgggaacgtacccgtcatacccagcggttgcggcatgcgctgcgggagtactttccggccgcgttggaagcgtttgaagacctcgacgccccagatgcgctggagttgctgaccaaggctccggacccggtcgcggccaccacactcacactcgcgcagatccgtgccgcgctcaagcgtgcccgccgccgcaacatcgacgacaaagcggagcggatccaggccgtgctgcgtgccgagcacctcggccaggccgaggtcatcaccgcggcgtacgcggccaccacccgatccgctgcggcggtactggccaccctgaacgagcaggtcaaggcactggaaggtcaggtcgatgcgcattttggccggcacccggacgctgagatcatcctgtcccagcccggtctgggcccgatcctcggggcccgggtgctcgcagagttcggcgacgaccccgaccgctacgccaccgcgaagaaccggaagaactacgccggcacctccccgatcacccgagcctcgggcaagaagaaagtcgtcgccgcccgattcgtgcacaacgaccggctcatcgacgcgctcatcagccaggccttcgccgcgctcaacacctcgcccggagcccgctcctactacgaccagcaacgagcccgcggcgctgaccacaaccccgccctgcgccagctcgccaaccgcctcgtcgggatcctgcacggatgcctcaaaacccgcacgctctacgacgaagcaaccgcctggtcgcaccacaccaagaaactcgctactgctgcttgacattcaagctcctgggatgt

SEQ ID NO: 3146 - DNA, 1411 bp, unidentified
  source 1..1411: mol_type = unassigned DNA; note = element_4916f16
  misc_feature 1: note = core
  misc_feature 2..231: note = LE
  misc_feature 232..1398: note = CDS
  misc_feature 1399..1411: note = RE
  misc_feature 14..246: note = bridgeRNA
ctgcttgttgtattgcctttaggaccgggtctggccaggcttcggttcaggcgctcggcccatcgctctgatcgcggctgcccacgctttgtcgtgtggctctcatttggcctgcgtgggtcgggcgtcaccccagggcggggagaggctcaagagaggtttgtaccgctcgaagcagcgttgccctcccggctcgataactgacagcagcatcgagaatcggagggccagatggatggtgtggtgatcggcatggacccgcacaagcgcagcgtcacgatcgaggtgatggccgcagacgagaccgtcgtgggcgggggtcgcttcggaaccgacaaggatggctacgccgcgatgctgggctatgcgcggcggtggccggatcgggtctgggcgatcgagggttgtgccgggatcggtaggcacgtcgctcaccggctgctcgccgaggggcaggaggtcgtggacgtgccgccgaagctgtcggcgcgagcgcgggtgttcgccaccggccagggccgaaagaccgatgccaccgacgctcactcggtggccctggtcggtacccggatggtcgggctgcggccggtggtcaacgaccagcaactggcggtgctgaggatcctggtcgaccggcgccgctcgctaggtgaggaccacacccggatggtctcccagctgcatcagttgctgctcgaactgatccccggtggggcgaagaaggacctgtccgccgcccaggccaaggcgctgctggccaaggttcgaccccgtgacgctgccggcaaggcccgccgccgggtcgccgccgaactgatcagcgacctggagcggatctacaagcgcaagaaggccgccgacaaagagcttcgcgagctcgtcgccgctaccggcacctcgctgctcgacctgaagggcatcggaccatccggcgccgcccggctgctcgtcgaggtcggtgacatcacccgcttccccgaccagaaccacttcgcgtcctggaacggcaccgcccccatcgacgcctcctccggcgaccaggtgcggcaccggctgtcgcgggccgggaaccggcagatcaaccgggtgctccacatcatggccaccgtccagctgcgcaatcccaccgaagggcgtgactacttcgaccgtaagaaagcatccggcaagacctcgatggaagccatgcgctgcctcaaacgccgactctccaacctcgtttaccgacacatggtcaaagacaccatcacccacgcaacgacgggcccgggagggcaacagggacacgactctgactccagcgtgaccggctcacatcccaacaccggctcttcggacaagccacttcccggacccgccagcaccaaccctacgacccaactccagacagcctcttgacacagagaggagc

SEQ ID NO: 3147 - DNA, 1348 bp, unidentified
  source 1..1348: mol_type = unassigned DNA; note = element_493019c
  misc_feature 1..2: note = core
  misc_feature 3..1097: note = CDS
  misc_feature 1098..1348: note = RE
  misc_feature 1130..1338: note = bridgeRNA
ttatggatggcccacccctcaccaccggcgcaggctggcgtcgtacagaggagaagctgaccattatcaagacgcccgtcgccgtgctgggaattgacctcggcaagaacagttgcagcctggccggtctggatgccagcggcgccgtagcgctgcgacggcggatgacgcgggaaggcgtgatcgtgtttgtggccaagctgccggcctgcgtcgtggctatggaagcctgttgcggggcgcatttccttggacggacgtttcaggcgcaaggacacgaggtgcggctgatgtcgcccgagtatgtccagccttacgttaaggctcagaagaccgacgatcgtgacgcggaagcgatcgccgaggcgacgactcggccgaccatgcggctggtgacactgaagaccgaggcgcagctcgacttgcaggtgctgcaccgggctcggcaacggctggtgacctcgcggacccgcctgaccaatcagctccgtgcggttctgctcgaacgcggcatcattctgcccaagcgtcgggcatcccttgttcagcggctggacgaactgatgaacggtgagctcccgatcagcgtccgagcggtccggctgctcggcgacctacgggacgagtgggcgagtctggaccggcggatcaagagctatgacgacgagcttgcggcacttacccgtgacgacgctcaagctcgcgcgctcgccaccatcccgggtatcggcgtcatcaacgctaccgcgctgctcgccgctgtcgacgacggctcggcctttgcgaggggaagagatctggcagcgtggcttggcctgacgccacgccagcactccaccggcggcaaaaccaggctgcttggcgtcagcaagcgagggaacaagtacattcgcgtgcagctgattcacggcgcgcgtgcggccatggcgcacttcgtcaggcaggccacgccgacgggcgagtgggtgcgccggctggtcgcacgtgctcaccccaacgtcgtggtggtggcgctcgccgcgaagctggcacggaccgcatgggccgtgctccgtcatggacgcagctttgatcgtcagacgcccgtggcagcctgaccaggaatagcggctctgctcagcgccgacgccgctcacgatgtctgtggaggtgaaggacagatggcgtaacggttgaccccgcgtcgcgacagcctgggcaaaaatgtggtgctcgacacccccgtctttatgaggcccgtgacgcgcgagatccatcttggccagggctgaagccttgagaccggatacgttgatgcagaccagcacgtcgtccaatttcactcttgcagacggggtgggccatacgt

SEQ ID NO: 3148 - DNA, 1837 bp, unidentified
  source 1..1837: mol_type = unassigned DNA; note = element_493a868
  misc_feature 1..3: note = core
  misc_feature 4..117: note = LE
  misc_feature 118..1392: note = CDS
  misc_feature 1393..1837: note = RE
  misc_feature 1475..1735: note = bridgeRNA
gagcattcctgtaattcagaaataacgtcaattgaataaaaagaaacctcgaagtaagataaaggtgttcatcttggcggatgaaaaaacatcttatttcaaactggaggtttcaatatgaatttaacacagaatgacagacttaggcaagtaacaagcgacactcttattgttggagttgatgttggatcacagactcacttctgcagagcatttgactggagaggatttgaactttcaagaagagtatttaagtttagcaacaccgggatgggattcctcactttccttcgttggacagaggaactcatgaataaagctgaaatgaaaaaggttattgttggctgcgagcctaccggctgctactggcttacttttcagaagttcttacaggaccacgatattcagtttgtaactgttaatccgtttacggttaacaggagcatggagttggatgataacagccctgaaaagagtgacttaaaggatccaaagacaatagcgttgcttgtgaaagatggaagattttcaacttcttatcttccaagcggtgtatatgcagaaatcagagaggcctctgtctgcagagaccagatcatgaaacagcatgtacgtctgtcaaatcagatacagggatggcttcagaagttcttcccagagtattttgagtgttatgccgattgggattcaaccagtggacttatgcttctaaaaaaggctccgcttccacaggatatccttagaatcggtgcaggtggaatcaatcagatatggcgtgatgcaaaggtgcgggcggccgggataaagagggcacagaccctggtagaagctgcacaaaacagtgtagggttggaagctggtgaggctgcaagacttgagatatgggttcttgtaaatgactacatccttaaagcagaacagcttaaaagacttgatgaatatctggaagaaaaagtaaaagaagtaccaaatgtggagaaactgctcgccattaaaggagtagggatgagtactgtgattggctttattgcagaggttggtgatatcggacgttttaccgatcctaagcagatacagaagcttgcaggactagagatagtcaagaagagctctggcaaaaagaaaggtcagccaagaatcagtaagaggggcagacgaaaactacgaagaacaatgtacgaatcagcaaaagcactgatgctgtggaatccggcatttcaggatgtattcctttattacaggaaccgaaccaggaatccacttggtggaatgcaggccaagatagcagttgcatgtaaagcaatcagagtattctacgtagtattacaaacaggctgtgactttgatgaggagaagttccgaaaagacattatcagaccggaagcagcctaataaataaaagcacatactgtagcagataacgtccgtcaagagttcaattggtgctggattacaggagtgctctctggcaatgaaaaagcagagcgaagccgctaagacattttttatagggcatgaccctgataaggagcagaagcggcaccccgctatgggtaggctggacgaaggaatttaggactcttcttttgaaagatgatcctgttagacatgagaggttagcagccatagggaagaatgggacaccgattcgccttcataaaaaggatgacgttttatttcgtgtacctttctgacaggaaacataagtgcgttgtaactgaaatgacacagtttccgcctattattgaatgcttatcattgtatgtaacttagttaatcattgcacaaatggctaaaatacaagcttttttgtgcaaaataaataagaaagtataga

SEQ ID NO: 3149 - DNA, 1351 bp, unidentified
  source 1..1351: mol_type = unassigned DNA; note = element_493bbdc
  misc_feature 1..2: note = core
  misc_feature 3..87: note = LE
  misc_feature 88..1107: note = CDS
  misc_feature 1108..1351: note = RE
  misc_feature 1123..1338: note = bridgeRNA
tgatggggtggatagctcctgctccaaccgacgtcgcgatgcgtcataatgcaggtgtcaaaatctgcaattgagaggagccaccccatgcaagttacaacaatcggagtcgacctggctaagaacatttttcaggttcacgggatcactgatagtgacgaagtcgctttcaaccggcctctgcggcgcgctcaagtgttgccgtttttcgcgcgacttaatccttgcctcgttggcatggaagcttgttctacaagtcattactgggcgcgcgagctgaccaggctaggccacgaggttcggttgatcccacccatgtatgtcaaaccatacgtgaagcgcggcaagtcagacgctatcgatgcggaggcgatctgcgaagcagtcacccgtcccacgatgcgttttgtcgaggccaaatcggttgaacagcaggcgctgctttccctgcatcgcgcgcgcaatctcatggttcgtcagcgcacgcaactggtcaatgccttgcgcagcatgttggcagagtttggtgtgtacatcgccaagggcctcgcacgtgccatcaattttgcgcaaggggtgctggctggagccgagttagaactgcccgaggtcgcgcaagacgtggcccatagactgtgcgggcagttgggcgttctgcatggacaagtgcgttggtatgaagcccgtctgcgacttgaatccaaacgcgatccccgtgtcaaacttctgcagaccattccgggcgttggcccggttacggcctctgcgatcgctgcgagcattggtagtgggcaccagttcaagaatggccgtgaatttgcggcgtggctgggtttgacgccgagcaatcgatcaagcggcggaaaggagcgattgggtcggatcaccaagatgggcgaccaatacttgcgccaattgcttgttgtgggaatgacctcgctcgtcaggcagacagaatcccacccagaacgggcgaacaaatggctcacctcacttttggaacgtaagcctgcgcggttagcaactgtcgctatggcgaacaaaacagcacggatcgtctgggcggttttgacaaagaacgagccgtacatgcctcgaacaacctgaaaggaattgaggaacacgagatagcaagacctgcgaaatgatggtgcaaaagtcagccgccaaaaccaagacaccccgccgaacggctcgggcattatagcccgcaaagctgatagggacttggtttgcggaacccttcagggccagcggtcaaaaccgcgcaaacaggccggacacatgactgcttctgacaaaagcacaaatcatctcaaaaatgtcttgctatgcaggggctatccacaca

SEQ ID NO: 3150 - DNA, 1387 bp, unidentified
  source 1..1387: mol_type = unassigned DNA; note = element_4940c73
  misc_feature 1..2: note = core
  misc_feature 3..127: note = LE
  misc_feature 128..1150: note = CDS
  misc_feature 1151..1387: note = RE
  misc_feature 1163..1350: note = bridgeRNA
acatggggtaatcgcgggagcggtcacccattcggcaggatttcagccccagagggtggttgttcccggctatgatgaaggacgggctctcgattggtgaccgggcccagcatcagggagaacaaccatgggtgagtatatcgggctggatgtgtcgttgaaagagaccgcagtagccattcggcgcgatggcaagcgtatttggcgtgggaaatgcgcctcggatccgcagcttctttcagcattgatccgcaagcatgcccctacagccgagcgggtcgtcttcgagaccgggcctctttcagtctggttttttcatgctctcactgcggaagggataccggcaatctgtattgacgcccgccacgccaaggctgcgctcgacatggcagccaacaaaaccgacgccaatgacgccgacgggctcgcgcatctggcagaggtcggcttcttccgcgaggtccgtgtaaagggcttcgacagcatgcgctcgcggactgttgtcgcggctcgaacgaaactcgtgcggacgacgctggacgtggcgaaccaggtccgggggctgatgaagacatttggcctcatcgttccgcgtagcatgggtgggaagttcgaagcgaatgttcgttccttgctcgctgacgacgccgacctctcgcggattatcctgcccttgctcgaagcctggcggaacctgcgcttccaggcggccaggttgacacagcagctcctcgccgaagcgcgcagaaaccagcaatgtcagttgttgatgtcgattccgagcgttggcgcgatcacagccactgcctatctgactgccgttgaggatccggagaactttaagcgatcacgctcggtgggtgcctggctgggactgacgacgcggcgatatcaatcgggcgaggttgactatgatggccatatctcccgaagaggtgacgcccatttgcggtcgctcctctacgaagccgcggtggtgatcctgacccgcagtcaggccgacagtgccctgcgcaactggggcatgaaacttcgcgagaagatcggcttcaaacgctctgctatcgctgttgcccgcaagctcgctgtcattatgcatgcgatgctccggtccggtgaactctttaacagggagacggcgtccgcctaaatcaccggctctgcagcgccaaaggcgcgaagaggcgtccctgccggggcggaggctgatccattccgttaagaccgttgcacctcgagttcgctcggatcgtgcgagacatacattggaaggattgtcccgcgaagccccatgatgcggcgacccatgtcgaccgcgtagacgaccatgctcccggcaaaccacctcccgcatcaaaaaggcgcttgcaaatcccgctattagacg

SEQ ID NO: 3151 - DNA, 1341 bp, unidentified
  source 1..1341: mol_type = unassigned DNA; note = element_4947ada
  misc_feature 1: note = core
  misc_feature 2..104: note = LE
  misc_feature 105..1109: note = CDS
  misc_feature 1110..1341: note = RE
  misc_feature 1113..1335: note = bridgeRNA
gaatgaaagggacttcccctactcgaagcgggcttgcgcccgcacggcatcggagtgccaagattgacgtgacgttgttcaatctgaaaacgagaggggaagtcatggagaagattactactgtgggaattgatctggcaaagagcgtgttttcgctgcatggggtggatgggatggggcgtgtggtgctgagaaagacggtgcgtcgggatcagctggaggcggtggtggcggggctatcgccctgcctgatcgggatggaggcgtgctcgggggcgcacgagtgggcgcggcgctttgagcggcacgggcacacggtgcggctgatagccccgaagttcgtgatcccgtaccgaaagagcggcaagaacgacgggaacgatgccgaggcgatctgcgaggcggtgagccggcccagcatgaggttcgtgccggtgaagtcgctcgagcagcaggcgctattggcgctacaccgggtgaggcagggctttgtagtggagaggaccgcgacgatcaaccggctgcgggggttgatggctgagttcggggtggtgctgccgctgcgctcggtcacggtgcgccgccaggcggcggcggcggccgaggggctgcccgagctggcaaggcgcatggtggcggagctcctagagcagctgcggctgctcgatgagcgtatcggggcctacgaccgggagcttggcgcccaggcgcggctctcggagcccgcgcagcggctaatgaagatccgcggcatcgggccgacgacggcgctggcgatcgtggccacggtgggcaacgcccgagagttcgacaacggccggcagttcgccgcctggctcgggctggtgccggggcagtactctacgggaggcaaggcgcgccttgggcgcatcaccaagcggggcgatgcctacctgaggaacctcctggtgtatggggcacgctcggtgctgcacacggcggcggcgcaccgtgaccggatctcgcgctgggcgctcgagctgcagggacgctgcggctatcaccgcacgctcgtggcgatcgccaacaagaacgcgcgcattgcttgggcgctgctggccaagggcgagcagctacgccccgagtgatctagagccttccttgcgactgcacccgatgacgacacggtcacaccggcgcccggagaacctggaaattgcgaaaggcggaatcaaacgccgactaacgatcgaggaccgggcgtgcggctttcatccgggccagagcacaacgctgctcaaaataggccgtttatagtgacgcagtccgaccttcgatcatcaccaccagaacccttgcagttccggggaagtccttata

SEQ ID NO: 3152 - DNA, 1418 bp, unidentified
  source 1..1418: mol_type = unassigned DNA; note = element_4947fa8
  misc_feature 1..4: note = core
  misc_feature 5..201: note = LE
  misc_feature 202..1404: note = CDS
  misc_feature 1405..1418: note = RE
  misc_feature 1..188: note = bridgeRNA
ctccgtaagttgttaggcggcccgggagggccgggtgtggcttatggttctctgccgtcagtggcttacaaggagtggccgcccggttctccggggcgccctggctgctgattgagatgtgcgcttcggtcgctttttacggagatgacagcggggtgttcctcgggtcgacgggatgctgttcggagtgaggaggggcgagtgggcgagcgacgggcccgggtctgggccgggatcgacgcgggcaaggggcatcactgggcggcggtggtcgacgagaccggtgtgacgctgtggtcgaagaagatcggcaacgatgagtcggcgatcctgaccgccatgggtgagatcctcgacctggccgacgaggtccactgggcagtggacatctccggcacgtcctccgcgctgctgctggccctgctcgcggcccacggccagcaggccgtctacgtgcccggccgcacggtcaaccgcatgtccggcgcttaccggggcgaggcgaagaccgacgcccgcgacgcctacgtcatcgccgaaaccgcccgcaaccgacgggacttcgcgtcgatcgacgtgcccgcccagctggccgccgacctcgcgctgctgaccgcccaccgttccgacctcgtggccgaccgggtcaggatgatcaaccgtctccgcgacacgctgaccggcgtcttccccgcgctggaacgggccttcgactacagctcgcagaagggcgcgctggtcctgctgacgggctaccagaccccggcagctctccgccgccgcggccgggcccggctgacggcctggccggccaaccgaggcgtgcgcggtgccgacgccgtcgccgcgacggcgctggaggctgcccaggctcagcagaccgcgctgcccggggaggacgtcgccgcccagatcgtggctgacctggccgcgcagatcctggccctggacgaccgtctgaagcggattgaccagcagatccgcgagacgttccgcagccatccacaggccgagatcatcgagtctctgccgggcatggggccgatcctcggcgccgagttcgtcgtcgccgccggcgacctcacggcctacgccgacgccggtcacctggcctcggcggccggcctggtgcccgtcccccgcgactccggtcgtcgcactggcaacctgcatcggcccaagcgctacagccgccgcccgcgacgagtgttctacatgtcggcccaaaccagcatgatgcgggaggggccgaaccgggacttctacctcaagaagcgcggcgagggctgcaaacacgttcaagccgtcatcgccctggcacggcgtcgggccagcgtcctgtgggctctcctgcgcgacaaccgggtcttcacccccgagctgccggtcgcgcaagcggcttgacttcatcattgaga

SEQ ID NO: 3153 - DNA, 1113 bp, unidentified
  source 1..1113: mol_type = unassigned DNA; note = element_494a5b0
  misc_feature 1..2: note = core
  misc_feature 3..162: note = LE
  misc_feature 163..1107: note = CDS
  misc_feature 1108..1113: note = RE
  misc_feature 1..164: note = bridgeRNA
ccctgtgtcttgaagatctgtcaggatggggttgggcgggaagccgttgggtccttggcgcttgacgccgtgagccggctcggtctcccgcccgttccattaccaacctgaacagttgcacgaggctgcgccaacagacctcgcatcacagggacaggcatcgtgatcatacccctccgttacgtcggaatcgacgtctccaagaagcatctcgatatctttgatgaagccgacggcgtgcccaggcgcatcgccaacgcgacacaggccatcacacagcaggtggcgcgttggcgatgcgatacgctggtcgtcttcgaggccacgggcacctacgacctcaagcttcgcgaggccctgggccaagctggtgtccactttgcgcggatcaatccggcacgagctcgcgattttgctcgggccagcggccagcttgccaaaaccgacccgatcgatgcacggatgctggcggcttttggccgggtcatgcagccggcagtcgagcaggcagccgccaatcctgcccgcaacgccttggcagggcttgcaaaacggcgagatcagctggttctcatgcgcgcccaggagaagaaccggcgcagcgaggccgacgaccgcgccatggccgggcggatcagccgtctcattgaggtcctcgacggcgagattgcggagatcgaagccgacatcaaggctctgacaaaagctgagccggagattgcagacgatgcgcgcttgatgcgctccgtgcctggtgtgggcccggtggcttgcatgcagctcatcgcgaagatgccggaactcggacgcgtcggagccaagcagatcgcggcgctggccggtcttgcccccttcaacgtcgacagcggcgccttccgcggcaaacgcaagatcgccggcggtcgaaaacgcgttcgcgatgccctttacatggcggctctcaatgcggttcgacgagccgatccgtttaaggccttctatgaaagactgcgactagccggcaaaccggccaagatcgctctcgttgccgttgccaggaagctgctaacggttatcaacgccatcatgcgcgaaagaaaaccgtacctgacaaccacgccaacataacagttg

SEQ ID NO: 3154 - DNA, 1537 bp, unidentified
  source 1..1537: mol_type = unassigned DNA; note = element_494af4c
  misc_feature 1..3: note = core
  misc_feature 4..244: note = LE
  misc_feature 245..1423: note = CDS
  misc_feature 1424..1537: note = RE
  misc_feature 8..226: note = bridgeRNA
tttcgtattatcaggtcaaccagtcttttctggttggcctttctttatggtcgttttacgatggcggtagccgggagaacgtcaggcttttaggggcaaaagtggacctcgccgaaaaaactgttctcccactatccccaatgaccatgtttgagctggtagaggcgtagacctcgcatcacaagcgaagctatgggtttggaaccatcgtgggagtgccggcaaataattaatggaggttgctatggagccagttgtaggtgtagatgtagcaaagggatcaagtgttgtacaagcgttcctgagacgaaacgagccttacgggaaattggagagtatcccgcatgaggaatgcgggtttgaacgtttaggggagcttcttgctgggctgcagacagtcacaaagaccgatccaatcgttgtgcttgaagcgacaggccactatcaccgtggacttgcggcttatctagagcgtagtggatggacgtatttcatcgtcaatccattacagtcgaaacgggcgaaagggacacagttacgtaaggtgaaaacggacgctgcggatgcctggcatttggcggatatgtattaccgaggagatgttactgcacaccgtatatgggatgagacgtacacggagcttcaacacgtaaccagacagcatgaatttgtaacggggatgttcatacaagcaaaattgaatacgagagctctgttagatcaggtttttccggcctacgaaaaggtttttcgtgatctgttctctgtcacatccctaaaggtgctggcccgttgtctggagggcaatttcgagaataatgtggaagcaattcgggaagacacggggaagtcccactctaggcggtgggctgaagaaaaagcggagcgactaggggaagttctgcttcactggcgcgaccaaccaagaagtcgttcccaaaccgttactttgagcggaatggtctcattactgcttgcgttctccgagcaactaagcgaattagagaagcaaatgaacgagattgcagcggctcttccagaagtggaactggtgaaaagcataccaggcataggggataaacttgccgccgcaatcgttgctgaaatcggcgacgcaagacaatttaaagacgcaaatcaacttgtcgctttcgccggcttggacccgggaatattcagctcggggaaatttacggctacgagttcgcgaattacaaaacgcggatccaagaggcttcgtcgtgctttgtatttagcagtacagtgcggtattcgtggaagtattaacgctaagatacgtaattattatgacaggaaaagaatagagggcaagccttacaaggtggtcgtgatcgcttgcgccaacaagcttctccatcacatctttgccatccttagcaagagccagccctacagcacataaacccatatttacccataatccttccgccaagaaggattatttgctatgcaataaattcagtgtaccacaatctctttgaaatccaagctgaaaagcttgacaaacattagctgg

SEQ ID NO: 3155 - DNA, 1442 bp, unidentified
  source 1..1442: mol_type = unassigned DNA; note = element_494df9e
  misc_feature 1..2: note = core
  misc_feature 3..233: note = LE
  misc_feature 234..1427: note = CDS
  misc_feature 1428..1442: note = RE
  misc_feature 15..207: note = bridgeRNA
gtccaacccttcaagcgcgggtttgatctggtcattcgtaggatcggagggcccgggggctgcgggtatggctgtcattgctgagccgttcgatggcttaaaggacttggccgcccggagccccgtgacgactcgaccgccaattgggatacgcgatgtgatcgctgctgtaggacaacgtcggcgaggtcgtctgcgggatcacatgtgacagcgagttggcggaggtgaccgtgcccgaactgtgggctggagtggatatcggcaagacccaccatcactgcgtggtgatcaacgcggacggtcagcggttgctgtcccgtcgcattctcaacgatgagaaggcattgctggagctgatcggtgacgtcgaggctctgtcgcaggacgtgttgtggacggtggatctcaaccacggtggcgcggcgttgctgatcgggctgctgctcaaccacggccagccggttgcctacctcaccggcttggctgtgtaccgggcctcgggcacctaccggggtgagggcaagaccgattgtgggcatgatgcttttgtcatcgctgaccaggcccgtgttcgtcgggacattggcctgctgcgaccaggcgacgagatcgccgtggacctgcgcaccttgaccacccgtcgcctggacgtggtcttcgaccgcacccggcagatcaaccgtctgcgcgcccagttgctggagatcttccccgccttggaacgtgcggtggagctgacgcgtaagggaccggtgctgttgctgaccggattccagacccccggcgcgatccgccgtgctggcgccaatcgcatcgagagctggctgcgtacccgcaaagtccggggagccgctgccctggccaaagtggcggtggaggctgcccaggctcagcacacaacgctgcccggccagaggttggcggccacgatggtggcgcgcctcgcgaagggggtgatgaatcttgatgaagagatcgccgaacttgattccctcatcgaggcacggtttcgtcagcatccacacgctgaagtgatccgcagcttgcccggcatgggtaccaacctggctgcggagttcctggccgccaccggcggtgacatgactaccttcgacagcgtcgatcgcttggccggtttcgccggcctggcgcccaggccccgcgactccggccgcgtcagcggcaacctgcaccgccccaggcgatatcaccggggactgctgcgcagtatgtatctgtcgtccatggtcagcctgcaatgctgcgcggcgtcgaaggcatattaccagcgcaaacgacatgaaggtaaggggcacaagcaagcactgctcgcgctggcacgccgcagactcaacgttctgtgggcgatgatccgtgacgggaagtgctaccacgcttcacctcccgtcactgcggtggcttgacatcctgattgggaa

SEQ ID NO: 3156 - DNA, 1320 bp, unidentified
  source 1..1320: mol_type = unassigned DNA; note = element_4951cf5
  misc_feature 1: note = core
  misc_feature 2..72: note = LE
  misc_feature 73..1089: note = CDS
  misc_feature 1090..1320: note = RE
  misc_feature 1091..1314: note = bridgeRNA
taataagatggtacgccccacccacacgctaaacttaacactgtttggctcagttgaataaaggtgaccatcatgactacgattcgcgttattggtatcgatttgggaaagaacacatttcttcttatcggccatgattactcaggtagagaagtgttcagaaagaagcttaacagacaaaagctgcttcaattattatcagttcatgaacctgttattgttgctatggaagcttgtggtggtgctcattggctggcgaggcggtgtgagtcttatggacatcaagtcaaattgattcctgctcagtatgttaaaccttacgtaaaaacaaacaaaaatgacttcattgacgctgatgcaattgcggaagcatcgatgcgcccaaatatgcgttttgtctctccaaaaagtgaattagctcaaatatgtacagtcatccgaaaaatcagagcaggttatctcaaggaaagaacagcatgcatgaataggattggttcaattcttctagagtttgggataaattttccgagagggcaccacaacatgaagaatctatttcagtatttggctgataataaagaacccgttccaccaatgttaattttggagcttagagaacaattagatcattataatcaattgaatacatggattaaagagcaggaaaagaaattagaaaacttgctgaaagacgatgaattgttaactcttttacaaagtgtcccaggaattgggccaatgacagcctcttgttgcttgtcaactgtagggaaccctaccgatttttctaatggtcgtaactttgctgcttggattggtttaacgccacatcaatattctactggtggcaaatcaagaatgctcggaatatcgaagcgaggaaataaggagctaagagaactatttgttcatgctgctagggctgttatctggagagatgggacggctgagcgttattttggctcttggcttattgacctgaagcgacggaaaccattcaatgttgcccttgttgctttagcaaacaaattggctcgtatagcatggtcagtaatggtgacacataaaacttttgaaataagaatttaaatcagatttgcagatgatatatgaagatgacaaaacggttagaccaccagattgaagacctgatggacagaacagcaacatagaatgctttcacgcttttgaggacaatctggcgcggatctcatcgtagagctgggactaatgcaagtctcaaacagactctgaatacattagcgcaaaccaactccgttatttttgatttatcacttgcaaaacggggcgtaccataca

SEQ ID NO: 3157 - DNA, 1358 bp, unidentified
  source 1..1358: mol_type = unassigned DNA; note = element_495a39b
  misc_feature 1..2: note = core
  misc_feature 3..76: note = LE
  misc_feature 77..1105: note = CDS
  misc_feature 1106..1358: note = RE
  misc_feature 1109..1347: note = bridgeRNA
ttatggatggcccgcccctcaccgggcttcactgctaggtttgcagtgtggctcacaccagggatggagcggaccgatggccattgcgatactcgggatcgatctgggcaagaacagctgcagcctcgtcgggcaggatgcgaccggtcgggtcgtcctgcgacgccggatgcggcgcgagacggtgatgacctttggcgcgacgcttccggcctgcagcatcgccatggaggcgtgctgtggcgcgcatcacatgggccgggcgctagccgctcaaggccacaccatccggttgatgtcgccggaatacgtgcggccctacgtcaaggcacagaagaacgacgaccgcgacgccgaggcgatcgcagaggctgcgactcgtccgaccatgcggttggtcgcgctaaagtcggaagcgcagctcgacatgcagaccctgcaccgggtgcgcgaccagatcgttagcgagcgcaccgccctgatgaaccagatccgagccgtcgttctggagcgcggtcacatcgtcccgcagggtcgcgccaagctcgcagccagcttggaaagtctgctcgataccgaggcggtctcagacctcacgccacggatgcgtagtctggtggcggacgtgcgtgaacgctggcagtccctcgacgggcgcattgcagcactcgacgcagagttcaccgaacaggctcggaccgatgagagcgctcgccggctcaccaccatcccgggcatcggcgcactcaacgcgacggcgctggtcgcggctatcggtgacgtggccaccttcgcccgcgggcgtgatctggcggcctggctcggcctcgtgccgcggcaggtcacgaccggcggacggcccaaacttgtcggcatcaccaagcgcggcagcaagtacctgcgcaagatgctgatccagggtgcacgggccgcgatgccgacccttcgcaaaagcgatacgcggatcggccaattgctccggggcctgctggcgcgggcgcacgccaacggcgccgtcgttgcgctggcggctaaaatggcccggaccgtcttggcgctgctgcgccacgaacgcgtctatgagccggcggcggtggctgcctgaaccgagcttggtcggcgaagccttcgtcggccttccgatgtctgcgagcggtgagaggaagatggcctgacagtcgatcggtattctgaaagcctccggcggaaaatggcgctcgacgccgacccctttatgaggaccaggacgcgcggatctccatctcggccaacggcatcgccggaaggccggatacggttatgcagactgctcagaccagcggatccaaagccacttgcggacggggcgggccatacgt

SEQ ID NO: 3158 - DNA, 1556 bp, unidentified
  source 1..1556: mol_type = unassigned DNA; note = element_495b4cf
  misc_feature 1: note = core
  misc_feature 2..314: note = LE
  misc_feature 315..1541: note = CDS
  misc_feature 1542..1556: note = RE
  misc_feature 25..261: note = bridgeRNA
ccccccgttagcttctaaggacaccgtttctccggcaggatgaggggtgttggccggtccggtctctgggcatgatcgtttgcccccagtcaccccatgatccggggggtgttgtcacccagggactggtcgcggcggagcatggatcgctgatagaggcacgacaccccaacgttggatgaaggcgttgagggcttgttttctaacgtggatgccgagcatgacccgcccaccgactctttggactggatgactgactgccacaggcgtcgtgcccgcggtggtgacgagatccgcaacgatgggagcccgccatggcttttgatctgcgcagtttcgccctcttcatcggcctcgacgtgggtaaatcggaacatcacgccacggccctgacccgtgacggggagaaggtctacgacaaacctctgcccaacgacgagactcggcttagggaactcttcgccgggctgaccggtgagcatggcgcagcgctggtgatcgtggatcaaccagccacgatcggagccctgcccgtggcagtcgcccaagccgtgcctggcattgagatcgcctacctgccggggctcacgatgcgcaggatggcggatctgcacgccggatcagccaagaccgatgcccgcgacgcgttcatcattgccgagaccgctcgcacgatgcccgccgcgctgcgttcgatcgcggtctcagatgaacaggtcgctgaactcgccgtgctggctgggttcgatgatgacctgctgggccagatgaccgcggccaggaaccggctgcgcggactgctcactcagatccatcccgccctggaacgagcaatgggaccgcatctgcatcaggtaggggtcctcgacgcgttggtcacctggccgaccccgcaacgactcaagagcgcggggcggggtcatgtgcgcaatcggatcaagaagcacaacccacgattggccgagcgggtcactgaggagatcttctcggctctggaggcccagaccgtggtggtcgccggcaccggggcggccgcgacgatcgtgccgatcctggcgagtcagctacaagacctgacccggcagcgggccggggttctggcccaggtcgaggctcttgtggaggcccaccctctttaccgggtcctgacttcgatgcccggaatcggggtcaggaccgctgccaggatcctcaccaaagtcgtgggcaaggacttcaaaacggcaggccatctggcctcctacgccgggattgcgcccacgaccaggcgttccgggacttccattcgtggggagttcgccaaccgcggcgggaacaagcggctgaaatcgagtctctacaactcagcgttcgcggccctgcaccacccgccctcgagggcctactacgaccggaaggtcgccgaaggaaagcggcacaagcaggccatcatcgcgctggcgcggcgccgtttggacacgctctatgcgatgctgcgcgacgggactctctaccaagacccagccgccccgatcgcatcagaacactccctggcggcttgactaaaaccatagagg

SEQ ID NO: 3159 - DNA, 1292 bp, unidentified
  source 1..1292: mol_type = unassigned DNA; note = element_495e699
  misc_feature 1: note = core
  misc_feature 2..211: note = LE
  misc_feature 212..1180: note = CDS
  misc_feature 1181..1292: note = RE
  misc_feature 34..202: note = bridgeRNA
tcttaagtttgatttttattaaattgatataataaacagaaagaataaaagagagaattaaggttaatttatacggtgaagcttttgacttcgacaacattgataatcctctctcttttctactaaaaatcacgttcagttctgtgagacctagatctcgatttcaagttgttgtgatgccagtagtttattctttcataaatcatttcttatgaataaatatagcgaaactattggaatagacattagtaaagatgtttttgattgttatggcagtgttcaaggacacttacaatttaaaaacacagaagaaggattccataattttctaaaaacgcttacaaagaatagtatagtcgttatggaggctactggctattatcattacagattagcacaatttctatacaaaaaaaacatagtagtatctgttgtaaatccattatctattaaacgatttatacaaatgaaactagccaaagtaaaaacagataaaagcgatgccaaggcaatttgcaactatgctttaattaatgaagttcctatttacagtgcattgacagatattcaaagcgaatgtttgcaattgtttagattattagatgcctatttaaaacagcgtacagcaaccaagaataagatacatggagaagtagtgttaggtatgccatctaagtttgtgtatcgttccttagtacgtaataaaaagcaattagataaagaagtaaaggcaattgaattaaagctgctgtccttggtaaaagaagaccaacaaaagcagttaaccttattgatgtctataccaggaataggccaaaagaccgctttatttttaatagttgtgaccgatggtttttctaagtttgaaaatgcatctcagctttgtagttacgtaggtataacgcctacaataagggagtctggaagcagtgtaagaggtagggcgcgaataagtaaggttggtaatagaaatcttcgtaatcttttgtttctgtgctcttttaatgcctgtaaacacaacaaggcctgtaaggctatttatgaccgcatagttgctaaaggaaaaagtaagaaactagcattaatagctgttgctaataagttacttaagcagtcttttgctattgcaaaatctggaaggccgtatgatgaaacttacgtttctatactgcctagataaatataaaataaatacaataaaaaagctcaaagaaccagttttagaatctatgagcttactataataatgcctcaaattaaagaagaatttgtttgctttttacctcagttct

SEQ ID NO: 3160 - DNA, 1237 bp, unidentified
  source 1..1237: mol_type = unassigned DNA; note = element_495fa0b
  misc_feature 1..3: note = core
  misc_feature 4..234: note = LE
  misc_feature 235..1215: note = CDS
  misc_feature 1216..1237: note = RE
  misc_feature 20..209: note = bridgeRNA
gctattagttttacattttatatttacaagaagtttaaccttattaaatttctgaaaaaccagagggcaaggtgaactatttcggcttttgaaattcaagtttcatcctgagcattagtccttaccctcttttaggttttggtaccatttagaatgtaaagcttaaaggcttattaatagcgttagtacacagacctattggttcttcaggtttttaatagctaattcaaagttatgaaaaatttagtaacaggaatcgacatctctaaagacactctagattattgctctttagggaataatgatgtacaagtgaaaaatagaggagttttagaaaatcatcgtaaagctatcaataaatggcttgacgattttgataaaaccaataccgtttttgctttggagcacacaggacattatggtgcagctttaatagactgtttgagtcagaaaaaatatgctttttatcttataaatcccttagaacttaaaaaatctctaggtattcagagaggtaaaagtgatataaaggacgcttatcgtattgcagaatatgctattacaaataagcacaagttaaatccataccatttacctgcagaaaacttaggtagacttaaagcgctaatcacagcacgggaacgttacgttaaaatgtccgttcaagttcaaaatagtttaaaggccaatgagatattaaaccgaaccatagatgtgaagatgttaattagagaagagaaaaaacaatataaatctctacaaaagagtataaaaaatatagaggatgagatgcaaaaaatcattaaagctgaccaagagttgaaaagtagctataaaaaagtgacagcggtaatcggagtaggtccggtaatcgcaataaagtgcatcacagaaacagctaatttcaccaaatttcacaatccacgtaaatttagttgtcactgcggcttagctccttttccatatcagtcgggaagtagtataaggggtaagacaagaactcattttttaagagataagtcattaaaagcaattttaataaaaggagctgttaccgctgtccagcacgatcctcaattgaaaacttattataaccgtaaagtaaaagatggaaaacatcatatgagcgtaattaatgctgtagctaataaacttgtattaagaatatttgcagtagccaaaagagaggaaccttttgtaaaattatctgcttaaaagtttgtttttaacttagaat

SEQ ID NO: 3161 - DNA, 1306 bp, unidentified
  source 1..1306: mol_type = unassigned DNA; note = element_496304f
  misc_feature 1: note = core
  misc_feature 2..266: note = LE
  misc_feature 267..1259: note = CDS
  misc_feature 1260..1306: note = RE
  misc_feature 54..250: note = bridgeRNA
cctttggttaaataatgtaatgatcttaagattattgtcattgttgaaatggggggtctggggggtgttaaaaactaaaaactttgtggaaaacgttaatataaaaggcagggttgaactaatcggccctctagttttggagaactttacagagtattagtcccctgccttttatgattgcccaaggcccagctagaatactttctttgacgcatcaaaggtgattggcaaaaggcaatttattaagatactttaaatacaaacgtatgaaaatctggaatgttattttaggtgtcgatgtatcaaagttaacactcgacatttgctgtgcagagcgtaacctgcacatcaaaattgacaattgctcaaagggattcaatgatttaaaaaaatggtgcaaaaccaacgagatcgatttaaaggaaaccttaatggtactggagtttacgggcgggtatgaataccggttccttcaattttgcgagtcattatccattccctattgcaggatacccggcctggagatcaaaaagtccctgggcatgaccagaggaaagagcgaccggatagatgctttccgtatcgggcagtatggggaagaaaaggccaaacgcctgataccttcaaagccactggataagaatatcttaacgcttaaacagctgctatcctttcgtaaaaggctggtccgggaaaaggcgggactggaaagcaccataaaagaacgagagcatatgtatccccaaaagaaagcagatacgatcacccgtattgccagggcaaaagtaaaatcggatgcgcaacatatcctacagatcgagcaggagatcatagcagtaataaaaagcaatgaggccatgtggcaaaactaccggataataaccagcattaaggggataggaaagataaacggatggatgacgatagcgcataccgagaacttcaccagctttacagatccgcgaaaatacggtgtttatgttggcgtgatccccttcgagcatacctcaggaacgagtgttaaagcgcgaaaaagagttagccatttagcccataaagagttaaaacaggagttaaatcaagcagccaaagcagctataacacatgaccgggagatggcagcttatgcagaacggaaactaaaaagcaaagaataccggctggtattgaacaatgtgaaattcaagttgatcttaaggatgttttctttggtgaaaagaggtgaaacgtatgtggagaattataatagagcagcatagaaaaaagcttttgcaaataaattttgaaatatgataaacctagaata

SEQ ID NO: 3162 - DNA, 1431 bp, unidentified
  source 1..1431: mol_type = unassigned DNA; note = element_49645bc
  misc_feature 1..2: note = core
  misc_feature 3..131: note = LE
  misc_feature 132..1160: note = CDS
  misc_feature 1161..1431: note = RE
  misc_feature 1192..1430: note = bridgeRNA
gaatggaatgaacggcccccgccaacgatgaggatatgcaggatgtaggtccttgcatacgggcccacggaatcgagttgccaaggctggaggatcataaggatcttcccaggcaaaccggaggggccatcatgaagcatacgatcgtaggtgtggatatcgcgaagaatgtgatgcaggttcactgggtcgacgcggacagcggcgagatcgtgaacaaacccatcaaaagagcggtatttctcgagtattttgtcaatcgtcctccctgtctggtcggcatggaatcctgtggaggatcccagcattgggccagacggttgatcgaaatgggtcatcaggtgaagctgatgccagcgaagttcgtcaaggccttcgttaccggaaacaagaacgatgccgcggacgcaagggcaatctggatggccacgcagatgcccagcaaggaagtggccgtgaaaaccgaagcgcagcaggcggttctggcgttgcaccggatgcggcaacaactggtgaagtttcgcacgatgcagatcaacagcctgcgcgggctgctgaccgaatacggtgaggtaatgggcacaggtcgtgccgcgctggaccgggctatcgcaggggtgctggagaggttatccggacgtctgccggcgatactgattgatacgcttcgcgaacagtggaatggcctggaggcactggaccagcagattgcccagatcgagcgccgcttgcaggcatggatgaaacaggatgacgcaagcaaggcgatagcagcaataccaggcgtaggtcttctgtctgcaacagctgccgtagcgacgatgggacacgcgaagtcgttcaggtctggccgcgagttcgcagcgtggctcggtctggtacccgggcaaaccggttccggcggcaaggtggagttattgggaataagcaaacgcggcgatagatatttgaggacgctgctcattcatggcgctcgcagcgtgatattccacgcgaaagacgccggcgcgtggcttgaacagttgaaaaaacgtcgacctctgaacgtggtagtcgtggcgctcgctaacaagatggcccgaacgatctgggcgatgctggcacatcaaagaccgtatcagaaagactacgggagcgttccaccagccccggccagataatcttccacggcagacagcatcagtgcatggaaagtaatatcaaggttgcgttggcattcgagtgtgatgacgatacaggtcggaccgggactcaccaagcctgaaaacttgtcagagactaacgatctcgcggtgcgaatgaggcgtgagtcagcgaatttcataggggcccgcagcgaaacaggctgcaaaacaggccgaatgtagagctgcaacccaccctgttcatcaaaacacacgaacacctggcgcaaagggggccgttcatgta

SEQ ID NO: 3163 - DNA, 1239 bp, unidentified
  source 1..1239: mol_type = unassigned DNA; note = element_4974031
  misc_feature 1..3: note = core
  misc_feature 4..236: note = LE
  misc_feature 237..1217: note = CDS
  misc_feature 1218..1239: note = RE
  misc_feature 21..210: note = bridgeRNA
gctattagttttgcattattatatttactggaagtttaatcgtattaaatttctgaaaaaccagaaggaaaaggtgaactatttcgactcttaaattatcaggcttatgctgagcatcagtccttttccttctcaggtttttggtaccatttagaatgtaaagcttcaaggcttattaatagcgttagtacacaaacctatggttcttcagttctttaatatctaaaaacaaagttatgaaaaaacaagttatcggtatcgacatttcaaaagacaaactggatttttgtgtattggataagcaatctgtgcaggtgctgtctaagggggaggtgcaaaacaatgagaaagccatcaaaaagtggttgggtcagtttgaacagtccacttccactttcgcattagaacacacagggcattatggagccgccttgtgcaaaagtttggcggatcaaagttttatcttttatttgatcaatccattggagctcaaaaagtcactggggatccaaagggggaagagcgatgcgaaagatgcgtaccgtattgcagaatatggtattactaacaaacataaactaaaaccctatcagtttcccgcagaaagcctaagccgcctaaaggcgcttatgacagccagggaacggtacgtcaagatgtcggtgcaagtgcaaaacagcctgaaagctaacgagatcctgaacaaaaccattgatgttaaagtgctgataaaagaagaaaagaaacaagaccagtccatcaaaaaaagcattaaggcaattgagaatgaaatgcaaaaaatcattaaatcagaccaggagctggaagaaagttaccgaaaagctacttcggtcatcggaataggacctattattgccctaaaatgtattgttgaaaccgagaatttcagcaagttctctgagccaagaaaattctgctgccattgtgggttggctccttttccctaccagtcgggaagcagcataaaaggaaaaacaaaaactcatttcttaagggataaatcactcaaagcggtcttaaccaagggggcgataactgctatccaacatgatccccaaataaaagcttattatcatcgaaaaataggggaaggaaaacatcatatgagcgtcataaatgcagtggccaacaaattagtgctaagaatttttgctgtggctaaaagagaaacactttttgtaaaattatctgcataattatttgtttttgtcttagaat

SEQ ID NO: 3164 - DNA, 1228 bp, unidentified
  source 1..1228: mol_type = unassigned DNA; note = element_498717b
  misc_feature 1..2: note = core
  misc_feature 3..241: note = LE
  misc_feature 242..1213: note = CDS
  misc_feature 1214..1228: note = RE
  misc_feature 6..213: note = bridgeRNA
cttgtatctcgacaatcactcagttactgggtgattgtatccgacagatcatcggaagcagggtcagaaagacgagcccaccctcaggccttgagtctgtgacgtagatagttcttcgaccctgcgcactcactcgtgaagttcgaacggtatcttgagccagctttgcgcgagagctcgcattgacaaggttgaacagagtgtcgtgatgatcaaacggatcaacttgaggagatcgaccatgtccagcgtagttggtatcgacattgccaaaggcagctttgatattgccacccttcagatcaacgacaagtaccgcaccaaagcccgtctgccgaataatcccaaggggtttgatgccctgcaggcatggctgggcaaacatgccacggccgatgcctggctggtgatggaggcaaccggtatttatcacctggcgttggctgaacacatgtacaacctgggctatcaggttgcagtgatcaaccctgcgtgcatttccagctatgccaagagccagttgcagcgggtcaaaaccgacaaggtcgatgccaaattgatcgcactttatggccagcgccataaagatgagcttgtcgcctggcagcccgaaccccttgcgcagcgccgcctgcgtgccttggtacggcgtctggaagacctcaaggggcttgagcagatggagcaaaatcgattggatgtctctgatgccagcgtgcaaggctctatccgctcggtcatccagcatttggagcaagagattacggcgaccctgaaagccatcaaagaacatattgatgatgatcctgacttgcgtggccagcgtgaactgctggtcagcattgacgggatcagcgataaaactgcagcgttgataatggccgagctggcgaatccgttacgcttcaagagctcccgcgccgttgtcgcattcgccgggctgaaccctcgactgcaagagtccggcaagcacaaagggcatgtgcgtatatcgcgcacggggtccgcaagtctacgtgcaggtttgtacatgccggcactcgtggccatgacgcacaatccggcagtaaaagccctgagtgagcggctaaaagccaaaggcaagccgggtaaacagatcgtctgcgcagcgatgcgtaaacttctacacattgcttacggcgtattgaagtcaggcaagccttttgatgctcaactggctattgcgcactgaccggcaagacggtat

SEQ ID NO: 3165 - DNA, 1406 bp, unidentified
  source 1..1406: mol_type = unassigned DNA; note = element_49a1689
  misc_feature 1: note = core
  misc_feature 2..80: note = LE
  misc_feature 81..1118: note = CDS
  misc_feature 1119..1406: note = RE
  misc_feature 1173..1401: note = bridgeRNA
taatggaatggacgccccctctcctgcggtgcggatatgccaaagtaagggtctcaagcgttagcgcgaaggagagcatcatgaagatcgcggccattggccttgaccttgccaagaacgtttttcaggtccacggcgtcgacccgcgcggcgtccccgtattaaggaagcagctaaaacgcattcaggtgctgccattcttcgccacgctggaaccctgtctagtgggcatggaagcctgttgcggtgcacacttctgggcgagaaagctgcaagcttatgggcatacggtcaagctcattgcgccacagttcgtcaaaccttacgtgaagagcaacaagaatgatgccgcggatgcagaggcaatctgtgaagccgtctcgcgaccgaacatgcggttcgtacccgtcaaaagcatcgagcagcaggcgatccttgcactgcaccgggtccggcagggatttgttaccgcgcgtaccgcccacgcaaaccagatccgcagtctgctcgcagaatacggtctggttgtgccgcagggcattcatcatttgcatcaggatgtccctgatcttctggaagacgtcagtaacgaactgccgggcgtattccggcaactggtcatgcatcagctcgactatctgcgggagctggaccggcaggtgcaactgctcgaagcgcaaataaagacctggcatcgggagaacgaagcaagccgcagacttgcgcagattccaggcatcggacccatcaccgctactgcgctcgtcgcatcagtgggcgacgcgcgatgctttgcaagcggccggcaactagcggcatggatcggtctggtgccgcgccagcactcaagtggcggcaaacaggtgctgctcggtatcggcaaacgtggggacgcttatctgcgatgcctgcttgtccacggtgcacgggccgtgattagcgccgtacgccaaaaagccgacacctccacaagctggctaggtcgtctgcttgcacggcgacacacgaacatcgcaaccgtggcacttgccaaccgcaatgcgcgcatcgcctgggccttacttgcacatcaccgggagttctgctccgactatgggcgcgcagcacctgtcgtctgacacatggacacggagattaactgatacaggataactaactaatggataggcggtagcttccagcgattgcgcgggcaatcatgacgtgatggcaaaacaggtgagaccgggatcgggaaaattctgtggtctgccacgcgcttcgagcgcgaagggttaacgagaaaccgatctgcgcattccatcagggacagaggcaagtcctcacaagtccggatgtatggctgcaatcctttatctgctaacgatcaccgaatgacggctgtgcaaactgtgggcgtccatgta

SEQ ID NO: 3166 - DNA, 1655 bp, unidentified
  source 1..1655: mol_type = unassigned DNA; note = element_49a63cd
  misc_feature 1: note = core
  misc_feature 2..272: note = LE
  misc_feature 273..1523: note = CDS
  misc_feature 1524..1655: note = RE
  misc_feature 13..292: note = bridgeRNA
cctgttactataaatttgccccttgatatatggcagccagccataggcatgggacatctcgttgcctaagctgttagaatgaagaggtaatggtctgacctttgcctccaagggctttcacgtccgtgagaaagtcagtcagccatcctctcattcgcagcgttcgatttgtgcaggtagagcctgagcgttcgcgtcatcaaacagatggaatcggcaatgggaaaaggatggcatttgtccattgcaaattctaaacgggagtgattcttatgaacgcagcaggtattgatgtttccagcagaaaaagtacggtggccgtgctccgtccgtttggcgaggttgtaaaggttccgtttgaggtgggccacagcgccgaagcactgcttgatcttgcccggcagctcaagacgcttgacggcgagacgcgggtcgtcatggagcacaccggccgctactacgagccggtggccaatgtgctgcacgaagcaggcctgtacgtcagcgcggtcaatccgctgctcatccgggagtacggcggcaattctctgcgcagggtcaagaccgataaggcagacgctgtgaagattgcccgctatgcccttgacaactgggcggatctgcgggattatactcccatggatacgattcgttatgacctgaaaacgctgaaccgccagtttcagctggccagtaagcagaaaaccgcaaccgccaacaacctgatcgccctacaggaacagtccttccccggcatccgcaaatgctttgacagcccggtccgcagggacggtacgcagaagtgggtggatttcacctacgccttttggcacgtggactgcgtccgcagacacagcctgaacgccttttccgagcgttaccggaaatggtgcaaacggcacggctacattttcaagcaaagcaacgctgaagaagtttacaccctcgccaagtctgccgtggtgctggtgtcgtcgtccgaaaccacgaagctgctggtgcaggaggctgcgaaccaactgaccagtatctctcgttctgtggagacctaccgcgccgagatgaaccgtctggcttccctgctgccggaatacccagtcgtcatggaactatacggcgtaggcgagtctctggggcctcagctgatggcagagattggcgatgtgcgccgctttgagcagaagaagtctctgatcgcgtttgccggtgttgaccctatgccgaaccagtccggcgacaagaatgtgcgcagcaaccgttcctcgaaacgcggctcgccgtatcttcgcaagacgctgttcaacatcatgggaatctatctcagatgctcgccagccgaggagcctgtgtaccagttccttgaccgcaagcgagccgagggcaagcccttctatgtctacatgacagccggtgcgaacaagttcctgcggcggtactacgcaaaggtgagagattacctcgccaccttggacgatctaccgccggtagatatggattccaccggtctaaaccagaccaactgacagccaaacaccccgacattgcaggccagcggtttcacggtggcctttttgtcttgcccttttgcagttacctgccgcctgcaaaattttctttcgtcaagtccaatttgggcttgactttttatttgcagg

SEQ ID NO: 3167 - DNA, 1388 bp, unidentified
  source 1..1388: mol_type = unassigned DNA; note = element_49b0ef7
  misc_feature 1..3: note = core
  misc_feature 4..88: note = LE
  misc_feature 89..1117: note = CDS
  misc_feature 1118..1388: note = RE
  misc_feature 1088..1375: note = bridgeRNA
agatggagtggttgccgccctccccagacggcatcgcaatgtgccaaggtcgtggtgttaacagccacacaacgaggaggacagcgagatgaaggatacgatgatcggggtcgatctggcaaagaatgttttccaggtccacggtgccctgcggaccggggaggtgcagtttcgtaaaaagctgacgcgtaagcagttccctgtattcatggcccagcaggagccttgcacggtcattcttgaggcttgctgcggcgcgcactattgggcgcgccagatggaagcgcttggccacgaggtaaaactgatcgcgccacaatacacgcgcccgttcgtcaagcgtcagaagaatgatgctgctgacgcagaggcaatcgtgatagcggcccgccagcccgagatgcgcttcgtggcacctaagactgtcgagcagcagtcccgcgcggcggtgtttcgcggccgggagcgactagtccatcagcgcaccgcggatgtgaacgcgttgcgggcgcttctgcatgaacatggccacgtgtttccaatcggaacacgctacctcgatcgcatgagggcgctcgtggaggatgaagcttcagacttgccagcgctgatccgggaggaatgccaggacatgctggttcagattgcagagaaaacggcgcgcatcaccgaacgcaccacgaaactcaaggtcctggccgcccggtcggacagggcacgtcggcttcagaccatgccgggtgtcggaccgctgacggccgtcgcggtggaagcgttcgggcctgacatggcggcgttcaagaccgggcgcgacttcgcggcttggctgggcctggtgcccaggcagcattcctctgggggtaaggaacgtttggggcgcatgaccaaggcaggtcaggccgatatccgacgtctcctgatcgttggcgcgatgtcgcgactgaactggcttgggcagcgcacgatcacggagggcagctggctgtcgcgcatgttggcgcgcaaacccaagatgctggtcgcgatcgcgctggccaacaaaatggcccgccagatatgggcgatgctgacaaagaacgaagattacaaggatccggcgctggcaggcgcgacatgatgctcgtgtcatactgctagcaacggtgccaaggggagtgtgagaaggcggcgacctgaatgggcaaaacgatcgaacagatccggatcaggaaaaccagtgtttctctacgagcataaagctcggtaggtagatttggacccgatccgctgatcatcatcccggcccgcggcttctggaaatgccgcacaccgaggcctgacagaagttcgcactcgatcacacgccaatagggtcaaaaacttcttgcactacgggcggcaaccacaga

SEQ ID NO: 3168 - DNA, 1675 bp, unidentified
  source 1..1675: mol_type = unassigned DNA; note = element_49b3089
  misc_feature 1..3: note = core
  misc_feature 4..259: note = LE
  misc_feature 260..1492: note = CDS
  misc_feature 1493..1675: note = RE
  misc_feature 11..221: note = bridgeRNA
aaacatactaacctaagtattgggttgaagttcgacggaactttaatcaaatactttatttttatctaaaataaaggtgaagataaagcataaagtcatatctaatttaaggcaaaaaatgtcgttttagaaacaggctgctttaccgactatttagaagtctcttcgaagtatgcaggcacttgatgccgggtttagaaaataagaattaaatagttcgataaggtattttatctttaaaactttgggaggttcaatcatggaaaattgtaaagtgattgttggcattgatgttagcagtaaggactctactgtctgcgttctaatggataaagttaggcagggtaagacatttaaaataagcaatgacatggtcggcttccagcagctttataaaagattacgtctttactctgtcattcctttgatagtctttgaatcaacaggagtatattctttgagcttgcaggcttttttagagaagaagcatattcaatatctaaagcttaatcctttgaaagctaaaaagctgatggataataaccttcgtcataataagaccgatcaagttgacgcttatcgtctagctctgatacagtttaatgctccacagaagctacttaagcctcagtctcgggcataccatgaaatgcaaaatgcaagcagatactatgaagaattgaataaagctatggttgttgccaagaatcagcttcatcgtaatctgcagacaactttcccacaaattgaaaatctcatgtgtcatcctacaggtaaaatttattggtcagtagttgccttatttccgcatgcacaagctgttttagatagtaacaaggaacatattttgggcgaattagaaactatatcgggattaagccagaaaaaagccgaataccttacgcaccgcttaatctctttggctcgattaacttgtgcctatgacaataaggatagtattgttatccgtgctattcaaagaaatattgccagtcttttttctcttgatcaggagaaaaaggaagtactggcctacctgtataaattagctagtaaaaatcaggctgatacccgtatattaaccatttatcaaagcattcctggtattgccaaaacaacagccttaagattattggctgaattaggtgatttaagacgatttgacagtcctaaccaaattgatgcttttatcggcattgatcctggcatctatcagtctggtgaattagacagtcatttaagtattaccaaacacggcaattcaattgccagaaagatcatgtatttaagtatcggtcaaatggaatcagtaaagactacccagccctgtcatattactgactattatgatagaaaaaaatcttctcaaagccgcggcttcaagaagattgccattgcatcagtacataaactaattcgaaccatgtatgcactggttacaaagaatcaattatatgattacaacgtagccactaggaatcaaagactttagttgaaatcaaataatcactttcagtataacaacctatgaaaaaactacaagaattcataggcttctttgtgttacctaataaatatgcactaaacttttatttaatcttttcagctttattcgcaccattatttttaagaaaatatctaaattaaacgttgataatacttgaattaaagtaga

SEQ ID NO: 3169 - DNA, 1335 bp, unidentified
  source 1..1335: mol_type = unassigned DNA; note = element_49ba79d
  misc_feature 1..2: note = core
  misc_feature 3..81: note = LE
  misc_feature 82..1086: note = CDS
  misc_feature 1087..1335: note = RE
  misc_feature 1094..1331: note = bridgeRNA
ttaatgagatggtcagcccgggtcgagaccccagtaagtctaggcttacgggggtctcactttaccgaaggaggatctctcatgaacaccgtatcgctgctgggtatcgacatcggcaagaatacttttcacctgcatggccaggacgccagaggaaatcagatcttgcgcaagaaactcaatcgcagccaattgctgccttatctggcgcagttgccgaactgcaaagttgccatggagtcctgcggcggttcgcagtggctagccaggcagatcgaaggcttgggacaccgcgtgcagttaattgcagcgcagcatgtgaaggcctacgtcactggcaacaagaatgactatatcgatgcagaggccatctgcgacgctgcgtcacgccccagaacccgctcggttccggtaaagaccctggagcagcagatcctgtcgactgagcacaagctacgcaagtcgtggatggataatcgcacgcgaatcatcaaccaggtacacggctttctactggagttcggcataattttccccgttgggcatgctgctctggaacaggtgcctgcgttgatggaacaccatgagctgccgattcgactgcggaatgccattgagcgaatgctgctcgatattcaacgcctgacgagagatatcaaagcgatcgatgtcgagatcaaacagcaattgtctgaggacgccgccggcatgcgcttgctgagcatccccggcatcggccctctcaccgtggccgacgtcggtgacgcttcgacttataaaagctcacgcgactttgccgcgtcactcggactggtgcctcgacagtactcaaccggaggcaagacgaacttgctaggcatcagtaagcgaggcgacaagtatctgcgttgcctgctggtgcaaggtgctcacgcattaatgatccgaatcgacaagcgtaacgattccctcggagcctgggtaagaaaccttttgtcgcgcaaacccgcgaacaaggttgcctgtgcgctagccaacaaaatggcaaggattgtctgggctgtactagcccgaggtggcagctacaacgtgcaacagatggtttgacctaaccgattgaccgccggcttttgcgacgacagtgatgatgacgataaacggcagacatcccgactgaaaacctgaagaccaagatagctgttttgcagctggtgcctttatcaaggacagtagggagcgacttctcatcaagggccgagcgctaataaccgtgctcaccatgagcccggatacattagcgcaagcacgttttaccgctcatcaaagctaggttgcaggaggtgggctgaccataca

SEQ ID NO: 3170 - DNA, 1357 bp, unidentified
  source 1..1357: mol_type = unassigned DNA; note = element_49beff1
  misc_feature 1: note = core
  misc_feature 2..7: note = LE
  misc_feature 8..1117: note = CDS
  misc_feature 1118..1357: note = RE
  misc_feature 1130..1351: note = bridgeRNA
taatgggatggtccgcctcgtcctcctgccgcagaatgcggcatttggacaggaggattgcctaatggcggaacgtaacaaaccaaaggaagctgccgtgttcggcgtcgatatcggcaagaatgtttttcacgtagtcgggatcgacgcatccggtgcgccgatccagcgagcgagctttcggcgggatacgctgctgcaatttttcgagcgcgcaaagccgacagtcgttggcatggaagcctgtcctggctcccaatggctggcgcgaaagattatggccttcggacacagggtccggatcgtccccgcgaggttcgtcaaaccttacgtcaagtcaaacaagaacgacatcatcgacgcagaagcaattgccgaggcagtctcgcggccaacaatgcgtttcgtcgaagtgcggtcaccggaacagattgatctccaggcgctgcatcgcgttcgtgaccggatggtggcccagcggacacgactcgtctgccaaatgcgcgccttttgcctggaatacggcattgcgatgcatcagggcgtcggcagattcaaggcagacctgccaaaggtcctggcgaatgaagagaacgatctcacgccagcgatgcgcagactgctcgcgagcttattcgaagatgtgcgacagctcgaagcgcgaatctctgagatatcgcgcgagattgaagctacagcggcggctgacgacaccgcccggcgtctaatgacgatcccgggcattggaccgctcgcggcgacggcgctgctcgcagcggcgggcaaaggcgcgcagtttaaaaaagctcgagatatggcggcttggctcgggctcacgccgcgcgaacactcaaccgggggcaagacgacattgctcgggatcagcaagcgaggaaacgcctatctgcgccggcttctgatccacggatcacggtcatgcctgctacacctggaccgatcgcgcgatcggcttggtggctggctcgagcggcttcagagccgaatgcacaacaacaaagcggtcgtggcgcttgccgccaaggtcgcacgcatcgcctgggtgatcatgacgacgcccggcgcaacctatgagaagcgcggtccggcagcagcctgattgcccttttcgacagactgcgaggttcgggagagtgatgacgaaacagttgatcggcacgccgtaagctctgggcaaaaaaccgggcttcgtgcccgcaccattattcgagaacggcgtgtgcgcatctcatcatggcctggctgcaacagcagctcgctcgcgagaggccggatacatttatgcagactggaacgtcagaacgaacgcgacccttgcacggacggggcggaccataca

SEQ ID NO: 3171 - DNA, 1195 bp, unidentified
  source 1..1195: mol_type = unassigned DNA; note = element_49bf852
  misc_feature 1..2: note = core
  misc_feature 3..189: note = LE
  misc_feature 190..1182: note = CDS
  misc_feature 1183..1195: note = RE
  misc_feature 9..198: note = bridgeRNA
cttgtgtcttgcggttcacggatcgctaccatggaccgcaccgggctcggggtaacccgatcgcatcctgaggtcacgaacctgtgccgtagatgggcccccgagtcctttttcatctcgaagtttgaacggtatccaagccccccgtaagggacgggtgaggctgtacggacaaggcgagaggacgagatggcccatatcggcattgatgtcagcaagaacaagctcgactgcatgtgggtccgggatctggaggcgggcaaggtcaagccgaaggtattcccgaaccgcccggaccagtacccggagttgctgcgctggctgcagcgcaacacgggtgaagcgcccgagacgcttcaggtgtatctggaagccaccggcatctatcacgaaccgctggcctactggctgcatgagcagggggttcgggtccatgtgctgaacccggcccaagtgcgcttccacgcccagggcatgggggtgcgcaacaagaccgaccgcaaggacagcatgatgctggcgcgttacggcatcgagcgcgcgccacggcgctggcagcccgagccgcccgaggtgcgggagctcaagcgcctgctcagccggctggaagcccttgaggaggacatccggcgcgaggagaatcgcctggagaaggcgcagttcagcgaggacaccctcgcccaggcgtcgatcgacaacgtgctgcaagccctgcgcgaggaacaccgtcggctacagcagcagatcgatgatcacttcgacgcgcatgatcatctcaagcgggatcgggccttgctggagagcatccccggcatcggccgggtgttgtcggcgtcgatggccgcgacgttgcgcagccgtgcgttcacgagtgctcggcaggcggcggcgttccatgggctggtaccggtcctgcaggagtccgggacctcggtccagcgacccccgcggctggcgaaggccggctcggggcggctgcgcaaaacgctctacatggccgctgtggtggccacccgctacaacccggacgtgcggcgccagtaccaccgcctcctgaggcggggcaaagccaagatggccgccatcggggcggccatgcgcaagctcctgcacatcgccttcggcgtcctcaagtcgcaaaccccgtatcaaccccgaaatgacacgccttgcacctcatagggcaagacggtat

SEQ ID NO: 3172 - DNA, 1371 bp, unidentified
  source 1..1371: mol_type = unassigned DNA; note = element_49cdbaa
  misc_feature 1..4: note = core
  misc_feature 5..78: note = LE
  misc_feature 79..1146: note = CDS
  misc_feature 1147..1371: note = RE
  misc_feature 1086..1360: note = bridgeRNA
atgatggggtggacgccccgccgacggcatcgatgtgccaaagtggaggtgttgagcaccactttaagggaggcgtccgtgtcagaggttagcataatcggtctggatatcgcgaagcatgtttttcacgctcacggagcggatgagcggggtcgagtaatattcagcaagcggatcggtcgaggaaagttgctggatttcttcgcagcccagccgagttgcacggtggcactggaggcgtgtggtggagcgcatcactgggcccgtcagctcacccagcttggccatgacgttcggctaatcccgcccgcttatgtaaaggcgtttgtgaagcggcaaaagaacgacgcgatcgatgccgaagcgatctgcgaggcggcacagcgccccagcatgcggttcgtggcggtgaaaagcgaagagcagcaagcggcgggtttggtgtttcggacccgagatctgttagtgcgacagcgaacccagctcatcaacgcgatccggggacatctcactgaatatggttggatcgctcccaagggaccgtcgcacgtggcgatgcttgccgacctgatcgaggaagacgagatggccaacgcgcttcccgaagcggcccacgccatgttccgattgatgttagacctgctcgcgggtcttaatggcaagatcgcagatctcgacaaggagatcgcgcgacgcgctcgcgaggacgaagtatcgcgcaggctgatgaccgttcccgggatcggcccaatctccgccaccgcgatcgccgctttagcaccgccggtcgagacctttgccaagggccgcgactttgccgcctggctaggtctcacgccccttcaaagatcgacaggcggcaagcagaagcttggtgcaacgtccaaaatgggcgagcgcacgctcaggcgcctcctcatcatcggcagcagcgccgtcgtgcaacaggcgagcaaacgcggcgcaccaaagggttcgtggctcgaacagatgttggctcgcaaaccgcgcatgctggtgacggtcgcgctcgccaacaagatggcacggatcgtctgggcgctacttgtaaaacaagagaattaccgagctccggtcgcagccaaggacgtgatcttggcggacttgaggtcgtcggaggtgtagtcggccgaaggagagtatggcgcaacagtcggtgagacggggccggaagaaccagatgtactcatcgtgcctggagcacgcatttatgatttggttccggtccgcgaactcccatacaggcccgcagctccatcgctgcacaatcagaggccggacagatggcagcatccgactacgtgccgatcttcttcaaaaatccgcttgcatctcgcggggcgtccacag

SEQ ID NO: 3173 - DNA, 1581 bp, unidentified
  source 1..1581: mol_type = unassigned DNA; note = element_49cf8cc
  misc_feature 1..2: note = core
  misc_feature 3..252: note = LE
  misc_feature 253..1422: note = CDS
  misc_feature 1423..1581: note = RE
  misc_feature 5..225: note = bridgeRNA
ctactattaaataagtcatagcctatctttaccttttctataggtttggctatgctgttaaagatgctgtggattggttcttttctcctaccgcttagacggtttaaacgaggctccaaccacagtctctttgtctcaatgttaatcagttagataccgcatgacggtttatgtagaagtaggttacatcgacagagagccctgtggatcttaacagcattacaccattaatcacacttaaggaggtaatctatgttctacgttggaatcgatgttgcaaaggataagcacgattgttgtatcctcagttcggatggtgaaatcctcttttcaccgttcacaatacccaatactctgtatggtttcgatgagctttatgagaaaataggctctcttacagatgatgtttccgaaataaaagtaggtctcgaagctaccggtcattatcatctcaatctcctgcgctcgctccttgataacggcctacccagctttgttatcaatccgttacatacaaatcttttcagaaaaggtcaaagccttagaaagacgaaaacggataaagtcgatgctgcttccattgcaatgatgttattaaccgataagacactcaagccctactcggaaacatcataccacaacgaggaactaaagtcgctaacaagatatcgatttgacaaggtacaggagcgttcacaactcaaagtatcggtctcacggctggtcagcgttcttttccctgaactcgagaagatggtgccaacgcttcacatgaattccatatacacgcttctttcagaattccccggagcatcatatattgctgatgcccatttaacacgcctaaaacaccttctttacgaagcatctaaaggtcattatggaagagatatggctatatccataagagatgttgcaacagcctctataggcactgctatgccatctaaatctatggagctcaggcacacgattcatctcatcgaagtaatttcgcaagagattgatgaaatcgaatccgctattaataccattatggaatccatcgggtctccaataaccactatccccggaataaaaaaccgtatgggagctatgataattgcagaaattggtgacttctcccgttttgattctgctgatcaaattcttgcatacgccggtctatcgccatcaacatatcaatccgggcaaatgacatcttcttactcaagaatggaaaaacgcggctcacgatatcttcgttatgccctgttcaatgccactcagtatgtctgcatctgggatccgtcattcaaagcatatctcgccaaaaaacgcaacgaaggcaagcattactatgttgccatatcacacgcctgtaagaagcttgtacgactcatttatcgaatgcagataaccggagaatcataccggggataacctatatcggcaaatagccaggcaaagcccgagcatccaataggatgttctattcgtcatgcagttttcaaggttctgattgcagcatataggttactgccacccaaaatatcaaaatgataactcaatacttatacttgactttctttaatagttagt

SEQ ID NO: 3174 - DNA, 1231 bp, unidentified
  source 1..1231: mol_type = unassigned DNA; note = element_49d1c3f
  misc_feature 1..2: note = core
  misc_feature 3..198: note = LE
  misc_feature 199..1149: note = CDS
  misc_feature 1150..1231: note = RE
  misc_feature 7..186: note = bridgeRNA
tcctttagatttgcatcataataaatagaggttgaaatattatctttgtagttaaaacaagttaaccaaggaaagcaggtgacctattgcgttatctaggcagaagtcctatacgcagaattagtcctgctttccttttcagttgaatcgtcccaattagaatttatcggcattgatgtatccaaaaaaacattggatgtggttatttatgactctgcaaagaaacatgcggacactgagaattacaaacagttatccaacagcaaggaaggatatgataccttactatcctggcttaaaaagaaaaaggcagcacttgaccagatcgttgttggtctggagcatacaggcacttacagttttgatttgcggctttatttggaaaaacaccagatcgattactgtacgtttaaccctttacatctgaaacgttcattaggtctggttcgtggcaaaaacgacaaggtggatgccgaacggattgcctattttacgtatcttcatcgggaagaacttacctattctaaactttcaggaagtaccgtacttcgtttgcaggacttgtcggctgagaggaagcgctttgtcacacagcaggctgaatataaggccttgttgactgacaacaaggaacgtcccagaacaagtactctgctacgcgctcaaaatatggtggatgtgttggaaggagaaattaaaactgtggaagaagaaatgattgcactggtcggaaaagatccggctattgcaaaaaattatgaattgctgaccggcataaagggtattggaagtgtcaatgccatttccaccctcatacacacaaataactttgaagcgtttgaaacggcaagacagtatgcctgttacttgggcattgccccctttgaacatacctcgggaacctcagtcaagggggccaccagagtttcccatataggggcaaaactcttgaaagcggacctttcgcaagctgcaaagtctgcaattgtatgggacaaggaattgaaagaatattatattcgtaagacaatgcagggaaaagcttttggagtggtattgaatgctgtgaagtttaaattgatatgtagaatgtttgcagttgtcaaaagaggaacgccgtttgtggagttgaatacatataaaagttaaacagtctgctacactagatagcaacccatttaacttatttaactgttttttcttgcacaaatatttgcgcaggtcttagaat

SEQ ID NO: 3175 - DNA, 1244 bp, unidentified
  source 1..1244: mol_type = unassigned DNA; note = element_49d2e83
  misc_feature 1..2: note = core
  misc_feature 3..213: note = LE
  misc_feature 214..1209: note = CDS
  misc_feature 1210..1244: note = RE
  misc_feature 3..198: note = bridgeRNA
cggcctttagatttacgttttaataattcttaatagttttaagaaaaaagaatggggtgaacttacctgccgactaggccttaatgcctactgcctgtattagtccccattctttccaagttgcacaagaaccatttagaatattagacttagaggtcttaataaaggtcttagtttaagcaactttagttattcaaacgtaaatataaaattatgaaatttttagaaacagccggcattgatgtatcaaaagatacaatcgatgctacacttcatgtaaaacagtgtaataaacagtttgacaacaacactactgggtttagatctttcattagatgggctcaaaaacaatctggattatctataaaccagatacaagtatgcttcgaacacaccggtttgtattcgttaaagttagctacgtttctttcaaacaatgaaattaagtttagtatggttccggctcttgaaatcaaaaaatcacttggtattgcaagaggcaaaaatgataaacttgatgccaggagaatcgcagaatatgcttatttacgcagagagaaattagccttctacaatgtaccttccatacacataataaaactgcaggccttaactactttgagagcacaaatggttaagaatagagctggataccagagttcattgataggattaaaaacattctttaagcaaaaagataacgagaagatctacaaaacaatacaatctgaaatatccggattaaacaaaaaagtcaaggaaatcgaaagtgaaatgcttcaagtgattagaagtgaggaatctttataccgtttgtttaatttaattacttctgttaaaggagtaggattaatcctggctgccaatttcctggtaataaccaactgttttacaaagtttgaaaccagcagacaatttgcttgttatagtggaatagctccttttgagaaacaatccggaaccagtttgaagtcaaaaagtaaggtaagtcattttgctaataaaagaatgaaagcattattaaatctggcagcttcttctgctatccaatgtgatccagagttaaaggcatactataatcatcgaatagaaactggtaagagcaggatgagtactttaaacattgtacggaataaaattgtttatagggtttttgctgttgtaaaaagaggaactccttatgttcctcttcatctacacgctgcttaatttatttttaaatatatttggttttgtcttagaat

SEQ ID NO: 3176 - DNA, 1999 bp, unidentified
  source 1..1999: mol_type = unassigned DNA; note = element_49e05c1
  misc_feature 1..2: note = core
  misc_feature 3..231: note = LE
  misc_feature 232..1425: note = CDS
  misc_feature 1426..1999: note = RE
  misc_feature 1..235: note = bridgeRNA
ccgttaccttcttcgtagtcccgcaccgcggggccacggtcgccaggttcggtatgactttcttcccctgtctctcgaatgatccggggggtggtgtcgccgagcctggtggcatcggtagaccgctgatagggacaaggccaccgggttcgaggtaggtctctttgtaacgtgggtgccgggtatcgatgctggatcggcgaccggtaggaccggacgaaagactgcttcatggacacgagttacgccgtgttttgcggcatcgacgtgggtaaaagcgatcatcacgcggtcgggctggacaccgccggcggccgactgttcgacaaggcactgccgaacgacgaggcccgactacgggctgtgttcgcggatctggccgtacacgggccgatcctggtggtcgtcgatcaaccgaacacgatcggcgcgctgccggtcaccgttgcccgagcttgcggtcacgacgtcgcctacctgccggggttgtcgatgcgccgggtcgccgacctgtatccggggcaagcgaaaaccgatgcccgcgatgcgttcatcatcgccgataccgcccgcaccatgccgcacacgctgcgccgggtcgacgtcggtgacgagaccctgaccgaattcggtgtgctcgtcgggttcgacgacgacctcgccggcgaggcgacccgggtcagcaaccgcatccgaggactgctcaccggcatccaccctgccctcgaacgagtactgggacctcggatcaaccatctggctgtcctcgagatcctgtcccgctatggcggaccggtcgggatccgacaggccggcaaacgccgaatcaccaccctcgcggtcaaacacgcaccgcggatgggcgccaggttggccgaggaaatcttcgccgccctggacgcgcagaccgtgacggttcccggcagcaaggccgccgagatcgtgctgccgaaactcgccgactcgctcaaagaggtgctgcaacaacgcagaaccatcggtgacgacgtcgagaggattctcgacgagcaccctctttcccaggtcctgacctcgatgcccggcatcggagtcaggaccgcagcacgcatcctcatcgagatcggtgacggttcggacttcgcctcggccgggcacctcgccgcctacgccggcatcgccccggtcacccaccgctccggcacctcgatccgcggcgagcacccggcccgctcgggcaaccggaaactcaaacgcgccctgttcctgtccgcgttcgcggccctgcacgacccgaccagccgcgcctactacgaccgcaaacgcgccgagggcaagagacacaacgccgccctgatctgcctcgcccgacgtcgctgcgacgtcctgcacgcgatgctcaagaacaagaccttctaccagccaccaaccgcagacgcggcgtgatcacgcccagcaggcgtgctaacgcactcgcttcgccagatggaccagcgcatagccgcctggagtcggagttcggtgcgtttcctgataaccgaaccgagagtagagccgcaggttgccgaggctgcgctcacccgtgaacaactgcagatcagtgatctgctcaggtagtcgctcttccaccagttcgagcagtcgactgccccggccccggccctgcatgtccggggccacgaccagccgtcccaactcggcgatgtgaagctccggcagagagagatacacgcgcacggcggcgacgagacgccgggagtcatcgcgcaacccgaacgcgagaacgtcgggctgcgtcagctcgctcaccaactcggcgaaggactgcatcaacgggggaaggttcacgtcatcgtgggcctgagcctcagtcacatacgcagcccgctgcaacgtcagcagctcacccgcgtccccacccgacagcgtcacaacggattccatgcacgtcgactattccagcccctaccggaccgcactccagtggcatccccgagcggttgacatcaacatagggaca

SEQ ID NO: 3177 - DNA, 1293 bp, unidentified
  source 1..1293: mol_type = unassigned DNA; note = element_49ead00
  misc_feature 1..2: note = core
  misc_feature 3..148: note = LE
  misc_feature 149..1162: note = CDS
  misc_feature 1163..1293: note = RE
cttgtatgattactccgtcagaaagaaccggccagttctctctgatggcggtccggatgccgtgtccgggcttaggctttcgcgcctgttccgtagatcctttgcaccggaccgccgttctttctcatgtgataaaccggacagtatcatggaccggctttcaccggtaacccgtatttgcaaggttggtttcactatggaaaatgaactccacttcatcggtattgatgtcgccaaagctaaactggatgtcgatattcttcgccctgatggccggcatcgctgtaaaaaatttgacaataccctctccggacacgaagcgctggtccgctggcttcgcggccatgacgtgaaccgtgcccatgtctgcatggagtccaccagcacctacatggaagacgcggccgcgcatctgagtgatgccgggtataccgtgtccatcatcaaccccgccctcagtaaagctttcgcacagagtgaggggttgcgcagtaaaactgacaaagtggacgcccgtatgctggctcacttctgccgggaaaaacgcccgtcagcctgggaggcccctcatccgacagagcgggcactgaaagccctggtgttaaggcatcaggcgctgacagagatgcagacgcaggagaaaaaccggcgggaaaccgcgccggaggttcagctggccagcattgatatcctgctgggatgtctgagcgcggagctggcgcgtatcgaaaaacagataaaagacctgacggataacgacccggatatgaaacgacggcggaagctgctgaacagtatcccgggcatcggggagaaaacagcggctgttctgctggcgtatacgggcctgaggctgaagttcggtacagcgcggcagttcgcggcgtatgcaggactgacgccggtgcagcatgagtcgggcagcagcgtgatgcgggcgagccggatgagcaaagcgggggccggttcaactgcgcaaggcgttatacatgccagcgttatcggcgctgtaccatacggcgtggggaaaagcgttcaggaaaaggctggaagagagcggaaagcgggcaaaagtcatcataggggcgatgatgcgaaagctggcgcaggtggcttatggagtactgaagtcaggaaaggcgttcgatgcgtcacagcatgagctgttgatagcgtaacaacgttccctgagaaaaaacgacagcaccagagagtgctgtcgttggtgtgcctgtcatccgggagccggagaaagtatcggcaactaaaaatggttgcaggcgttcacagtat

SEQ ID NO: 3178 - DNA, 1408 bp, unidentified
  source 1..1408: mol_type = unassigned DNA; note = element_49ecda3
  misc_feature 1..2: note = core
  misc_feature 3..79: note = LE
  misc_feature 80..1123: note = CDS
  misc_feature 1124..1408: note = RE
  misc_feature 1123..1395: note = bridgeRNA
tgttggggtggacggcctccgaacggcatcgaattgtgccagagtgagtcgtttgaaactcaagcgaaggagaccgcccgtggacgaaattatacgtattggtgtcgacacgtcaaagcttgtctttcagctgcatggggtaaacgcggctgaagaaccggtgctacgcaagaaactgcggcggcaggagatgatcgcctttttcgagaagtgcccgccgaccgtgatagggattgaagcctgtgcagcctcgcaccactgggcgcgcctgctgggcttgtttggacatgaggtacgcctgattgcgccgcaattggccaaaccctatgtcaagcgcggtaagaatgacgcggcggatgccgaggcactttgcgaggcaatgagccgcccgacgatgcgcttcgtaccggtgaagagcgctgagcagcaagccgacctgatgctggtcggaatgcgggaacggctggtggcaacgcaaacccagctttgcaatgtgatccgtgcttacgctgccgagtttggaattacagctgcgaagggcattcataaaatctcaccgctgctggagcgtcttgcggcagatgacacacttcccgcattggcgcgtgagttgttcgccgcgcacggtgatgaatttgcacaggtcggcaaaaggctaaaagaggtcgacgcgaaattgatggcttggcaccgcaacaacgaatgcagccgccgccttgccaagatccccggtgtcgggccgatcggcgcagcccttttggtgatgaaagcgccaagggcggagctattcgcatccggtcgacagttcgcagcctggatggggctgacacccaaaaatcattcgactgcaggcaaagtcaggctcggcgtcattacccgagccggtgatgagcaggtgcgaaaaacgttggtagtgggcgctactgcgcttctacgacacgtacgagaaggaaaaagtcggcacgcttcgccctggctcgtcgaattgctgaagcgcaagccgccaaagctcgcggcagtcgcgtttgccaacaagatcgcgcggatcgcatggaagatgatgatcactggcgaggtttatcagggcagtgccgcacgaccagccttggctagcgcggcgtaacaagatcagctggttacggtgagcctgacagaattgctaccgtgccgagttgatacgtgaacttgcgagaaacgagcagatggtgtgatcgatcgatccgagatttgggatactccgggtgaggcaatggcccagcgtggtcgccgtgttgtttggaacccaagtcgcggaacccatcttggccagcgttcatgtgcgagcgcaccaacaggccggacatatgagcgcaagcgatccgatcaaaatcatctgaatcattcttgcaagcaggaggccgtccacata

SEQ ID NO: 3179 - DNA, 1360 bp, unidentified
  source 1..1360: mol_type = unassigned DNA; note = element_49ef377
  misc_feature 1..3: note = core
  misc_feature 4..81: note = LE
  misc_feature 82..1101: note = CDS
  misc_feature 1102..1360: note = RE
  misc_feature 1141..1347: note = bridgeRNA
tgatggggtcgggccctgctcaccggcatcgaagtgccataagctggtcgttgttgacacgccacgaagaggggaccgtccatgaacgagattagcatgattggtttggatttggcgaagcgggtttttcaggtccattgtgccggtgcggtaggcgagttggtgctcggccgccggttgcgacggggtcaggttctgggcttctttgcccggctttcgccgtgtgtggtgggcatggaagcctgtgcgtcggcgcattactgggcgcgcgaattggaggcgctcggccatgaggtgcggctggttccgccggcctatgtcaagcctttcgtcaagcgcgggcgcaagagcgacgccgccgacgcggcggcgattctgcgggcaatggcgagcccgggcatgtgctttgtgccggtcaagtcgaccgaggaccaggccgggctgatgctgcatcgcgctcgccagctgctggtccgccagcgcacccagcttgccaatgcgctgcgcgcccatctggccgaactcggcatcatcgcggcccaaggcgagacggggctcaaggaactgatcgccattgtcgccgacggcggcgatcggcgcttgccggcggcggcgcgcaccgccctgacgctgttggtggcgcagtgggaagcggccggtgacgggatcgcccggctggaccgggaaatccgcgcctggcatcgcgccagcgaagcaagccggcggcttgccactatccccggcatcgggccgcttgcggccagcgccatcgtcgccacggtaggcgatgtgtcgcgcttcgggcgcggccgcaacttcgccgcttggctggggctggtgcccagccagcactcgaccggcggcaagacggtgctcgggcccatcaccaagatgggcgaccgctacctgcgctcgctcctcgtgctcggcgccaccgcgatgctgcggcgcaagggctacgggccgtggctcgtcggcctgatggcccgcaagaaggcccgtcaggcctcggtcgcgctcgccaacaagatggcgcgcatcgcctgggccatcctcgcccatggcggggtctaccgccaaccggaggcaagcgccgcctgaggcaacacgacaccaggaaagcgcaggacacaaaaccgccgaatgcaagggcaaggcgtgatggcgaccgtccacgaatggcaaaacccttcggccgtcacgacccgtcgaggtcgccggggtgatttgggagtcgttcgcggatcacatcatggccagcggctcatgcggccgcgaaaacaggccggacacatgaccgctccaaccaacgtcgccaaaaacgcgaaataccccttgcaatgcaggggccgtccacaca

SEQ ID NO: 3180 - DNA, 1553 bp, unidentified
  source 1..1553: mol_type = unassigned DNA; note = element_49f01a7
  misc_feature 1..2: note = core
  misc_feature 3..77: note = LE
  misc_feature 78..1190: note = CDS
  misc_feature 1191..1553: note = RE
  misc_feature 1288..1540: note = bridgeRNA
tgttggggtggacggcccccgacggcatcagtgtgccagaatgaggtcgttggagatctcaaacgagggagccgtccatgaacgatcttatccgcattggcatcgacacgtccaagagtgttttcgtgctgcacggggtggacgcggcggaacagccggtgctgcgcaggaagctgcggcgccagcagatgctcgatttcttcgccaagctggcgccggtgcagatcggcatcgaagcctgtggggccgcccattattgggcgcgcgaactcatggccttggggcacgaggtgcggcttttgccgccgcaatacgtcaagccctacgtgcagcggggcaagaacgatgcggcggacgcgagcgcgatctgcgaggcgatgagccggccgcgcatgcggttcgtaccggtcaagacggccgaccaacaggcggcgctgatgctggtaggggtgcgcgaccagctcgttgcccgccggacgcaactgagcaacacgatccgcggctatgcggccgagttcgggatcgccgcggcgaaggggctcgacaaggtcgagccactgctggtccggatcgcgcgcgagcccggggtgccggagctagccaaggggctgtttgcggcgctgggcgaggagttcgccgcgctcaagccgaagcttcgcaagctcgaagcgcaactgcttgcttggcatcgccacaacgagctgagccggcgcctggcggagattccatccatcgggccgatcggggcgacgctcttggtgatgaaggtgactaatccccaggcgttccgctgcggtcgagatttttccgcctgggttgggctcaccccgaaggatcactcgaccgccggcaagcagcggctcggcgtgatcacgcgcgccggcgacgagacgctgcgccgcgtgctggtggtgggtgccaccgcggtgatccagcaggtcaggaaggggcggggcaatccctcgccctggctgatcgagttgatgcggcgcaagccacccaagctcgtcgccgtggcgctcgccaacaagaccgcgcgtatcgcctggaagctgatggtcagtggcgaacgctaccatcgagagcacgcccgcggcgacttcgttccgccgaccggcagtctagcgccgggcacgcgccgtcaaggccgcgttgcgccgcctgcggcggtggcctgcggccagccttgaccgcgcttgccgccccggcgctgacagcgccgccgtcggcaaaacgaagccatcgccacccaaataataaggtgttcaagatgatcctgatctcttccgagttcgacgtgcgtagaaccgcacgttgaggccgaagcttgctcgagaaggcagatggcgtgatcgatcgatcccagacgcgaggcactccgtggcatccaatggccctcagtattcacgggccgctttactgtttggaactcgcgtcgcggaacccatcttggcagcggtcatgtgcgaccgcgacatcagaccggacatataatcgcaaccgatccggtcacgccttgctcaatctcttgcaggccgggggccgtccacata

SEQ ID NO: 3181 - DNA, 1178 bp, unidentified
  source 1..1178: mol_type = unassigned DNA; note = element_49f120b
  misc_feature 1..2: note = core
  misc_feature 3..207: note = LE
  misc_feature 208..1155: note = CDS
  misc_feature 1156..1178: note = RE
  misc_feature 3..183: note = bridgeRNA
cttgtatggtaagacttgaagggaggaggagggacttagttcgcttctgactgttcgcgcagtacagacccgtaggagatttcacccctcctcctttcacccaagcgccgataaagaatgcttaaggctcacaacctacgatagaaacaagcctgcgcctctgggtggccccttcaagtctgtaaaccttatccccgaggaggcgttatggcaatgcgggttactctggaaaaaccgatcatcggtgtagatgtcgccaagaatgagctggtgatctaccacgatcaatatgatcgacttgaggcaatccccaataccaaagtcgccatcacccaatggctgaaggccttggcgagcagctgcgccatcgccatcgaagccactaacgtctatcacgtcctgttcgcggatgcggcccacgaagcaggctgtgacatttatatggtggatggctatcagctcagtcattaccgtaaaggcgtcaacatacgcgccaaaaccgatgcccaagatgctcgtttgttggcccgatacctgaaaaacgagcttgatgagttgcggccctggatacctgcgagcccgctttatcggcagcttctgagcctgttccgacgtcgtgcagccttggttcaggctcgtactggcctggtgcaaagctggaccaacgagccttttctgagaacagcgttcgccaatcaggtcaactcgatgaaacgatttgaggcgctcgttgaaaagaagattcgcgatgtactgcaggaagccggtctgatgaggcaggtcaaccgctgtatgaaagtagaagggatcggctttctgactgcagctcgtttggtcacttcttttcagcgaggcgagttcagcggagcgaacgcctttatcgcgtttcttgggctggacctgagagtatccaaatcagggcaaagtgatggacctcgtcgattgaccaaacgcggcgatccagaagcccgacggttgctgcacaacgcggctatgtccgggagccgtacgccggcctggaagcctttttatgaagagcagagaaagcgtggctttagtacaactcaagcgctggtcatgctctcccgaaagttggctcgagtagtcttcgctctgttaaagaaccagagcgaatatcaaacaaaagtggcttgagggctttgccaaaaccatagaat

SEQ ID NO: 3182 - DNA, 1428 bp, unidentified
  source 1..1428: mol_type = unassigned DNA; note = element_49f12f2
  misc_feature 1..2: note = core
  misc_feature 3..93: note = LE
  misc_feature 94..1128: note = CDS
  misc_feature 1129..1428: note = RE
  misc_feature 1189..1426: note = bridgeRNA
cgatgagatggtctcctcccctcctaatcggcgtcgcaatgcgccaggatagggaaggagaattttcctatcagaaacgagtgggaggagaccatgagtaaggttacaacggttggcattgatctcgcaaagaacacgtttgtcctttttgggctgggccctaaaggtcacagcgggtggaagcgcaaagttcgccgcaagcagttgctggagcagctggtgcgtttggagccttgcacagtcgctcttgaggcgtgtgggagctcgcactattgggctcgccagatacgagcgttagggcatcaggttgagttgttaccgcctcaacatgtgaagggctatcttcgaggtcagaaaaacgattacaacgatgctcgggccattgcggaggccagtgaacatgggcgaattcgcccggtgccgatcaaagaggtcgagcagcaggatgatcagatgctgcacaagctgcgccagggcgtgagcaaggatcgggtacgaatcagcaatcagcttcgagggttgctggccgagtacggtgtgatcatgccccagggaatagcggcgctgcgccgggagctgccactggcactggaagacgctgacaacgggttgagcgagcgggcccggcagttgttgcaccgccagtatcagcgttttctggaagtagagcaggaactggcctggtacgaccaacaagtaaagcagagatcgagacaggatgagacctgtcggcgcctgcaagcgataccgggcgttggtgaagtcgtcgccagtctgctgaagggctggatgggtgatggccgccaattccggcgaggccgagacgctggcgcagcgctgggcctgatcccccgtcagaacagcaccgggggcaaagacgtcttactgggaatcagcaagcgaggcgacccgtacgtacgcgcccaactggttcacggggcgagagcggtggttgcccgtgcggacgggaaaatggaccgcctcagccgatggatccagcgactcaaggcagagcgagggttcaacaaggcaaccgtcgcattggccaacaagttggttcgcattgcctgggtgattatcgcccgaggcgagcactaccagccatcggagcaacggctggcggtatgaataagtcagggattgactgagctaaatcaccgacgcgacgtcggaaagtaaagcggttacccttcccgcaggttgcgagggtcacagcaatcgatggcataacaggtcagaccggcctgccgaaaacctgactaatccaagggccccagaggccgttaggtcgataaggacggcaggcgcggatcttccatcaaggccagaggcgacaaagccgcctcatcaaacaggccggatatacgggcgcaaacctgtccctgacattgagtgctgagaccttgcaaacggggaggagaccatata

SEQ ID NO: 3183 - DNA, 1501 bp, unidentified
  source 1..1501: mol_type = unassigned DNA; note = element_49fa876
  misc_feature 1..2: note = core
  misc_feature 3..262: note = LE
  misc_feature 263..1480: note = CDS
  misc_feature 1481..1501: note = RE
  misc_feature 7..246: note = bridgeRNA
ctaatgagagctaccgggttcgtcgttgaggcagactcggtgcttggtagccgctggcaggtgagcactctcccgccctggatctcgggagtcctacaagcagatcgtgccccttgccggtggtcggaagagtcgaccgctgatgggatgtcgtgcccgctgctcataggcgtgagcacttgatcattagggtgctggtggttcttccgcgggctacgtcaacctgatcgttgtgcgggacacggaagaacggagaacggggttgctgttcgtcggagacgactgggccgaggaccaccacgacatcgaggtgcaagacgagacgggccggcggttggccaaggcccgcttcaccgaggggttggccggcgtcgctcagttgcatgagttggtcgcccagcacctggacgaggacgaggccgaccaggtcgtggtcggtatcgagaccgaccgtggtccgtgggtgctcgcgttgatcgccgcgggctaccgggtgttcgcgatcaatccgctgcaggtcgctcgttaccgcgagcggcagagtgtctccggtgccaagagcgacgccgcggacgcacacgccctcgccgacatggtccgcaccgactctcatcagctgcgttcggtcgccggtgacagcgaccaggccgaagcggtgaaggtggtggcccgcgcccacaagagcctgatctgggaacgcactaggcatgcgcaacggctacgtaacgtgctgcgggagttcttccccgcggcgttgcaggccttcgatgatctgactgccgccgatgcccttgagctgcttgccaaagcccccgatcctgatgcggcggcgcggctcaccatcgcgcagatcagcgcggcgctcaagcatccccatcgacaccacgccagcgacaaggcccgggtgatccgcgcggcgctgcgcactgagcagctgcgtcagcccgccgcggtgacgaccgcctacgcggccacggtccgtgcgcaggtcgccgtcatcggcaccctcaacgcgcagatcaagacgatgggagcgcaggtcgaagcccattttggtcagcacccggacgctgaaatctacctcagccagcccggcatgggccccatcctcggcgcccgggtgcttgccgaattcggagacgatgaccaccgctacgccgacgcccgctcccgcaagaactacgccggcacaagcccgatcacccgcgcctcgggcaagaagaagaccgtcctcgcgcgttacgtccacaacaacagactgatcgatgcactcggccagcaagcgttcagcgccctgaccggctcgccaggcgcccgctcctactacgacgaactccgccggcgcgggaccggccaccgcgccgcactgcgtcaactcgccaaccgcctcgtgggcatcctgcacggctgcctcaagaccggcaccgtctacgacgaagcggccgcctggtcacaccacacccacaccgccgccgcttgacaatatttcgccatgggatgt

SEQ ID NO: 3184 - DNA, 1384 bp, unidentified
  source 1..1384: mol_type = unassigned DNA; note = element_4a08703
  misc_feature 1..3: note = core
  misc_feature 4..82: note = LE
  misc_feature 83..1111: note = CDS
  misc_feature 1112..1384: note = RE
  misc_feature 1085..1371: note = bridgeRNA
tgatggattggatgccccctcccgacggcatcgcaatgtgccaaagtgatgtttgcaacgtcacttgaaggagagagcatccatgaacgaagttagcattgttggggtggaccttgcaaagcgggtctttcagcttcacggatcgcgggcggacggcacggttgcatttcgcaagaaggtaacccgcggccatgtcctgacggttctggcgggtttgcccaagtgcattgtggcgatggaagcctgcgcgacagcccatttctgggcacgcgagatcggaaagctcgggcacagcgtgaggctgatcccgccggtttacgtcaagccatttgtcaagaggcaaaagaacgatgctgccgacgctgaagcgatcgcagaagcggccagtcgccccaccatgcggtttgtccagcccaagagcgagcagcaacaagcacgagcaatggtgtttcgaacacgtgacctgctggttcgccagaggacgcaattgatcaatgcccttcgcgcccatttggctgagcatggcgtcattgcagcgcagggcataaccaatgtcgccgcgcttggcgcactcatcgagcaagctgattgcgatctcgatctgatggtggtggagacggcgcgcctataccttgaccagatcgaggtgctttccgacaggatcgcgacgctggaaaaggtgctcaaactcgaagcagctcggtcacaaagtgcggtccggcttatgaccatgccgggaattgggcccgttaccgcaatggcggttgatgctttcgcgccgtccatgacagcgttcaagcgggggcgcgactttgcggcttggctggggctggtcccgcgccagcactcaagtggcggaaaacaggttctgggccgaacatcgaagatggggcaacgcgatattcgtcggctgctgatcatcggcgcgatgaccgtcatccgctgggcagaccgcaagggtgtttcagaaagctcatggttggggcggatgctgtcgcgcaagccgcgcatgttggttgcgatcgcattggccaacaagatggcccggtcgatctgggcgatgatgacaaagaacgaggattatcggactccggccctgtctgctgcctgagtgcatacacgcaggtaatcagccacggtcagagcgtcggggtgtgaggaggccagcgaacggtaaggacaaggatacggtgagacaggatctggaaaggcatgcgggtcagagagcatcgaagctcgcagatttgatttgcgccaggtccgcacagctccataccggccagcggtcagtatttgccgcatgaaaggcctgatacatgaccgcacccgatcacacgtccagaacgttcggaaaacctcttgcgctaacgggggcatccataca

SEQ ID NO: 3185 - DNA, 1435 bp, unidentified
  source 1..1435: mol_type = unassigned DNA; note = element_4a10dd2
  misc_feature 1..2: note = core
  misc_feature 3..84: note = LE
  misc_feature 85..1152: note = CDS
  misc_feature 1153..1435: note = RE
  misc_feature 1187..1388: note = bridgeRNA
agatggggtaatcggccgacgagcttgtggaaagctgaagattttgggtgctgcgcttcaggctgatggtgaaacgaggtcagtgtggacggcctcaagcatcagaaggagaagcgcagcatggaccattttgctcgactggacgtatcggtcaaggagaccagcgtctgcattgtggacgacacgggcaagatcgttggcgaagtgaaggttgcgagcgaacctgaagcgttgttggcggtgctgaagaaccccgcctaccgcttcaagcgaattggcttggaagctggaccgctatcacaatggctgttcagcgctctcgccgaagccgagctaccggtggtctgtgtcgaaacgcgacacattcaggcggtgctgaaagcccagatcaacaagacggaccgcaacgatgcgcgcggtatcgcgcagatgatgcgggtggggctttaccgtccagtgcgcgtgaagacgctacgcagtcagaaactgcggatgctgctgacccatcgcaagcttttgcaatcgaaggccatcgccatcgagaacgatctgcgcggtactttgcgtaacttcggcctcaaggtgggcatggtggggacggtgaagttcgaggcccgcatcagggagctggtcgagaacctgctcgacctggccgcgttggttgaaccgctgctcgttgtccggcgggtgcttcatgagcagatcaacgtcctgcaccgacgcttgctggcgatcgtgcgggacgatgccgtgtgccggcgcctgatgacgattcccggggtcggccccgtggtggcactgacctatcgcgccaccgtcgacgtgccagctcgctttaagaactccaaggcagtcggggcggtatttggactgacgccctccaagtatcaatcgggcgagatcaaccgcaccggcgcgatatcaaagtgcggggacgagatgatgcgggtgatgctttacgaagcagcccgggtcatgctgacccgcactaacaagtggtcctggctcaaggtctgggcgatgaagatcgccaggcagcgcgggatgaaaaaggcgatcgtggcactcgcacgtcggttggccgtgatcatgcaccgtatatgggttgacagcaccgagttccgctggacccggaaggtcgtagcggcatgagggtcgtacaggatcaattacgataggagaacctcgagttccaccgagcggtggaatgatgtccctcgcgggacgatggatgaggtgagttcgttcggtcgcttggacctgccattcgtctgacggtaaggccgcccaaaagattgttccacctcgtcctcgactcccatgctggaagggccttggtgccgagtccgaagagaagcgcgagcccgcgagagacgtcgacactgaagcggtggatagtctgataagcgcttgacccagaacggccgattagaga

SEQ ID NO: 3186 - DNA, 1223 bp, unidentified
  source 1..1223: mol_type = unassigned DNA; note = element_4a14d08
  misc_feature 1..2: note = core
  misc_feature 3..210: note = LE
  misc_feature 211..1176: note = CDS
  misc_feature 1177..1223: note = RE
  misc_feature 36..200: note = bridgeRNA
gtcgtacatttgtcataagtaaaacaattgaattatttttatagtttcaagcatggaataaggcagatcattcgttggttttcaaaaccgtatggcacgttctgtccccatgctttgcatctgaaaaccggacagttcgttaggccaagcagagcccgtgtttgcgacgatggtttacaagatgtagttttcacttaaattctttttattatggtttatatcggtatcgacatcagcaaaagcagtttcgtcgcagcctatccgtcagcgaaaggttatcgtacccagacttacccgaatactgctgcgggagtgcgtaaattcattgctacgctttcagtaacagagcatcactgtgtcatggaggcaaccggtaattacggctttctgctgctgtatctgcttcatcagaccggtattgccgtcagtctggtcaatcccaagcagatcaagcattttgcccggatgatgatgacagttaccaagaccgacgaaaaagacgcctgcatgatcgccatgtacggggagaagatgaatcctcccatctacaaaatgccctcgcaagctatcctgctgctcaaacagaagaagaccgtaatccgtcagctgcgtaaacaactcgttgcatcgaagaacctgcgtgaatcgctcgtcgtactgccttatcgagacaaagcctgtgtgcgtacactggacaagaccattgattttctgaccaagcagatcgagcaactcgaaacggaactggcagacatagcatcatccgagttcgataaacaactaaaagccctgacatccatcaaaggaaccggcattacactcgctacggcactcatccttaccaccggaggatttacctacttcgacaatgcaaagcaactatcccgctttatcggaatatgtcccacatatcaacaatcaggtacgtcggtgaatatcaaaggccatataaaccgaaatggcgatgaacaattacgagctttgctctatatcgcctcgtggactgcattacgttacaatgctgcttgcaaggaatgttacgtccgactaaaagccaatggtaaaccgtctaaagtagctctgatcgctgtggctaacaaactcgtcagacaagcttttgctatcgcgactaacgactcaacatatatcgacgggtttgtctcgactaaaaaataagcatcggttcatttttttacctttttatttgctttccaatacagttc

SEQ ID NO: 3187 - DNA, 1393 bp, unidentified
  source 1..1393: mol_type = unassigned DNA; note = element_4a1bfea
  misc_feature 1: note = core
  misc_feature 2..86: note = LE
  misc_feature 87..1112: note = CDS
  misc_feature 1113..1393: note = RE
  misc_feature 1167..1388: note = bridgeRNA
caatgggatggacccctcccacctatcggcatcaatgtgccaaactgatatgattaacttatcagcaaacagcggaggggtccgacatgaatattaaacgaataggcatcgatttggcaaaacaagtctttcaggtgcatggtgttgatggtcaagaaaaagtggtagtgcgcaagaagttatcgagagcacaaatgctggtgtattttcaaaaattaccgccttgcctgattggcatggaagcctgcagtagtgctcattactgggcaagagagttacagaaaatagggcataccgtcaaactgatggctccgcaatttgtaaagccgtatgttaaaagcaataaaaatgatgccaacgatgctgaagcgatatgcgaagcagtggcacgacctactatgcgttttgttgctattaaaagcatcgaacagcaagacattcaggccgttcatcgcatacgcagtgaactcgtgcagcagcgtaccgccaaagtcaatcagattagaggcttgctgggtgaatatggtcttgttgttgggcagcgtatcgatgtacttcgtaaagccttacccctcatgcttgaagatgctgaaaatggcttgacggttgatttccgaacacttcttgagggcttacagcaagatctcattaccttagatgagcgtgttgatgacatggataagaaaataaagctattggctagcagcaacgaagatgccaaacgcttacaacaaattcctggcataggcccaataacggctactgctttgattagcgctatcggtgatggcaagcaatttaaacgaggcagagacctagcggcatggttaggtctcacaccaaggcagcatagtagcggcggcaaagaccgcttattaggtattagcaaacggggcgatgcttatttacgcaccttgctcatccatggtgcccgagcggtattaaaagttgcgggcaacaaagaggatccacgtagtcgctggatacaaaatttatgtggcagacgcaataagaatattgcggctgtcgccttggctaacaaaaatgcgcggatagtttgggcgttgttaactaagaaaaccgatttcctgccggagggcaaacctgcttgagttagaaggcaagccttcaaactcaagcaggtttagagaaaggaatcgttcatccacgattgtgtagcataactaactgatggaaaacaggtcgaaccggcgtttgcaaaaccttacgaatccgctgtgccttgagcacgttagggcgattaggagcaaacgcgcgaatagcccattatggccagagtataaaagctcaattaacaggccgaatatacgtgtgcagtcgtaccccaatccagaagtgacgaaatgcttgcaaaacgggaggtgtccatata

SEQ ID NO: 3188 - DNA, 1411 bp, unidentified
  source 1..1411: mol_type = unassigned DNA; note = element_4a1e190
  misc_feature 1..2: note = core
  misc_feature 3..78: note = LE
  misc_feature 79..1128: note = CDS
  misc_feature 1129..1411: note = RE
  misc_feature 1127..1398: note = bridgeRNA
tgttggggtggacggcccccgaacggcatcgctgtgccaagctgaggtcgttgcagatctcaggtgaggaggccgtccgtgaacgagattacccgcatcgggatggacacgtccaagcacatcttccagctccatggcgttgatggggacgagcagccggtcctgcgccggaagctccggcgtcgggagatgatcgcattcttcgagaagctcgcgccgacgcgcgtcgccatcgaagcctgcggcgcctcacaccactgggcgcggctgctgagtgggttcggccacaaggtgcaactcatcgccccgcaactcgtgaagccctacgtcaagcgtggcaagaacgacgcggccgacgccgaagcgctgtgcgaggcgatgagccggccgaccatgcgcttcgtgccggtcaagacggccgagcagcaggcggcgctcatgctggtgggacttcgcgaccggctggtccgcaaccgaactcaactcgccaatgcgatccgcggttacgcggccgagttcggcctcgcgggtgccagcggcatcacgcacgtgcccgcattgcttgcgcgcatcgaggccgacgtggcgctgccctcgcttgcccgcgaactgttcgcgatgcaggcggccgagtatgcacaggtccaggcgaagctcgcggtcgtcgaggccaagctcctagcctggcaccgtgccgacgagcgcagccgacgcttggctgggatccccggcatcggaccgatcggagcgacgctgctgaccatgaagacgccggcacccgaggccttccggtcgggccggcagttcgcggcctggatcgggctgacgccgaaggatcactcgacggcgggcaaggcgcgacccggcgtgatcacgcgggcgggcgacgaggcgttgcgcagcgtgctggtcgtcggagccacggccctgatccggcgcgtgcgcgagggccgatcgcgcgacggacaccggttcgcggcttgggtccaggaccttctgcgccgcaagccgccgaaactggtagcggtggcgctggccaacaagctcgcgcgcatagcctggaagttgatgatcaccggcgagagcttcgccggccggcctgcacccgcggcggcaggggccgtgtagagatcggtccgggcgcagaccgcgaagagcgcgtctgctcaggactgatgccgagcttgcaagaggacgaagaggtggcgtgatcgattgatccgagacgtgaaccaacccgcaggtgccagtggccagccatggtcgcatcgttgtttgggcctcacgccgcggaacccatcttggccagcgttcatgtgcgagcgcagcagaaggccggacatatgaatgcaagcaatcgaatgacgcgaaccgacttcgtcaaccttgcgagacgggggccgtccacata

SEQ ID NO: 3189 - DNA, 1328 bp, unidentified
  source 1..1328: mol_type = unassigned DNA; note = element_4a2e877
  misc_feature 1..2: note = core
  misc_feature 3..247: note = LE
  misc_feature 248..1126: note = CDS
  misc_feature 1127..1328: note = RE
  misc_feature 1095..1326: note = bridgeRNA
ttaatgagatggtcactccctccttcccggtactatgctgaggataggctttcattcggagaactatcatggaaaacattgcgctcattggtatcgatctgggtaaaaactctttccatattcattgcgggatcgtcgcggcaaggctgtttaccgtaaaaaatttacacggccaaagttaatcgaatttttggcgacatgccccgctacaaccatcgcaatggaagcctgtggtggctctcactttatggcacgcaagttggaagagttggggcattttcctaagctgatatcaccacaatttgtccgtccattcgttaaaagtaacaaaaacgactttgtcgacgccgaagctatttgtgaagctgcatcgcgtccgtctatgcgttttgtacagcccagaactgaatctcagcaggcaatgcgtgcgctgcatcgtgtccgtgaatccctggttcaggataaggtaaaaacaaccaatcagatgcatgcttttctgctggaatttggcatcagcgttccacgaggagctgccgttattagccgactgagtacccttcttgaggacaatagtttgcctctatacctcagccagttattgctgaaattacaacagcattatcactatcttgttgagcagattaaagatttggaatcccagttgaaacgaaagttggacgaagatgagattggacagcgcttgctgagcattccctgcgtcggaacactgacagcgagtactatttcaactgagattggcgacgggaagcagtacgccagcagtcgtgactttgcggcggcaacagggctagtgcctcgacagtacagcacgggaggtcggacgacattgctgggaattagtaagcgaggtaacaaaaagatccgaactttgttggttcaatgtgccagggtattcatacaaaaactggaacaccagtctggcaaattggccgattgggtcagggatctactgtgtaggaaaagcaactttgtcgtcacttgtgctctggcaaacaagctggccagaatagcacgggcccctaacggcacgacagcaaacttatgtagcataacggcagaaatacaccggtttaaagaatcactgatctggttttgcgaatactgatattgatgatactaacggcccaccggcctgttgaggaacctgtaaaacggaaaggctcattgaagccgtatattttctggaggttcatcaggcgcggaactcatcgaggcgcgggaataaaatcccattcagacgccggatagattcaagcaagccaatttatcgtcaaaatcggtgttgcaaaaacgggagtgaccataga

SEQ ID NO: 3190 - DNA, 1646 bp, unidentified
  source 1..1646: mol_type = unassigned DNA; note = element_4a366c8
  misc_feature 1..3: note = core
  misc_feature 4..264: note = LE
  misc_feature 265..1488: note = CDS
  misc_feature 1489..1646: note = RE
  misc_feature 1..225: note = bridgeRNA
cccgttaccttgatcgtgtccccataagatcggggacaggtcactggcctcggtatggcttactcgccctgttgttcgacatgatccggggggtgttgccgccgaggtaccaggacacacgctgacggctaatagggacgcggctcaccagaacgactcaggtgaagtctcttcgtaacgtgggtgcccgcgacgagtgtctcgaccagtgatcttccaccacaatccaccacggcctgccccaactgaaggaggggaacgatcatggaagacaccaccggctatgacgtctacctcggactggacgtcggcaagaccgcccaccacggctgtgcgctactcaccgacggcaccaaggtgcacgacaaacctctaccccaggacgaagcgcagctcaccgccctgttcgaccagctcaagacccatggccgggtcctgctgatcgtcgatcagcccaacaccatcggcgccctaccggtcgcggtggcccgcgccaccgactgcggtgtggcctacctgcccggcctggcgatgcgaaaagccgccgacctgtaccccggccagtcgaagactgacccccgcgatgcgttcatcatcgccaacaccgcccgcacgatgccgcacaccttgcgtgctgtggaccgcaacgacgaggttctgtcagcgttgaagatgctctccgggctcgacgatgacatcgcccgcgactgcacccgaaccatcaatcgactgcgcagcatcctggtgcagatctacccctcgctggaacgggtcctgcccggggatgtgatccagcgcccgttcatcctggaactgctgatccactacggcgggccgacgaagctgaagaagtcaggcaaaaatcgggtgctgacctgggcgcgcaaccatgccaagaagaatccggaccggctggtcgaggacatcttcaaggccctggatgcgcagaccgtcacggtgcccggcaccgcggcggcagaggtggcgatcccgatgctggcgacgaacatcaagtcgttgaaggcgcagcgtgagtccatcgccggccaggtcgaggagatgctcgacgagttccctcttgcacaggtcttgatgtccatgccgggagtcggcatcaagaccgccgcgaacatcctcctggccgtcggcgactgctccgacttccccgatgccgctcacctggctgcttacgctgggatcgctccggtgacaagacgatcgggtacgtcgatcagaggtgagttcccggccaggtcaggtaacaaaagactcaagaacgccctgttcagatcggcgtgggtcgcgtcgaactgccacgccgcgtccaagatgtactacgagaagaagcgggccgaaggcaagcggcacaacgcggcggtgatgtgcctggcccggcggcggtgcaatgtcatcttcgcgatgctcaccaacggcgagttcttccgggaactgcccgcacgagccgctggggaggccgtcgctgcctagattgctgagctgagtccccgccgcccgcaggtcaggcgttcctccgtaacaaccggtggaacgtctacgcccgcatgttcgaccaccctcaccccgggagggctacacaggccgaggaaaagacgggtcgaggggttgacaatctacatagggacacc

SEQ ID NO: 3191 - DNA, 1365 bp, unidentified
  source 1..1365: mol_type = unassigned DNA; note = element_4a3726e
  misc_feature 1..3: note = core
  misc_feature 4..107: note = LE
  misc_feature 108..1118: note = CDS
  misc_feature 1119..1365: note = RE
  misc_feature 1137..1363: note = bridgeRNA
agatggaatggtcgcctcccgccttagcggtcatccgtcgccgcagttcggttgactggagcgtgcgacattgctggttcggtgtgttcgccgtcaaggagaaccagatggaatccacgaccattgccatcgatctgaccaagcgcgttttccagattcactacgtcgatcctcagaccggcgcgatttacagcaaggcgctcaaacgtgcgcagctcgtgccgttctttgcgaaccggccggcatgccgcgtcgtcatggaagcttgtggcagtgctcatcattgggcccgaactctggcacgcctcggccacgacgtgcggctcatagcggcccagttcgtacgaccgtttgtgaagtcgaacaagaacgacgcggctgatgccgccgcaatctgggaagccgcccagcgccctggcatgcggttcgtcgcagtcaagaccgaagatcagcaggccatgctgacgatgcaccggatccgtcagcaactggtccggattcgcgtcatgcacatcaatcagcttcgtggattgctctacgagttcggcatcgtactgccgcaaggccgtcgcccatccattgaggctgcgaaagcgtccctgacgtcactagctgaccagtttcccgtcatgctgacggaaagtctgcaagatcaactctcgcgacttcgtacgctcgacgagcagatcgaactgctcgaacgtcgcattcaggaatggcggcgcaacggcgacgcatgtcgccggatctccgaaattcccggcgttggtgtgcttaccgcgaccgctgcggtatcggtaatcggacaagcgaagtcgttccgctccggacgcgagttcgctgcctatcttggtctggtgccgcgacagaatagctccggaggcaaaacgaagcttggaggcatcagcaaacgcggtgacgtctatttgcgaacgctgctgattcacggagctcgagcggtgatctcaagctcaaggcatttgccggagcgattgcgcctgatgttgacccggcgtccgacgaacgtcgttgctgtcgctctcgccaacaagatggcacgaacgatttgggcgctgcttgcgtatggacgaacgtatcaagcctcaccacagcagtaagcaagctacgcaacttaaaacttatccaccgttgcacaggtagattgaacgatggcaagacaggttggaccgcgcaaaggcaagcctgagacatttctcggacttcgagtccgccttttagattaggaccctttgcggcgaaatccatcggggccggcgggcatgcccgcgatcgagtccggatataagtctgcaaccaccctcctcgctacgaacaattaccttgcaaatgggcggcgaccatata

SEQ ID NO: 3192 - DNA, 1310 bp, unidentified
  source 1..1310: mol_type = unassigned DNA; note = element_4a38bee
  misc_feature 1: note = core
  misc_feature 2..183: note = LE
  misc_feature 184..1098: note = CDS
  misc_feature 1099..1310: note = RE
  misc_feature 1109..1308: note = bridgeRNA
atggaaacctccccataccggcttcagtgagccatgctgtaagtgcaaaccaacagcaaaataaagaggtgtccagtggaacaaattatcggctttgatctggcaaagcgagttttttaggttcacatcgtttctctgcagggggaaaagaaagccaacaaaataattacccgcgagaagctgatggcttttatcgcccaacagccatcgtcaagaattgttatggaagcctgtggcagcgcaaattactgggcacgccagttcagtcaatacggacatgaagttaaacaaatcagtccgcagtacgtggctccctccagaatgggatgtaaaaacgataaaaatgatgccatcgctatcgttgaagctgacagtcgtccaggcatgcgttatgtgccggaaaaaagcgttgagcagcaggatattcagtgtctgcaccgggttcgccagcgactgatgaaaaacaaagcggccctcatcaatcagataagaggactgggtctggaatacggtattgccatgccggaaggtgcacataaaatcatggcctgtctgccggattatctggaagatgccgaaaatgaactgaccacgttaagccggcaactgatccacgagatgctgcaggagctgcagaactgtcagcagcggatcaaagagctggacgtacgccttgcccatatcagtcagcaaaataaggataccgttaggctggagagcatcccgggtatcgggccactgggggcgtcagcgctgacagtggcacagggtgacagcagtgattttcaaaatggtcgacattttgccagttacctggggctggttccgaaggagcacagtagcggcggaaaggtcagactcctgggcataacgaaacgcggggatggttacctgcgagggttgcttatccatggagctcgttcagtagtctatcgcgtcgtaaacctcccggatgagcggtgcaacggcctgcaacgctggctcaagggaattatcacccgaagcggcgtgaataaagcggttgtggcactggcgaacaaaaatgcgcgaatggcatggacgctggtgaatcagaaaacagtttatataccgaagtgaagaatctttatcaaataaagtcaaagagttgatgtactaacaggtagaaccgactctctgtgaacctggcaaatagctgggctgtaattagccatggcactaatgaggccagagagtacggatgttcatcagggctcacgaagccggatatatgtttgtggctacattgtcaggaaaagagctgcctgcttgcatcggagcggtgtccatat

SEQ ID NO: 3193 - DNA, 1209 bp, unidentified
  source 1..1209: mol_type = unassigned DNA; note = element_4a3b476
  misc_feature 1..4: note = core
  misc_feature 5..226: note = LE
  misc_feature 227..1189: note = CDS
  misc_feature 1190..1209: note = RE
  misc_feature 57..212: note = bridgeRNA
cattgtatattgactacaaatataataaaattatagatatagtcatgcaaacagagatagaaaggaataagggaaggtgagcaagcttatcatgtcattggttttacagaccgcagggaatgttaagcccaccttccacgaatctgaacagtacattaggttagaaacctggataatgcacaatgatagattacctattccttacaatctttgtaaaggagtttagatgaaagagctaacagccggaatagacgtgtcaaaagagacacttgatatttctctttataatggagggaagcatgataatattaccatcgctaacaacaagaaatcttttatgaaatttcttaagaaatattcatcagacgatcttcagatagtgatggaagctacgggtatctatcatttaaggattgccttggaagctcacgatttgggatatttcgtatcagtagtaaatccattgatcataaagcgttatggcgagatgaagatgttaagggcaaagacagacagggtagatgcgcggcttattgcggaatatggctatgaacagagtcctaaagaatttacaccacactcagatgatcgtatggtattgttccagttattaaaagctattgaagatttatataagactcgcaccgagttcaggaatcggcttgaatcctatacccatggatatccggtatcgaaggaagttggaaagacttatcggtcgatggttcagaagatagatcgtgagatagagaggcttaagaaaaagcttcaggattctcttgatactcattttccagatcagtcatcgaagctgacctctatcaagggggtcggcaagatgacggcatcaatgatcatggctttttacggtaattttgagcaatttgagacagcaaaacaagcagtgtcctttgctgggcttaatccacatccgagacaatctggaacgagtgtaaaaagaggttccagcataagtaagagaggacatgctttgatacgtaagactctttacatgagcgcattgagtgcaaagaaacataatcctgtttatcgagaatattatgaacgtttattagcatcaggtaaatcaaagaaagtcgctcttgttgcagtcgcacataaattactacgtcatatctttgctatcgttaaatatgatagagaatgggaccctcaatatgcaaaataagttgacttcgaaacacagta

SEQ ID NO: 3194 - DNA, 1533 bp, unidentified
  source 1..1533: mol_type = unassigned DNA; note = element_4a3ee70
  misc_feature 1..2: note = core
  misc_feature 3..241: note = LE
  misc_feature 242..1417: note = CDS
  misc_feature 1418..1533: note = RE
  misc_feature 3..217: note = bridgeRNA
cttgtattatagagtagtagttattaacgtccctcaccaaggacatatgctacactgtaagggatgctgtggattggttaaattctcctaccgcgagacggttcatgaaaggctccaaccacagccctttgcagttttgttaatcagttagataccgctcagacggttgatgtagaacaaggttacaaggcaaaggctctgtggctccagcatcaacaatctaaagacggaggttttgcgtatggtctatgttggaattgatgtcgcaaaggacaagcacgattgcttcattctcggttcagagggtgaggtgttggcagatgtgttcaccgtccccaactctatggagggattccgctgtctgctggaacggctgcgctcagtcactgacccggaggacaaaataaaagtaggacttgaggcgaccgggcattacagctataacctcttggggttccttcttgacaatggtctgtccacccatgtcctgaaccccctgcacaccaacctttaccgaaaaagcctttcgttgcggaagaccaagacggataaagttgacgcacgtaccattgcggctatgctcatgtccgatttgggcctcaagccctacacggacacagtataccacaacgaggagctgaagtcactcaccagataccgcttcgacaaggtcagagaacgggctaagctgaagcagtccattgcccgactggcttgtattctctttcccgagctggagaagctggttccctcactgcacatgacatcggtctacgcccttctggacgagttccccggggccaaacaaatcgcagaagctaacctgaccagactgaagcatctcttaggcgacgcttctaaaggtcgctatggccgagacatggcccttgccatccgggatgctgccagggcttccgttggttccattatgccagctaagtctttggaactgcggcataccatccatctcattcgggagctggatgccgaaatcggtgaggtagaggattctatccaggatatcatggaaaagacaggctctcccattaccaccatcccaggcatgggcttccgcatgggagctatgatactggcagaggtgggtgacttctcccggtttgattccccggacaaggttttagccttcgccggtctttctccgtccacataccaatccgggcaactcagcaactgctatgcccacatggagaagcgaggctcaccgtatctccgctttgccctctacaacgccaccaagtacgtctgccactgggatcctgcctttgccgcctaccttgctaagaaacgagctgaaggtaagcattacaacgtggcactctctcatgctgccaagaaactggtccggctgatttgcgctatggagaagtccgggctgccttaccagccagcggcttaacttcctctcctgccgctatggcgtcccttgcggacgtctgctttgctttacccttttgcaaccgtcttgctcatggcatctctccacatattttgacttgacttttaatagttagt

SEQ ID NO: 3195 - DNA, 1353 bp, unidentified
  source 1..1353: mol_type = unassigned DNA; note = element_4a48278
  misc_feature 1..2: note = core
  misc_feature 3..302: note = LE
  misc_feature 303..1103: note = CDS
  misc_feature 1104..1353: note = RE
  misc_feature 1117..1339: note = bridgeRNA
gatgaggtgggtggcacctgctccaccggcatcgaatgtgccaaagtgcagttactttgaactgctaggaatggagccacccaatgacagttaaaactatcggcctagatttggccaaggacgtatttcaagtgcatggcatatccgagaatggacgtgtcattttcaacaaagcgatcaagcgggcaaagctgctcgctttctttgaagcgctgccaccctgtagggttggaatggaagcctgtggatcgtcacaccactagggtcgtacgttgcgacaactcgggcacgatgttcggctgatgccagcaaactatgtgaagccttatgtcaaacgcggtaaaacagatgcggctgatgccgaggcaatctgcgaagcagtcaggcgtccgacaatgcgctttgtcgagatcaagactgaggatcaacaggcgctactgtcgatccatcgcacccgagatttggctgtccggcagcgtacccagatggctaatgtgatccgtagtctcctgcgcgagtttgggcatattctaccgatcggggtcgaagcggtcaccgcgttcgcaaaacgtcatctagatggcgatcacccagatatgccagatatagctaacggaatgcttggtatgcagtgttatcagtttattggcttgaacgaacgaattgcgggatattcaaaaatgatcgaacagcatgcattgttgaacgcagatgctcgcaggttaatgcgcatgccgggcgttggcccaattacggcgtcagcaatcatagcaacgattggcgatgcacagcaatttaaaaccgggcgtgattttgcagcttggcttggccttacgccactcaacaaatctagcggcggaaaggaacgcctcggcaagattacaaagaaaggtgatcgctatattcgcaaactgttagtcgtcggcatgacgtctcgcgccgtgatggcaaaacgttcgccagagaaagtagacctttggacggcaaagatcatcgctgacaagccgttccgactggcgacaacagccatggccaacaagtccgctcggatcatctgggcgatgctcacaaagaaacaggaataccggcagccagcgttctaaccgcgctaactgcctagagatgcaagacgttgaagtgatgatgcggaattaagtcaaccataagcaaggatactccgggaatgtctgcggcccaccgaggtcgttaagccgtatggaacctcgcttgcggaattcatcagggccagtggaggcaatgccaaaacataaacaggccggacacacgactgtactgacgaaaatgcgcaaacagcacaaaaaaacgcttgcaatgcaggtgccacccacacag

SEQ ID NO: 3196 - DNA, 1862 bp, unidentified
  source 1..1862: mol_type = unassigned DNA; note = element_4a4f8f4
  misc_feature 1..2: note = core
  misc_feature 3..120: note = LE
  misc_feature 121..1404: note = CDS
  misc_feature 1405..1862: note = RE
  misc_feature 1536..1803: note = bridgeRNA
agcattcctgttataaagtaaaatgaactttgaaaaaaagagcacctactgataaaatactgggtataacaacttgcaagttttatccctaattaataattatcagtggaggtactcaaaatgaattatacacaaaatgaaaagattatgtcaattacagaaaaaactttagttataggaattgatattggaaagggagttcaatttgcaagagcatttgattacagaggtatagaactaagtaaaatacaatcttttgaaaatactttagaaggctttaaactatttgaagaatgggcagaatcagtaattactgaatatagaaaagataatataattgttggattagagcctacagggcattattggtttaatttagctgagtttgtcagaaatttaggaatcagacttgttcttgttaacccgtatcacgtaaaaagaagcaaggaactagatgataactcacagacaaaaaatgatcgcaaagatcctaaaaccattgcaaaacttgttattgatggtagatattctgaaccgtatattcccgaagggatatatagcgatttaaggatagctatgaatatgaaagaaggtcttactcgaaatcttaatataattaaaaacaaagtagatcattggttagacaaatattttccagaattcaataatgttttcgtagattgggaaggtaaaactgcattaatatcattaactgaatttccgacacctgataaagttttatccgtagatgttcaacaaatagttacaacgtggaaaaagaaagttaaacgtgggatcggatttaatagagctgtaaagcttgtggaatcagctaagatttcagtaggtattacagaaggacttaaaatggctgagaaagaacttaaagctgacttagagcagtatgaattatacatcaagcaatatgaggaattagagaaagaaatagaggaattagcgctgcaaataccaggggttaaagaaatgttaactattaaaggtgtaggaataatgactgctgctggatttatttcagaggttggtgatataaaaagattcactcatcccagtcaaattcagaagcttgcaggtttaaatttaattgaagatagttctggtaagcataaaggtaagacgagtataagtaaacgtggaagatcgaggcttagagcacttctattccgagtaataatgccgttagtatctaagaataatgaatttaagatactccatgaatattacacaagcagaaaagaaaatccgttaaagaaaaaacaatcattgattttattatgttgtaagcttataagaatattttttgcaataatgaataaacaagttgaatataatccacaaaaattaataaaagatactggatttgatatcctacctatggtagcgtaagttacttatccacaaagcatatctatttaaatcatatttgaaatgatccacaacatatcgaaatctgagtcttcagcaataagtgtggaaaactaataaaatttttacagtcttaaattgatctttgaaaaaagaaactgggattagtcaggtttgaaaattttccattagggcatggacccggtctaggagcatatgctgacatccgcctcttggatagactgaacgaaggaatttaggacatagatcctgtgagacgtggaagggtaagttaccagagttatagcggacatctaacggtaaccataattttacaaataagtataactctatttaggtcgtccatgcatgtccatataattcaatatattcaacagatatccaaatgatttctttttacaataatgaaattttaagaataagagagatattaagagaaaattaaagtatagagagga

SEQ ID NO: 3197 - DNA, 1489 bp, unidentified
  source 1..1489: mol_type = unassigned DNA; note = element_4a51412
  misc_feature 1..2: note = core
  misc_feature 3..241: note = LE
  misc_feature 242..1234: note = CDS
  misc_feature 1235..1489: note = RE
  misc_feature 14..232: note = bridgeRNA
ctaatgagtgctaggagctgccggatccggcaagcttctggtgggtaggtagccgccggcggatgagcactgacgtcctctgaacgtgggagttcttagtgaagaccgtgccgccgccggtcggctgggagaacagaatcgctgatgggatgtcgtgcctttgagcactggttcattaggtcgctgatggttctcctgccggctgcaggcccgcgtcgttgctggtcgtggacgggagagcgtgttgctgttcgtgggtgatgactgggccgaggaccatcacgacgtcgagttgatggatggttcggggcggcggctggccaaggcgcggttgccggagggtgtggcgggtatcgcccggctgcacgcgatgatcggcgagcatctcggcgaggccgacagtgagtcggcgcaggtcaagatcgggattgagaccgatcgagggctgtgggtgcaggcgttgatcgccgcgggctacacggtgttcgcggtgaatccgttgcaggcctcgcggtatcgggaacgcctcgcggtgtccggggccaagagtgacgccgcggacgcgcacatgctggccgacatggtccgcaccgactcgcaccagctgcgtgcgatggccggggacagcccggacgccgaggcgatcaaggtcgtctcccggatgcacaaaaccatgatctgggaacgtgaccgggcggtgctacggctgcggcacgcgctgcgcgactatttcccggccgccctggccgcgttcgacgacctcgacgccgccgacagcctcgaactgctgggcaaggcgcccgagccggccgccgcggcccggctgagcctgactcagatcagcgccgccctcaaacgcgcccgccgccgcggtgacctcaccgccaaagccaccgcgatccagacggtgctacgcaccggacacctgggtcagccggccgtggtcgccaccgcctacgcggccacgactcgttcgctggtcgcgctgctgctgaccctcaacgagcagatcgccgtcctgcaacaggaggtcgaggcccattttggccggcacccggacgctgagatcatcctgtcccagccgggactcggtgctgttctcggcgcccgggtgcttgccgagttcggcgactaccacgcccgctacgccagcgcgaaagcccgcaagaactacgccgcgaccagcccgctcacccgcgcctccggcaagaaaaagatcgtcatggcccgctaggtgcacaacgaccggctcgccgacgccctgcagggccaagccttcaccgcgctacgcgcctcacccggcgcccgcgcctactacgacaggcaacgcacccgcggcatcggccaccgacccgccctgcgacaactcgccaaccgcctcgtcggcatcctccacggatgcctcaaaaccagcaccccctacaacgaaaccaccgcctgggcacaccacctcgaccaagccgcttgacacccctggcacatgggatgt

SEQ ID NO: 3198 - DNA, 1306 bp, unidentified
  source 1..1306: mol_type = unassigned DNA; note = element_4a5461a
  misc_feature 1: note = core
  misc_feature 2..67: note = LE
  misc_feature 68..1090: note = CDS
  misc_feature 1091..1306: note = RE
  misc_feature 1101..1292: note = bridgeRNA
taatgggatggactacctcctccctttgcgcttaactgaacaaaatacgttcagcaggagaataaacatgaatatcgtctatctgggtatcgatctggctaaaaatgtttttcaactctgtggcttaaaccaggctggaaaacctctctacacgaaacgcgttgaccgaaaaatactgcttcagacagtagccaatttaccagcctgcctgattggtctggaagcctcaacgggagcattttactggcagcgtgagtttgaaaaactgggacataaagtaaaagtcatcagcccccagtatgttaaaccttttgttcgcgggcaaaaaaatgacggcaatgatgcattggcgatcgcgatagcgctgatgcagcccacgatgaaatttgtcccgccaaaaagcccggagcagcaggatattcaggccttacatcgtgcaaggcaacggatcgtcaatcatcgtactgcgacagtctgtcaaatgcgagggttgttgcttgaccgagggatccccattggtaccgctgtcacaagggcccgtcgggctattcctttgatcctggaagatgctgaaaacgggcttagtgcacgtatgcgtagaacgattgcggaactctatgatctctttttagatctcgaacggcgtataagattttttgataaagaaatcgacatcgttttcaaacagtccgaagcctgtcagcgtattgctaaagtgaaaggtattggccccaaaaccgccacagccgttattgcggcgattggtaaaggaacagaattcaaaaatggccgccattttgctgcgtggcttggcctcgtaccacgtcaacactcgagcggagacagacaggtactgatgaacatgacgaaaaaaggcgacaagcatctccggaccctgtttattcatggtgcccgcgctgttgtcagagtggctacaaataataactatggctatttaaatcaatgggttaatcaactaaaggaacggcgcgaattcaacaaaacgactgttgcagttgccaacaagaatgcccggatcatatggtcaattcttcataacgagacagaatatcaaccagcaacaatatgatacttgccttaaaagttgcagagtattgaaaaatggtaacaggttgcacctgcacaatcggaacctgatttttatacaggccttcgaggccgtccagttgttgaggcgattgtgtgcggattacccatttgggcacaggaactcctgatgccggatagatgtaagcaacaacctaaaaccagattcaatgcttgcaaaacggaggtagtccataga

SEQ ID NO: 3199 - DNA, 1110 bp, unidentified
  source 1..1110: mol_type = unassigned DNA; note = element_4a640fa
  misc_feature 1..2: note = core
  misc_feature 3..169: note = LE
  misc_feature 170..1099: note = CDS
  misc_feature 1100..1110: note = RE
  misc_feature 1..168: note = bridgeRNA
cctgtgtatttgaactgtggtagaagggttgcgggcggaaggccgtaggaatcctggtcgtgagagaccgtatgctggctcttggtcctccgcccgcttcaaaaatcccaacctgaacagttgattgaggccgttgccgcggacctcgtagcacaggatgaggcttgccatgatacaccctgttttcatcggatgcgacgtcgccaaggcgcatctggatcttttcgataaccagacgcagaagcatgttcgcatatcgaatacgtctgacgccattgccacatggcttgcgtcgctggccgagcgcgacgttacggtcatcctggaggcgaccggacgctacgacaggcttttgtgcgcggcgctcgaagacgccgagcggccttactgccgggtcaatcccgccagagcccgcgactttgccaaggcgctcggccttttggccaagaccgatgtcatcgatgcgcgtatgctggccctgatgggccagaccctttccccgccagtcagcatgccgctcgatgcgtcgcgccggcagctggccgatctgcatggccgccgcgaccagctggtggccatgcgccagcaggaacgtgtgcgcttgaaaggcgctgatccgtcccagcatgccagcctccaaagccatatcgcctggctcgatgctgagatcatcaggatcgagaaggcgtgccgcgagcacgtgcaggccgaccagaccatgagcgagcagaataacaggcttcgttccataccgggcatcgggccggtcatcgccttcacactgcttgcccatatgcccgaactcggcagccggtcgccaaaggccatggcggcccttgccggtcttgcacccttcaatgcagatagtggcacccagcgcggcaagcgtcatatccgcggcgggcgcaagcgggtgcgcgatgcgctctacatcgccgctttcgtcgcatacagaatgaagacgcccttcgctaaaacggcgcaaacaatgatggcaaagggaaagccgccaaaggtcatgctcatcgctatcgcccgcaaaatcctcatcaccgcaaacgctttgatcagggataagacgatgttcaatccaacctaacaatacagttg

SEQ ID NO: 3200 - DNA, 1293 bp, unidentified
  source 1..1293: mol_type = unassigned DNA; note = element_4a6a60c
  misc_feature 1..2: note = core
  misc_feature 3..243: note = LE
  misc_feature 244..1215: note = CDS
  misc_feature 1216..1293: note = RE
  misc_feature 53..218: note = bridgeRNA
atcgtatattagttattagtggatttcaattcctttttttgttagatttactgaagaaaggatatagggaaggcgataaagattaagattgtcattggttattaaaaccgttcagaatgttaatcacgccttccccccttcttgaatctggacagtacattaggctacaagcctgcatttacgatgatagagaccaagaaggaccatatcctaacaaaacattaactaatatagtgaggtagtatgaaaaagtcaataggaattgatgtgagcatgaatacggtagatgtagtaaggtacgatggcaaatttacaaagaacacacagtataaaaatacggtggaaggatttcaaaagcttgaggatgaaatttcaaaaggagatacctctgaaactatcataacgatggaagcgacggggatatatcatttgcaagcagcatattattttagtgaaaaagggtatacggtatcagtagtaaatccattgataataaaacgatatagcgagatgaagatgctacgggcaaaaacggattcagtaaacgcacggacaatcgcagagtatggatttcatgaaaaaccatggtatttcatacaaaaagatgacggtagagatcatattgtgcagcttttaaagcaaatagacgcactgcatactatgcgaacagaaaataaaaatagacttcatgctttacagaggataccccatgcagatacaaaagctctggaaatttaccaggagattgacactatgctaaaacggaaggaacaggaagcagagcaaagaatagatacaatagcaaacgagttgtatgctgatgtgtacaaacgtcttttagctataccaggagtaggcaaacgattagcatcactgatactgggattttttggggaatttgaaaattttagtaatgccaagcaggtttcgagttttataggattaaacccatcagcgaaccaatcgggagtatcggtacatggtagaggtgttatatcgaaaaagggaaataggtacatgcggaaaatattttatatggcagcattatcagcaaaagaatacaataagacatgtagggagcaatataatcgtttaataagcaatggtaagtgtaaaaaggtagcgttagtggcggtagcaaataagctggcaaggcagatatttgcaattgtgaaaaatggaatgatttatgatccatggtatcaaaaaatttaatttttttttgacatggaacacagtacattctgagtcccgacaaagtcgggacgaagaatctcatgattataccattag

SEQ ID NO: 3201 - DNA, 1322 bp, unidentified
  source 1..1322: mol_type = unassigned DNA; note = element_4a6bffd
  misc_feature 1..3: note = core
  misc_feature 4..219: note = LE
  misc_feature 220..1218: note = CDS
  misc_feature 1219..1322: note = RE
  misc_feature 39..199: note = bridgeRNA
cattgtatatttaaattaaataattacttttacactcgttaacaacatcaaggtgtggagcaaggccgctttttcattcgtcataagacagtaagaaatgttccgcccccatatctttacatccgaaaccgaacagttcaatgggctttgaccccgtatttgcaatgatggctccacgatgtttgagatgttgtatgatacattaaattctttatagttatgacttacattggaatcgacgtcagcaaggacactttcgtagtggcttactcaccggagaaggccagcaagacgagaacctttaagaacaccactaagggtattcacgagttcatccagaccgtctccaaggataagcaccattgtgtcatggagggcacgggcaactatagtgccctgcttgtctatctgctttccgaggcaggcattaccacgagtctggagaatcctctgaaggtgaagaacttcgcccgtgtcatgctctcaacggtcaagacagatgaggttgacgcccgtctgattgccctctatggggaaaagatgaatcctgcgccatacaagctccgcagtgaagccatccttaccctgaagcagaaacgcaccgtcatccgtcagctcaagaagcagctcattgctacgaagaacctcaagggttccatggaggtgctgccgttctttgattccaagtgtaggaagtccatcgaacaggccatcgctttccttgaaaagcaggttaaacacctcgaagaggatctgtcagacttagccaacagcgagtacaagaagcagatggatttgcttacttccatcaagggtatcggtgttaccctcgctgccgcactcatcatggctaccggtgggttcacctactttgacaatgccaagcaactcacccgttatctgggtctgtcgccaagctatcagcagtccggtacctcagtcaatttcaaaggtcacatcaaccgaaacggagactcctcgctcaggagccaactctacgtggcggcattctcctcgctaaggtgcaatgccgagtgcagggcctgttacgaccgtctgcggtctaacggaaagtcagggaagctcgctgtcattgccgtggcaaacaaactcgtccggcaggcttttgccgttgtcactcagcagagaccttatgtcgatggttatgtctccacattgaggtcggctcctgcatcctcggaaacaggtgaaggatagaagctaatacctgaaaaacaccgaggggattgggggcgagctacccccatgagagggttctgtgttaaaaacacttaaccacataagatttccttattacagtt

SEQ ID NO: 3202 - DNA, 1447 bp, unidentified
  source 1..1447: mol_type = unassigned DNA; note = element_4a6e722
  misc_feature 1: note = core
  misc_feature 2..229: note = LE
  misc_feature 230..1429: note = CDS
  misc_feature 1430..1447: note = RE
  misc_feature 9..233: note = bridgeRNA
cgttaccttcttcccgccccggttatgctggggtcggccagctaggcccggcatgactctctgccccccagtcgtccatgatccggggggtgttgtcaccgggcctggccggcagctagtgatcgctaataggggctcgacccgggttctccgaggtcgtccgtaacgtggatgccgagactagttgccatcggtcgctggcctctcgttatcaactttaggagtacgcatgactgacattgaacagcatgggtgcgacgtcttcgtcggtgtcgacgtgggcaaaggagcacatcatgcggttgccctggatcgccaaggcaagcgtctactggacagccctttgcctaacgacgaagcaaagctgcgagcactgatcacaggactgaagaggcacggtcaaatcctgctcgttgtggatcaacccgccaccatcggtgcgctacccgtcgcggtggcccgtgctgaaggcatcggcgtggcttacttgccagggttggcgatgcgacggatcgctgatctgcatgctggtgaagccaagaccgacgcacgtgatgcgtacgtgatcgcagaggctgctcgcagcctgccgcatacgctgcgatcactgaagctggccgacaatgaactcgccgagctgacgatgctgtgcggcttcgacgatgacctcgctggccaagtcactcagaccagcaatcgcatccgcggtctgctaacgcagatccatccggcattggagcgcgttgtcgggccgcacctggatcatccggccatgctggatctgttggagcactatccctcgcctgctgaacttgcagcggtgagcgagaagactctggccaaccggctcaccaagcttgctccgcgcatgggaaagcgctgggccgcggagatcgcgcaggcgctgagcgaacagacggtggtcgttttgggaacccaggctgcaagcattgtcctgccacgcttggcgcagcaactggcgacattgcgtcgccagcgcgatgaagtcgcgaaggaagtggaacggctcgtgcttgctcaccctcttcatccggtcctgaccagcatgccgggagtcggggtcaggaccgctgccagactcctgatcgatgttgcgagccgagtgtttgcctcggcgggccatctcgccgcctatgcaggccttgcgccggtgacacgacgttcgggctcctcgatccgaggcgagcatccgtccaggcgcggaaacaagcaactcaagcgagcgatgttcctgtcggcgttcgcagcgttgcgcgatccgatctcacgggcttactacgcccgcaagattagtcagggcaagaggcacaaccaagcgcttatcgcgcttgctcgccgccgctgtgatgttctgttcgcgatgctgcgcgacggaaccctctacagcccgccgcagtccgaaacttgattgacaaacacatagggg

SEQ ID NO: 3203 - DNA, 1399 bp, unidentified
  source 1..1399: mol_type = unassigned DNA; note = element_4a7884e
  misc_feature 1: note = core
  misc_feature 2..79: note = LE
  misc_feature 80..1123: note = CDS
  misc_feature 1124..1399: note = RE
  misc_feature 1121..1387: note = bridgeRNA
atgttggggtggacggcccccaaacggcatcaaatgtgccaagattgagtcgttgaaaacctcaagaaggagaccgtccgtgaacgatattatccgcattgggatggacacgtcaaagcatgtgttccagctgcacggtgtcgatgctgccgaaaggcctgtgctgcgcaaaacttttcgccgcaaagagatgatcgagttcttctcaaagctgccaccaacgcaagtggcgatcgaagcatgtggcgcttcgcacaactggggtcggacgcttaccggctttgggcactcggtgaagttgattccgcctgcctatatcaagccttatatcaagcgcggcaaaaacgacgcagccgatgcagaagcgatctgcgaggcgatgagcaggcctacaatgcgcttcgtgccgatcaagtcggcggacaatcaggcggccttgatgctggtcacaatgcgcgaccggttgatccgaacgcgcactcagctctgcagcgcgatccgcggccacgctgccgagttcgggctgatcgctggctccggaacctgccgcgtggaaccgctccttgatcgtatcgctgccgatccagaagtcccgcatctcgcgcgcgatctgttcgcaatgcatgccgaggagctggcactgctgcgggcacggattaaggaagtcaacgggaggcttgctgaatggcaccgctcgaacgcgcgaagtcggcgggtggctcagataccgggtgtcggaacacttggtgcgacattgctggcactaaagacgccggcaccggaagacttccagtccggtcgggcgttcgccgcctggatcggtctgacgccgcgtgatcactcaaccggcggccgggtgaagctgggcagcataacccgtgctggcgacgccctgctcagacgaacactcgtggtcggagctacagcgctgctccgccatatccgcaatgatcgaagcaagcatgcttcgccctggatcctcgagatgctgaagcggaaaccgccaaagttggtcgcggtcgccttggcgaacaagatggcgcgcatcgcgtggaagctcatggtcaccaaccaggattaccaggcacctgctggagccacatcgctggcgagagctgcatgaaatcagccagtcgcggggagcgcagcacgcgcttcgtgccaggccgataaccggaaacttgcaagaagaaagcagatggtgtgatcgatcgatccagagcgcaagaaactccgaacgccgcatcggccctagaggtcgcgtacgtgttaggaactcgcgccgcggaatccatcttggccagcggtcatgtgaggctgcaccaacaggccggacatatgaacgcaaaccatccgatcagctgctgcttgacccttgtaagcgaggggccgtccacat

SEQ ID NO: 3204 - DNA, 1369 bp, unidentified
  source 1..1369: mol_type = unassigned DNA; note = element_4a8b27b
  misc_feature 1..3: note = core
  misc_feature 4..84: note = LE
  misc_feature 85..1107: note = CDS
  misc_feature 1108..1369: note = RE
  misc_feature 1081..1356: note = bridgeRNA
tgatgggttggatgcccctcccaccggcatcgcgatgtgccaagatggtgatacgtaaagtcaccaacacagtaggaggcatttatggaggaagtcagtgtcgtcggcgtcgaccttgtaaagcagttttttcaagtgcacggcgcgactgccgatggccgagttttgtttcgcaagaaactgtcgcggtcgcaatttccgaaatttatagccggacttcggccgtgtgtggttgcgatggaggcgtgtggtacggcacattattggggtcgagaattcgcaagcatgggtgatgacgttcggctgatccccccagtctatgtgaaggccttcgtcaaaaggcaaaagaatgatgtcgctgacgcggaagccgtagcagaggctgcaatgcgaccgacgatgcggaccgtctctgtaaagacgtctgaacagcaagctcgtgcaatgttattccggacccgcgatcttctcgtcggacagagaacgcaaatggtgaacgccctacgaggtcacctcgcacagcacggtatcatcgtgggcaaaggattaggcaacgttgagcggctcgcgacgctcattgcggcggacgatttgcctgagttggtacggaccatgggacgcctttatctcagccagatcactcagttgcacgaagagattgatcagatcgatcgtcgtatcgcagcggaagcaaaacaaagcgatatcgttcgacggctccagaaagtgccagggatcggaccgatttgcgcgatggcaatcactgccttcgcgccgcctatggaggcattccgaagtggtcgcgattttgcagcctggcttggccttgtcccgcgacagcactcgagcggaggcaagcaaaagcttggccgcacctcgaagatgggccaacgagatatcaggaggcttttgattataggcgcgatgtctgttgtgcattggaagggccgaggcggtgggggacctggttcttggctctcgaatatgctgggccgaaagccacgcatgctggtggcgattgcgatggcaaacaagctgtcgcggatcgtctgggcaatgctctggcgcaatcaagaataccgagatccaagcggagcggtctgctgaaggtagacgttctaattggagtgccggcgatgtgaggaggacatgatccgcatgggcaaatgatcgaacagatcgggattgggcaaaccagtagttctcaggaagcttttagcgcgttgcactgatttggagtccagtccgcgtatcaccataccggcccgcggcatgtcatcgccgcaacatgaggtctgaaacatgtacgcacccgatcactcgctctggcggtcaaaaaagtccttgcatcgaacggggcatccaaaca

SEQ ID NO: 3205 - DNA, 1387 bp, unidentified
  source 1..1387: mol_type = unassigned DNA; note = element_4a91bf0
  misc_feature 1: note = core
  misc_feature 2..75: note = LE
  misc_feature 76..1104: note = CDS
  misc_feature 1105..1387: note = RE
  misc_feature 1157..1384: note = bridgeRNA
tactgagatggacccgacgcaccttccgggggaaactgaggatctcgttctcacgaaccgatgtggaggcgcaccatggaaatcgatcttctcggcattgacctcgccaagcgtgtctttcaactccacggcgccgatgcgcgcggccgggcggtgtatcgcaataaggtttcacgagcggctctgattgaaaccgtgcgggccttgcgtcctcagatgatcgcgatggaagcttgtggctctgcccaccactgggcgcggcgtttcaaggaggcaggtatcgaggtgcgcctcatcagcccccactacgtttcgcccttcgttaaaacgaacaagaatgatcgcaacgacgctgaagctatcgtcgaggccgcatcccggccgtccatgaactttgttgccgtgaagtcggttgaacaacaggacatgcaggcagcgcatcgcgtgcgcgaactgctggtccagcaacgaaccgcgattatcaaccaggcaagaggtcttctgggcgagcgcggcatcgcgatagcccagtctccagcagccttcagacgagcgatacccgagattctcttgcagagtgagggggagctcaccagcttctgccagtccctgatcatggcgcttgttcagcacctgcgtgcgttggaagaggaaatagctgtcgcagaaggctggattcgctcgttcatgaatcgctcggctctgtgccagaagatcgccgccgtgccgggaatcggcccaattacagcgacggccatcgtcgccgctgtcggtcgggctgacggcttcaggaatggccgtcatcttgcggcgtggcttggcctggtgccgaggcagcactcgtccggtgggaaatcgcaactctacggcatcagtaaaagaggagacaagtatctacggacgctgttaattcacggagccagatctgtcctgatacgcgtgtccggtaaactcgacgcccgcagccgctggctgcaggaattgattgcgcgtcgaggctataaccgagcctgcgttgcgctggccaacaagaatgcacgcatcattcaggtgcttctgagcaccgaagccacatacaagcctgttgcactggctgattcatgagggcactgaaaactacgaagaactcaagttagtggtagcgacataaccatcactggtttgcgaagcttcctgattgtgatgacaaaaccggttagaccagcaccccacgatcctgtactttatgccggccgataaaaaaggccgaactgctgccaaggacggggcgcgcggatctcatcaaggctgcgggcatgctggtaggcccaccaagcaagccggatacatgtttgcagaccgttttacgtcacaaaagaaagcttgcaaaaagcgtcgggtccataca

SEQ ID NO: 3206 - DNA, 1448 bp, unidentified
  source 1..1448: mol_type = unassigned DNA; note = element_4a93ef9
  misc_feature 1: note = core
  misc_feature 2..225: note = LE
  misc_feature 226..1434: note = CDS
  misc_feature 1435..1448: note = RE
  misc_feature 12..231: note = bridgeRNA
ctactagacgattcccctaggaccggcgtctggccagactcggttcaggtgatcggcgggcagctctccatgcggctgcccaccagctcgatcggtgtggctcactatcggtctgcagcccgtcggtcaccgtgacgaggcgtggctcaagaagggactgcccagctcgtagtagcaatgcccacctcgccgacctaaccggacgagcacaggcgggagcagcacatggttcagcgagcagagcaggtcatcatcggggtcgatccccacaagctgtcggccacgatcgaggtcgtcgaccagcacgagcagatgcttgggtctggcaggttcaccaccgaccgtgccggctacaccgcgatgcgcagctacgcgaagacctggccggaccgggtctgggccgtcgaaggggccaacggcgctggacgcccgctcgcacaacgactcctcgaagacggcgaaagcgtggtggatgttccggcgaagctgtctgctcgggtgcgtctcttcgacaccggtcacaaccgcaagaccgacgcccacgacgcccacgcggtcgcggccgtcgcggtgcgcaccaagaacctgcgagtgctgcagctcgacggcgagctcgaagcactgcgaatgcttaccgaccgccgcgaagcgctcacccggcggcgggtccagaccgtcgaccgactccaggccctgctcgcagaactcctgccaggacaggcgaaacgcgacctcaccaccggccaggccaagaccatgctcgcctctgtacggcctcgcgacgtcgccgggaagacccgacgccgcatcgccgccgaggaacttgcggagctgatcgcggtcgaggccaagatcaagacgtcgaccgccgagctgaaggccatcgtcctggcccgcggctcacggctgatggacctgcacggcgtcggccccgtcgtcgccgcacggactctggccgatgtcggtgacgtgacccgcttcgctgaccgcaaccggttcgcgtcctggaccggcaccgcccccctggacgcctcgtcgggcgaacagaaccgccaccgtctctcccgcgctgggaaccggcggatgaaccacatgatccacatcgccgcgatgagccagatccgactcgacaccgacggccgggtctactaccgacgcaagcgagccgagggcaagaagtccctcgaagcgatccgatgcctcaagcgcaggatctccgatgcgatctaccgccagctggtcgaggacgcgcaacgcgccgtcgaggacgttggcacgggtccgggagggcactgcggggcgactcttcaatccagcgcggtcgacctgcacccgcacatcgacacttcggatcagccacttcccggacccgcgaatcagacgctacgcccgacaccgccaacccggaagaggtcactcgagaccaccggttgacaacagaagggagc

SEQ ID NO: 3207 - DNA, 1442 bp, unidentified
  source 1..1442: mol_type = unassigned DNA; note = element_4a9442f
  misc_feature 1..4: note = core
  misc_feature 5..268: note = LE
  misc_feature 269..1432: note = CDS
  misc_feature 1433..1442: note = RE
ctcactggtgcaccatccttgtgtcggtgaccttggatggattgccgatgcacccaaggcgccgctgggttatcgccctgctcgctcgacagccgtgatgtccacgatgagttctgcggagtccggcggtagccccggacgcgccgaccgtcgacaggactgagcgccgacgagcgccgaacagtgagcggcccaaaccactaccctgcccgacgagccgcggaacggcgtcacgggtggaatcgattgggcgcgagatgatcacgcggtgtcgatcgtcgatgcgcgtgggcgcgaggttcgccgcgccacgatcgagcacaacgccgccggactgcgcgagctgctcgagctgctgagccgggccggtgcccgcgaggtcgccatcgaacgcccggacggcccggtcgtggataccctgctcgaggccgggatcacggtggtggtgatcagccccaaccagctgaagaatctgcgcggtcgttacggctcggctggcaacaaggacgaccggttcgacgcgttcgtgctcgccgacacgttgcgcaccgaccggtcccggctgcgccccctgctgcccgacaccccggccacggccaccctgcgccggacctgccgcccccgcaaagacctcgtcgcccaccgggttgcgttggccaatcagctgcgcgcgcacctgcgcgtcgtctttccgggtgtggtcgggttgttcgctgaccttgactcgccgatcagcctcgcgtttttgacgttgttgcccgtttcgactgccaggaccgcgcggactggctgtcggtcaagcgcctggccggctggctggccgccgctggctactgcggccgtgctccacgaccggctcaccggtgccccgcgcggcgccaccggtgacgagggtgccgccaacgcccacatcacccgggccatggtcgccgcgctcaccagcgtcgcgacccagatcaagacgctcgacgcgcagatcgccgaacagctctccttgcacgccgacgcgcatatcttcacctccctgccccgctccggcaccgtccgcgccgcccggctgctcgccgagatcggggactgccgagcccgtttccccacgcccgaatcgttggcctgcctggctggcgtcgccccctccacccgtcagtccggcaaagtcaaacacgtcggattccgttgggccgcagacaaacaactccgcgacgccgtctgcgacttcgccggtgacagccgccgagccaacctctgggccgccgaccgctacaaccgcgccatcgcccgaggacacgaccacccccacgccgtgcgcatcctggcccgcgcctggctctacgccatctggcactgctggcaagacggcgccgcctaccaccctgccaaccatcgcgccctccaggcactgctcaaccaagatcaagaccgggcggcttgacacagggcta

SEQ ID NO: 3208 - DNA, 1280 bp, unidentified
  source 1..1280: mol_type = unassigned DNA; note = element_4a9913f
  misc_feature 1..2: note = core
  misc_feature 3..270: note = LE
  misc_feature 271..1266: note = CDS
  misc_feature 1267..1280: note = RE
  misc_feature 37..218: note = bridgeRNA
tccttgtatgttctcaacacacccacggagagatcgttaatctcctgagtgcgtcaccaaacagatgtgttctgggggagaccgatcggtccctaaggcaggccttgcgcctgaccttgtttgtagaggggtccccccgcctcattgcccaccacgtagagtatcgagaagccgacgaatcggacttcgcattacaaggtcgcagcggcatgaagttcgaggtcaggggaaccagagccatcattacctagtttttctggagatgaaagcatggctgttcacgtcggtcttgatgtcggttcacgcacgacggccatgggatggcgcgataaaggccgatcagccggcgcctgggaaatcactcaaacacctaaaggccgcaaggctgccgtcaagaagcttctggccctcaaaccgctcagcgttgtcatggaagccaccggtatttattacctggatctggcgatagagctgagtgcggccggtttgccagtctcggtgataaacccgaaaagctcccgcaattttgccaggctgaaacttcagcacagcaagacggatgcaatcgatgcccagttgcttgccgaatatggcgagcgcatgacgcctcgcctgtggaccccgccaaccgccgctcagcttgagctgcgggctatcggccggcacatcaatcgcctggtcgggcaccgcacccaagcgaaaaatgagttgcacgctttgaaggcaactgacacgtctgaggcgctgctgatcgaagatgaggaagaggccatcgcagcctttgacaagcgtattgaacgcttcaggaaagctggacttgatttagttgccagttgcccggtgctgcaaggtcagttcgataatatgctggcagcccccggcatgggagaggtctccacgctggccgcgcttgccgaaatggcgaccctgccaacgacattgaagtcaggccaggtaagccgtcatgcagggctggatgtgcggctgactcagtctggaacgagcatcgacaagcctggcaggctcagcaaatgcggcaacgcatacttacgctgttcaatgtacatgccagcgctgactgcgatccgctgcgatccctatgtgaaggggttttacgaggcactggtgggccgaggcaagcgtaagatgcaagcggtctgcgcggtgatgcgtaaatacctgacaggtttgtgggcttgcatgcgcagcggcgaagacttcaatacggccaagcttttcagcgaaaaacatctgcaaaaagcttgatctggaacagagta

SEQ ID NO: 3209 - DNA, 1380 bp, unidentified
  source 1..1380: mol_type = unassigned DNA; note = element_4a9a3a5
  misc_feature 1..2: note = core
  misc_feature 3..77: note = LE
  misc_feature 78..1115: note = CDS
  misc_feature 1116..1380: note = RE
  misc_feature 1120..1367: note = bridgeRNA
tgatggtgtggacggccccctacggcattgattgtgccagaatgaggttgtcgagatctcatacgagggagccgtccgtgagcgagattatccgaattggaatggatgcgtcgaagtatattttcgtcctgcatggcgtcgacgccgaggaacggaccgtgctgcgcaagcggctgagccggaaggcgatgctggagttttttgccaagttgccgccgacgcttgtggcgatcgaggcttgtggggcttcgcactattgggcgcgagagctggcaaagctgggccacgaggtgagacagattgcgccgcagttggtgaagccgtatgtcgcgcgcaacaagaacgacggccgagatgccgagggtctgtgcgaggcggtgagccggccacggatgcggtttgtgccgacgaagacggccgagcagcaggctgctgtgatgctgttgggcgtccgcgagcagctggtcacccggcggacgcaacttgctaatgcgatccgcggccatgcgacggagtttggcctgatcgcagcccaaggtctggacaagcttgcatcgctgttggagcgaatcgcgcaagacgaaggcttgcccgaactggcccgcggactgttcacgatgcttggtcgccagtatgagcaggtgcaggttgaactgaaggcgatcgaggccaagcttatggcctggcatcgtgccgatgcgacgtgccggcggctggcagagatccctgggatcggtccggtcacggcggccgcacttgtgatgaaggcgcccgatccgcacgccttccgctcgggccggctgtttgcagcctggctcggcttgaccccgaaggaccattccactgcgggaaagaccaggctcggcacgatcacccgggcaggtgatgagaccctgcggagccttttggtggtcggggccacctcggtggtcaagctggccaaggggcccaagcaacgtgggccacgctggctgatcgagctcttgaaacgcaagtcgccaaagcttgccgctgtggcgcttgccaacaagatggcgcggatcgcctggaagctgatgacgacaggcgaaagctacagggcgcggattgatgccgctgcgccgacccctgcctgattgagaacgtcggctggcggtgtcgtgtctccgctggtcgaaccggagctgcaagagcagatggagtaggatcaatcgatccggtatgcgagctaaaccgtgggacccattggcctgacagaggtcatgaggttgattggagctcgcgtcgcggaagccatcttggccagcggtcaaactcgccgcaccaaaaggccggacatatggatgcaagcgatccgatcccacctcaaaaagctcttgtgccacgggggccgtccacata

SEQ ID NO: 3210 - DNA, 1281 bp, unidentified
  source 1..1281: mol_type = unassigned DNA; note = element_4aa297c
  misc_feature 1..2: note = core
  misc_feature 3..234: note = LE
  misc_feature 235..1269: note = CDS
  misc_feature 1270..1281: note = RE
  misc_feature 17..237: note = bridgeRNA
ctgacttgtctactgggggcaggcgcttgggtctgcagcccgtagcgtcagggcgccggtcggcgcaggttcgcaggctccttgccacctaattgggttggctcactgatagcgtgccgagccggccggcgcccggccgtggcgtggctcgacagaggcatgcgatcgatcttcaagtcagggtgcccaccacggcgatcctccatcaccccattgccgtggagagcagccctcgtgatcacgatcggaatcgatccgcacaagtcctcactgaccgccgtcgccgtcgacgccaccggccaacagttggccgcccgacgcttcaccgtcaacgccggcaccttcggccagctgacccgatgggcggaccggtggccgcagcgccgctacgccgtcgaaggcgccaacggcctcggccgtggcatcgcccaacaactggccgccgccggcgagaccgttctcgacgtgcccgccaccctcgccgcccgagcccgtctgctggacaccggcggcagccgcaagaccgacaccgccgacgcgtccagcgtcgcccacgtcgccctgcgccaccgcagtctgcgccaggtcacggccgaagaccagagcaccatcctgcgactgctagccgaacgccgcgacgacctggcccacgaacgcactcgaatcctcaaccgcctccacggcatgctgcgcgacctcatccccggcggcgcccccaccgggctgtccgcggacaaggccgccgccctgctccgggcaacccggccgaccaccgccaccgccgcgtgccgccgcgacatcgcccgcgacctcctggctgacctccgccgcctcgaccgccagctcagagccaacgaggtgtcgcagcaagatgcggtcgctgcgaccggcagcacactgtccgaggtccacggcatcgcggtcgtgttgtccgcgaagatcctcggccacgtcggtgacgtcagccgcttcccgaccgccgatcacttcgccagctacaccggcacgtcaccgctggacgcctccagcggcaaccgcaaccggcaccgtctcaacaccggaggcaaccgccaactcaactccgcgctgcacaccatcgcggtctgccaagcccgcgaccccggccccggacgcgcctactacctgcgcaaaatcagcgagggcaagacccctgccgaagcccgccgcgccctgaaacgacgcctggcgaacgtcatctaccgccacatcctgagagatcaaaaacgtcggccggccatgacgacttgacacacagaggcg

SEQ ID NO: 3211 - DNA, 1356 bp, unidentified
  source 1..1356: mol_type = unassigned DNA; note = element_4aad75c
  misc_feature 1..2: note = core
  misc_feature 3..72: note = LE
  misc_feature 73..1077: note = CDS
  misc_feature 1078..1356: note = RE
  misc_feature 1119..1353: note = bridgeRNA
ttaatgagatggtcacccccaccctgtgagcggtacgctgacagggtgtttttctttctgaaggggctcatcatgcaaaacgttacgctcatcggtatcgacctcggcaagcattcgttccatctccacgctcaggataaaaacggcaatgcattgctacgtaagaagttctcacgtacccagttaaccacctttctctctacctgtaccgcttctaccgttgttatggagtcctgtgctggcgcgcattttatggcacgacacatcagccagcttgggcatcaggtcaagctcatttcacctcagttcgttcgcccttttattaagagtaataagaacgattttattgatgccgaggctatttgcgaagccgcgtcaagaccttctatgcgcttcgtgaccccgagaacggaagaccagcaggcgatgtcagctttgcatcgcgttcgtgatgctctcgtcagggaccgggttaaaaccaccaatcagatgcatgctttcctgctggagtttggcattagcatgccgcgcggcatcgcggttatcaggcgtcttgccgtggtgcttgaagagcacgaactgccgccttatttagcgcggttgcttatgcgactccaccaacactacgcctacctcacagaacaaattgaggaggtcgaacaagagctaaaaatccatatggctgaagacgatacagcccagcgtttattgactattcccggcgtcgggcttatcacggccagctttttagccacgaagctcggcgacggaaaaagttatgcctgcagccgggactttgctgcatcaacggggttagtcccgcgtcagtacagcacgggtggaaaaaatacgctaatgggaataagtaagcgcggggataagaatctgcgacggttgctggtgcaatgtgcccgggtatttatgcagcggctggaacataaccgagggcgtctggctgactgggtaaaggggcagctaacgcggcatcattcgaacgtggtggcctgcgggttggcgaacaaactagcccgaatagcctggtcggtgacaacccatcggacagcttttatccaataaaaaagagccaacagcgacgaacagttagcgcttaggtgttacgcagtgactttctggttttgcgatgactgattattgatgacatgaacggcacagcgacctgtggatgaacctgacataaaaaatggctctttgaagccgtccggtttttaaggttctgcaggcgcggacttcatcgtggcgcgggcaacgtaaggttgcccatcagacgccgtatagatttaagcaagcccatcataaatcaaaatcggtgttgcaaaaacgggggtgaccatagat

SEQ ID NO: 3212 - DNA, 1349 bp, unidentified
  source 1..1349: mol_type = unassigned DNA; note = element_4ab670e
  misc_feature 1..2: note = core
  misc_feature 3..323: note = LE
  misc_feature 324..1103: note = CDS
  misc_feature 1104..1349: note = RE
  misc_feature 1120..1347: note = bridgeRNA
atgaaatggctacccccgctgccccctgtgatcgcccactaagctttcaccgggggctcatcggagatcattgccatgaacaacgtagctatcgccgccatcgacctcggaaaacatacctttcacctgcatgcgcaagatgatcgcggccacgaggtttaccgcaaaaaatttacgcggacggcgctcacccggcacctcgcaaatctcgccccctgcaccgtcgtgatggaagcctgcggcggcgcccacttcatggcgcaagaggtcgccaagctaggacatacacccaagctcattgccctcatctcgtgcgtccgtatgtgaaaagcaacaaaaacgacttcgctgatgccgaggcgatctgcgaggcggcgacccgacccacgatgcgttttgtgccgcccaaaacccaagcccagcaggcgctggccatgtccaactcgctacgtgagtcgttcattaaagaccgcacggcgaccgtcaatcggattcacgcagcccttctggaggttggcgtcagcctggccccgggcttcaaaaccatcaaagagcttccagcgttgcttgaggtgagttcattttctgaacgcatcaagaaaaatctgatgctgctgcatgggcacttcaactatctggatggacaggtcaagtcgctggacaaggaggtggagtgccaggccgccgaagatgatctggcggcgcgcttgatgaccatgccgtgtgtcggcccgatcacctccagcgccctggctgccgagttgggcgatggcaaacagttcaaatgcggccgaggctatgcggcctcgatcgggttggtgcccaaacaacattccacgggcgacaagaccgtactgttgggcatcagcaaacgcggcgatcgaaaccagcgacgcctgctcatccagtgcgcccgtgtgtacttgatgcaactggatcgacagaaaggcgctttggcggactgggtccgccagctcttggcgtcccgccatcactccaatcttgtggtttgcgcgttggccaacaagctggcacgaatcgcctgggcgattgcggcacaccacactgaattcgatgcggggccagccgcgatgaacgcctgaccccgctgtcacccgagcaccacccacctggttttgcgatgctggataactgatgacgtgaacggccaaccggcctgacgacaaccctgggctcctacacggctgaaaggccgttaccctaattagggtcgttgggcatcgattctcatcgaggcgcgggccacaaaccccacttagacgccggatagatgaaagcaagccaaacacgcatcaagaacagtattgcagaaaagggggtaaccatag

SEQ ID NO: 3213 - DNA, 1732 bp, unidentified
  source 1..1732: mol_type = unassigned DNA; note = element_4abd5d0
  misc_feature 1..2: note = core
  misc_feature 3..275: note = LE
  misc_feature 276..1586: note = CDS
  misc_feature 1587..1732: note = RE
  misc_feature 54..332: note = bridgeRNA
ctcgtataatatcttttagatacataaatacatgtatcttggttaccaaataaatattgttcaataggcttaataaaacccatgatataattgtcccagtgtcaatcaggtaatagttcttctcgctcctgttgaaccagtaatggttgcttcattgaaagtctgttcccctgacatggaagttagcttcatatcggctggctgtttgcttaagtacatggacgaccatctagcagtgtggtttcgcatctgtccatcttaagctggattcctatatgcgagggtgtcgatgctccatgatcatgggttttaccaagccgattgaacactttaatccacaacgaaagaaggtgattacaatgaacacactttacgtcggtattgatgtaagtagcaaatccaatgtcgtttacctaatgcttccaaatggtgacaaacacagtaacttttctgttgctaactcacatgaaggttctacacaactggtaaaaagaattctttctgcgttaacttcacattcccttgacacggttctgattggtcttgaagcaacctctgtttatggggacaatctcgtgtatttcttaagggaagatgcctctctggcatcgtttaacagaaagattcatgtccttaatcctaagcaggtcaaaaagtttcatgatacttataatgacctgccaaaaaatgattatgtggactcttttgttattgctgactgcctgcgtttcggtagaatcaacaaagaggtttatctcggagactatcgctacaaagcactccagaacctcacacgggcacgtttcttcgctgttcaaaatctggtaaaagaaaagcagcgatttatgaatgtgctgttcaagaagtattctacgatgacgcaggagaaggtattcagcgataccttcagcaccaccgcccttgctgtctacgatgaatttgaatccgcagaagcactggcaaatatggacttacatgagcttactgacttcatcattgaaaaaggaaagaaccgttttcctgatcctgatgcagtagccaaagccattcagaaagctgcctgcagttcttaccgtttacccaagacggtaaatgattctgtcaatcaggtgctttctatatccataacctccatgaaggcattggaatctcaaatcaaagagttcgataaagctattaaatcccagatggaactcttgccaaacgtattgatatccatttctggtattggacctgtatactcagccggaatcatggctgaaatcggtgatatcaatcgttttaacagtcaggctgctcttgctaaatatgcaggacttgcctggaagcagcaccagtccggtggttttgaatccgaagttacaagactcattccatctggtaaccgatttttaaaatactatctgtgtgaagcagcattttctcttgtaagatgcgacaaggaatacagcgacttctaccacctcaaatacaaagaggtaaacagatgccaacacaaacgtgcactcgcattaactgcccgtaaatttgtgcgtttagtctttcgactgctgaaagacaaccgcctatactgtccggcaaagtagattcatctacttgctgatgagctacgccctgctcatttttaaaaaactggtcgacagggcttaggtgggtgttttttgtcttcttgagatatatacaaaaatatatgatttttatgttatttatctcttgacatcacaccgctgga

SEQ ID NO: 3214 - DNA, 1376 bp, unidentified
  source 1..1376: mol_type = unassigned DNA; note = element_4abf7dd
  misc_feature 1..3: note = core
  misc_feature 4..83: note = LE
  misc_feature 84..1124: note = CDS
  misc_feature 1125..1376: note = RE
  misc_feature 1109..1363: note = bridgeRNA
tgatggtgtggacggcgctcgcgagcggcatctgcgtgccaagatgatcgtcgttgcaggacatcatcagaggagcgccgtccgtgaagcagattaccacagtcggaattgatctggccaagcgcgtctttcaggttcacgcgatcgacgcccatggggcggtgatcgtcagcaaggctgtgcgaagagctggcttgcttcagcttctcgcgaaatttccgccctgtctgatcgggatggaggcgtgcgcgtcgtcgcatcattgggcccgcgagctgatcaagctgggtcatcaggtgaagctgatcccgccggcctatgtgaaggcctatgtccgccggcagaagaacgacgcggccgatgccgcggcgatctgcgaggcggtcggccggccctcgatgcggttcacgccggtcaagacctgcgatcagcaggcggtgctgatgctgcacagaacccgcgccttgctggtgtcccaacgcacggcgctgatctgcgcgctgcgggcgcacatggccgagttcgggatcgtggcgcccgtcgggccgcgcaacgtcgcgccgctgctggagatcctggccgatagcgccgatacgcggctgccggccctggcgcgtcaggcgctcagacccctggcgcggcgcatggcgatgctgcggctggagattgagcggctggatcgccgtctgctcgattggcatcgatcgaacgcagtcagccagcgcctggcgaccatccccggaatcgggccgatcaccgccacggcgctggccgcgaccatcgtcgatccgtcgatgttccggtccggccgtgagttcgccgccttcctgggcctggtcccgcgccagtcctccagcggcggcaaggagcggttgggacggatctccaagatgggcgaccggtatctgcgcaccctgctggtggtgggggccacggcggtgctgcgccacgccaagtctggcggatcgtcttccagggtctgggctgaggccctgctgatcaagaagccgttcaagctggtcgcggtggcgctcgccaacaagagcgcccgcatcgcctgggcggtgatggcccgcggcgaggcgttccgcgagggcgtggaggctcgcgccttggccgcctgatcgagcggccccggcgcaacagggttggcgagggcagagatttgatgcgaaccgggtcagaccggtgaccgggacactccgttgcactgtcggcgcagatcagcgcggttcggtgataggaacccaaggtcagcgaacgacatcagggccagcggctgctcaaggccgcaccaacaggccggacacatgaccgcacccgaccacctcgcatcagctcaaacgcttacttgccaacagagcgccgtccacaca

SEQ ID NO: 3215 - DNA, 1367 bp, unidentified
  source 1..1367: mol_type = unassigned DNA; note = element_4ac0e89
  misc_feature 1..2: note = core
  misc_feature 3..225: note = LE
  misc_feature 226..1179: note = CDS
  misc_feature 1180..1367: note = RE
  misc_feature 29..196: note = bridgeRNA
attgtaagttaaaaacatgatataaatgaagtaagagggaagataactctactcactataggaatagagttatcacgggcgtgtgcgaccgaaaacctattggtattacaaccgtttgtatcaaggtacactagccctatctctcgatacgtttgaatagttgtttgggacatatatatgcgcccgtttacaatctaaaattagctaaaactatcgaggtttattatggttacatcttatcaaaattttattggcattgacatcggaaaatttaaaaatgttgctgcagtttacaaccaaaattacattatcaagttcgacaataatgctgatggttggcaactgttgttcaaaaagttttcagatatcttacccaattctttggtaactttagaaaatacaggcaaatatgagcttgatttatcacattttcttgttgacaagaatattgcagtacatcgagctaatactcgaaaagtaagaagttttatcttgtcgcacggaactttagcaaagtctgataaatcagatgcgatggctcttgctcaatacggatgtgaacgccatagaactctctctctatttgtacctacgtcaaaagaacaatcaactctagctgcactgtgtcaacgtcgtgatgacattacgcaaatgagaactcaggaaaagtgtagactggaagctcctgaaaatgaccatacaagggaaagttgccagaagaccattgaatttttcaatagtcaaataaacgaactcaatgacactatacaaaaaattattgatgaaagccatgagctacaacaacgtcaaaaaatccttaaaacagttcctggaataggcaaaaagttatcacaagattttttgtgtttaatgccagagcttggctacttaagtagaaaagaagtagcaagtcttgccggagtagcacctcatcctaaggaaagtggtaaagctgttggttaccgaaggattatgggcggtagaagtaatgttcgttcaaagctcttcatatcagccatagctgctacaaagtcaaaatctgtacttggtgccttttattctaagcttgttgaaagtggtaagaagaagatggtggctatagcagctcttatgcgtaaaattatagtaattgctaatgcaagacttaaagcagcaattacttcacacagtagcaactgaaaatgaatattgtgaataagtacgtccacacaaacttaaagtacttattcatatattcattggcttaagcaggcaatagctgtttgacataaaattctattcctatgacgaatgggtttttattacctacatgattgggtcaagttgcaaaattacacaaataaaaaattttttaaaaaacatagttg

SEQ ID NO: 3216 - DNA, 1351 bp, unidentified
  source 1..1351: mol_type = unassigned DNA; note = element_4ac6402
  misc_feature 1..2: note = core
  misc_feature 3..87: note = LE
  misc_feature 88..1107: note = CDS
  misc_feature 1108..1351: note = RE
  misc_feature 1122..1338: note = bridgeRNA
tgatggggtggatggctcctgctccaaccagcgtcgcaatgcgctataatgcaggtgtcgatatctgcatatgagaggagccaccccatgcaagttacaacaataggcgttgatctggccaagaacatttttcaagttcacgggatcgctagagacgaagaggtcgtcttcaaccggccgttgagacgcgcacaactattaccgttcttcacgaagcttgaaccctgtctcattggtatggaggcctgtagcaatgcgcatcattgggctcgggagttcacagcgttgggccatattgtccgcctgatcccaccgaagtatgtcaaaccatacgtcaaacgcgggaagtccgacgccatcgatgccgaggccatttgtgaagcggtgacgcgtccgacgatgagatttgttgcgataaaaaccgttgagcaacaagctctgctgtcgctccatcgcgcacgggctctgcttgtccgacaacgcacccagttgatcaatggcttgcgtggtatggtcgctgagttcggcgtttacatcgcgaagggcctcgcgcgggtcatcggatttgcagaggatattttagtaggcgaagtgctagatctgcccgagattgccaatgaggtgatccataacctgtgtgagcacctcgtggcacttcatgcccgaatccggtggtatgaagaacggctcaagctggtcgccaaggaagatgcgcgtgtccgtttattgcgtactattccaggcgttggtgttgtgacagcctcggcaatcatcgccagcattggtgacggccatcagttccgcaatggccgtgagtttgcagcatggctgggtctgacgcctgcaaacaagtccagcggcgggaaagagaaactggggcgcattacgaaaatgggtgatcaatacttacgatgcttgctcgttgtcggcatgacatcacttgtccgacagaccaaatcccacccggagcgcgccagcaaatggctgacatcgttgctggaacgaaaaccagcgcgcgtcgcaactgtcgcgatggcaaacaaaacggcaaggattgtctgggcggtcctgacccgcaacgaaccatacacaccccacacagtttgagagacaaaggaacaacgagttagcaagacctgcgagatgatggtgcataagtctgccgccaaaaccaagacaccccgccgaatggctcgggcattaaagcccgcaaagctgatagggacttggtttgcggaatccatcagggccagcggtcaaaaaccgcgcaaacaggccggacacatgactgcttctgacaaatgcacaaatctgatcaaaaatgtcttgctatgcaggagccatccacaca

SEQ ID NO: 3217 - DNA, 1356 bp, unidentified
  source 1..1356: mol_type = unassigned DNA; note = element_4acc85e
  misc_feature 1: note = core
  misc_feature 2..223: note = LE
  misc_feature 224..1075: note = CDS
  misc_feature 1076..1356: note = RE
  misc_feature 1122..1354: note = bridgeRNA
taatgagatggtcacccccaccctgtgagcggtacgctgacagggtggattattttagagggcaccatcatgcaaaacgttgcgcttattggtatcgatctcggtaaacattcttttcatatttcattgtcaggataaatctggcaatgcgcttttgcgtaagaagtttacgcgtacgaagttgatgcagtttctggcaacatgtccatcctcagtaggtgttatggaagcctgcgctggtgcgcattttatggcccggcgtatcagcgacatcggtcatgaagcaaaacttatctctccgcaattcgtgcgtccgtttgtcaaaagtaataagaatgattttattgatgcagaagccatatgcgaagcggcttcacgaccatcaatgcgttttgtccagccaagaacagaaacccagcaggctatgagggcattacaccgggtcagagaatcgctcatcagagataaggtgaaaacaaccaaccagatccacggtttcttgctggaatttggaatcagtctgccgacaggggatgccgcaataaaacggttgtctctggtgttggctgaacacgaattacctgaatatctgagtcgcttgctgatgaaattacatgctcactatctttatcttattgagcaaataacagaactggaatcagagttaaaccagtcaatcaaagctgacgctactgcgcaacgcatcatgacaatccccggtgttgggccgatgacggccagcctgctctcatcccagcttggtgatggtaaacaattttcatgcagcagggattttgcagcatccacaggacttgttccccgacaatacagtaccggtggtaaatcaacgctgttggggatcagcaaacgaggaaacaaaaatttgcgtcggttacttgttcagtgcgcccgctcgttcatgatgcggctggagcatcaacagggtagactcgctgaatgggttcgaaagcaactcgacaacaagcattcaaatattgtcgcctgcgctctggcaaataaactggcccgaatagcctgggcaatcactgctctgcaaaaagaatatcaggcctgatatagatactgacaaaactcaattggcttattttaaacaataagatacaagttacctgtctggttttgcgaagactgattattgatgacatgaacggcaaatagacctgattaaaaacctgtcagaaaaaatggctcgctgaagccgagggtctttttaggattatcaggtgcggaactcatcgaggcgcgggcctccttgcccacagagacgccggatagatttaagcaagcccaccattaatcaaaaatcagtgttgcaaaaacgggggtgaccataga

SEQ ID NO: 3218 - DNA, 1453 bp, unidentified
  source 1..1453: mol_type = unassigned DNA; note = element_4ad5f1b
  misc_feature 1..2: note = core
  misc_feature 3..164: note = LE
  misc_feature 165..1199: note = CDS
  misc_feature 1200..1453: note = RE
  misc_feature 1217..1448: note = bridgeRNA
agatggtgtaacgggccggccgaaccagccgctcgctcgctactgcgcaattttgcaagcgcgctcgcgaggggcttcaccggaaggcggtcgtccctcaaactgatggtgtgtcaacaaacggagtcgggcaagcccgctccaagcatcatcgagggacgaccatgagctattatgcaggaattgacgtgtctttggaaagctctgccgtgtgcgtcgttgacggcgctggcaagattcttcgcgaagcaaaggttgcgagtgagccgcgggcgctgatcgactggttccgatcgctgggtctggcgcttgagcgaattggcctggaggcgggtcccttgtcgcaatggctctatgcagcgctgtgcgaggcgaagtttgcggttgagctgctagagacgcggcacgttcgcgacgccttcaaggcgatgccggtgaagtcggatcgcaacgacgcccgcgggatcgcgcagctcatgcggctcggctggttccggccagtgcactgcaagtcgatcgaggctcaggagacgcgggccattctgacggcacgcaagctgctgcaatcgaaactacgcgatatcgagaacagcctgaggggggtgcttcgggggtttggcttgaaggtcggcaagaccaccgagcggacgtttgcggaacgcatcagggaattggttgtcggccatcccagcctcgagctggttgctcaggccttgctggaagcccatgccgtgctgctgcgcgagttcaatggcctggacaagcacacgcagaagcttgccaaactgcatccgcaggcgaagcttctgatgacgacgccggctgtcggtccgatcgtggcgctcacctatgccgcggcaatcgatgatccaaaacggttccgctcatcgaaggcgaccggggcgcactttggtcttaccccgaagaaataccagtcgggggaaactgactataccggccgcatcagcaagatcggcgatgcttccgtgcgcgaggcgctctaccaggcggctcacatcatgctgaccaagccggtcaagaactgctcggcgctgaagagttgggcgatgaggatcgccaggcgcgccggcatgcgcaaggccaaggtggctctggcgcgcaagcttgccgtcatcctgcaccgcatgctcgccgatgctaagccgttcaacccgatggccaagaccatcgcaacctgagcaaggagtattcaatcagttccgggcgggccacgacaccaggccctccctgagcgaagtcccctcgccgggacgatggatccggtcaggccgccatgcgggaagtcggcttacaaccacgcttccgtagattggccggccggctcctcatgcaccccatcaggcgacggccaccgcgccgatcccgtacagaagcaagtgcccggcaggccgacgatgcaaaaagggattgactaatcgaggcccgttacaga

SEQ ID NO: 3219 - DNA, 1372 bp, unidentified
  source 1..1372: mol_type = unassigned DNA; note = element_4adad24
  misc_feature 1..2: note = core
  misc_feature 3..84: note = LE
  misc_feature 85..1113: note = CDS
  misc_feature 1114..1372: note = RE
  misc_feature 1087..1359: note = bridgeRNA
tgatggagtggatgcccctcccgacggcatcgtgatgtgccatgctggtgctgttttaacagaccagaaacagaggaggcggcaatggaaatggttgcaatcatcggaatggatttggcaaagcgcagttttcaggtgcatggggcaacagctggtggggatgtcttgttccgcaagaaactgtcccgggtgcaagttgtgccattttttgcacaactaccaaactgcaccgttgctatggaggcctgcgcgaccgcgcatgactgggggcgtcagatcggagcactcggccatgaagtgaaattgataccacccatctatgtgaaacctttcgtcaaacggcataaaaacgatgctgctgacgcagaagcgattgccgaggctgcgtcacgtccaacgatgcgaacagtcgccgtgaaaacacctgagcagcaaagccgggcggttttgttccgaacacgtgacctgctcttgcgacaacgcacgcagcttatcaacgccttgcgggctcatcttgccgagtttggccgggtggcaccaaagacgacgacaaatatcaaacgccttagggaaatcttggaagatcctgagaatggtctgccacaagtggtgacagatgttggatcaatctaccttggccagatcgctacgctaacagaacagataggcgggcttgaaaagcaggtgcgcatcgaagcgacaagagacgataccgcacgccgtcttcagaccatgccgggcatcggtccgataactgcaacggctgtctcggcctttgccccgcctatggaaatctttcgtcggggccgggattttgctgcgtgggtagggctggtaccgaagcaacactcgacaggcggaaagcaaaagctaggccgaacgtcgaagatggggcaaagagatatccgtaggcttttggtcatcggtgccatgtccgtcgtgaaagtggcggttcacaagggtgcctctgaaggatcttggctgcaaaagatgctcgcacggaaaccacgtatggtcgtcgctattgcgctcgcaaataagatggcgcgcaggttatgggccatgttggtgaaacacgaggattacagagatccggccatcgccgccgcgtaagcgttgcggtgggcggtacgtcgggaatgtgaggaggtctttgagtgtaagggctaatgatcggaaagatcggttcagtaaaaccagaaattcacagcggaataatcaacccgccaacctgatttggaactgaaccgcgtatctccataccggccagcggcatctgaaacgccgcatcaacaggcctgacagatgaccgcatccgttcacaatcccaaaacgttcaaaaataacttgcatttactggggcatccacaga

SEQ ID NO: 3220 - DNA, 1368 bp, unidentified
  source 1..1368: mol_type = unassigned DNA; note = element_4ae3461
  misc_feature 1: note = core
  misc_feature 2..78: note = LE
  misc_feature 79..1116: note = CDS
  misc_feature 1117..1368: note = RE
  misc_feature 1139..1359: note = bridgeRNA
taatgatatggtcctccgtcaagaagccaacaggagtaatgattgggttggcaaaaagccagacggaggatcatcaccatgcagattaaatcgatcgggatcgatctgggtaagaccaccttccacctcatcgccctgggaacccgcgcccaggtggtaatccgcaagaagttctcacgttcacaactactggagtacacagccaatctgccttcctcgttgattgggatggaggcgggagtgggatcgcattttctgggacgagccctgcgcgaacaggggcatcaggtgcgtctgatccctgcgcagtttgtgcgaccgttcgtgaagtccaacaagaacgactatcgcgatgcggaggccattgccgaagtggtggaacgggagaacatgcgtttcgtgcccatcaagacagaagatcagctcgatctgcaagcgctccatcgagtgcgcgaccggttagtggcacgccggaccagcgtgattaatcagattcgagcctttctgctggagcgtggcataagtttccgcaaggggccggccagcctgcgtcggcagatgcccgagatcctggaaaatgccgacgcaaaactcagcactgccatgcgtcggctgttggatttcttgtggcaggagtggaaaggcctgcagttgcagatcgagagcctgaacgtagaactcgaacaagttgcgagcagcaatccgagttgtgttcgactacggcagatcccgggagtgggtccattgatctcgaccgccgtggtatcggctatcgggaacggcgcggctttcaaaaggggacgggagtttgccgcttggctgggactggtgccacggcaatggtcaaccggcggcaaggccaagctactgggcatcagcaagcggggcaacccgtatctgcgcaaaatgttcattcatggagcgcgagctgcggtcttacgtgtccaacgcgaaggctccagtctggggaagtggatgagcgggttggaaaccagaacagcacgcaatgtggtgatcgtcgccactgccaacaagctggccagaatcagttgggcagttttgtccagcgggaacgaccatcagcccctgcaccgagctgctctgccctccaactagacgaagtggagtttgaaattcttttctcggcagtctgccgaagacaggaacgacgaaaacacagtcaaacggcgtgcctgaaaacctgtggcgtaacaaggtctttcacgaccgtggcgattaacaaggacaggcacgcgcggatcatcatcatgcgcccggagatcactctccactcagaggccggatacattttcgcagactgttctcgtcgaaaccgattcttcttgcagttcggcgacggaccataca

SEQ ID NO: 3221 - DNA, 1407 bp, unidentified
  source 1..1407: mol_type = unassigned DNA; note = element_4ae73ce
  misc_feature 1: note = core
  misc_feature 2..304: note = LE
  misc_feature 305..1354: note = CDS
  misc_feature 1355..1407: note = RE
  misc_feature 62..272: note = bridgeRNA
ctttaactttgcagtaaatattctaagagttaaaatctcttaaattttaatgttagataacacgttaaaataacgttaagatataacagtttatgcttacctttgttgtataaaggaaggattaactgccagaggtcaacctattgtctcccaccagacctgagcctatgctccgtcgaaggtcctctggattttaagctgcaaatgccagataggaagatagactctgagtctaattaaagtgatagccaatcacagctcctttcagttaatcgcttccataaactttaacgagtacaaaggtatgaaaaagattattgtcggcatcgacgtttcaaaggaaaaaatcgacgcaagtgcgattttagtgacgggcaatcagttgggaatgcaaaagctcgactatcagacattcgagaaccgtcctatgggcttccgccgtatggtagtatgggcaaaacatcttgtgaaagggataaccctcgatgatgtcatgttctgctgtgagactacaggagcttacgatcacaagctgtgcgactatctttttgccaagggacttgatatctggagagaaagtgcactacagataaagaaaagcagcggtctgcgtaagggcaaggatgacaaggcagattcacttgccattgcagaatatgccatgcgacatgcagacaaagccgtctattacgtctctccaagccaggatatcagggaattgaaggaactcctgttgtacaggcacaagcttgagcaggagaaggcttccacgactgtgcgtgtgactggcctgaaggcaactgcaggcaaaagcccgtcacgcaacttcatactgcgtgatgcacagaaacgtatcaagcaactggagaaaagtataaaggagtgtgaaaagcagattctcgaaatctacggacgtaacgaggagatgaagaagagctacacacatatcacatccatcaaaggcgtttccattgtaaatgccacagcaatgattgcgtatacaaacaatttcaagaacataacgtcgtcaagaaaacttgcatcctactatggtgttgctcctttcagggagaagtcaggcacgagtattgacaagaaagcgaaagtcaactgctactcaaacacgatgctcagatcctacctgacaatggctgcaaaacataccatcaaggcaaatggcatatacttcgactactacaatcgtatgattgcggcaggaaaatgttatggaattgcaatcaacaacgtaaagaacaaactacttaatctgtccatctcgcttgtcaaaaatgacatggattatgaagcctgtcatgagtacaaaaggctacaaggaaaggctgaacttgcataattctcaaaataaacattttttaacaaataatattttgttttttctataggaag

SEQ ID NO: 3222 - DNA, 1532 bp, unidentified
  source 1..1532: mol_type = unassigned DNA; note = element_4ae7dbe
  misc_feature 1..2: note = core
  misc_feature 3..241: note = LE
  misc_feature 242..1417: note = CDS
  misc_feature 1418..1532: note = RE
  misc_feature 3..218: note = bridgeRNA
cttgtattatagagtagtagttattaaagcccctctccaagggctgtgctacactgtaagagatgctgtggattggtttgctcatcctaccacaagatggttccagaaaggttccaaccacagccccttacaattttgttaattagttaaataccgccagacggttgatgtggaacaaggctacaaaagtaaggtgtactgtggatgcagcatcacaaatttaccgttggaggtttttactatgatttctgttggtatcgatgtctcaaaagataagcacgactgctttatcgtaaattccgagggtgaagttctggcagatgtatttactattccaaacacgatggatgggttcaatagcctgttgcagagagtccgggagtgtaccacaccacaggacaaaataaaagtagggcttgaggcgaccggacattacagctacaacctgctcgggtttcttcttgacaatggtctggccacctatgtcttgaaccccttgcgcacgaacctttaccggaaaagcctcagccttagaaagaccaaaaccgaccgggtggatgcgcgaacgattgcggctatgcttttgtccgatgtaggcctcaagccctacacagatacagcataccacaacgaggagttaaagtcactcaccagataccgttttgacaaggtaaaagaacgggcaaaactgaaaagctctatttctcgactgatctgcatcttgtttcccgaactggaaaaactggtttcttcacttcatacagcctctgtctacaccctgctggaggagttccctggcgctaaacaggtcgcaggtgcacacttgaccagactgagatcacttctcgaaaccgcctccaaaggccactacaaacgggatatggctttagaaattcgggatgctgccagaaattccattggctcctggatgcccgccaagtcccttgaattgcagcacactatccgtctcatccgtgaactggatactgagatcgctgagattgaggaacaaatccgatccattatggatgagttgcattctcccattaccaccatcccagggctggggttccgcatggctgccatgattttagctgaggtcggcgacttcacccgctttgactccccggacaagctgttggcctatgccggcatgtcgccatccacttaccagtccggccagctcaagaattgctatccgcacatggaaaagcggggttccagatatctgcgctatgcccttttcaacgcaaccaagtatgtctgtcactgggatcctgcttttgctgcttatctcgccaaaaaacgagcagaaggtaaacattacaacattgccctttcccacgctactaagaaactcgttcgcttgatttttgctttggagaaatccggaaccccctaccgttccgttgtctgatttctttctgattgctaactggggccttcccgggcctctgttttgctataccctttttgagccatctgttttttcaccatcactccattttagggattgacttctaatagttaat

SEQ ID NO: 3223 - DNA, 1391 bp, unidentified
  source 1..1391: mol_type = unassigned DNA; note = element_4aede08
  misc_feature 1..3: note = core
  misc_feature 4..88: note = LE
  misc_feature 89..1120: note = CDS
  misc_feature 1121..1391: note = RE
  misc_feature 1091..1378: note = bridgeRNA
agatggggtggttgccgtcctccccagacggcatcgcaatgtgccaaagatgtggtgtctacagcactgagcggaaaggacggcaaccgtgacgaaggatatgatgattggagtcgatctggcgaagaatgttttccagctgcacgcagcctcggtgacgggacatctgcagtttcgcaagaagctgtcgcgggagatgttccgccgattcatggccgaacaagcaccagcggtcgtggtgatggaagcctgtggcagtgcgcattactgggcccgcgaaataatcaggcttggccatgaggtgaaactgatcgctcctcattacgtgaagccgttcgtgaagcgccagaagaacgatgcggcggacgccgaggccatcgtgatcgcggcgcagcggccagaaatgcgcttcgtcgagccgaagtcggcagagcagcaaagcaaggctatcctgtttcgttccagggagcggcttgtccaccagcgaaccgagttgatcaatgctctcagggcgtacctttatgaatatggccatgttgttccacagggaattcgtcagctcaacaggatcgaagatgtcctgaatgcgccgaacagcgatttgcccgatttgatgcgcgaggagtgccgtgatttgctggagcagattgccgagaagacgacccgcatcaatgcccaaaccgggaagatcaaggcgctggcagctgaagcggatagggcgcgacgcttgcagacaatccccggggttggacctttgaccgctctcgccgtcgaagcctttgccccgccgatggagagctttcgatgtggccgcgacttcgccgcctggctcggtctcgtaccacgccagttctcgtccggcggtaaagagcggctcgggggcgtttccaaagcagggcaaaccgatatccgcagactgctgattattggggcgatgtcccgtctgaactggatgggccgcaaatcgattgcggaaggttcctggctggcgcagatgatgatgcgcaagccacggatgctcgtggcgatcgcattagccaacaaaatggccaggaccatttgggcgatgctgatcaaacaagaggattaccgggttccggcagtagcaaccgcagcttgaccacaaggctgcgcaaggctgacgccggataagggggtgaaagaaggcgacgacccgaatgggcaaaataatcgaacagatctggattaggaaaaccagtcaaaactcgtgagcacttaagctcgacaatgagatttggacctgatccgctgatcaccataccggccagcggcttctgaaaatgccgcagataaaggccttacagaagaccgcactcgatcactcgcacattcaaatcaaatcttcttgcatcccgggcggcaaccacaga

SEQ ID NO: 3224 - DNA, 1336 bp, unidentified
  source 1..1336: mol_type = unassigned DNA; note = element_4af68db
  misc_feature 1: note = core
  misc_feature 2..285: note = LE
  misc_feature 286..1299: note = CDS
  misc_feature 1300..1336: note = RE
  misc_feature 108..265: note = bridgeRNA
cattaagtttgcagcatcgttgcagacgaagtctgctaaaagcaaacatgatgttaatgtaatacgaagaatgccaggtagatttcttacttttgccgtattaaagaagaagtcaaccctcctttgaagtaaaataattgtgcaaacagtctttgagactatattcggttatatacttcaaaggagcggcatccttagacgagatagaatgttaggctcgaagcctatttaatgtttgagtcaaagggggccgatggtcgacttcgtaaacggtggcacaaaagtatgaaaaagttctttatcggcattgactttgccaagacaaaatttgatgtggttgtcctgtcgaaggatgacctggtgagtaaaggggagtataaccagttctgcaacaccaaggacggagttaagcaactcgagaaatggctgctccaggtgtgtggcaatgacgtcatcactgagtgcgtcatctgtggagaaaacacaggggtttacagcgtgttggcggcaaagatgttgacccgtgacggttacacggtatgccttgagagtgcgctgcgcataaagcgttccatggggatttcgcgaagcaagaacgacaagaaagatgcccgcgacatcgcagagtatgcagcccgccactacgacaagctggtggtctatcaggagccgtcgctgacatcagaggctctcaaaacattatttagccagagacgtctgttggtcaagcagaaaagtgacttacagcggcgcaacaaagagttaaccggtctgtacaaggacaaccctttactgaaaaagatgttggcctccgacaaaaggatcatcaacgccattgacgctgaaatcgaaaagattgaagcacaaatgaagtcgatcattgaggggaacccagaggtcaaaaaggtgtacgatatactcacctcgatgaaaggcatcgcactggtcaatgccgttgccctgattgtgtacaccgataatttcaaacgatttgactatgatgccaggcgtatctgttcttactggggtatcgcgccattcgccaatcagtccgggacatcgattaacggcaagccgcatgtttcccactttgccgaccattatttgaaatccctgctttctcaagcggttgtttgcgcaatccgtttctgtccagacatcagcaattatgcacagcgcctgttagcgagaaaaaagcatatatccattgtccacaacaactgtaaaaacaagatgattcacatccttgtcgctatggtcaagaatggcaccttatatggtgaaattcaaaaaaactagaaaaatcatcatttttcttgcatatgaacatagaatg

SEQ ID NO: 3225 - DNA, 1397 bp, unidentified
  source 1..1397: mol_type = unassigned DNA; note = element_4af6c38
  misc_feature 1: note = core
  misc_feature 2..84: note = LE
  misc_feature 85..1122: note = CDS
  misc_feature 1123..1397: note = RE
  misc_feature 1164..1389: note = bridgeRNA
taatggaatggacgcccccaccatcagcatcgatacgccaaagtgatagtgtcaaacagaccactcacggaaggagcctccaccatgaagatcatgactatcggcattgatctggcaaaaaacgtgttccaattgcacggcgtagatgaacacggcaagacaatcctgaagaaacagcttcgccgcgagcagatgacggtctatttcgccaatctgccacagtgtctaattggtatggaggcctgtggcggcgctcaccattgggcacgtctgctgcaaagctttggccacaccgtcaaattgatggcgccgcagttcgtcaaaccctacgtcaagaccaacaagaacgatgctgctgatgctgcggcgatttgtgaagccgtaacccggccggatatgcgtttcgtgccgatcaagaccgttgagcagcaagccatactatcggtacatcgggctcgcgccggtttcgtcaaagcgcgcactgcaacggccaacgaaattcgcggcctgctcgccgagtttggcatcatcatcccgcagggtatccacgctattggccgacgcattccggaaatacaggaagacggcgagaatgaattgcccagcaccttcaaacagttgctgcagacactctcggaccacctgaaagcgctggatcagcagattgaggcactagaacaggacattcagtgctggcaccgaaatgctgccgtcagcgtccggctggcgaagattcctggcatcggaccgcttaccgccagcgccctggtcgccacggtgggggacgcccgaaacttcagcaatggccgacaacttgcggcatggctcggtttggtgccgcgacagcattcaagtggcggtaagccgaccttgctgggtatcagcaagcgtggcgacagttacttgcgaaccttgatgattcacggtgcccgagcggtgttacgctttgcgacgaataaaactgattgcacctcgacgtggctgaacggcgtgatggcgcggcgacatgtcaatgtggcggcggtggcgctggccaacaagaatgcacgtattgtctgggccttgctggcacacgagcgagagttccggtccgaccacaccctggcgttcgctggagcgtagccgaaccggttgattgtgacaaagtagattggtgaagactttcaacggttgcgcaggcaatcttgatgtgatggcaagacaggtaagaccgtgaccgacaaaccccgagattgtcaaagtgcgtaaagcacggtgatctgatagcggagtcggtcagcttattccatcagggacagaggcgaaggcctcactaaaagtccggatgtatggctgcaatctcaaccttgttcttggtgcaacaaaaagatggcttggcaaacgggggcgtccatgta

SEQ ID NO: 3226 - DNA, 1636 bp, unidentified
  source 1..1636: mol_type = unassigned DNA; note = element_4affdde
  misc_feature 1..2: note = core
  misc_feature 3..292: note = LE
  misc_feature 293..1405: note = CDS
  misc_feature 1406..1636: note = RE
  misc_feature 40..271: note = bridgeRNA
ctcgtattatatagtagtagtttttagagaccctctccaaggtcttttaactattaagtcatagtccttttctttacctcttctgtaggtttgactatgatatataagatgctgtggattggtttcaatcacctaccactcgatggtttaatggaggctccaaccacagtctctttgttcatttgttaatcagttagataccgcatgacggtttatttagaacgaggttacaatcgcaaagagcatctgtggttataaaacagtatcaaatacatttcaaaggagtttttttatgatttacgtaggaattgatgttgctaaggacaagcatgattgctttatcaccaactctgatggagaagtgttatttaaagcatttaccatcaccaacaacttagatggttttaatgaacttcatcaaaagattgcttccgttatgaatgatgtgacaaaagtaaaagtaggactggaagccaccggacactacagttacaatctcctcggatatctcattgataaaggtttgcccacctatgttatcaatccgttacatacaaatctgtacagaaaaagtctaagccttagacagacgaaaacggataaagtagatgcccgcacgattgcttccatgcttatttctgatgtgaacttgaagtcctactcagacatattttaccacaacgaggagctaaagtcattaacacgttatcgttttgacaaagtgaaagaacgtgccaagctgaaaacctccgtttcgagacttgtctgtattctttttcctgaattggaaaagctggttcctcaacttcatatggcatctatttatgcaatgctctctgaatttccggtgcaaaaacaagtagccaatgctcaccttaccagacttaccaatctactttctgaatcctcaaaaggtcgctacgacaaggaaacagcaatcacatttagagatgctgcaagagcttctatcagttcaaatatgccagcgaaatcacttgaactgaaacacaccattaagttgattcaggaacttgattccgagattgacgaaatcgaaaatgaaatcaaaatcatcatggatgaaatcaactctccgattctcagtattcctggaatcagttatcgcatgggagccatgatcattgccgagattggtgatttcagtcgatttgattctcccgataaaatcttagcttatgcccggctttttcgccatcaacatatcaatccggacaactggatggtgcttacgcacatatggaaaaacgtggctccagatacctgcgatacgctctgtataatgccaccaagtatgtctgccactgggacccaacatttgcagcctatcttgctaaaaaacgagcggaaggtaagcattacaatgttgccatatcacacgctgtaaaaaagttggttcgagtgatttatcatcttgaaaaaacaaagcagcaatacataaaagcagcttaaacctttctaattcaatactcctttttgagcacctatcacgatgctctttttgtcatgcagttttcaaggttcaaggaactctaactaagtttccaatatatctaaaatacatttctgtactttattcaaaaaatatcattttaaggcttgacttttaatagttagt

SEQ ID NO: 3227 - DNA, 1628 bp, unidentified
  source 1..1628: mol_type = unassigned DNA; note = element_4b045ec
  misc_feature 1..4: note = core
  misc_feature 5..280: note = LE
  misc_feature 281..1504: note = CDS
  misc_feature 1505..1628: note = RE
  misc_feature 13..300: note = bridgeRNA
ctcctacaatatagattacggtgaaaggcacggcagccagccgtgtcttttgtcgtctcaaagctgaagctgtagaatgagggagtaaatggcctgacagttcatcccttgggctgacacgcccgcattggagtccgtcagccggctctctcattcgcagtattcgatttgcgcaggtagaaccatcgtgcagatgcggtgcgttcgcgtcacccaggagattgaacaagcggcgaggaaacagagacgggagccatatccaatcacacaggaggaagctatgaacgcagtaggaattgacgtatccaaagggaaaagcatgatgatggccctgcggccgatgaataaggttgtgctgaagccaaaggaataccctcacaccggggttggcctggaacagatggcggttgccatcctggggctgggggaagacacgcgggtgctcatggaggccacaggctggtatcatgagccggtggcggcggcgctgcacgggtatgggattcatgtcacggtaatgaacccgctgttcatcaagcagagcggcgggggctccatccgaaaggtcaagaccgacaaggcggacgccaggaagatcgccaagtacgctcttgacaactgggcggctctgcgggaatatgcacccatggaagcaatcagggaacaactgaagctgtcctcacggcagtacaatctgtacatgaaaaacgtggtggcgctgcaaaacaacctcatctctcttactgacaaggtatttccgggtgtgaacgaactgttctccagtccggaccgtgccgatggcagccagaagtgggtggattttgtcatgaccttttggcactgtgagtgcgtcaatctggccagtgagatggcttttactgaacgctaccgcaaatggtgcaagcgaaagggctaccatttcagccaagggaaagcggcggagttgtacatggacagcatgggctatatcaccaccctgcccagaaacagcaataccaagctgctgatcaccaccgccgccaaggaattggcctcggccaaggctacgctggccgttctgcgggctgagatggatcgcctggcccgacagcttcccgaatacgatactgtccgggccttgtacggcgtgggtgagaggactgccccgcaactgatagcagagattggggatgtgcgccgcttcccccgccgcagctccattgtaagcttcgccggcgttgatccggcagtggacgagtccggcaagcatgtctccaaaagcaaccctaccaccaagcgcggttcaccccatctgcgtaagacgctatatcaaatcgtctgtacttatctgaagaagtctcccgctgatgagccggtgtaccagttcctggacaagaagcgggccgagggcaagccctattttgtttacatgaccgccgcacagaacaagttcctgcgtatctactacgcccgcgtgaaagaatcccttgccgccgctgatgtgcgggaacctgacgaaaattagaccgccctaaaatcttcagcttggatgctctgcaaaaattcttcttttgcaggcttggtttgttgtacccttttccattccccttaaattttttgattttagggcttgacttttatttgcagga

SEQ ID NO: 3228 - DNA, 1445 bp, unidentified
  source 1..1445: mol_type = unassigned DNA; note = element_4b0b2ad
  misc_feature 1: note = core
  misc_feature 2..165: note = LE
  misc_feature 166..1440: note = CDS
  misc_feature 1441..1445: note = RE
  misc_feature 46..191: note = bridgeRNA
cgttactatgttcataccccagaatgtgacgtgttggccagccaggtccggcatgatttctgcccccagtcgtccatgatccggggggtgttgtcaccagacctgataggtggctggtgatcgctaataggggttaggtccgggcataccgaggccgtccgtaacgtggatgccgagaccaaccgccgtcgcacagccaacgtactgacaatatggaggccaaatgacagaaatcgacactatgagtcggttgacgtgtttatcggtgtcgacgttggtaaaggcgaacatcatgccgttgcacttagttgcacaggcaagcgcttgtttgataaagccttgccgaatgacgagaccagattacgcacactcatcaccgaactccaggcgcacggtcaactattgcttgtagttgatcaacccgcaacgatcggcgcactgcctgttgctgttgcgcgcgatggaggcatcctggtagcgtacctgccaagactatccatgcgacgcattaccgatctccatgccggcgaagcgaagactgacgcacgggatgcggcaatcatcgccgaagctgcacgttgtatgccgcatacgctgcgctcacttaagctggctgacgaacaagtgtcggaattgaccatgctgtgcggattcgacaatgacctggctgctcaaattacccagaccagtaatcgcattcgtgggttgctgactcagatccatcctgccttagagcgggtgctgggaccacgccttgaccatcccgccgtacttgatcttctcgagcgatacccatcaccagccaagctcgcctcagtcaccgagaaacaattggcaaaccgccttaccaaactggctccccgcctgggcaagaatctggctgctgaaatcgttctggcactctcggaacaagctgtagtagttcctggaaccaacgccgctatgatcgtgttgcctcgtcttgctcgccaactcgccgggctacggtgccaacgtgaagaggtctcacaggaagttgagcggctcgtacaagctccccctctttacccggtcctgagcagcatgcccggagtcggcgtcaggactgcggccagactcctcacagaggtcgcctgcaaagccttcgcttcggccgctcacttagccgcctatgtcggactggcgccagtcacccaccgatccggctcttctatccgcggcgaacatccctccagacggggaaacaagattctcaaacgagcgctcttcctctcggccttcgccgcgttacgcgatccaatctctcgaacttattacacgcgaaaaattaaccaggggaaaaggcataaccaagtcctcatcgcactcgcccgtcgacgctgtgacgtcctattcgccatgcttcgtgacggctcattttattgccaacaatcgatcaaattgccgttgacaacaacatagccccc

SEQ ID NO: 3229 - DNA, 1109 bp, unidentified
  source 1..1109: mol_type = unassigned DNA; note = element_4b1e62f
  misc_feature 1..2: note = core
  misc_feature 3..161: note = LE
  misc_feature 162..1103: note = CDS
  misc_feature 1104..1109: note = RE
  misc_feature 1..163: note = bridgeRNA
ccctgtgtcttggaagtctgtcaggatgggttgggcgggaagccgttgggtccttggcgcttgacgccgtgagccggctcggtctcccgcccgttccattaccaacctgaacagttgcacgaggctgcgccaacagacctcgcatcacagggacaggcaccgtgatcataccccttcgttgcgtcggaatcgacgtctccaaacaatatctcgatatcttcgatgaaggcctgggcgtgccggagcgcatcgccaacgcgacgcaggccatcacccagatcgcggcgcgttggcgatgcgatgtgctggtcgtcttcgaggccacgggtgtttatgacctcgagcttcgcgaagcgctgagcgaggccggcatccgtttcgcccggatcaacccggcccgggctcgtgacttcgcgcgcgccagcgggcagctcgccaagaccgacccgatcgacgcgcgaatgctggcagcctttgcgcgggccatgcagccagcaacggagccgactgccaatcccgcccgcaacgccttggcgggacttgcaaaacggcgagatcagctggttcgcatgcgcgcgcaggagaagaaccggcgcagcgagaccgacgaccgtgccatggccgagcgcatcggtcgcctcattgaagtcctcgacggcgagatcgccgagatcgaggccgacatcaggggactaatcaaagccgagcgagagattgcggacgatgcgcgattgatgcgctcactgcctggcgtgggtcccgtggcttgcatgcaactcatcgcgaagatgccggaactcggacatgtgggagccaagcagatcgcggcgctcgccggcctggctcccttcaacgtcgacagcggagccttccgcggcaaacgcaagattgccggcggccgaaagcgcgtccgtgacgccctctacatggctgcgctcaacgcggttcgcagggccgatccgttcaaggccttctacgcacggctgcgacgggccggcaaaccagccaagctcgccctcattgccgtcgccaggaagctgctaacggtcctcaatgccatgatgcgtgacagaaagccgtacctgaaagccaacccaacataacagttg

SEQ ID NO: 3230 - DNA, 1652 bp, unidentified
  source 1..1652: mol_type = unassigned DNA; note = element_4b21380
  misc_feature 1..4: note = core
  misc_feature 5..280: note = LE
  misc_feature 281..1516: note = CDS
  misc_feature 1517..1652: note = RE
  misc_feature 30..300: note = bridgeRNA
ttgctacaatatgtttgaccccaagaacggtgttgcactggtaatgctgttcagcggttcaaacctaagctacaatgaagaggtaatcggccttacggggcattgcttgagctaaccacgctcgtttgtgcaaactgttagccgaccctctcattgcagcgttcgatttacgcaggttgaatcatcggagcaatccgtacattcgtgtgactaagcaagctgaatcggtaatgaactgtggcggtcgccggttataaaaccaaacaaaggaggattgtgtatgagcgcaggagtcattacagcggttggaatcgatgtttcaaaatacaaaagcacagtggcagccagaagaccaggcggtgaagtggctttgctcccatttgatgtcggccatgatgtcaccggtatcaagaatctgctcgagaagctgcatggtcttgacgatgaaggcagcgagattcgagttgtcatggagcatacaggaatgtattggaggcccgtggctttggcgctgcaacaggctggattctttgtcagtgtagtcaacgcgattctgatccacaacttcagcgacaattcactgcgcaaggttaaaacggataaagcggatgcgttgaaaatcgcaaattatggtctcacattctggatggatctgagggaatattccgcagaagatgaaacaaggcaaatgctgaagatccagaatcggctctatgagcggacaactaccaccggtacgatgttgagaaacggtttgatttcactcctggatcagatattccccggcgccaataagttatttctgaatgaaggcaggaactcaaagggccatgtcaaatgggtggattttgtgatccgcttttggcataaagaatgcgtggcagctttatccctacatacttttgcagacaccttccaaaaatggtgcaaaagaaccggttacagattcagcacttccgatgccgaacgaatccataccgcagccaggaacgccgttgccacgcttcccaaaaatgatagtacaaaactgctgataacgcaagcggcaatcagcctgaataccgtgtatgattcgcttcatgcgttccgcacagaaatgaaccggctggcctctctgctgccagaatatgagctggtgatggggatggaaggtgtcggaaaaatcacaggaccgcagttgatggctgaggttggtgatgtccgccgtttttcgcacaaaggcgctctggttgcttacgctggtgtggacgcaccaccgtatcaatccggtacattcgatgcaaagaatcgtcatgtttcaaagcgcggttcacctcacttgcgtaaggtgctgtttgagatcgcctccatgattcttgttcacggaaaccctgacaattctgtattctgcttcatggataagaaacgagcagagggaaagcatttctatgtctatactgtggccggagctgcaaagttcctgcggatttattatgcaagagtaaaagaatatctgaacactcaagaaaccgcttgactctgctgtaaatacgaaacctcaaagacataaaacccttaggtctgcaattttcactttgttgcaggtctgttttgttatgctcattttcagacatctgatttttcattttggggcttgacacctattagcaggt

SEQ ID NO: 3231 - DNA, 1585 bp, unidentified
  source 1..1585: mol_type = unassigned DNA; note = element_4b26f0b
  misc_feature 1: note = core
  misc_feature 2..251: note = LE
  misc_feature 252..1454: note = CDS
  misc_feature 1455..1585: note = RE
  misc_feature 6..226: note = bridgeRNA
tcgtattatatgaataagccagtcatttctggttgacctattttttataggtttcatatgcttgaggaagtcgggggaggacgccggcgcccgtgggacactgatcccgtccgtaatactgtccaccccttccttgtagaaacatgtttgaggctggttgggacatgatcccgtataacaagcgaagctatgaaactacaagggatgtgaggggcgcactgacgaatttatcaaaggagttgtgattacttatgaatcctgtcatcggcctggatgtcgcaaaaggagaaagccaggtccaagcctttttacaaaggaaaagcccatataagaaaagctttaaatttaaacaccatttacaaggtcttcatactttttatcagttttatcaggaagtggaacaagtatccggacaacctccggctgtcatctttgaatccaccggacactatcatgaacctgtgcttcaatttcttgaggatcaggctataacgtattatgtcatcaatccggtcatttcctatgaggctcgaaaaacaagcctccgtaaggtgaaaacagacaaaatcgatgccttccatctgggggagttgtattacaaagaagatctggaagtgtttcaaaggaaaaccgaacaatacctgaatctgcggcaattaaccagacagcacagcgctttaacggacagctatgttgaaatcaaacttcagtttcaggctgctttggatcagattttcccggagtttcatagcgtttttagtaatctttgtggcaagttgtccctgaacactttactgcattatccgacttctgcggatattgaaggggtctctcaacaggcattggccacggagatgcgtcaagtcggagcaagacgttccgatacatggtttctcgataaagcggctcaattacaggatgcggctgcccgcaatccctttcaagagccaatctgccgtggccatgtccttagcctacagatgtacatccagatgatttttcaataccaggaacatctatccaaattacggaaggaaatcaatgccttggccaagacttttgacgattatgcgttggttcaatccgttcccggagtcggagaaaagattgcagcaacaattatctccgaaatcgggggaatcgatctgtttgaacgtcctaaacaactggccgcctatgcgggactagatccaagtgtttttgagtcaggcaaatttaaagcatccattaaccgtatcacgaaaagagggtcatcaagattacgtcaggctctttatacggctgtgcagtgcggtattgccaaaaaccgaaacaagaaacttatagccttttataatcgcaaaagaagcgaaggcaagccacacaaggtcgctgtgattgcctgtgctaataaacttattcactggatccatgtcatgttaaaacgtcaagaagcctttgtagaccaatcatgagatgcatttaaattgccaatcttttgaaaccttatcaattcaacggtaaggctatttggcatgtccgattttagtataacatgtttttttaaacttttttacctttaattgttgacagctattggctggta

SEQ ID NO: 3232 - DNA, 1355 bp, unidentified
  source 1..1355: mol_type = unassigned DNA; note = element_4b2837a
  misc_feature 1: note = core
  misc_feature 2..40: note = LE
  misc_feature 41..1096: note = CDS
  misc_feature 1097..1355: note = RE
  misc_feature 1097..1342: note = bridgeRNA
tgatggtgtggacgacctccacccaaccgggttcgctgatgtgtcgtcgatagggacgtcatgtctagggagcggatcatgcaagaggtcgccgtcgtcgggttgggatctggcgaagaacgtctttcaggtgcacgggatcgacgctgcaggcgtcgtggtggtgcgcaagccgctacggcgtagccaggttcttcccttcttcgagggcttgtcgccctgtctggtcgggattgaggcctgtgcgtcggcccatcactggggccggcagctgatggcggtcgtccacgaggtgcggctgatgccgccagcctatgtgaaggcctatgtgaagcgcggcaaaacggacgccgccgacgcggaggcgatcgcggaggccgtcacccggcccaccatgcgtttcgtcgccgtcaagaccgaggcccagcaggcgattttgatgctgcacaaaacccgcgacctcctggtgcgccagaggacaatgctgatcaacgcacttcggggtcacctcggcgaattcgggatggtttcagcgcagggctccgcaggcgttcaggcggcgctgaggtcactgatcctggagcaggaacggttgccggagctggcgcaggccgcgctccggggactcgcgggacagctggagacgcttcgggcggagattgaacgactggagcatcagatcctcgcctggcatcggcaggacgccaccagccggcggctcgccacgatcccaggcatcgggccgatcaccgccagcgccctggccgccagtgcgcccgaccccgccctcttccgatcggggcgccagttcgccgcctggctcggtctaacgcctcgcgctcacagcagcgggggtaagaagcggcaggccgggatcagcaagatgggcgacggctatctgcgacgcctgctggtggtcggagcgacagccgtgctccgtatggcccgccaacgcggtgtcggcggcgcctggatccagggccttctcgagcgcaagaagccgaaggccgccgccgtcgcgctggcgaacaagacggcgcggatcgcctgggtgctgatggcccggcaggaggtctacaagcccgcagcagcttagagatcggcgacggtcacccggaccgacgccgtagacgccagagtgatgagacgtgatgacgaaccggccgcagccggggaccagtcaaacccagggggtcagagcgcttcgagcgcgttgacgtgattagggagccagtccgcggacttcatcaaggccagcagcctcgaccgcagcagcaacaggccgaacacatgactgcactcgaccgagcgccgaacgtcaatttcacccttgcgtcttggaggtcgtccacaca

SEQ ID NO: 3233 - DNA, 1154 bp, unidentified
  source 1..1154: mol_type = unassigned DNA; note = element_4b2e6fd
  misc_feature 1..2: note = core
  misc_feature 3..194: note = LE
  misc_feature 195..1139: note = CDS
  misc_feature 1140..1154: note = RE
  misc_feature 28..193: note = bridgeRNA
cttgtatctctcggcttgtggcacgatactgctgcctatgaagcagtggggcctgacagaccgtcggttccatggtcgttcccagaccgagtgtcagcgtgggtcgtcaggccttctcacctgtaaagcccccgaacaggtgcgagggccacagagcccgcatttcgcaaggctgggttcgacaggaggctgcgatgagttccctcgtcttcgtcggtatcgatgtctcgcaggcgcgcttggatattgccgtccgtcccggtgttccgttttcgatcgcccataccgagtccgccttcgccacgctggtcgaacaattccgggccctcagtcccaccctgattgtcttggaagcgacgggcgggatggaaatcccgctcacgagtgcgctcgccaccgccggcttgccggtggtcgtcgtcaatccccgtcaggtgcgcgacttcgccaaggccagcgggcggttggcgaagaccgatgccctcgatgctcaggtgctcgcgcagttcgctgaggtgatgcgcccccagccacggccgcttccggatgcggaggcccgggccttggccgcgctgttgacccgacgacggcaactggtcgagatgctgacggctgagaaaaatcgcctcctgagcgcctcgtcgccgatccgtaagagggtgcggacccatatcgtctggcttgaacgggagctagagcacaccaacacggatttggcggaggccattcgccagagcccggtgtggcgtgaacaagacgaactgttgcaaagtgtgccgggggtggggcccgtcgtgacctcgacccggttggcgagtctcccggaactcggcatgttgacgaacaagcagatcgcggccttcgtcggcggggcgccgctgaatcgcgacagcggcacgctgcgggggagacgcacgatctggagcggacgggcgcaggtgcgcgcggtcctctatatgggcgcgctcgtcgcggcccggttcaatccggtgatccgggccttctatcagcgcttgtgtcgagcggggaaagcgaagaaggtggcgctcacggcgtgcatgcgcaagctcttggtcattctcaatgccatgatcaaacatcggactccctggcatcaggcggaggtaccccttgcgtaaatcccaagacagttg

SEQ ID NO: 3234 - DNA, 1464 bp, unidentified
  source 1..1464: mol_type = unassigned DNA; note = element_4b2f5ae
  misc_feature 1..4: note = core
  misc_feature 5..245: note = LE
  misc_feature 246..1448: note = CDS
  misc_feature 1449..1464: note = RE
  misc_feature 15..234: note = bridgeRNA
ccttaagttcgtagttgcagttgcgtcgtgttgttacgttgttctgcgacccgggtgggtcgggtgaggctgatgtggtctttgccggctttcgagtgcggcttgaaaggactggccgcccgacttgcctggacttctctggccgctgattgagatctgcgatctgatcgcttgtttaaggaaatgccggcggggtcgtccgtggggatcatgttggtagacaagcgaaaagaggatcgatgacaatgagccagttgtgggctggtgtggatgtcggcaaggaacatcactgggtggtagtcgtcgacgacaccggcgcggtgaagctctcgcgcaagctggtcaacgacgagcaacccatccgggcactggtggccgagatcggcgccatggcagagcaggtgtcctgggcggtcgacctgaccacggtgtatgccagcctgttgttgacggtgttggccgacgccggcaagtcggtgcgctacctggctggccgcgcggtatggcaggcctcgggaacctaccgcggtggcgaagccaagaccgacgccaaagacgcccgggtgatcgccgatcagtcgcgcatgcgcggcaccgatctgccggtgttgcatccccacgatgacctggtcaccgaactgcggatgctgaccgctcaccgcgcggacctggtggctgatcggacccgcaccatcaaccgactgcgtcagcaactggtggcggtgtgcccggcgcttgagcgagcggctcaactgacccaggaccgtggttgggtggttctgttgtcgcgctaccagcgaccgaaagccattcggcagagcggactgtcgcgcatcacgaagaccctgaccgaggccggggtgcgcaatgcatccaccatcgccgagaccgctgtcaccgccgcgaagacccagaccgtgcgcctgcccggcgaagaggtcgccgccgcgctggtcgccgaactggcgcagggggtgatctccctcgatgaccgcatcaaagccactgacgctgacatcgagggccgatttcgccgccatccactcgccgaggtgatcaccagcatgcccggcatcggcttccgactcggcgccgaattcctcgccgccgtcggcgacccggcgctgattggctcggccgaccaactcgcctcctgggccggactggctcccgttccccgcgattcggggaaacgcaccggacggctgcacactccgcagcgctacagcagacgactgcgccgggtgatgtacatgtccgccctgaccgccatccgctgcgacccgcactctcagacctactaccagcgcaaacgcgacgaaggcaaacggcccatccaagccacgatgtgcctggccagacgccgcaccaacgtcctctacgcactcatccgcgacaaccgcacctggcaaccccactcaccccagatcaccgaatcggcggcttgacatcttcattgagagt

SEQ ID NO: 3235 - DNA, 1431 bp, unidentified
  source 1..1431: mol_type = unassigned DNA; note = element_4b2fe12
  misc_feature 1..2: note = core
  misc_feature 3..116: note = LE
  misc_feature 117..1148: note = CDS
  misc_feature 1149..1431: note = RE
  misc_feature 1184..1384: note = bridgeRNA
agatggggtaatcggccgcccagcggatagctggagattttgggtggtgcacttcaggctgatggttcaacgaggtcggcatttgcggcctcaaacatcagaaggagaagcacaacatggaccattttgctggacttgacgtttcggtcaaggagacgagcgtctgcatcgtggacaacacaggcaggatcgtgcgggaagtgaaagtgccgagcgaacctgaagcgttgttggcggtgctgaagaaccccgcctaccacttcaaacggatagggctggaagcggggccactgtcgcaatggctttacagcgctctcgccgaagcgggcttgccggtgatctgtgttgagacgcggcacatgagggcggtgttgaaggcgcagatcaataagacggatcgcaacgatgcgcgcggcatggcgcagatgatgcgggtgggactttatcgtcgggtgcatgtgaagacgttacgcagtcagaaactgcggatgctgctgacccatcgcaagctgctgcagtcgaaggctatcgccatcgataacgacctgcgcgccaccttgcgtaacttcggtctcaaagtgggcatggtgggaacggtgaagttcgaggcacgcatcaaggagctggtcgagaaccttcctgatttggccgtgctggtggaacccctgctcattgtccggcgggtgcttcgcgagcagaccggcgtcctgcactgccgcttgttggccatcgtccgggacgatgatgtgtgccggcgcctgatgacggtccccggcgtcggtcctgtggtcgcgctgacctatcgcgctaccgtcgacgtgcccgcccgcttcaggaactcaaaggcggtcggggcggtgttcggtctgacgcccgctaagtatcaatcgggcgagagcgaccgaaccggtcggatatcacggtgcggagacgagatgatgcggatgatgctctatgaagcggcccacaccatgctggtgtgttcggcgaaatggtcctggctcaaggcctgggcgatgaagatcgctaggcaccgcgggatgaaaaaggcgatcgtggccttggcgcgtcggttggccgtgatcatgcaccgcatctgggttgacggcaccgagttccggtggaccagggaggtcgtggcggcatgagggccgtgcaggattagatgcgataggaggaaactcgaattccaccgagcggtggaatgatgtccctcgcgggacgatggatgaggtgagatcgtacttccgcttgaacctaccgttagtctaacgctaaggccgcggcatagattgttccacctcgtcttcgaatcccatgctggaagggccttggtgccgaatccgaagagaagcgcgagcccgtgagcgacatcaacactgtagtggtggatagtctgaaggagcttgaccctgaatggccgattagaga

SEQ ID NO: 3236 - DNA, 1725 bp, unidentified
  source 1..1725: mol_type = unassigned DNA; note = element_4b3f42e
  misc_feature 1..2: note = core
  misc_feature 3..354: note = LE
  misc_feature 355..1581: note = CDS
  misc_feature 1582..1725: note = RE
  misc_feature 50..329: note = bridgeRNA
ctcgtatagtatctttagataccattattcttatataaaatttaatagttactttgttcaataggcttcattaaacccatgatataattgtcccagtgtcaatcaggcaaaagttctagtcactcctgttgaactcccagagagttacttcaccaaaagtctgttcccctgacatggaagttagcttcaaaccgctggctgtttgcttaagtaattggacaaccatcttgcagtgtggtttcgcatctgtccatcttaagctggattcttatatgcgagggtgttgatgctccatggtcatgggtttaccaagccgattgaacactttaatcccaaacgaaagaaggtgattttatgaacccactttacgtcggtattgatgtgagcagcaaaaacaatgtcatttatctcatgctccctaacggtgacaagcatagttctttttcacttgcaaactcacatgatggatctactcaacttgtaaaacgaatctttgcagcaatgacttctaacaacatcgactccgttctgattggactggaagcaacttctgtctatggcgacaatctagtatactttctaaaagaagatgcaactctcgcatccttcgatagaaaaatccatgtcttgaatccaaagcaggtcaataaattcaaggaatcttataacgacttgcctaagaatgattatatagatgctttcgttattgctgattgcttgcgttttggcagaattaacaaagaggtctatatggatgactaccgctataaagccctccagaaccttaccagagcacgttatttcgctgttacaaaccttactaaagaaaaacaacgatttataaacgtgctatttaagaagcactctaccatgacgcaggaaaagatattttccgataccttcagcaccaccgcccttgctgtctacgaaaaatttgaatccgcagaaacactggcaaagatggacttacaagaactgactgcatttattatggaaaaagggaagaatcgtttccctgatccggatgcagtagccaaagccctccagaaagctgccagaagctcctatcgtttgcctaaaaccgtgaatgattctgtaaatcaggtgcttgctatctccataacatcaatcagagcattggaatcccaaatcaaagcatttgataaagctatcacaaatcaaatggaacttttgcccaatgttttgatatccattcccggtattggtccggtactttctgctggaattatggctgagatcggagacatcaaccgttttcaaaatcaggctgcccttgctaaatatgcaggtcttgcatggcagcagcaccaatcaggtgactttgaagcccaaacaacaagaatgattcattccggcaaccgattcttaaagtattatctgtgtgaagccgcattttctcttgtaagatgcgacaaggaatacagcgacttctatcatctcaaatacaaagaggtaaacagatatcaacacaaacgtgcactcgcattaactgctcgtaaatttgtgcggttagtctttgcactgctcaaagacaatcgtttatatcgtccggcagaatagatttttctatctgccgatacactaaccctgctcatttttcaaaaatacgatttgcagggcttaggtgggtgtttttgtctttttgaaacatagctgaaagtatatctttcaatattgtttttatcttgacatatcaccgctgga

SEQ ID NO: 3237 - DNA, 1628 bp, unidentified
  source 1..1628: mol_type = unassigned DNA; note = element_4b4081b
  misc_feature 1: note = core
  misc_feature 2..290: note = LE
  misc_feature 291..1511: note = CDS
  misc_feature 1512..1628: note = RE
  misc_feature 15..313: note = bridgeRNA
tcctacaataaagttgtaggtaacagacacctgacaaccagccaggatctgctccctttcattgctaaagctgtacaatggtgtggcatggatctgacttgttcctcctaggaccatatggcgtccgcatgaaagcctgtcagccagccatactcatttgcagccgttcggtttatgcaggttgaaccgatgttactaattacattgcgttcgtgtgataccccaggagattgaatcggcaatgagaaaactggtcatccattgcaatttcaatatcggaggtatcagtgatgttaaacgcagtaggtattgatgtgtcaaaaggcagaagcacggtcgctgtcctgcagccaggcggtgtcgttattcataagccatttgacgtatctcacaattccaaggatcttcatgatctcgcccattaccttgtaacccttgatggtgaaacaagagtcgtaatggagagcaccgggcgctatcatgagccaatcctacatgctctgtcagaggcaggcctgtttgtcagtgccgtgaatccgcatctgatcaaaaattttggcaataacactatccgcaaaatcaagacagatccagctgatgcgaagaaaatcgcccgctacacgcttgacaactggacttctctgcgtgaatattcagctatggataccactcgtacagaactgaaaacacttaattctcaattcagcttcttcatgaagcagaagatttcggctaaggccaacctgattgcgcttctcgacgaaacatatcccggcgtgaataagcttttcaacagtcctactcgcccggatggaagcgaaaagtgggtggattatgcctattccttctggcatgtaaattgtgtccttgattccggcctcaaagcatttacagaacgctataaaagcttctgcaaacgtcatggttacaactgccagccggataagcctgcacagatctatgagcaagccaaagcgctcgtacctgtagccccaaaggattctatctacaaggagttgatacaggacagcattaaacagctgaaccttatctcacagcacgttgagcaactccgtaagaagatggacgaactcgcatccacacttccggaatataatacggtacgctccatgtactgcgtcggccccagccttggtccccagctcattgcggagatcggggatatcagccgctttactcatcgtgaggctctgactgctttcgcaggtgtggatccgggtaaagacgattccggacaggtcgtgcataagagcggtcacgcttcaaaatgcggatctgcacgactcagaaaaacgctgttccagatcatggatgccatgctcaagcttggcccacgagagggcgaccctgtcagccagttccttttcaagaagaagtcggaaggtaaaccctaccttgtctacatgacggcaggtgccaataagttccttcgggtttactacggcaaggtaaaggaatgtctacggggtcaggctagatcagaagcctgactgcatctatccatagggacaatctgagactgcctgaatgaagacagtctggtttgttgtgctcattttcatccctccaaattcttgtgaattacacttgacttttacttagcaggc

SEQ ID NO: 3238 - DNA, 1493 bp, unidentified
  source 1..1493: mol_type = unassigned DNA; note = element_4b432da
  misc_feature 1: note = core
  misc_feature 2..179: note = LE
  misc_feature 180..1478: note = CDS
  misc_feature 1479..1493: note = RE
  misc_feature 59..205: note = bridgeRNA
cgttaccttcttcctatctcgtccgtccagcaggatggaggagtgctgaccggccggtcctcggcatgatcgtttgcccccagtcatccatgatccggggggtgtagtcaccgaggaccggtccggtggtcacggatcgctaatagaggcagggcccgctggttcagggccttcgtaacgtggatgccgagcgtgaccacctcccggccggccagcacgcgcagatgccagtgcaggagagggattcgatcgtggcggagcaaccactgccggcggtgttcgtcggcctcgacgtcggcaagtccgaccaccacgccgtggccgtgacgagcaccgggaagacggtctacgacaaggccctgcccaacgacgagacccggctgcgggccatcctcgaggagctggccgccgagcacgggccggtgctgatggtcgtagaccagccggccaccatcggggcgctgccggtggccgtcgccgaagccaccgaccaggttgaagtggcctatctgcccggactggcgatgcgccggatcgcggacctgcacccaggcacggccaagaccgatgcgcgggatgccctgatcatcgctgaggccgcccggaccatgccccataccctgcgcgacatccgggtcgacgaggcccagatcgccgaactcgcggtgctggccggcttcgacgacgacctggccgcccagatcaccgccacctccaatcggttgcgcgggatgctcacccagatccaccccgccctggaacgggtcctcgggccgcgggtgacgcatccggcggtggccgacctgctcacccgctacccgaccccggccaagctggccgcggccgggcggggccatgtgcgggcccgactgaagaagcacgcaccccggctggccgaggccctcacggaggagatcttcgacgccctggggcagcagagcgtggtcgtcgccggcaccgaggccgccgccaccgtcgtcccgatcctggccgggcagctggccgccttgatccaccagcgcgccacggtggctacccaggtcgaggccctcgtggaggcccaccctctttccgcggtcctgacctcgatgcccggggtaggggtcaggaccgccgcgaggatcctcaccgaggtcgtcggcaaggacttccgagatgccgggcacctggcttcctacgccgggatcgcccccgtcacccgaaggtcggggacctcgatccgcggcgagcacgccgccaagggcggcaacaagagattgaagcgggcgctgttcctctcggccttcgcctcgctcaaccacccgccctcacgggcgtactacgaccggaaacgggcccagggcaaacgccacaaccaggccgtcatcgccctggcccgccgacggaccgacgtgctcttcgcgatgctgcgcgacggcaccctctaccaagaccccaccgagccacgagacccgtcaccggtggccctggccgcttgacgaaaacgatagagg

SEQ ID NO: 3239 - DNA, 1902 bp, unidentified
  source 1..1902: mol_type = unassigned DNA; note = element_4b467b2
  misc_feature 1: note = core
  misc_feature 2..367: note = LE
  misc_feature 368..1357: note = CDS
  misc_feature 1358..1902: note = RE
  misc_feature 162..359: note = bridgeRNA
cctttagatttgttctatagatgaaatctattatggtgatggtgttgaaaagagggggtccgggggagactcataacctttaattttgttaataacctaaaactgggtaggcgaactttcgcgaccgctaggtcaagggtctatatagagtaacggtacctacccttttttttccaatgattgtagtattaaatttatagttcaacagaaaaaaggacggggtgaacttccgcgacggctaggtttatgatctatatagcgtaacagtccccgccctttataaccagattgccagaaccatataggatattagcccttgctattaaaggtcttagtttaagcaatctattaaaagcaaagtaaaaatatggaaattattgatgttatcggtattgatgtcagcaaactgacattggattgttgcatccatagcaatggactgcaaagaaagttcgcaaaccatccaaaaggaattgcgaagatggccaagtggagcttggcaaaaagtaaggtgaagaaggaaaacctactgttcatacttgaacacacaggactctattcggacaggcttgtccatatgctcgctgaggatgattgcctgatgaaagtagtatcgggtctagagatcaagcgttcgcttggaataacccgtggtaaggatgacagggcggatgccagacgtattgccttgtacggatatcgtactagggaggagggcaggccgagcaagttgccaagcgccacattggtaaggttgaaacggttaatgtccttgcggcgaaagctggttggacaacgggcaggccatatggcgacgcttcgagagcagaaaaaggtactggaagaagatgcacttttattttgggtccaggaggacatcatcaaccttttgacctggaggataaatgaccttgagcgtgaaatggacaatctcatgcaggaagataccgagttacgggaaatgttaaggttgttggtggggatcaagggaataggcaaggtcaccgcccgttttttaattgtatatacttcaggcttcacatcgttcggctcttggagaaaatttgcttcctattgtggtattgccccttttccgcacacttctggaaccagtgtgaaagggcggtcaaaggtaagccgtctggctaatctggaaggaaaatcgttattgcaccaatgtgccctgagtgcggtgaaatcgagtccagagatgaagatctactatgaaagaaggctcgaaatgggcaagagcaagatgagcacgctcaatatcattagaaataaattggttgcaagggcatttgcagtagtcaacaggggcacaccttatgtaaatacaatgaaatatgcctcttgacatagatagttccgcttaatctctgggctaacaacccagaatactaccaacttttaatccattggtcaatatcattgatcccatggacagggacagtattgtcccttattgaacattagatcacgtctatatggattgtcttttcgttttgtccccttgcccagtcttatgggtctcttcataatgggctttggcctcccggtcatagtcccccataccttttttagaatgcgaaaaaacaacatccgttcttggacggcggcataaagccgttccgcgggctttactttttatacgccttaccaagcccgtatgttgtgtggtaagtggcatcaaaaaaggtaatgtgagggcactatgggaagtaagtcaaatcagatatcatgaaatccaacaacatacaaaaaagggcaaggggacaaaaaaaatcaaaaaaaggaaaatgctcaggatataataagtaagtcggttggactgcgtggcagaaaaaaaagtagaacaataaataaaatttatgatagaaaattaggaattaccataggata

SEQ ID NO: 3240 - DNA, 1554 bp, unidentified
  source 1..1554: mol_type = unassigned DNA; note = element_4b482bb
  misc_feature 1..4: note = core
  misc_feature 5..265: note = LE
  misc_feature 266..1525: note = CDS
  misc_feature 1526..1554: note = RE
  misc_feature 14..235: note = bridgeRNA
ctcctatcttgatgttgttgcatctgagagccggataccggatgctttggtgcaatgcagactctggcgggcagggacgccgacattgctgctggggcgcggtgcgaccccgtaaaggagaatggcgacctgccccacccgggcatttccgcggattagctggatgaggggccgtgcgccacctcggatctcttctaggaggttgcggtcccgggcgatgcggcaggcggcccgtccgtcctgcaggagagaggagggcgggggcatgatctacgccggtgtggacgtcgcgaaggcggaccacgtgataggggccgtcgatgagcgcggctccgagatctgcgggcccatgggcttcaagaacagcgccgccgggttcgagcggtgcgaggcctggctcgagggggtggccgagaccccggtggacgcgctcgtcggcatggaggccacgggccactactggatggcgctctacgcgttcctcgtgtccaggggctacgaggtcgtcgtcatcgacccggcgcaggtgcgcgcagtgcgcaggctgaaggggctcgaccgggtgaagaacgaccgcgtggacgcgggcctcatcgccgagacgctgcgcatcggccagtacgacccgacgaggctcgccaccgacgaggtgcagtcccttcgctcgctcacgcgctaccggcagtcgctcaaggccgagctcgccgaggtgaagacccagtgcatatgcctgctcgactcctacttcccggagtacgcgtcggcgtggtcggacgtgttcggcgcggccagccgcgcggtgctctccaggagcccgctgccctccgagctcgcgcgcaggcgcgcggactcgctgcagcgcgacatctccgaggccgcgcgcggcagcaggcggatggacggcaaggcggccgagctcaaggcgctcgcgaagggctccgtcggcatcaggctcggcgaggcggcggcgtcgatgcaggtccgctcgctcgtgcgccagatggacttcctcgacgccgagtgcgccaggttcgacgccctcatcagggagctgctggagagggtcgagccgctcgtgctcaccatacccggcgtctcctacgccaccggcgcccagatcgtcgccgagataggcgacgtggggcgcttccggaacgccccggcgctcgtgagctacgccgggctcaactcgggcgtgaaccagtccggcaagttcgacagcggcggcggccccataaccaagcacggctcgccgtacctgaggagggcgctgtggctcgcggcgaacagggcccggcagtacgacccgtcgctgcgcgccttctacgagcggaagcgcgccgagggcaagtgccaccgcgtggcggtgacggccgtggcgcgcaagctctgccacatagtcttcgcggtgatgcgggacggggccccctacgacccggcgaggccgggcagggacccctcaaagcattcggtatccggttctcaaggtgctggttccgataaatgcagagacgggaaaagctagtcctcgggtcttgacttcatatagctggt

SEQ ID NO: 3241 - DNA, 1366 bp, unidentified
  source 1..1366: mol_type = unassigned DNA; note = element_4b4cfc8
  misc_feature 1..2: note = core
  misc_feature 3..80: note = LE
  misc_feature 81..1115: note = CDS
  misc_feature 1116..1366: note = RE
  misc_feature 1098..1353: note = bridgeRNA
tgttggggtggacggcccccgacggcatcgagtgtgccagactgcgggttgtcataaccacagccaagggaagccgtccgatgacgattatcagggtcgggttggatacatccaagagcgtctttcaagtgcacggcgcggacgagcaggagcggccggtgctgcgccggcagttgcgacgcggtcagattgagaaggtttttgccaagctgccgccgacgcgggtcgggctggaagcgtgcggcgcctcgcaccattggggacgggtgctgcgcgatctggggcacgaggtcatgctgatcccaccgcaatacatcaagccctacgttaaacgcggcaagaacgacgtgatcgacgccgaagcgatctgcgaggcgatgagccggccggggatgcgcttcgtgccgatcaagagtcgtgaagagcaggcggcgctgatgctcctgaaggtgcgcgatctgctgaccaagcagagcacgatgctgagcaatgcgatccgcgggcacgcggcggagttcggcgtgatcggcgcgaaggggccgcagaagatcaaggagctgctcgagcggattgccggcgaggccaatatgccggagccggcgcgcgaattgctgaacgacttggccagccagctggccgccgtcgaagtgcggctggcggcactcgaggccaagctgatggcgcatcacaaagccgatccgcgcagccagttgctggcgacgatccccggcgtcgggccggtcacggcggtcaacatcaccctcaaggtgcccgatgccaccgtcttccgttccggtcggcattttgctgcctggctcgggatcacaccacgcgagcactcgacggcagggcggcagcggctcggcaagatcagccggcaaggcgatgaaggcttgcgccggctgctggtgctcggcgccactgccgtcatccagcaggtcgagcgacgccgcaaagccaaaaagacgagcggcaacgactcgccctggcttctgcaattgctggcgcgcaagccgagaaagctcgcggcgatcgcgctggccaacaagatggcccgcaccatccgggccatgctggtgagcggcgaactgtaccgccgaccgcaggcggcttgagcccgtcaccaccgctctctggcgcttgcaaggaccgcagcaagatggcgatcggtcggtccgaggaccgggacaacccgtggaacccagcgatgcgtagacatcacttccctgttcgggacccgatccgcgtaacccatctgggccagcggctatccatgccgcgtgcaaaggccggacatatgaccgcaatcgaccagaaaccgtcatccgcgctgcaccgcccttgcgaggcgggggccgtccacata

SEQ ID NO: 3242 - DNA, 1170 bp, unidentified
  source 1..1170: mol_type = unassigned DNA; note = element_4b4db89
  misc_feature 1..2: note = core
  misc_feature 3..204: note = LE
  misc_feature 205..1167: note = CDS
  misc_feature 1168..1170: note = RE
  misc_feature 3..180: note = bridgeRNA
cttgtatgtttagacttgaaggggtgggcggcgactaaaagcccgattccgactctagccagtacggaccgtgggagacttctcgtcccgccctttctaccctaagcgccgataaggaattcatcgggaaaaccgacaatagaggcaagccagcgctgggatagaccccgacaagcccttaaaccctagctccgaggattagttatgacaatccttacttcaccaacggttgtgggtatcgatgtggccaaggccgaaatcgttgcctaccgcgaagacctcaacgccactcaagccattaccaacgaccgcgatgctcttggccgctggctcaacacattacctgccaacagctcaattgccctggaagccaccagcacttaccacttggacacagctgaactcgcccatgaaataggacatcgggtttacgttgtagacgcttatcggttgagccattaccgcgaaagcattggccagcgggcgaaaaccgacccttgtgatgcacgtttattagcgcgctacctgagcagcgagcagaaacggctacggctctggagtccacctccgcaggcttacaagttattgaaaagcttgctacaccgacgtgcagaacttatcaacttgcgtgtaagcctcacactgagctggtcaggcgaaccgcttttgaaagacgagttggcccagcagttaaagtccttcaaacaagctgagcaggtcattcagaagttgctgcacaaggtcagcaaagaggcgggcatcaccgaaaatatcaagcgctgcaaagccattgagggagtgggtgatcttacggctactggtctagcgacagccttcatgcgcggtcagttcgccaatggcgatgcattcatcgctttcttggggatggatctgagaccaaaagactccggaaaaaaggccggccctcggcacttgagtaaaaagggcgattcagagttgcggcgccttgctcacaacgcagcgatggccgctagccgatctgcgacctggaaaccgtactacgagtcctacctggcccgaggactggcaaagacccaagccctggtaatcctcgcccgcaagctctgccgggtggcattcgcgctgatgaaaaaccagagcgaataccaaccgaacttaaggttgcagggtttacctgcaacatagaat

SEQ ID NO: 3243 - DNA, 1431 bp, unidentified
  source 1..1431: mol_type = unassigned DNA; note = element_4b54aa2
  misc_feature 1..2: note = core
  misc_feature 3..230: note = LE
  misc_feature 231..1415: note = CDS
  misc_feature 1416..1431: note = RE
ctgatatacgtccctgtcagaggatccacactgcggtggaccctcgcggggagaccgacagctcgctatgcggcatgaccgttgcggctagtgtgcggccctcgcgttccgtccgagaacggtgatcgggaccctatggcggtcgagagaccgaccagtgatcgggcatcagcgggcgtgggacggatgacgtgagctccccggggtcagaaatgatcggaggagcgcgcatggccaccatcggcatcgacgtcggcaagcgtgagcacatcgcggcgatccagtaccagggtgagcgcgaggcgcgcaagacggtcctgcgatttggcgcggaccgcgccggtgtggccgagctctcggcctggatcgcgcgacaaggcggcgccgagcgcgcggtcctggagtcgagcggccattaccagctcaacctggccgcggcgctgcagcggcagggtctgccggtcgcggtcgtcaatcccctcgagtcgcgctacttcggcaaacgccgcctccagcgcaccaagagcgacgccgccgacgcgcgcacactggcgaccctagcgatggtcgatcagccagaggtccgcgacgtgctcgccggcgccgagttgcgcgaggccgcgcgctttgtcatgggcctggtcgaccagcagggccggatcgaccagaagatctgccgcctggtggagctggggtttcccgagctcgaggcggcgtacgacgacccgacctgcatcagcgctctggcgctgctgcgcaccgcggcgaccgccgccgcggtcgcgcgcaagcacaccgcgaccttggcccaggccagccgacccggcggcgggcggaggatcggcccaaagaaggccgagcagatctcgacgctcgccaaggacaccatcgccgcacccgagctggccgagcagatcggcttccagatgcgcctgctcatcgcccagcacgacctgctcgagggacagatcgccgaggccgaggcccaccttgcgaccaagctcgacggcgagctggtgcgacgcctgcggaccatccccggcgctgggccggccatcgtggccacactcatcgccgaggtcggcgacatctaccgcttcagcgactttgacaagctcgtggccttcgtcggcgtgcaccccgcggagaagagcagcggggaaaaaggcaagaaccccgagaccagctggcggatgagcaaggccggcaacgcctacctgcgcaccgcgctctatcgcacggccgtcgtcggcatcacccacaacccgctgatccgcgcccactacgcacgcaagcgcgcccagggcaagagcaacatgaacgcggtcgggcactgcatgaagaaggccctcgcgatcgtctggggtgtctggcggagcggcacggacttcgccgctccgccttcacgcccttgacaactccttatgggac

SEQ ID NO: 3244 - DNA, 1611 bp, unidentified
  source 1..1611: mol_type = unassigned DNA; note = element_4b63c4a
  misc_feature 1..2: note = core
  misc_feature 3..274: note = LE
  misc_feature 275..1477: note = CDS
  misc_feature 1478..1611: note = RE
  misc_feature 16..294: note = bridgeRNA
ctgttacaataatattagtcggtaaatccataacaaaccagctatggtttacacgcactcatttctgagctacaatgaaagcagtgattggaatgacgtcactctccttgggacaaagcgcccgtactaaagacagtcatccatgctttcattgtagtgttcgtttttgcaggttgagccgcctcatcggtgcgttcgtgtcacccaacagattgaataggtaatgagaaaaagcgtggcatccgattacatattcatacaggagtgatgttaaatgaacgcagtaggtatcgatgtttccaaaggcaaaagcactgttgcggtgctcagaccattcggagaagtggcagcttcaccttttgatgttattcataacgacagtgaccttaaacagcttgctgagcttatcaaggcattgccgggtgaatcaaaggttgttatggagtacaccggtacatattttgaacccatagcacagtttctccataacaacggtatatttgtttccgtagtcaatgctctcttagttcatgactatggcggaaactctttgagaaaggtcaagacggacaagaaagacgctttgaagcttgcttcctatgctctcgaccgctggactgaacttgatgaatatattcctgccgatgaacagcgtaaaacattgaaactgctgaacagacaatacaatcaatccatcaagatacagactatgatgaaaaacaaccttatctccctgaccgattctgtttttcccggtatcaataaactctttacatctcccgaaagacaatctgacggtcatgagaaatgggtagattttcttaaagcatttcctcataaggactgtgttgccaagctgtatttatccgtattcaaaaccaaatacaaaagctggtgcagcaggaataaatacaaatactctgagtctaaagcagaggaaatacatgcttatgccaaatctgtcattgcagttcttcccatgaatgacagcgcaaagctgcttgttacacaggctgtttctcagctgaataccatacttgaaacgctttcgtccattcgagacgaaatgaacaggatcgcttcctcactgcccgagtacgacactgtaatgtcgatgttcggagttggaaaggtgtacgggcctcagcttattgcagagatcggtgatacccgccgtttcaggaacagaagagctgttactgcttttgcaggacttgatgctccgccgtatcagtcgggacagcttgatgtatcttcaaggcacatttccaagcgtggctcagcggcactcagaaaggttctttttcagataactgaagtatatatccttaacaaaccggaagatgaaccggtttatcaatttatcgacaaaaagcgttccgaaggcaaacattattactcctacaggatcgctgctgcaaacaaatttctgaggatctattttgcgaaagtaaatcaggttttgatttctcaataaacttctcactttatctcctcatcaggctgcttcaaaaaatttttttatgaagcggtctttttgtcgtgcacttttttatcattgtgaattatctgtaaattcagcttttggggacttgacttttatttgcaggt

SEQ ID NO: 3245 - DNA, 1355 bp, unidentified
  source 1..1355: mol_type = unassigned DNA; note = element_4b654ba
  misc_feature 1..2: note = core
  misc_feature 3..287: note = LE
  misc_feature 288..1088: note = CDS
  misc_feature 1089..1355: note = RE
  misc_feature 1120..1343: note = bridgeRNA
tgatgctgtggacggctctccaacccaccggcagcgttggcttccggtcagagctggaggagagccatgggacaggtggtcactatcggattggacatcgcgaagtcggtgttccaggtgcacggcgtcgatgctgaaggcggcgttgtcattcgacagaagctgacgcgagcgcgcctgctgaagttcttcggcaagctcgctccgtgtctggtggggatcgaggcctgcgaaactcgcatcactgggcgcgcgaactgatcgagctcggtcacgatgtgcgcctgatgccgccgagctatgtgaagccctacgtgaagcgccagaagaacgacatggccgacgcggaggcgatctgcgaggcggtcactcggccgaccatgcggttcgtaccggtgaagtcgcccgagcagcagagcgtcatggtgttgcatcggacccggtcgatcctgatccgtcagcgcatccagatctcgaacgcgatccgtagccatatggcagagttcggcatggccgccgcagtcggccgtcagggcctccaggcgttgatcgcgatcgtggaggattcctctgatgtccgagtgccgggggaggcccgaggttgtctggggatgctggccgcccaactgcggctggtgaacgatcagatcctcgatacggatcgactgatcaggaccaacgcccgctcgacagaggtcggccgccggctgatggagatccccggtgtgggcccgctgctcgccagcgccttggtcggcacgatcaccgatccgaaggccttcaagactggccgtaatctggcggcatggatcggtctggtccctcgacagaactccagcggaggcaaagagcggctcggcggcatcactaagcagggcgatcgctacctgcgacagatgctggtcgtcggcgccttggctgtcgtgcgctacgccgttcgaaacggaacacgccgaccgtggctggttcagttgctcgcgcgacgaacgccgaaggtcgccgccgtcgcgctcgccaacaaaaccgcccgaatggtctgggcgatcatgacctcaggcgagcgctacagggagccgctggcggcgtagagatcaggccgaggcgaagcgcctgggtcaacgaacttgggaagggcgaacaggatgtaatgcgacagccggtcgacaccggaaggcgggaaaacccacatgcgccagagcgcctcgagcgcgtgcttttggtcgggaaccatcttcgcggaaggcattatggccagcggtcatgcgtaccgcaccaacaggtcgaacacatggccgcaccgaccaagctcagcagaacatcaagatcacccttgccaaaggggagccgtccacaca

SEQ ID NO: 3246 - DNA, 1107 bp, unidentified
  source 1..1107: mol_type = unassigned DNA; note = element_4b6f5fd
  misc_feature 1..2: note = core
  misc_feature 3..168: note = LE
  misc_feature 169..1092: note = CDS
  misc_feature 1093..1107: note = RE
  misc_feature 1..163: note = bridgeRNA
cctgtctgttgcgaatggagtagaatggcggtgcggaagggagcccgtccccccccagggtcgagagcccgtgtgggagcaagggtcccttccgcgtcgcgatcaacctgaacagttgcttgggacggctgactccgatcccgcatgacatggacaggagcttttaccatgccacagaccgtcatcggctgcgaccttgcccgcggctggatcgatacgcacgccctgccgaccaaggtggtggtgaggatcgataacaatccgaacagcattacccgctggaccgcgtccttgcctgcaaactctctagtcgtcttcgaggccaccagcggctgcgacactcttttgatcaaggcactctgcgaccggggccttcgcttcgcacgggtcaatccgcgccaagcccgagagttcgcccgcgcgacgggcgtgttggccaaaacggatcgggtcgatgcgcgcatactggctgatatggggcgcctcttgcctctcgaggttaccgcgccgcctcatccggatcgggcccgactttctgatttccttcgtcgccgcaggcagttggtcgaaatgcggaaagccgaaaaggtgcgtcgccacagcgccggccagccagcaatcctgcgcgagatcgagacgatgatcgcgctgctcgaccgccgcattgtcatcatggatcgcaagattgcggctctgatcggagacagccccgaacttaccgagcatgcggagttgcttcgcgccgtgcctgggattggaccgacggtgctggcaacgcttctcggcgaactgcccgaactcggcacgctctgtcggcgtcggatcgcctctctcgccgggctcgctccacatgcccgcgagagcggcacatggcgcggcacacgacgtatatggggaggacgacgcaaagtccgcgaggctctctacatcgcggccttgagcgcgtcccgccgcgtgccgctcttgattgccatgcgagatcgaatgaaggctgccggcaaagcccccaaaacagttctcattgccgttgcccgtcagctcctcgtcatcctcaacgccatgatccgaaacaaacagcccattcgcctctaagaaacgacacagttg

SEQ ID NO: 3247 - DNA, 1867 bp, unidentified
  source 1..1867: mol_type = unassigned DNA; note = element_4b71eb0
  misc_feature 1..2: note = core
  misc_feature 3..257: note = LE
  misc_feature 258..1481: note = CDS
  misc_feature 1482..1867: note = RE
  misc_feature 59..228: note = bridgeRNA
cttatacattaaactaagatcgtcccccctcaacgaggggacacggcggaccgtacagccgccggactgcgggcgagggaggaaaggataccttctcctagcggcgcgaccgtttatgaaagatcgaccttcctcctcgtcattcctggggctaatcgaccatagaaggatgcgcttcgagcgccgtgtataagggcacgactgcccaggatttctcgccacttcctattcctatccctagaaagcgaccgtagacgatgactatgtggtatgccggtattgactgggccgatcagcatcatgacgccgtggtgatcgacgaggcgggtaagcgcgtcgggacgacccgtgtggcccacagtgccgaggggctggacacgctggtgacgttccttaaaggaagcggggatgtcaccgctcatcccgaccatctggcctgcatcatcgagacgcaccggggcttgctcatcaccgccctgctggacgcgggcctgcccgtgtatccggtcaatcccaacaccgtcgagcggcaccgcaagcccgccggagccaagaccgacgccatcgacgcctatttgttggcgcgcacgggacggagtgacctgtccgacctgcgccgcctgaccccggatagccccgtgatcgccgaactcacggcgctcacgcgtgaccaggacaccctgatccagagccagacccgcctggtcaaccaacgcacggcctgcctcaaggcctattatccggtggcgcgggaattgttcggtaaacggcagcagccgaccacgctggctttcttgcaggcttttccgacccctgaccagtcgcgggcggcgacggtggagcagatcgccgccgtgctcaaagcggccggtcacccgacggcgaatgtcaaggcgcggcaggtccaagaacgcttgagccagccgcagttgcgggccgacgcggtggtgacgcgcaccaaaacgcgcctgatgctgacgttggtcgcccaattgcaggtgctcctccccgagatcgcggcctatgatgaggagattacgcgcctttttaggctgcattccgccagcagggcctgcgcgcgcctcccgcgggccgggacgcggttggcgccgcggctgctggcggaatggggcgatgaccgggggcgctacacggacgcggcgagcgtccaagccctcgccggcaccgcgccggtgcccttccagagtggcaacttcgccaaagcgcatcgccgctatgcctgcaacaagccgttgcgcaacgccctgcagccgtgcgcctggcagagcacgcagaaagaagcgtgggccttgacctactatcaacggaagcggcgcgacggcaagagccacgccatggccgtgcgcgccctggccaatcagtgggtccgcctcatctacgccttgtgggcgaagcatgagacctacaacccggcgaccttcctggccgccccgcaggcccacgcgccgcgcgccgcgtagcgcgcgtccctcccgccgccccgtcgtccccacccgtcgccgcgccaggcgtgccgggcgtcccgtcgtgccctcttccaccccacctgcgctcctgaggacgcggggtgtgggggcgcgcagcccccacaggcgtgcccccgacaagcgcaggcgccgcggcttgacgaccccggcggggtcccctgctagactgcacagccggagggagcggacggcagcgtagcgcccccccgtcccgtccgctccctcggcgtagcagacgcagcaggggtgccgggcggcgtcaagccccagccggagcgtacctgcccccaccggacacctcctgccccttatgcccttaaaggagagcgacatttttatttacccttgacatagaaggt

SEQ ID NO: 3248 - DNA, 1718 bp, unidentified
  source 1..1718: mol_type = unassigned DNA; note = element_4b7f49b
  misc_feature 1..5: note = core
  misc_feature 6..361: note = LE
  misc_feature 362..1543: note = CDS
  misc_feature 1544..1718: note = RE
  misc_feature 111..341: note = bridgeRNA
ctgctataatatcgaccgtagatatttcctgcataatggtcgaatatctatgcagaggaacatggtcttctattctccctgaaaccacgttttcttcaagcagtttgatcagttctcctgcaccttcgttatctcatccggcgcgtagctggatatgatataatacatacatcggacagaggcagctcttacactttctctgtgaccatcagttcacttgaagcagcgtgggccctctgccttatgggatttcatttattagccggatgtcgaagcctcgtgctttcctctaatgtccaagcaggttgtgatccataaggagttggggtgctgtccgaaagaacggaaggaggctcaggccatgttcattgttggtgtggacgtcgccaagcgaagtcatgaggcaattgttctcgatgactccggcggtatcgtcagaaaagcattcaacttcaaaaacgattccacaggtttccgaaaactcacggctgtattagacagcgtcagtaccgatccttccgacttcatcgttggaatggaatccaccgcccattattggctggcgctgtactctgcgctccgtaagcgaggatataccgttcatgtgctgaatccgattcagtccaacgccctgcgcggcatgtatatccgtcaggtgaagaacgatgagcgcgacagcttcatcatcgccgaggtgatccgctttggccgatacacagagggcggtctgccgccgtctgaactgtacgagctgcgggaactgtgccgtgccagatcctttattgtggatatgacagcagatctcaaacgcaaggtcatagccttattggaccaggcttttccggagtatgaaactgtgttttcaaacatttttgggctcacttcttccgaactgcttttgaattgttccacgccggaggagattcttgcaatagacacagagcagcttgccaggatcattgaagtgccaagccgcaaacgcttcagtacgcctaaggcggagcagatcaaggaggtagcatccaactcctttggcatcgttttggaatacggctccatgggacttctcatcaagcaatacatggagcatatccgctacacggaaaagcaaattgctgagttggaagagaagattacagaattgtacgcccactttgacacacaactcacgaccattccaggcattggaacgactctggcggcaacgatcttgagtgagattggcgacatctcccgtttttcatccgccgccaagctggccgcctttgccggtattgatccgacggtgaagcagtccggcgagttcaccgcaacccataatcatatgtcgaagcgcggttctccctatttacgcagggcgatctggcaggcgtcaacattggcggttatccatgatcctgcgttgaaggcattttttgagaagaaacgcgccgagggaaaaccgtatatgaacgccattggacacgttacaaggaaactgacgaacatcatttttgctgttcttcgagataacaagccctactactgccgcagcgacatctgaagcacgattcatattttccttaagcccctgattgccttcaacaaattcggaggcgactgtcaagggcgggcgaagcacgcttgttttacccttgaccggcaccgctgaatttgtattttaatacatgggtttgagaaaaaatctttcttttatcccttgacaaacacatagccgg

SEQ ID NO: 3249 - DNA, 1183 bp, unidentified
  source 1..1183: mol_type = unassigned DNA; note = element_4b8b1db
  misc_feature 1..2: note = core
  misc_feature 3..205: note = LE
  misc_feature 206..1168: note = CDS
  misc_feature 1169..1183: note = RE
  misc_feature 6..210: note = bridgeRNA
cttgtatcttcaggccagaccagcacggtagagtctgatggccattgtggtgatcagaccggaccgtgcagcctggtacgcgctggggccttgaagcccgtttctgagtgtattgcgcacgggttccgtgctggtcttcctgaagcccgaacggttacgcgcgccggcgttgagcgcgcatgcacaagcaagggagccgaagaccatgtctgcaacctcagtggtggtgggcatcgatgtggcgaaagcgtccgttgatgtcgcggtgctgggcggcaagctcgaggctcggcggttcgacaacgaagccgagggccactcggcactggcggccgcactgcagccgcagggcgtggcgctggtggtgatggaggccacgggcggctatgaggccgcgctggcctgcgcactgcaggcagcgggcttgccggtggcggtggtgaatccgaagcaggcccgtgattttgccaaggcaatgggacggctggccaagaccgatcgcatcgacgccgccatgcttgccgaactggcggccgtgctggtgcggcgcgacgacctggcacgcttcattcgcccgctgaccgacgcccagcagcaggcgctggcggcctgggtgacgcgtcgacggcaactgctgaccatgctgctgtccgagcgccagcggctgcaactggccatccccatggtgcgccccagcatcgaggcgatgatccgggctatccgcgcccagttggatgacgtggaagcacagatgacgggccacgtccgaacgcactttgccgaactcgacaccctgctgcgttcgacccgcggcatcggcccgatcgccagtgcgacgctgattgccgaactgccggaactcgggcggttgaaccggcgcgagattgctgccttggttggtgttgcgcccatcgccaatgactcgggcgccacgcgcgggcgccgacgagttcagggtggccggttcgagacccgccgtgtcttgtacatggccgctctcgtggctacacgccacaaccccgtcatccagaccttctaccagcgtctgattgacgccgggaagctgcccaaggtcgccttggtggcctgcatgcgcaagctcctgaccacgctcaacgccatggtcaggaccaacaagccttgggacgcatcgtttcatcacgcttgactgggaagacggtta

SEQ ID NO: 3250 - DNA, 1617 bp, unidentified
  source 1..1617: mol_type = unassigned DNA; note = element_4b8f726
  misc_feature 1..3: note = core
  misc_feature 4..249: note = LE
  misc_feature 250..1485: note = CDS
  misc_feature 1486..1617: note = RE
  misc_feature 8..226: note = bridgeRNA
gttcgtattataaggtcatccagaaaatatttctggttgaccattttttatatcgatatatgataaccgtagccggggtagaacgtccgcacccgtgggatttgatcccgtcaactaaacagttcgccccctacttgtagaaacatgattgaggctggttgggactatgatctcgtataacaagcgaagctatgatactacaagaaggaaatggggtaccggtgactttatattaggaggagataatttatgaatccagttgttggtctggatgtggcaaaaggggaaagtcaggttcaagcgttcttggataaaaagcagccttacaaaaaaggctttaaagtagcacatactcttgaagggttagctagtcttctagactttattagagaagtagaaaatgtatccgggggacggcctcccattgtattagaatccactggacattatcatacaccagttgtccagtatttcgaggatagagggtacttattgattatcgtaaatccactcatatcgtatcgagctaagagttctagtttacgcaaggtaaagacagatgttattgacgctcgtcatctctgcgagctgtattataaagaggacttagagccgtataaacagcgaggaatccaactcttaaacttacgtaaccttacaagacagcacgaaaatattacaggcctgtttgtacaaactaaattacaatttcaagcaattttggatcaagtgtttcctgaataccgtggggtttttggggacttacattcatatgtttctttattaactttacaagcatttcctacatccgaagaaatcttgggtactggtgaagagacagtcgccaaaaaaataaaggaattatgtaaaagtcgttcgcaaaaatgggcagacagtcaggcagaaaaactgatggccgccgcagttcaaaatccatttcagaaaaacttatatcatagtctgaccttaagcctggatatgtatattaatatgcttcttgaatacaaaaagcatctatccaagcttgaagatgagatagatgctttagcaaaaggtattgaagagtgtaagattatccaatcgatccctggtatcggtgaaaaaatcgctgccacgataatttctgaaattggggaaattgatcggtttaatcaccctaagaaactggttgcatttgccggaatcgatccaagtgtttttgaatctggtacattcaaaggtactttaaatcggattaccaaaagaggttctagtaggctacgacacgccttgtatatggctgtaaaatgtgccattcgtgattgtcgcaaaaagaaaacgacagatgaaatcattcctcgtaacaagagattacgagagttttatgataagaaacgtgaggaaggaaagccctttaaagtagctgtgatagcatgtgccaataaattcttacattggatttatgcacttttaaaaagcaaatcaactttccaagatctagcctagttttaaagtataactaaacagcccaaaactttccaaacacagaaccttggaaggttatttggcatacgcaaatttagtataacatgaaacattttaagtgtttattgaaaaatgttgacaaactattggctg

SEQ ID NO: 3251 - DNA, 1610 bp, unidentified
  source 1..1610: mol_type = unassigned DNA; note = element_4b9ca9e
  misc_feature 1..2: note = core
  misc_feature 3..280: note = LE
  misc_feature 281..1492: note = CDS
  misc_feature 1493..1610: note = RE
  misc_feature 14..300: note = bridgeRNA
ctattacaatagatttatagatcagggaagcggtacgcgaccgcgcccttgtctgcctcattacctaaactgtagaatgagagtgcattggtctgacgtacacctcctggaactttacgtccgtaaggcagtccgtcagccatcctcccattcccagttgttcgttttatgcaggtagaactgcatttctgcacgttcgtgtcagccctcaatagatcgaatcggcaatgaggagtttggtgcaccattgcagtaaatctattgttttggagggattcacatgaacgctgtcggtattgatgtttccaagggcaaaagcatggtcgccgcactccagcccggtggaaagctccttgcccgcccctttgaggtactccacaccaagaacggcctcaaggaactcgtttcctttgtccgcagtttggatggagatacgcgcatcgtcatggaacacacaggtcgttactacgagccgatgctccaatggctttccgcttccgatcttttcgtcactgccgtcaacccaaaactcatcaaggattttggaaacaacacgctgcgcagagtcaagacggataaagccgatgccaagaagattgctcgttatgcccttgacaactggtgcgatttgcgtcagcatacaggcatggataccacacgcacacagctcaaaaccatgaatcggcagtttgccttctgtatgcggcaaagaactgcctgcaagaacaacctcattgccctcaccgatcaggtctatcccggtgccaacacctattttgaaagccccgcaagagcggacggctcgcaaaaatgggtggactatgttgctgctttttggcacgtcgattatgtctgctcgatgcgtctttccacctttacggagcgttaccgcaaatggtgtcatcgacacggctacaacttccagtcagacaagcccaggatgctctgggagaaggcaaaggatcttatcgcgatgctcccgatggacaagatgacgaagagcctggtacagaccgccgtcgctcagctcaacgtgctgtccaaaacagtcgagacgctgcgcacgcagatgatcgaacttgccgaaaaactgccggaatacccggtcgttatcgccatgaacggcgtcggagcgacgcttgcaagtcagctgattgctgaaatcggcgacatcacccgtttccctaggcgcggctcattgactgctttcgcaggtgtcgatccgggggcaaagcagtccgggacaatgcagctaaggagcaacaagacatccaaggcagggtctccgcatctaaggagagcgctgtttcagattgtatcaggactcttgatgcgtgctcccgacgatccggtctacaacttcatggacaagaagcgcaccgagggaaagccatactacgtctatatgacggcgggagcaaataagttcctgcgcatctactacggacgcgtgaatgagtatttagcgggtctttccaaagaacaagaatagcgttttacctcagcccttcggtcggcgcttctgcggcgacctgtttgttgtactcaaaaaccgcttgcaacaactcctcatctttttactgtcgaggggttgactttttatttgcagg

SEQ ID NO: 3252 - DNA, 1386 bp, unidentified
  source 1..1386: mol_type = unassigned DNA; note = element_4b9ddbd
  misc_feature 1..3: note = core
  misc_feature 4..87: note = LE
  misc_feature 88..1113: note = CDS
  misc_feature 1114..1386: note = RE
  misc_feature 1090..1374: note = bridgeRNA
atgatggtgtggatgccgccaccttcaggcatcgcaatgtgccgtcatggggacgtcacaacgtagtgctcgaaaggacgcatcaatatggaacaagttaccatcatcggccttgatctggcgaaaaacgtttttcaggctcacggcgcatccgagaccggcatgctcatttttcgcaagaagctgacccgtaatcaggttctttcgtttctctcagagcaaccgaggtgtatcgtcgcgatggaagcatgtgcgaccgcacatggctgggcgcgggagattgacaggctcggtcacagttcgcggctgatcccgccgcaatacgtgaagccttacgttaaacgtcagaaaaacgatatggctgacgctgaagcaattgctgaggcggcatcacggccgaccatgaggttcgtcgaggtcaagactgaggatcaacaggcaagtgccatggcatatcggacccggcagatgttcatcgggcagcgaacccaatcgaccaacgctttacgctcgcatctggccgagcacggtgtgattgccgcgacgagcaaaagccgtctgaaaaagctgtctgcaatgatccaagatgaaacggtgggtatgccggacaaagtcagggggattgcccatgtctatgtcaatcacattgaggggctgacggcgcaaatcgtcgagatgaccgaggcgatgatgacagtggcaaagacgtcaacgacgatgaaacgactccagaccgtgccgggggtcggattgcaaactgcaatggccatagagaccttcgcgccagatctgacgtgcttcacccgtggccgagatttctcggcgtggctgggactggttcccaaacagaattctacgggcggcaagagccgtcttggaagggtctcgaagatggggcaagtggacatacgcagccatatgatacgcggtgccatgtctgtcatcagcgcagcctgccgctttggtgtcaaaaagggttcctggcttgaacgccttcttgctcgaaagccaaagctcgtggcagcgatcaccttggccaatagaatggcccgtgcaatctgggcgatgatgacgaagaatgaggattatcggaaccccgaggtggtggcgtaacagcgatacacgcaactaccgccccggtgtaagagacgtgtgaggaggtcactggaacttatgggagattgatcggccagatccggactgggaaaaccatctatgtggcgttgagctttcagctctcggatatgatttgaacccggttcgcgcatcaccataccggcccgcggccatgaacagcgccgcaatgaagaggccttatacatgaccgcacctgatcacacactcataggttcagaaaaacccttgcactaacggcggcatccatac

SEQ ID NO: 3253 - DNA, 1569 bp, unidentified
  source 1..1569: mol_type = unassigned DNA; note = element_4b9e710
  misc_feature 1..2: note = core
  misc_feature 3..247: note = LE
  misc_feature 248..1426: note = CDS
  misc_feature 1427..1569: note = RE
  misc_feature 3..226: note = bridgeRNA
ctcgtattataaagtagtagtatttatagaccctctccaaggtctgcatgctatactataggagatactgtagattgttttgatcacctaccactcagattgtttaagtgaggctacaaccacagtctctttgtatatttgttaatcagttagataccgcatgacggtttatttagaacgaggttacaatcgcaaggagtaccagtggctctaaacagtatcaaatattttttaaaggagatttcttatgatttacgttggaattgatgttgctaaagataagcacgactgctttatttctaactctgacggggaagtattatacaaatcttttactatctctaacaaccgtgaggggtttgaaaccttatttcaaagaattgtatctgttgcagaagatttgaacaatgtaaaagtaggactggaagccaccggacactacaactacaatcttctaggattccttcttgataaaggtttgccaacctatgttatcaatccgttacataccaatctttacagaaaaagtctaagccttagaaagacaaaaacggataaagttgattcccgtaccattgccactatgataatgtctgatttgaacttgaagtcctactcagacatatcttaccacaacgaggagctaaagtcacttactcgttaccgtttcgataaagtaaaggaacgggcaaaactaaaatcctctgttgcacggcttatcaatatcctgtttcccgaactggaaaaacttgttccttcactccacatggtttccgtttacgccttgttatctgaatttcccggagcttctcatgttgcttccgcgcatcttacaaggctgaccaatctactttctcaggcttctaagggacattacgggaaagataccgccattcttttccgagagactgcaaaaacgtctatcggctcccttatgcccgcaaagtctttggaactaaaacataccatcaaactcattcaggaattaacttctgagattgacgaaattgaatccgctatcaaacagatcatggttgaagaaattcaatctcctatccttacaatccccggtatcagttatcgaatgggagcaatgattattgctgagattggcgacttcagcagatttgattctcctgataagatacttgcttatgcaggaatgtctccctctacctaccaatcaggacaacttgataactgttattctcacatggaaaagcgtggttcacgatacttacgatatgccctttacaatgccaccaaatacgtttgtcattgggatgaaaactttggcgcatatcttgctaagaaacgggccgaaggcaagcattataatgttgcattgtctcacgccactaagaagctcgtaagaactatttttgcaatagaaaaatcaggacaggcatatataccaaccgtttagctttttctataaagatctcctttgagagcacctgtaaagatgctcttactgtcatgcagttttcaaagtacatatttatttgaaatgcatttctgtaattcattcaaaaattttcattttagacttgacttttaatagttagt

SEQ ID NO: 3254 - DNA, 1599 bp, unidentified
  source 1..1599: mol_type = unassigned DNA; note = element_4b9ef5e
  misc_feature 1: note = core
  misc_feature 2..80: note = LE
  misc_feature 81..1136: note = CDS
  misc_feature 1137..1599: note = RE
  misc_feature 1364..1590: note = bridgeRNA
taatgggatggtccgccgcgatttgagatgacactcagcacggagcgatcgtggagaagatccagaggaggatcatctaaatgaagatacaaacgatcggtatcgatcttggaaaggccacttttcacgtggtgggtttcgacgaggcaggaaacgtggtcgtgaagaagcgattgtcgaggaaacaggtgatctgctatgcagcaaatgtgccgccctgcctgattggcatggaagcgtgttgtggcgcgcatcacctcggtgccgccctggaggctcgagggcatcaggtgcggctgattccggcgcagttcgtacgtcccttcgtaaaatccaataagaatgattacagggatgccgaagcgatcgccgaggcagtgcaacggccaacgatgcggttcgtgccaatcaagacgaaggatcaactcgatctgcaggcgttgcatcggacgcgcgatcggctggtttcccgccgcaccagcttagtgaaccagatcagagccttcttgttggaacgtcgcattacgttccggcagggccgtgcgtatctacggcaacgaatgccactgatcctggaagacgccgagctcaacctgtctccactcatgcgccaactgctcgatcaactgtggcaggagtggaaggctgtggaggagcagattgaaacgatgaaccgtactattgcgaggatcgcggatcaggatgccgcatgtcaaagattgcagcaagtccccggcgtgggcccgctggcagccacggccatagccgcggctgttggcaacgggtctgccttccgcaagggacgcgactttgcggcctggttgggcttggtcccgcgacagcactcgacaggaggaaaggcgaaactcctcgggatcagcaagcgtggcaatccgtacctcagacgcctgttcatccatggtgcacggtctatcctgacggtggcgaatcgggaaaacattgcgttcggcgcttggatgacccaactcgaatctcacgtgcatcgaaatgttgccattgtcgctgtggccaataagctggcgcggatcgcctgggcagtgctcgccaaagaagagacgtatcactggccaccggcaatgtccgtaactccatcggatcgcagccaagcggcatgaaaggagtatgaacccgtgctcagagcccaccagcgggaatcattgggttcccgctacgccgcccgtcgaggatacgccgaataccagaacggtgctcgccggcaagggttcactttgtcgcgctcacgcgcgcccttgccggctgcgcgccgttctggcgcattcgacccgcgacgggcggctccggcgggaatccaattcgatcccgtgagaacgtgacacagaaaatcgaccgaggtttgcgtagcgagaattaaggagatggcggaacagtctaacggcgtgccccaaacctgacaaaaaaagtggccctccattttgggccggtggcgcttataaggacgggcacgcgcgaatcctcatcatggccaagagcttgctccaccagtaggccggatacatttttgcagactatttcccagccctcgacgattctccttgacgcgatgcgccggaccataca

SEQ ID NO: 3255 - DNA, 1594 bp, unidentified
  source 1..1594: mol_type = unassigned DNA; note = element_4ba20f1
  misc_feature 1..2: note = core
  misc_feature 3..99: note = LE
  misc_feature 100..1227: note = CDS
  misc_feature 1228..1594: note = RE
  misc_feature 1328..1529: note = bridgeRNA
agacataatgtattaaacctgtccaacttaaagaacgtgggttaagctttaaggtagagaaaccaaaaggcccagagccacaattaaggaggacaggttatgagaaattttagcacatttatcggtatggatgtacatatggaaacgatagcaattgcaaccgcagggaagcatggagcgccccgatactatggcgagattgccaatacatccgaggcgctgacaaagctggtaaagaaagtcattccctctggaagtcgggctgttttttgttatgaggctggtccgtgcggatacggagtatatcggcaaataacggacatggggcatcgatgtgatgttatagctccttcactgataccgaagaaagctggaaatcgagtgaagacagatcggcgcgatgctgtgactctggtacgtttacttcgagcaaatgaactgacagcggtgtgggttcctgatcagcagcaagaggcgatgcgggacctaacccgaattcgtgaagatatgaagagcatggaacggcgtgcccggcaacggttgaacggctttttgttgcgcaataagaggatctacaccggccaaaataaatggacgcaagcacatttccgctggttggaaaagatcagctttgaaaacccaatccagcagatcgtctttcaagagtatgtggatgcagttaaacaccttcagggacgcgtggtatcgctggaagaagagatgagcagagcgcttagtggatggtcgttgggaatcgtcgtagtagcattgatggcattacggggagtgaaccttgtaactgcgatgaccattgtatcagagataggagatataagccgtttcaaaagtcctcggcaattgatggcctatcttggattagtaccgagcgaggattcaagcggcaaacgtaaaagaagaggagaaatcaccaaaacaggcaatggacatgtgaggagagtacttgtagaagcttcctggagctatcggctaccggctcgaaagacggcccatctacagcgcaaggctgaaaaggcgagtgaagcagtgcaggcaatcgcgtggaaagcgcaaaaacgtttgtgcggccgatactggcatctgacacaaaaagggaaactaaaagtacaggcatgcacagccgtggcaagggagttggcagggtttatttgggctattggttgcgaagttatgggaaagaacaatacccctgtggtgaaagttgcataacatgcagacgtgcacagtaaaggaaaatctgttgcctatggaggcttcgtaagcatgaatttgtttttctgcacctctaaacaactacggacattgatccgacaggtgtgcatttcggccaggatagcagccggttgggagaaccctcgaaagaactatgaggcgccttcttacaggctgacccccgactttagacagaggcagctccacgacgaagacaagtcatgcggtatccaacccgcgtatatcagagtgatctaccgtcgtttatcgctgctatcctgacccaaatgtataatccaaaaaggaggttatgacaaaaaacaaagacgccgaccatcagcacttgacaggtttaatacatatc

SEQ ID NO: 3256 - DNA, 1461 bp, unidentified
  source 1..1461: mol_type = unassigned DNA; note = element_4ba34b7
  misc_feature 1..2: note = core
  misc_feature 3..241: note = LE
  misc_feature 242..1444: note = CDS
  misc_feature 1445..1461: note = RE
tctaccattggatttcgctgggatgctgggggcgcctccgtccggtagactgtctacctgacgggggtgtggctcttggggtccgcaggctcctcggagacactgctcgactctgaattgccgcccccgtcatctctgccatccagggtgtccttcgggatggtgcgaaccctcagggtgtgtcgctctgccacgtagacgagacctcctggatgaccttcaccagacaggagggaccccgatggaagcctgcattcgggtcggcgtcgacgtgggctgtagggctcaccgggtaggggttgccggaccagacggcgcgctcctcgaggagttcgacatctcccacactcgggaagggttccggagcttctttgagcgggtccaccgccggcaacaggaactgcagctccctgtggcggtggcgatggaggggttcaacggctacgcccgcccccttgaccaggagatccgcactcacggctggcggctgtacaacgtgaacaacctcaagctggcccgcttccgcgaggtgttccctgggccagcgaagacggatgcccttgatgcccggaagatcctggagctgttccacttgaaggaccaccttcccctggccaaggacgtgctgcaggaagtgggcgagatccccccggagaacgagaagctgaagcggctgagccgccggcgccgccagctcgtggaggagaagatccgggtcatggaccgcctgcaggctgaccttcaggcggtctcccccggcctgctctcgatcacgaaggacgtggggaacctgtggttcctgcgcttcctcaccgcgcgggacgacctcgcccaaccagcacgcctgcggccatcgaccgtccatgagatcaaggggattggggtgaagtgggcgggcgtcatcgctgactggcagaagaaggccacgttctcttccgaggtggactacgttggcccgatgatcatcgctgacgcgaggaggatcctggcgcttcttcaggagatccgcgccctggaccgagcgatggccgagctgacggagatctcctcgatcgggcgtcgggtaaggacgatccctgggttcggcaagacctcggcagcggagctggcaggagagatcgggacgctcgagcggtttgcctccgagtccagcctggctctgtacctggggatggcggcgctggacaaccagtcgggccagtaccacgggtcgaagcgacctcgccaggtgaacaggagggcgaaggcagcgatgatgaccgccgtcgcccgacacatcgagtgcgtaccccagtccaaggcgtactacgacaggaagcgcgcggaggggaagagacacaaccaggcggtgcgcgccctcggccgccacctcgtgcgagtcatctggtcgatgctcagacaggaacgcgattacgagctacgcgactccccgcctgcctcttgacaatccaagcgggatgt

SEQ ID NO: 3257 - DNA, 1204 bp, unidentified
  source 1..1204: mol_type = unassigned DNA; note = element_4ba444e
  misc_feature 1..2: note = core
  misc_feature 3..223: note = LE
  misc_feature 224..1201: note = CDS
  misc_feature 1202..1204: note = RE
  misc_feature 40..199: note = bridgeRNA
tcctttagatttgttttttggaaatttattagatttatgattgagaaaggaagctaaagtacactatttgtccctccgggttagagacccatatcgcgattaagacttttgcttccccttcatcaaaaagactcagatagaaattagggttcgtggcccattattaaggagttgagtttatgatgattttctctaatcacttattaatcgtaaaagcaaagttatgaaaaacatcattattggcatcgacatcagtaaaaagactttagacatttgcattaaggaaaaccaactagtaaagcatttgaatattgaaaataaagttccggctatcaagcgctttttaaaggcttatactaaagaaaatgtacttattgctatggagaataccggcaggtataactggaccctgtttgaagttcttgagccttttaagttcagggtgtatgtaatatctccattacatcttaaaaaaagtataggcattacaaggggtaaaaacgataaaatagatgcccttcgtatctgtaattttattgaaaaaaatcatgaggaaacaccacaatggagtcccagcccccaagcaataaaacaaataaaagtattgcttaccgaaagggctttaacaataaaaatgaagaagcaactaacaggctatcagcatgattacaagctgatgaaatctattaaattagataaacacctacttaagcttaacgagcaacttataaaaagtattgacgctcagattaaaggtatagaagataatattgaacaaattatatccgatgaccaaaagcttaaacaacaatatcaattgataaaatctgtcccaggggttggaaaagtgttagcatgggtgttcttatctaaaacagatgggtttacctctataactaatccaagaaaaatggcctgttacagcggggttgtgccttttgattttcagtcgggaacatcaattaaaaaacggccaggagtatcaatgctggcggataaaacaattaaaagtacattacacttgggagcaatgagcgccattaggcacagcaatgatctccagacatactatcagcgaaaagttgaagaaggtaaaaataaaatgagcgttttaaacgcagttagaaacaaaattatacatcgggtttttgcagtaataaaaaaccaaagaccttatcaaaaagatttggttttatcatagaaa

SEQ ID NO: 3258 - DNA, 1462 bp, unidentified
  source 1..1462: mol_type = unassigned DNA; note = element_4bb7cce
  misc_feature 1: note = core
  misc_feature 2..244: note = LE
  misc_feature 245..1447: note = CDS
  misc_feature 1448..1462: note = RE
  misc_feature 16..241: note = bridgeRNA
ccccccccattaccgttctcgtagtcccgcaacgggactaccggccttcggagttggcatgactacctccccttgtcgagtgcatggcccggggggtggtgtcaccggctccgaaggcactgacagaccgctgattagaggcatgaccaccggcctttccccaggtcgggaggctcttcgtaatgtggatgtggcgatcagtgccgtggcgaggccgggtgaacagcaccgaaggaaccacgacgtgatcgacatcagcgacatcgacgtcttcctcggcctggacgtcggcaagggcgaacaccacgccaccgctgtcacatcggccgggaagaaggccctcgacaaacgcctgcccaacagcgaacccaagctccgcgaggtcttcacgaaactccaggccaagcacggcatcgtgcttgtggtcgtcgaccagccggcctccatcggagccctgccgctggccgttgcccgagccgtcggctgccaggtcgcctatctgcccggactgacgatgcggcggatcgccgacctctatccgggcgaagccaagaccgatgcccgcgacgcgttcatcatcgccgacgccgccagggcgatgccgcacacgcttcgctccatcgagctggacgacgagaccgtcgccgagctggagatgctcgtcgggttcgacgacgacctggtcgctgaggccaaccggctctccaaccggctccgcggcctgttcacgcaggtccacccgcacctggagcgggtgctcggcccgcgcatgcagcacccggccgtcctggtcctgctggagaggttgggctcgcccgcccagatccgccagaccggacgccgcaaggtcacccacctgctgcggcccaaggctccgcggatggcggcccgtctgaccgaggacgtcttcaccgcgctcgacgaacagaccgtcgtcgtcccgggcaccgaggcggccgcactgatcgttcccagcctcgcccggtccctgaccgccgtgctcgaccagcgccgtctgctggagaaacgactcgacgagctgctggagacacaccctctttcccaggtcctgacgtcgatgcccggcgtcggcgtcaggaccgcggcccgcctcctcatcgacgtcggcgacggcaccaggttcccctcagccgcccacctcgccgcctatgcgggactcgcgccgacgacccgcagctcgggctcctcgatccgcggcgaacagcagtccaggagagggaacaagcagctcaagcgggctttcttcctctccgcgttcgccgccctgtccgatcccgcctcccgcacctactacgacaagaagatcaaggaaggcaagcatcacacccaggccctcctctgcctcgcccgacgccgagccgacgtgctcttcgcgatgctccgcgacgggaccttctaccaaccaccaacccccgttgccccttgaccgaagtcatagagg

SEQ ID NO: 3259 - DNA, 1235 bp, unidentified
  source 1..1235: mol_type = unassigned DNA; note = element_4bbde19
  misc_feature 1..2: note = core
  misc_feature 3..220: note = LE
  misc_feature 221..1045: note = CDS
  misc_feature 1046..1235: note = RE
  misc_feature 52..214: note = bridgeRNA
atggtaagtttgcaataagaaaaataagtaataatttggttaataatattaaccaaagagtaaaagcagcaggataaaggcagacgttgcgttgatacttagatatcgccccggattttattcccctgctgctgttttcttccaaatccggatagaacattgttggtaagaacttttaccatggtggatcagaagaaaacctctttttaaaaaaaaatgtatgtcaaatgtattaaaaaaagtgattggtgttgatgttggagcaaaatttttaacagtaagttttaatgaccactgcgataaggatcaagttcaaaatattggaaacaatcagcgttcgatcgtagcttttttgaagaagttctctacggaagattattgcttcgtgattgaagcgacgggtaattacagcagtcggcttctgcatctttctttgtcgaaaggttttgaatccagtttgattaactgtatgtctgtgaaacatttttcgagaatgaaaaacatcatcaccaaaactgatgcggaagatgctaaactgatcaagctttatggagaaatgtttcgaccggaggtttatgtgcccaaaagcattgaaattgaacatttggatcaggaaataaaactgctgaatgatcttgaagaagaaaagcgtcggtatgcggtaaaactccaggcacttcgttacaatccttttcttaatgctaacacagaaaaacattatgagaaaagacttaaacagttagaaaaagaaattactgaagtagaactgcgcctgccacaacttcaggatgaagagtttaaagaagtaaaagatttgatacaaagtgtatgtggaattggggagaaaacctctcttcaactgatgatagctacctctggttttaaaaactttgattctgcaaaatcattggtaaaatactttggtttagcaccccgaatttatcaatcgggaaagaaatcctattcaccccggcaaatgcagaacctccaaaactcatatcagaggaatgctgtatgtttgttcctggactgctatgaaacataatctaccttgcaaagaactttatctgcgactcttggcaaaaggaaaaccaaagaaagtagccttaatagcagtttgtaataaactcctgagaatttgttttggtgccgtaaaaaataaaactgcatatcaacaggattatctaaaaaacttgaaaattttaacctgattaatttgcaaattaacatagaac

SEQ ID NO: 3260 - DNA, 1210 bp, unidentified
  source 1..1210: mol_type = unassigned DNA; note = element_4bca9e6
  misc_feature 1..2: note = core
  misc_feature 3..223: note = LE
  misc_feature 224..1207: note = CDS
  misc_feature 1208..1210: note = RE
  misc_feature 43..205: note = bridgeRNA
tcctttagacttgcattattatatttattggaagtttaattaagaaaagagagctgaacttaggtaaactattccttctcagaattaaaaattcatagtgcgatttagacctaagttcagactttcatcaacaatctctaatagaaattcgggatttaaagcccattatcaaggagttgagttattgatgaaattccctctttcactaaagcattacgaagttatgaaaagtatttatgttggtattgatgtgagtaaaagaactctggatgtttgtgtaaaaagtgctgagcaagaacagttttttaaaattgagaacaaatccaatagtattaaaaaactatttaaggaattaagaaaagttgatagttgtgttgtgatagctatggaaaacactgggtattacaaccaccagctttataaagtcctacccaatttcaattttactgtatatgtagtagaccccaaacatatcaagagaagtattgggttagttcggggaaaaaatgacaaagtggatgccaagcgaattgcgacatttattgagagaaataatgaagatctgaacccatgggaacctctctcggaaagcgtctattctttaaaggttctattaactgaacgaaaagcagaggttgctagaataagatctttaaaacaaagaatagaaagtcttaatcaacaaaaatcagtcagttctgttccaaaacttatcaccaggaacaaaaaagagatacagagaatccaaaaaagggtcaaggaaatcgagaaaatgataagggaagaaattgctaaggaaatttcattaaaaagagaaatagaccgaatcaaaactgttccaggaataggagatattacggcttggatgatcgctgccaagacccatggcttcaaacgattgctcgacccaagaaagctagcctgctttgccggagtagtgccctttgagcaacagagtggcagtagtttaaaaacaaaacccagagtatccaaaatggcagatcgctcattaaaaactgtactacaaatggctgcaatgagatcagtaagaatgaataatgaattacagagctactatcaacgtaaggtagaagaaggcaaaaacaaaatgagtgtattaaatgcagtaagaaacaaattgatccatattgtaatggctttaattaaaaataaaacctattatcaaaatcccttggaattgtcatagaaa

SEQ ID NO: 3261 - DNA, 1543 bp, unidentified
  source 1..1543: mol_type = unassigned DNA; note = element_4bd12bd
  misc_feature 1..2: note = core
  misc_feature 3..255: note = LE
  misc_feature 256..1434: note = CDS
  misc_feature 1435..1543: note = RE
  misc_feature 3..234: note = bridgeRNA
cttgtataatgaacatatagtaaaaattcattatacttttcctttcttaaagatttttactataattatcataagacgctgtagattagtattttcacctatagcttgactattttaatcgaggatctaaccactgtcttatgcttatctgttaattagttagataacgcatgacgttttatatatagcaaggatacatttgtcataagatttgtggaacatagcgtattaaaatactataaaggagttgttcttatgatttatattggcattgatgttgcaaagaacaaacacgattgctgcattatagattcagatggtgctgtttataacgattctttacgtatatccaattcccgtgaaggttttgaattactttattcttcaatactttccatcctgcctgacaggaatatttccaacgtaaaaataggacttgaatcaacaggtcattacagcattaatctacagaactttttgtatgctaaaggtttcagtctctccatcctcaaccctttagctgcaaatctcttccgtaaagctcagactcttagaaagaccaagactgataaaacggatgcactggttattgctaaaatgctcttttctgatgatacaaaatcctattctcctgtatcatatcagattcaagagctaaagtcactaaccagacatagatatcgcttaatcgggtaccgatccaagttgaaagtatccatcaatagattgatagatattatatttccggaactgcctaatcttttttggtcaatccatcagagctcttcctatgcacttttatctgtacttacaagtccaaaggagatagctgcctgccacctgaccaggttgacaaacattctaagtacagcttccaggggtaaatatggaaaagataaagcaatttttttaaaggaatgtgctgcaaattccattggtaccagctcaagagctttaagttttgaacttcagcagaccattaggttaatacaatcagtccaagttgaaattgatgctttagaactccagataaaagaagttgttattgaaatcaactcaccactgattagtattcccggaatttcatatactctagcagcaataatactgtccgaaatcggagatatagaaaggttctcaagtccctgcaagctcctagcttttgccgggttagatccttctacttaccaatccgggaaatataatgcttcgcatacacccatggtcaaacgtggatctagttatcttcgctttgccatacttatggccagcagaactgtttcaatgagagatgcagccttttctgcatatttatcaaagaaacgatctgaaggtaagcactattacgttgctatgagtcatgttgctaaaaaattgatacgtgtaatatttcaccttttaaaaacaaatacagcttttgttccacaaatgtaatcctcatttttaaaattggcaacttagttgctttatttgccatgcatttttttaagagactaaaataataaaaaaatctttaaaattatattgacttcatatagttagt

SEQ ID NO: 3262 - DNA, 1465 bp, unidentified
  source 1..1465: mol_type = unassigned DNA; note = element_4be331a
  misc_feature 1..3: note = core
  misc_feature 4..184: note = LE
  misc_feature 185..1450: note = CDS
  misc_feature 1451..1465: note = RE
  misc_feature 24..215: note = bridgeRNA
tccttaagttcgtaggtgcagttacttcgtgttgttacgttgtgctgtgaccccgggtggggcgggtgaggctgcatcgctcttgccggcctgatggtgcggcttgaaaggactggccgcccggcctgcctggacttctctggccgctgattgagatctgcgatctgctcgcttgtttaaggaaatgctggcggggttgtccgtggggaacatggtggacgacaagcgaataggaggttcgatggaggcggaccagttgtgggctggtgcggatgtcggcaaggagcaccattgggtctgcgttgtcgacgacaagggcaccgcggtgttgtcgcgcaagctcaccaacgatgaacaaccgatccgagaactcatcgatgaaatcgacgctctgggctgcgacgtgtcctggacggtggatttgaccacggtgtacgccagcttgctgttgacggtgctcgccgatgctggcaagtcggtgcggtatctgaccggccgtgctgtctggcaggcttcggtgacctaccgcggtggggaagccaagaccgatgccaaggacgcacgggtgatcgctgatcagtcgaggatgcgtggtgctgatctgccggtgctgcatcccgacgacgatttgatcaccgaactgcggatgctcaccgcgcatcgcgccgatctggtcgctgatcgcacccgcaccatcaaccggctgcgccaccaactcatcgccgtatgcccggcattggaacgcgttgcccaactgacccaggaccgcggctgggtggtgctgctcacgcggtatcaacgaccgaaagccattcgccacagcggtgtctcgcgcctgacgaagatgctcggcgacgccggcgtgcgcaatgcggccacgatcgccgccgcggcggtaacggctgccaaatcgcagacggtgcgcctgcccggcgaagacgtcgccgccggactcgtcgccgacctggccggggaggtggttgccctcgatgaccgcatcaaatccaccgacgccgacatcgaggaccgatttcgccgccatcccgcagccgaagtgatcaccagcctgcccggcatgggtttccgactcggcgcggaattcctcgccgccgtcggcgatcccaccctgatcggctctgccgaccaactcgccgcctgggccggactggccccggtctcgcgcgactccggaaaacgcaccgggcgcctgcacacgcccaagcgctacagccgacggctgcgccgggtgatgtacatgtccgccctgaccgcgatccgctgcgacccgcactccaaggcctactaccagcgcaaacgagacgaaggaaaacgaccgatcccgaccaccctctgcctggcgcgacgccgtaccaacgtcctttacgccctcatccgtgacaaccgcacctggcaacccgaatcacccccgatcaccaagtcggcggcttgacatcttcattgagag

SEQ ID NO: 3263 - DNA, 1398 bp, unidentified
  source 1..1398: mol_type = unassigned DNA; note = element_4c0f6b5
  misc_feature 1: note = core
  misc_feature 2..91: note = LE
  misc_feature 92..925: note = CDS
  misc_feature 926..1398: note = RE
  misc_feature 1165..1393: note = bridgeRNA
taatggaatggacgccccctttcacggccgtccgcctgctgccaaagtctgagcgggcgctctttgcccgctcatgccaatggaggcagctatgaagatcacgactctcggtttggacctcgccaagaatgtttttcagattcatggtgttgatgagcgcggtgccgtggtccttcgcaagcaactcaagcgtgaccaggtggcaccattcttcgcgcgcctggagccctgcctgatcggaatcaaagcttgtggaggcgcgcactattgggccataaagctcagcacactcggtcactgcgtgaagatgatggcgccgcagttcgtcaagccgtatgtgaagaccaacaagaacgatttgctcgacgccgaggcaatctgtgaggccgtcgcgcgtccgaacatgcgattcgttccgaccaaatcgcccgaacagcaggccgtgctgtcgctgcacacggcacgtgagagcttcgtcagggcgcgcaccgcgcaggccaaccagatccgcgggctgttgatcgagttcgggctgatcattccccaaggcattcgccatatttaccagcgcgttcccgagctgatcgaagacgccagcaacgagctgcctggacgcttcaggatgctgatcgatcggctgctgcagcacctcaaagagctcgaccggcaggtgcgcgaactcgagcgggagattgagcagtggcatcgcagtagcgaagtcagccgccggctgcagaccattcccggcatcggccccatgaccgccagcgcgcttgtggccagcgtcggcgacccgagcaacttcaagaacgcgcggcagttcgccgcctggatcgggttgtgccgcatcagaactccagtggcggcaagacgcagttgctgggcatcagcaagcgcggcaatgtctatcttcgaacactgctgatccatggtggcaggaccatggtcgagcttgctcgaaggaaggccgaccaagccgacggttggctcgcgaagttggtcggccgtcgacatcacaacattgcggccgtcgcaatggccaacaagaacgcacgaacggcgtgggccttgttgtcgtcgggcaaggcctacgacgcgatgcacgtgccggaccacgcactgtagtccgcgcagtcggcgcaggccgccataacaagacagattccctcctcaggttgctttggtaatcgatcgttgatggcaagacaggtaggaccggggctggccaaacctgacgtggataacgagccttgagctcgcagagttgtagaggaaccagccagcgaattccatcagggccgaagcgcttcatgcgtctgaaggccggatgtatgtctgcatccttctcgtgctcgccagaaacgtgagagagccttgcaaaccgggggcgtccatgta

SEQ ID NO: 3264 - DNA, 1377 bp, unidentified
  source 1..1377: mol_type = unassigned DNA; note = element_4c1af9a
  misc_feature 1..2: note = core
  misc_feature 3..305: note = LE
  misc_feature 306..1115: note = CDS
  misc_feature 1116..1377: note = RE
  misc_feature 1147..1365: note = bridgeRNA
tgatgctgtggacggctcctccaccggcacgtaagtgccatcgaagtggtcgccgctggggcggtcacgattggggagccggacatgcaaagcgtcacgacaattggtctcgatatcgcgaagtcggtctttcaagtccacggcgttgatgcggccggcaacgtgattgtccgccgcaagctgaagcgccggtacgtcgcggcgttcttccaaaagctgccgccgtgcctcgtcggcatcgaagcctgcgcgacatcgcacattggtcgcgcgagctccaggcgctcggccacagggtacgcctgatgccgccggcgtacgtcaagccctacgttaagcggcagaagaacgacgccgcggatgctgaggccatctgcgaggcggtcacccggtcaaacatgcgctttgttgagaccaagacgccagagcagcagagctgcctgatgctccaccgcacccggcatcttttcatccgccagcagaccgccgtgatcaattcgatccgcgcacatcttgccgagttcggcattgtggcgcgggtcggacgccgtggtgtcgaggagctcctcgaggtggctgccgatccgagcgacggacgcgtgcccgagttggcacgcgcgtgcctgatcgcgctcggcgcccagctgcggatgctaaaggaccagattctgcagttcgaccgccacatcatggcctggcaccgatcgaacgagatgagcaagcggctcgatgagatccccggtgtcggcccggcgctggccactgccctcgtcagcagcgttgccaacccgcgggctttccggtcagcgcggcatttttccgcctggatcgggctcgtccccaagcagcactcgagcgggggcaaggacaagctcggcagcatcagcaagcaaggggaccgctatctgcggagcctctttacggcgggcgcgctcgccgtcatccgctacgccaagatgcacggcaccaaacatcgtccttggctcaccgcgttgctggcgcgtcggccgaccaaggttgccgcggtcgccctggcgagcaagatcgccagaatggcttgggccatgatgatcaagggagagcgctacaaagaacccgccgcgctggcggcgtgatcgagatcacgctgggcgatccagtgtgatgtgaaggttgggagggcgaacagcacgtaatgcagagccgatcgatccggcgatcaggacaacccacatagtgccagcgcatcatcgaatgcgagcttatgaccgggacctgatccgcggagggcattatggccagcggtcatgtgaaccgcacaatcaggccgaacacatggctgcaccgaccagccctgcacgtgaagaaaacccttgccaacccggagccgtccacaca

SEQ ID NO: 3265 - DNA, 1504 bp, unidentified
  source 1..1504: mol_type = unassigned DNA; note = element_4c25a00
  misc_feature 1..3: note = core
  misc_feature 4..135: note = LE
  misc_feature 136..1167: note = CDS
  misc_feature 1168..1504: note = RE
  misc_feature 1196..1386: note = bridgeRNA
aacatggggtaatcgcggcgcgatcgtcccaggccatttttgtaagatgatggctggcgagggtggttgcccccgataagatggaaatacgggctcacgattggaaccgggcccaaacatcaaatggaggcaaccgtggaccaatatatagggctggacatttcattaaaagataccgcgatctcgatccgacaagacgggaagcggatctggcggggaaagtgtccctctgacccaaaacttctggcggagatgatccgcaaacacgctccgcacgccaagcgcgttgtgttcgagacggggccgttgtcgacgtggttctatcatgcgctgacagccgagggggttccagcaatctgcatcgaagcgcggcacgcgcaaaaggtcttggacgagacgctcaacaagaccgacgccaatgacgcggatggcttggcccatttagccgaagctgggttctacaaggccgtccggttgaaggctttcgatagcatgctgacgcgcacactggtggcggctcgcaatcagcttttgactatctcgacccagctcagcaatcaaatccgcggcctgatgaagacattcggtcttattgtcccgaaagggaaaggtcggatatttgatgggaacattaggcaattgctggatgggaatgacggcctgggaaagatcatattgcctctgctcgaggcatggcgcgacatacgcaggcgcgcggccgatcttgatcggcagttgctcgcagcggcgcgggagagccaggagacgaagcttttgatgacgatcccggggatcggcgccgtcaccgccatctcgtatgtcgcagcgatcgaagatccagaaaacttcagaacgtcgcgctcagttggcgcctggcttgggctgacaacgcggcgctaccagtccggcgaagtcgattatgacggtcatatctcacgcagaggcgacaaccatctgcggggcttgctttatgaagcagcgacggtactcctcacaagaaccagtgccagaaacgaaaacagtctcaggagctggggacttaaactgcgtgagcggctgggcttcaagcgcgccgcagtggcggtcgcgcgaaagctggccgttatcatgcatagcatgctcaagacaggggaagtgttcaacgcattggctggcgctaccgcataagcgaagaaccagccttctcacctcagcgcgtcaaatctgatttgaggcactgagcgtccgtgctgcggacgtgggttggatcattccgttcatgttcgctgcagctctttgagagactgcgcttcaaacataggaagatccaccctgcgaagacccattatgcggcgaccatgtgtcgaccgcggagacaacgctgctcccggcaccggatagctctgaagaaaaaaagtcgctgaggcccgatcgaactgaataacgtacgccgcccagcgtgttccgcagcacggcgacgttgacgagtgcccaccgctccttgactcttggaacgctattagac

SEQ ID NO: 3266 - DNA, 1677 bp, unidentified
  source 1..1677: mol_type = unassigned DNA; note = element_4c2a5bc
  misc_feature 1: note = core
  misc_feature 2..333: note = LE
  misc_feature 334..1536: note = CDS
  misc_feature 1537..1677: note = RE
  misc_feature 43..294: note = bridgeRNA
cattacgttgttagcagttccgtttgagggaaccgtagattcatagcctagtccctgtttcaggggtaggtagtgtttgttccgttccttctttcctttcggggagatggaactagtcgctggctttggtatggcttgttgttgtccctgtctgaaaatgatccggggggtgatgccgccaaaggcagtgacatactcccaactgctaataggaacctgacccgcacaatctggtgtgaggtctcaaagtaatgtggatgccagcgtgaagtatgtccgaccaccagcgatgaaatgacccaaattcgttttctatcgctaggaggttcaaagatgacatacgactatgtcatcggcatggacgtcggcaagtacttccaccacgcttgcgtcctcgattccagcggccaccaggccctatccaaacgcatcaaccaacacgagcaatctcttcgcaaactctttggcgcctatgcaacaaaagcaacgaagactctggtcgtcgtggatcagccgaataatatcggtcgtctgaccgtggcagtagctcaggacatcggaattgatgtccgctatctccccggactagccatgcgccagctatcacgcattcatgccggtaatgcaaagacagacgtccgtgatgcctacatcattgcctatgccggaaagaatcttccagaatcactaagaaacgtcgaccgagtcgaagaagcatttatccagctcaaggtactcaacggcatcgacgaagaccttgccagatcctatacacggcttatcaaccagatccgttcagcactagtcggcacatatccagcatttgagcacgtactgcgtggacaaatgattcaccgcaaatggatactccacttattagccaaatacggcggtcccaccaaaatcaagcggctaggcaaggcacgagtcaacacgttcgcgcgcaagcaccgagcacgcaatccggagcctattactgacgcaatgtttacagccatcgccgggcagtcagtccagatagcaggagctgaatacgcagagctaggcgtggcaatgtctgccaaagatgccttactcaaactcgagcatcgtaaagaaatcgaagcccaagtcatcgaactcatcgaagaaatcccccaaacacaactcctgttgtcaatgccaggaataggccccaggtcagctgcgcaaatactgatgacggtcggagatatgtccgattttcctaccgcgggtcatctggcgtcctacgcgggactttcacctaagacgaaccagtccggaacatcaattatgtccaactcgttaaatcgggctggaaacaagaaattaaagaacgccctatggcaatcgtcttttgcatcgatcagattccacgagcgttcacgacaattctacgaacgaaaacgcagcgaaggcaaaaggcataacgcagctgtcgtcgccctagcgcgtcgacgactcaacgtcttattcgccatgatgagaaacaacgaattttaccgcgagccccagacggaggtcactgccgcctaaagacaccttcacccgcaaagccgatggggatttcccaatcggctacttcctatgcccgaaaacaacaccaagaaagcaaaataaggctccctagttgcccctgtaatccccacccgcgaggttgacaagactataggaaca

SEQ ID NO: 3267 - DNA, 1349 bp, unidentified
  source 1..1349: mol_type = unassigned DNA; note = element_4c3a937
  misc_feature 1: note = core
  misc_feature 2..63: note = LE
  misc_feature 64..1113: note = CDS
  misc_feature 1114..1349: note = RE
  misc_feature 1126..1343: note = bridgeRNA
taatgggatggtccgccccgtcctcccgcctcaatctgaggccctatcaatggaggaacagacatgattcgcaataaacctcgaggcgcgaccgtctacggaatcgacctgggcaagaatatctttcacgtagtcgggactgatcccgccgggaatgttgtccagcgggtcaagttccgccgagacactttgcgtgcattttttgagcgcgccgagcgagcggtggtggggatggaagcctgccccggctcgcaatggctcgcaagaaagctgcaggcgatgggacacacggtccggatcattccggctcaatttgtgaagccttatgtaaagtcgcacaagaacgacactatcgatgcggcagcgattgccgaggcagtgacccgtccgacaatgcgatttgtccaggtcaagcagccggaacaggtggacttacagagccttcatcgcatccgtgatcagatggtgggaagccgaacacgactgatctgccagatgcgagccttttgcctcgagtacggagtcgcgatccgccagggcgccggtctcttcaaatcggatttgcccagggtcattgccgacgaatgcaacgacctgaccccgacaatgcggcggctgcttaatgagctcttcgaggatttgatgcgattggagaagcgcatcgcccaggtcacgcgagagatcgaggcactggcggcccgcgacgagaaggcccgtagactgatgacgataccaggaataggcccgttgggggccacagcacttctcgcagctgctggaaacggtcagcagtttaagaaagcccgtgacatggccgcctggcttggcctcgttccgcagcaatattccacgggaggcaaaacccagatgtttggcatcagcaagcgggggaaccgctatcttcgaaggcttttgatacatggtgcgaggtcatgcgtcatgcacctcgatcgatcgcgagaccgattgggggcatggctccggcaattacactcgaggatgcacgtcaataaagtcactgtggccctggcggctaaaattgctcgcattgcctgggtggtgctgaatcggcctggtgccatctacgagcggcgcgatcccgcgctcgcttagaaaggcctggccaaagattgcgaggctcgaggagatgacgagacagtcgatcggcgtgtcgtaagctctggcaaaaaaccgtgccccgtgcacgtaccattatttgagaacgatacgcgcggatctcatcatggcctggctgcaacagcagtccactcgcgagaggccggatacatttacgcaactgtcatcgttgtcacgtccaagaaccttgcacggacggggcggaccataca

SEQ ID NO: 3268 - DNA, 1472 bp, unidentified
  source 1..1472: mol_type = unassigned DNA; note = element_4c41907
  misc_feature 1: note = core
  misc_feature 2..226: note = LE
  misc_feature 227..1096: note = CDS
  misc_feature 1097..1472: note = RE
  misc_feature 12..237: note = bridgeRNA
ctactagacgattctcctaggaccggcgtctggccagactcggtccaggtgatcgacgggcagctgtccttgcggctgcccaccggctgatcggtgtggctctcttccggtctgcgtcccggcgggcaccgttgacgaggcgtggctcaagacgggactgccctgttcgtagtagcactgcccacgtcgccgtccctatcggtacgagcacaggcgggagcagcacatgcaacagacgcagcaaatcacgaagcagatcatcatcggggtcgatccgcacaagctgtccgcgacgatcgaggtcgtcgatgaccgcgagcggttcctcggctcgggtcggtttacgagcgaccgggccggctacaccgcgatcctgacgtacgcgaaggcctggcccgaacgggtctgggcggtcgagggcagcaacggtgccggccggcccctggcgcagcggcttctcgaggctggtgagcaggtggtcgacgtcccggccaaactggcagctcgggtccggctgttcgacaccgggcacaaccgcaagacccacgcgctggatgcgcactcgatcgcggtcgtcgcagtccgcaccgcggggctgcgggtcctggaggtcgacggcgagctcgaggcgctgcggatgctcaccgaccgccgcgaaacgctgacgcggcgccgggtccagaccgtcaaccggctccaggcgctcctcgcggaactgcttccgggacaggcgaagaaggacatcacaccgttgcaggccaaggcgctgctcgcgtccgtccgcccgcgtgacatcgccgtgaagacccggcgccggatcgcggcggaggagctggcggagctggtcgcagtcgacgcgaagatcaagaaggccacggccgagctcaaagccatcgtcctggctcgcatcacacgcctgatggacctgcgcggggtcgggccagtggtcgccgcgcgcacgttggccgacgtcggtgacgtgacccggttcgccgaccggaaccggttcgcgtcctggaccggcaccgcgcccctggacgcgtcctccggggagcagaaccggcaccgcctctcccgagcagggaccggcggatgaaccacatgatccacatcgctgcgatcagccagatccgtctcgacaccgacggcagggcctactaccgacgcaagcgcgccgagggcaagaagcccctcgaggcgctcaggtgcctcaagcgcaggatctctgatgccctctatcgccagctgctcgccgaccaccaacgcgctaccggcggggagcgtggaacgggtccgggagggcactgcggggcgtcacttcaatccagcgcggtcgacccacccccgcatatcgacactttggatcagccacttcccggacccgcgaaaccgacgctacgcccagcaccgacgtcacggaagaccacccgaggcgacaccctcctgagcaccccttgacaacagaagggagc

SEQ ID NO: 3269 - DNA, 1360 bp, unidentified
  source 1..1360: mol_type = unassigned DNA; note = element_4c473ef
  misc_feature 1..2: note = core
  misc_feature 3..87: note = LE
  misc_feature 88..1113: note = CDS
  misc_feature 1114..1360: note = RE
  misc_feature 1101..1346: note = bridgeRNA
tgatggggtggacggcccctgctcagcggcatcgaagtgccttaccgtggtcgtcggaaagatcgccacaaccgagggagccgtccgatggaagtttgcattgtcggtcttgaccttgccaagagcgtgtttcaggtccacggcaccgatgccgaagggcgcgttgtgatccgccgacagttgcgtcgcggcgaggtcgggaagtttttcagcgaattgccgccgtgcattgtgggaatggaagcgtgtgcgacctctcatcactgggcgcgagtggtggccggtttcggccatgaggtgcgtttgttgccgccggcgcaggtaaagccttatgtcaaacgcggcaagaagaacgacgcggcggatgcggctgccatcgccgaggcggtgacgcgcccgcacatgcggttggttccgatcaagaccatcgaccagcagtcgatgctgatgctgcaccggtcgcgcgaattgctggtcaggcagcgaaccatgctcatcaatgcgctacgcgcccatctggccgaattcgggctgatcgccgggcctgagcgcaacaagatcaccgccctggtcgcactgatcgacgacgacgaggtgggcctgtcaacggctgcgcgcatggcccttggcgcgcttgccgaacagatccatggcaccgatcagagaatcgaggcgctggaaaagcagattctggccgaccaccgagcctgcgaggccagccggaaccttgccaccattcccggcatcggcccgattaccgcctcggccatcgccgccagcgtccccgacccgtcggtgtttcagtcggggcgccacttcgccgcgtggctggggcttgtgccgcgccagaactccagcggcggcaaggaccggctggggcgcatcaccaagatgggcgacgcctacattcgccgcccgctggtcatcggcgccacagggcaggtgcggcatgtcggcaaacgaaagccgacggattggctcgcagggctgttgctgcgcaagccggtccgcgtcgcctcggtggccttggccaacaagatggcacgcatggcatgggccattctcagccggggagaagtgtatcgggaaacctggcctctccagaccgcataggacaagggacatctgaattgcgagggtgaacagtgacgtgatggcgatccggtcgagccggggaactggaagacccgcatgaaccaatgcgcatcaggcgcgcttttttgatcgggaccagttccgcggacttcatcagggccagcggcgaaagccgcacaaacgggccggacacatgactgcacccgaccatggaagcgtcggtcacgtcgagtttcccccttgcaacgcaggggccgtccacaca

SEQ ID NO: 3270 - DNA, 1368 bp, unidentified
  source 1..1368: mol_type = unassigned DNA; note = element_4c47d85
  misc_feature 1..2: note = core
  misc_feature 3..72: note = LE
  misc_feature 73..1098: note = CDS
  misc_feature 1099..1368: note = RE
  misc_feature 1132..1364: note = bridgeRNA
ttaatgagatggtcaccctccaccccacgagcggttacgctatggggtggtttcatttcagcggaggccatcatggaagacgttacccttattggcatcgatttcggcaagcacacctcccacctgcacgcgcaggatcgcgccggtcatgcggtctggcgaaagaagtgcaaccggtcgcaattgatgatcctgctggccaatacaccgccctgtaccgttgtcacggaagcctgtgccggcgcgcaccagatggcgcgtgatctcattcgattcaatcacactgtcaagctgatctcgccacagttcgtgcgacccttcgtcaagaccaacaagaacgacttcatcgacgccgaagcaatttgcgaagccgcttcacggccttcgatgcggtttgtgacgcccaagaccgaagcccagcaatgcctgggcgcctggcaccgggtgcgcgaatcgttggtctgcgaccgggtacaagtcacgaaccagatccatgcgtttctgatggaattcggtatcagcctgcccaagggagcagccgtcatcaagcgcctgccttccgtgctggcagaacagcgcctgccagcacggctagtcatcttgctcgagcgcttgcgtgatcagtaccgggcgctggacgcgcagattgccgagatcgaacgagacctggcggcgcaattacgcgaggacgagtcggggcgccgtttgctaagtgttccgggcatcggcccggtgacagccagcttgctggcggcggagatgggcgatggcaagcagtatggctgtgcgcgcgactttgccgcttcgctgggattggtgccacgccagtacagcactggcgagcgagcgcatctgatgggcataagcaagcgcggcgacaagaacctgagacgcttgctggtccaatgcgctcgcgtgtacatgcagaatgtggctcggcagaccggccggctggctgattgggtccgagacctgttgcagcgacggcattcgaatgtggtggcgtgcgccgtggccaataagttcgcccggatcgtgtgggctatgacggccaggcgcgtcgatttcgagcgcatcggggaggccctgccagcctgagcccccaaggcgctgaccgctttactgcagtaccgaaccacccacctggttttgcgaccgctgacattggatgacgtgaacggcacaccggcctgacggacaacctggcaatgcaattggccatcaaggccgagggctttttaaggaccgacaggcgcgactctcatcgtggcgcagggggcttgcccccgccaagacgccggatagatttacgcaagccaccccacgccaatcaacaaagcgcttgcaaaaaggagggtgaccatagat

SEQ ID NO: 3271 - DNA, 1152 bp, unidentified
  source 1..1152: mol_type = unassigned DNA; note = element_4c4d20d
  misc_feature 1..2: note = core
  misc_feature 3..192: note = LE
  misc_feature 193..1137: note = CDS
  misc_feature 1138..1152: note = RE
  misc_feature 25..191: note = bridgeRNA
cttgtatctctcggcatacggcatactactgccgcgcatgaaacattggggcctgacagaccgtcggttccatggtcgttcccagaccgagtgtcagcgtgggtcgtcaggcctcttcacctgtaaagcccgaacagttgcgagggccttggagcccgtatttcgcaaggctgggcacgacaggaggttgccatgagtcctctcgtcttcgtcggcatcgatgtctcgctgacgcgcttggatattgcccttcgtcccggtacgtcgtcttcgcatacgcatgatgagtcggccgtcgccacagtggtcgaacaactccgtgccctcagtcccaccctgattgtgttggaagcgacgggcgggatggaaatcccgctcacgagtgcgctggccaccgccggcttgccggtggtggtcgtcaatccccgtcaggtacgtgactttgccaaagccagtgggcagttggcgaagaccgatgcccttgatgcccaggtgctggcgcagtttgctgaggtgatgcgcccgcagccgcgcccacttccggatgcagacacgcgagccttggccgcggtattgacgcgccgccgacagctggtcgagatgctgacggccgagaagaatcgtcttctgagtgcctcgtcgccgattcggaagagggtgcgggtccatatcgcctggctcgaacgggagctggagcataccaacacggagctgtcggaggcgattcgtcaaagccccgtgtggcgtgaaaaagatgatctgctgcagagtgtgccgggagtaggcccggtcttgacctcgacgctcttggcgagtctcccggaactcggtacgttgacgaataagcagatcgcagccctcgttggcgtggcaccactgaatcgcgatagcgggacgctccgagggagacggacggtggggggtggacgcgcgcaggtccgcgccgttctctatatgggcgcgatcgtggccgcccggttcaatccggtgatccgtgtcttctatcagcggttgcagcaagcgggaaaggcgaagaaggtggtactcaccgcctgcatgcgcaagttgctgacgattctcaatgcgatgctgaaacatcgaacaccctggcgagaggtggaagcacaccatgcttaaatctcaagacagttg

SEQ ID NO: 3272 - DNA, 1421 bp, unidentified
  source 1..1421: mol_type = unassigned DNA; note = element_4c5cf39
  misc_feature 1..3: note = core
  misc_feature 4..136: note = LE
  misc_feature 137..1156: note = CDS
  misc_feature 1157..1421: note = RE
  misc_feature 1180..1419: note = bridgeRNA
agatgttatgaacgcctccctcccccctggggagtgagggtgccagaaaagcagagagccctcgctttacctaacggcatctaagtgccaaagtggagtttctgaaattaaccacaaacggtaatgagggctcgaaatgaagattacgacaatcggactagatattgcaaagaaattttttcaattgcattgggtagatatgacaacaggtgaggttcatcgcaagcagctcaagcgcgaacagatggcagagttttttgccaactgcgagcgcagcgtgatcgcgatggaggcctgtgggagtgcgcactactgggcgcgcaagctctcagggctggggcacgaggtcagattggttgctgcgcaatttgtgcggccgtttgttaagtccaataagaccgatgctgccgatgcacgggcgatctgggaagcctcacagcgtcctgagatgaagtttgtggcagtcaagaccgagggtcaacaaagcgtattgacgctgcatcgcttgcgagagcagttggttaagtttcgtaccatgcaaaccaatcagctgcgtggtctgctctatgagtttggtgtggtgttgccagttggacgcgctaaaggtatgcctgccgcgttagacgcgctcggcgagcttgaggaaacgttacccgccatgacggttgatgcgctgcgtcaacaaatggtgcgtatccaaaagctgagcgacgatatcgcggatatagagaagaaactcacgctttggaaaaaagaagagcgttcggcagtaaaaatcatggaaatacctggtgtggggatactcaccgccactgcagctgttgccacgatgggtgattcgggtgcgtttaagaacggacgagagtttgctgcctttctgggtttagtacccaaacaaagtggtacgggcgggcgggttcgtctgcaagggatcagcaaacggggtaacgtttatctaagaaccttactgattcacggggcacgggcgaggattaacttacagaaacagcgagacccctggatagaacagttgctggcgcgacgaccatttaatacggttgtagtagcgctagctaacaagatggcacgaacgatttgggccttgatggcgcataatcgggaataccaaaagaactacgtgacaagtatcgcgtagctgattaacaacaaataggagttgaacagctaataggttgcgcaggtagatatgagatagatggcggaacaggtcggaccgcgagaaagtaaacctgtatgtttgtctggtcctttaaaggacgttaaggagacgagggctttctcggcgaattccatcagggtcagcaggcttcgcgtctgcacaaacagaccggatataagactgcaaccacctttactgttgatatcaaatatttcttgccaaaccgggaggcgttcatata

SEQ ID NO: 3273 - DNA, 1191 bp, unidentified
  source 1..1191: mol_type = unassigned DNA; note = element_4c60817
  misc_feature 1..4: note = core
  misc_feature 5..209: note = LE
  misc_feature 210..1178: note = CDS
  misc_feature 1179..1191: note = RE
  misc_feature 23..187: note = bridgeRNA
atccattaggtttgttttatatttaaagatatcgcaagtcagaggtgaaccatctgctatccaggtgttaggacctaattagggattcggtcctctgactttactatgctccgggcttaaatagaaattcaggcatgcaggcctattatcatggatacaagctgtaagcataactgcgatactttctaaacaactcaaaattaaacattatggaacagttttcattttttacaggtattgatgtgtcgaagctatggttggacattgcagttttcaaaccggattacggaattgtttatcaaaccaggatcgataacgatgtaaagaccattaggagttttctaagaaacttaaaaaagcagtttaaggccgaaatagccgggcacatgttctgcatggaacataccggcaagtacggacatgcttttcttaacgcctcgattcttgaacaagctaaggtttgggtagaactgccgatccagatcaaaagaagccaggggcttgtaagagggaaaacagatcagtgggatgcggtacggatcgcgcaatatgcataccggtttgccgataaagctgtcttttggaagcctgcagataaaactgttcaggacctgaaagaacttcaggtaaaaagaagccggttggtaaaggcgtattcgcaattgagccaggaaaacaaaaacgatcctcttttcaaaaagcccctactggccttaaagcaaggcatcgaagctattgaattgaagatggaacacttgatagagcaaaatgaatcggccagccaccaatatgaattgctgaaaacagtgccgggtatcggtaagcaaacggcaatggccctgatcattgttaccaacggatttacaaggctgacagaaaccaggaagctaagctgttatagtggcgtggctccattcccatacagctcgggaagttctgtaaaaggcagaaccaaagtctctaaaatgggtgataaaaagttaaaggtattactcaatctttcagcctggaatgctatcaggtctattacagcgttcaaagattatttcaaccggaaagtgagcgaaggaaagcataaaatgtctgtgattaatgctgttagaaacaaattgatcgccttgatcttagcagtgatcaaaagaaacagtccttttgaaaaaaattactctttctcttgattttgccatagaa

SEQ ID NO: 3274 - DNA, 1452 bp, unidentified
  source 1..1452: mol_type = unassigned DNA; note = element_4c64904
  misc_feature 1..2: note = core
  misc_feature 3..172: note = LE
  misc_feature 173..1201: note = CDS
  misc_feature 1202..1452: note = RE
  misc_feature 1217..1447: note = bridgeRNA
agatggggtaacgggccccggtccgccttccaggcaagccgcgcttgctagggcgctattgggtggcgcgcttcgcgcggcttgactggaaggcgggcggtcgtccctcacattgatggtgttacggagtcagagggataagcctcgctccaagcatcaaggagagacgaccatggagcattatgcaggaatcgacgtgtcattggaatgctcgagcgtgtgcgttgtcgacgccaatggcaaaatcgtgcgcgaggccaaggtggcgagcgagccgcaagccctgatcgcctgggtcggttcgctgggcttcggcctggagcggatcgggctggaggccgggcccttgtcgcaatggctgtttgcggggatgaagggggccagccttgccgtggaactgctggagacgcggcacgtacggaaggcattcgaggccatgccggtcaagtcggatcgcaacgatgcacgcggcatcgcgcaactgatgcggctgggctggttccggcccgtgcattgcaaatcgatgagtgcgcaagagacccgatcgctgctgacggcgcgcaagctggtgcaatcaaagcttcacgacgtggagaacagtttacgcgggatcctgcgcggttttggcctgaaggttggcaagacgaccggacagaagttcgcgggacggatcgaggaactcgtggcgggccacccgcacctgcaaacgatcgccaaggcgctgctggcggtgcgagcggtgctgcgggccgagttcgcagccttcgagaagcagacccgcaggatggtgcgatccgacatgcaggcacggctgctgacgtcagtcccggcggtcggcccaatcgtggcgctaacctatgccagcgcgatcgacgatccagcccggttcaaatcgtcgaagcaggcaggagcccatttcgggttgacgccgaagaaacatcaatccggcgagaccaactacaccggtcggatcagcaagatcggtgatgcttcggtgcgcacggcgctttacgaggccgccaacgtcatgctgaccaagccagtcaaaggctgttcgcaactgaagagctgggccatgcgaatcaaacgccgtgccggcacgaacaaagccaaggtggcgctggcgcgccggctcgcggtgatcatgcatcgaatgctcgccgacggagcaccctttaacgccgctgctgcggcaacctgacagggagacacaacagttttcgggcgggtcacgacaccaggccttctcgaagcgaagtcccttcgccgggacgatggatcaggtcaggccgttgcccaccaggtcgccctcgtgagcacgcacaacgtagattggtcgacctatcctcttccaaccccatcaggtggcggccatgcgccgaccccgtacagaagcgagaccccggcgggcggactacgcaaagggattgactaatcgaggcccgttacaga

SEQ ID NO: 3275 - DNA, 1473 bp, unidentified
  source 1..1473: mol_type = unassigned DNA; note = element_4c6a85c
  misc_feature 1: note = core
  misc_feature 2..111: note = LE
  misc_feature 112..1212: note = CDS
  misc_feature 1213..1473: note = RE
  misc_feature 1200..1412: note = bridgeRNA
gaatgaaagggacttccccgtcccgtggcagcggtggaagccgcaaattggcatcaacgtgccatgatgaagtttcgaacgtccaacgaacactaacataaggggaagtccatgcccgttgtcaccgtcggaatcgatcttgccaagagcgtctttgcggttcacggagtggatgaaggcggcaaggcagtattgatcaaaccgcgcgtctcgcgcgatcaactgctcgcgttgatcgcccagttgccgccctgtctcatcggcatggaagcatgctcgggtgcacatcactgggcgcggatgttccagcagtacggccacacggcgaagctgatggcgccaaaactcgtggcgccgtaccggatgtcgggcaagcgtggcaagaacgacgcagctgatgctgcggcaatctgtgaggcagtgacgcgccccagcatgcgtttcgtgccgctgaaggacgaacaccagcaggctacactctgcctgcatcggacacgtcagggtttcgtcgaggaacggaccgcgacctacaaccgtgcacgtggcctgctctccgaattcggcgtggtgctaccgcagagcccggagcgcctgcgaagggaaatcccagctcatctggatgccttgcccggctgggccagacgatgcatcagtgatctgctcgagcacgccggcgaaatcgaagcccggctcgctgaatacgaccgcgcaatcagcgaaatcgcgagagacgacgagcgcagccgacggctcatgcatctgcgtggcattggtccgaccaccgcaagcgcattgcttgcgagcctcggcgctggacacgacttcagaaacggccgacaggtggccgcgtggataggcctcacgccaagccagtacagcagtgggggtaaggaccggctaggggccatcacgaagacgggggatgcgtacctacgctgcgtacctacgcaatctgctgatactcggagctcgctcggtgatggcgagtctgggcgacaagcaggaccgtttcagccgctgggtgagaagtctcgtcgagcgtcgcggctactggcgaacagccgtcgcaattgccgcaaagaacgcgcgcacggcctgggcgatgctcaaatacggcgaagccttcaaacacgaaccggcggctgcatgacacgaccgctatgtccaaacgacgaggaagctaaccgaatcgcagcaaccatgagcggatagacgatcactttgcactgccagcggtgatgtgaagcgggttggacccgcgcaaggcatacctgtcagagaaacggggattcctatcccgcccaacgaatgaggtccttgcgcgcgtctttcatcagggtccgggccagcggcccaatatgaccgtttgtagtacagcagtccttcaccttctcacgcgcgccgacgtggcattgcagcatgtatcaacagcgaacttcgattgagcttgtgctcaacggggaagcccttgta

SEQ ID NO: 3276 - DNA, 1582 bp, unidentified
  source 1..1582: mol_type = unassigned DNA; note = element_4c6b100
  misc_feature 1..2: note = core
  misc_feature 3..280: note = LE
  misc_feature 281..1468: note = CDS
  misc_feature 1469..1582: note = RE
  misc_feature 13..257: note = bridgeRNA
ctcgtatgattaagttaggtttttaggaaagggatttacctataaacccaagggtattttaactattgtaagatatccttaatttgtagatagagtgttgccgttcacccccttgaatcttgtattcgtcgcaaagaatggcacctctttctaataagcagtttacgaatgagttggatgttgatgaccattggtcattcttcgtatctcttacgaggtagtagcgcttattagaaaagaggaaagctatctcatattcactgaacaaggagtgatttacatgttttacgtaggtatagacattggaaagtatacacattacgcttccatcattgatcacactggagcacctcttaccaaacctttttcttttaaaaaccatacaaatggtggacaaacacttttagcttggatatctcaatatattgattccccttcaaatgtacaaatcgggatggaggctacaggccattattggttagcgacgtactcttttttgctcgatcagggtttttctgttattgttttaaatcctctgcaaaccaatgcttggcgaaaaggtacagagattcgaaaacgaaaaacagatgcgatagatgctactttaattgccgatgtcattcgttttggaaggtttaaagaaacaccattaatagacgagaaaatgtttaccttgaagcaacttagccgttttagacattctcttatcactaatatgggtgatttaaaacgtaaagctatcgtagtcttggatcaaacatttccagaatatcaaggtgtattttctgatgtctttggaaaaacctcctcacaaatcttaatggattatgcatccccaagcgattatgagggcgtttcagtggatgacttaaccaaaattattgagactacgagtcgcaaacgactcggtgaaaaaaaagctaaagaactcattacattagcctctcaatcatttggtgtcacattctgtaaagatgcttttgcattccaattaaaaatgttgatggaacaaattcgttttttggaagagcaagtagaacaatgcgaacagcaaatgaatcaatttttaattgaattagatacaccaattacgacgattcctggtataggaccaattttaggcgctactattttaagtgaaatcggcgatattcatcgatttgataaaccagctaaactagttgcttacgcaggtattgatgcgtctgtttcccagtctggtcaatatgaagcctcacgcacaactatgtcaaaacgtggttcttcccaccttagacgagctttatttcaagccgctatttcaggatatcgaagcgatccagtgttaaaagcattctatgaaaaaaagagagcacaaggcaaacattattacgtctgcataggcgcagtagctaaaaaattatgttatattatctacaccattctaaaaaataataaaccatatcaagtacctcatcattcagaataaagactgattcattattttttccgccttttttaaaggcttatttaagctgaaattttttttggaattatacgcataattttattttcttatatcccttgacttttcatagttggt

SEQ ID NO: 3277 - DNA, 1555 bp, unidentified
  source 1..1555: mol_type = unassigned DNA; note = element_4c6f89f
  misc_feature 1: note = core
  misc_feature 2..273: note = LE
  misc_feature 274..1446: note = CDS
  misc_feature 1447..1555: note = RE
tgtatgataaatatataaaaatatttatctatacaacctcctttcaattattttttatttaaatttgttatataattttattaatgaaactgtggactttttataaccctttattgaacttttaagttactttttaaaggagactattgccactgttttttctcaaatacttatagttggttagaatttttattcttcatgtttgcaagaatgtattgattaaaactttgtggatacacagtttctatactattaactaaaggatgtggttttatgctattgttaggtgttgatatcgctaaattaaatcatgttgcttcttttattgattcctcttctggcgaacttattttttcaaattttaaatttcaaaataatatacttggtttttcaagtttatttgaaaaaatttctaaattctcagtttctgaaattattattggcttagaatcaactggccattatggagaaaattttattaattttttcttccagaaaggatttaaaattgctgttatcaatcctttacaaacttcacatctgcgcaaagcaaatatcagagattctaaaaatgacagattagattctattaatattgctaaagctttattatttggaaaacatacatatgtttctcaaaaaaatcttactaatttttcgctaaaaaaacttactcgttttagaaaaagtttaattaaacaaaaaaccaaaactaaaattcaacttgtttcattacttgatattattttccctgaattgcagtatttttttaaatcaggagtgcattcaaatgcagtttatactcttttaaaaaagtatccttctacagaaaaaatagctgctttaagagaaaaatctttattctctattttgaacaaagcttcaaaaggtcattacaaagaacaacatgcttcgcaattgaaaagtctagctaaatcttctgtaggtattaaggatacttctatctctatgcatataccccaattaatacaattaattgagatgttagatagccaaattaaagctattgaaaaagaaattgattcttttattgatgaagaatctcctattctaactattcctggaatcaatactgtcgctgctgcttctattcttggagaaattaatgatatcgagaattttgattcctcttcaaagttactcgctttttctggattagatccaaagataaggcaatctggaaacttcaatgcttcatcatgccgaatgtctaaaaaaggttcttcatatttacgctatgctctaatttttactgcctggaatcttgttaggaacagcgcaacctttaataggtattatttgagtaaacgagctcaagggaaatcacattatagcgcattagggcatacagcccacaaattagtaagagtaatttatacactactcaagaaaaacatttcatatcaagaggattttatttcttaaaatttttattaatttgtagtatttttaagagctctatgaactctaattttgtagtgcagaaaaatcaaaattaatttttttttaaattatcttgacttttcatagttgg

SEQ ID NO: 3278 - DNA, 1580 bp, unidentified
  source 1..1580: mol_type = unassigned DNA; note = element_4c72261
  misc_feature 1..2: note = core
  misc_feature 3..248: note = LE
  misc_feature 249..1451: note = CDS
  misc_feature 1452..1580: note = RE
  misc_feature 7..225: note = bridgeRNA
ttcgtattatagagttaaccagtttttactggttgctcttttttttataggacctattatttcagtagccagggtagaacgtacgggtgcgtgggagtcagatctcgtaacataaactgttcgccccctacttgtagaatgatgtttgaggctggttgggacatatgatctcgtataacaagcgaagctatggaactacaggaaggtataggggttactggtgagtacatcaaagggagagataattattgaatccagtagttggcctagatgtggccaaaggggaaagtgaagctcaggcatttctagataaggacaagccatatggaaagagcttcaggatacaacatatcaaggaggatttagatactttcatctcttttttgaaagagatagaaagaaagactggcgtaagaccagcagtaattcttgaatctacagggcattaccatacaccaattattcaatgtctggaggagagtcaatatctatatatcttggtaaaccccatcatttctcatcaggccaagaaaaccagtcttagaaaggtaaagacggatgccgttgatgcatatcaactttgtgttttgtattacaaggaagaatttgagccttataagaaacgaggactaaggctactaaatctaagaacactatcaaggcaatacgaagcagttacgaacctttacattcaggcaaaacttcaattccacacaattcttgaccaggtatttccggaatataggggagtctttggagatttattttcaaaagtctctcttcaggttttaaaggagtttcctacatctgaagatgttctgaggactggtgaagcaaagatactggagcgaattgtgggaatgcgtataaaacggtctgagggttgggccagggagagggcagctaaattaatagcttcggctgagcgaaatcctttccaacaaggtgtgtatcaaagtcagttgttcagtttggatatgtatatctctatgcttcttcagtaccaaaaacacctatccagtatagaggcagagatagatgtcttggcagaagaaattgaagaatgcaagataatccaatcaattcccggaataggaggaaaaatcgcggcaacgatcatttccgaaatcggagaaattgaccggtttaatcaccctaaaaaacttgtggcttacgcgggagtagatccaagtgtccattcatcaggtaagttcacagctactataaatcatattactaaacgaggttcaagccgattacggcacgctttgtatatggccgttttatgcggtataagaagctccaggaacaagaagctaaaagagtattatgatcggaaacgaaatgaaggaaagccttcaagagtagcaatgatagcctgtgtaaacaagcttttacactggatttatgcaatcctaaaaaggaatgagcagttcctagatatggcttaatcaacaagaaaaaacagctaatgaaaaaccttccaaacggtatttggagggttatttggcgtgccttcaaaagtataacacggaagaacaaatattttaataagaagttcttgactcctattagctggt

SEQ ID NO: 3279 - DNA, 1372 bp, unidentified
  source 1..1372: mol_type = unassigned DNA; note = element_4c7cc5c
  misc_feature 1..2: note = core
  misc_feature 3..81: note = LE
  misc_feature 82..1110: note = CDS
  misc_feature 1111..1372: note = RE
  misc_feature 1084..1359: note = bridgeRNA
cgatggggtggacgccccaccaacggcatcaatgtgccaaggtcgcggttgtcgaagactgcgacgataggagaggcgtccatgcaaaaggttaccatcatcgggctcgatctggcgaagaacatttttcaggcgcatggggcgcgccgagatggttcggtggcgttccgcaagaaaatatcgcgcgccaagctgttgtcctttttcgcctcgatcccgaagtgtgttgttgcaatggaagcctgcgcgagcgcgcatcattggggtcggcacatcggcgcactcggacatgaagttcgtttaatcgcgccgatatatgtgaagccgtttgtgaagcggaacaagaacgacgcggctgacgcggaagcaattgccgaagcagcctctcgaccgacgatgaggttcgtggcagtcaagagcgtcgaaaagcaagcggccgggatggcgttcaagacgcgcgatctcctggttcggcagcgcactcagacgatcaacgccattcgggggcacatggcggaatatggcgtcgtagcgcctaatgggcccgtgcacatcaaacgtcttgttgaagcgcttcaggatccggatagcggcctgccggaatcgatccacggcgtttgtgagttgctcttgcgacatatcgctttgctttccgagaaaatcgggcttctcgaacgagagattcgcgaacggacgcgacgcgacgaactggctaaacggctcatggagattccaggcgttggagagatttgcgcggtcgcaatggaggcgttggcgccgccgccagagagtttttcgaaagggcgggattttgccgcttggctcggtctcacaccgaggcagaactcttcaggtggcaaaacccgcctcggtggaacatcgaaaatgggtcagcgcgatcttcgtcggcttctcgtttgcggcgcaatgaccgttgtccgctgggcggcccgcaaaggggcgccagaggggtcatggctcgaacagatgatgaagagaaagccgcgccttgttgtcgccgtggcgttggcgaaccgcacggcgcggatcgcctgggccctgatgatgacgggagagcgctatcgagcttcgaaagcgataagtgcatgatgcgccgatcgcgatcgaggacgttgggagtgtgaggaggtcgatcagagggtaagggcaaaggtcaataagacgggatcggaaaaaccagagtgtttcggagcgccacgagcgcgccacgccgatttggatccgatctgcgtacttcccatacgggcccgcggcgggtgaacggccgcattatgaggccggacacacgaaagcgcctgaccacatgctctcgcctaaagaaagtccttgcattcgacggggcgtccacaca

SEQ ID NO: 3280 - DNA, 1473 bp, unidentified
  source 1..1473: mol_type = unassigned DNA; note = element_4c800a3
  misc_feature 1..3: note = core
  misc_feature 4..259: note = LE
  misc_feature 260..1456: note = CDS
  misc_feature 1457..1473: note = RE
  misc_feature 11..249: note = bridgeRNA
cccgttatctttttgatagtccctaaaaagaggatcatggggactgttggccgaccagcctcggcatggtgtcttgcccctgtctaaccaatgatccggggggttgttgtcaccgaggctgggacggcagcggggtgattgctgattaggggcgcggcgccagccattcgggacgcctgtcataacgtggatgtaagactttgctgccaatgggttggccgacttttgaatagctacgagttcaaaggcggtactaaacatgatcaccagcgacatcgacatcttcctcggcctggacgttggaaaaactgaccactgggcctgcgccgtcaccagggacgggacgaaagtctgtaacaggaccctgcccaatgacgaagccaggctcaccgaagtatacgaggagctgcacaccaaaggaacggtccttgtcgtcgtggaccagcccgctaccatcggcgcattagcgatcgcggtcgctcaacaccttggaatcccggtggcctacctgccagggttgtcgatgagacggatcgcggacatgtacccgggtacggccaaaactgatgagaaggatgcgttcatcatctcggacgcggcgcgcaccatgccccacaccttacgaagcatcgaggttgctgacgaggacgaagccacgctcggaatgctcaccggttttgatctggacttggcgcgccagatcacccagaccagtaaccggatccgagggctctttacccagattcacccaccactagaacgagttctgggtccgtggctggagcacgacgccgtcctcgaggtcctcacgacctggcccacaccagccctgctcaaacacgcaggcaaagccagaatcgatgcgaagctcaagaagcacggagcccgccggcacaccgcacgggccggcaccatcatcgacgcattgggggcacaaacagtcaccgtgattggcactgacgccgccggactggtcatcccacacctggccaaacaactcatctcgctgcatgcccaacgcgttgatgtggccgcccatctagagaaaatggtggaggcccaccctctttacccggtcctgacatccatgcccggggtcgccgtcaggaccgcagcgatcatcatcgccgagatctccggcaaaacctttaccagcgccgcagcgttagcctcatacgcaggactagcgccgaccacccgccagtcaggcacctcgatcaagtccgaacgtgtcagtcattcagggaacaaacgcctgaaacgagcactcttcctctcggcgttcgcatcgatcagattcgaccccaccagccgcgcctactacgaccggaaacgagcccaaggcaaacgccacaaccaagccttgatcgcactagcccaccgccgactcaccgtcatattcgccatgctccgagacgggacactttacgacatcccggaactcaaagttgcttgacagaagacataggggca

SEQ ID NO: 3281 - DNA, 1172 bp, unidentified
  source 1..1172: mol_type = unassigned DNA; note = element_4c841c4
  misc_feature 1..2: note = core
  misc_feature 3..210: note = LE
  misc_feature 211..1146: note = CDS
  misc_feature 1147..1172: note = RE
  misc_feature 47..212: note = bridgeRNA
cttgtatgtttacttcagtctttcaaaatccgttttggttcggtaatagatctttcatggtttgagcccggcgtggcagaccgctctcgtctggggcctcgagcccgttggatagcctgggtcgccacgccgtacctccccaaacccgaacagttgtcagagaccgcttgaatctcgcatcaccgcaagaaagggtaaaaggagcatcccatgaaagaaccagagcgcttcgttggcatcgatatctccaaagaagagctggtggtcgctgtgcgtcccaccgcagagcttcagagcttccccaacaccgaagagggactggcagccctggtgggcttcctccagccactgggtgcccattccatcgtcctggaggccaccggcggctttgtccgggccgcggtcaacgccctggccctggcggccctgcccgttgtggtcgtcaacccccggcagatccgcgactttgcccgctccgtggggctgctggccaaaaccgacgccatcgacgcccggatcatcgcgcgcttcgccgaggccgtccgccccgagctgcgccccctcaaggacctggagacccagaagctcgaggacctcaacaaccgccgacggcagatcgtcgagatgatcagcgccgagaaaaatcgcctcgggatggccccgccgtggtcccagaaggacatccggagccacatcgcctggctcgagaaacgtctcaaacggatcaacgacgatatcgacgacctcatcaagaacagccccatctggcgccagaaggaaaagatcctcacgagcgtcctgggcgtcggccccgtggtgaccaccacgttgctgtgcggcctgcccgagttgggcagcctcagcgcccgcaagctctctgccctcgtcggggtggctcccttcaaccgcgacagcgggcaatcccgcgggcggcgttcctgctggggaggccgggctcacgtccgggcggccctctacatggcggcgctcaccgccagtcgctgcaaccccatgatccgggagttttacctgcggctgcgcctggccggaaagccggccaaggtggccctcgtggcctgcatgcgaaagctcctggtcatcctcaatgccatggtaaagaacaacacctgctggcagcaggcctaaaatctagttgaaaaggaacacagttg

SEQ ID NO: 3282 - DNA, 1472 bp, unidentified
  source 1..1472: mol_type = unassigned DNA; note = element_4c884a9
  misc_feature 1..4: note = core
  misc_feature 5..247: note = LE
  misc_feature 248..1462: note = CDS
  misc_feature 1463..1472: note = RE
ctcactggtccaccatccccgtgtcggtggccgtcaggctgtcgatgcacccctggtgtccaccgggccatcgccacgttcgcttgcggctcgaccgccacgatgagtcccgcgaggtccggtggcccaggacgtgccgactggcaatagggctgagcgccccagagcgccgatcagtgagcgaccggcagacacgtcctgagaccaccgggtgcttccccactgcagcaacagcgaggaggctgacatgcatgattccaccgccggctacgccggcatcgactgggccaccgacgcgcacgccgtctgcgtggtcgacgaccacggccgggtgatcgtcgagttcgaggtggcccataccgccgacgggcttggcgacctgtgccgtcgcatcgaacgagccggcgcccgcagggcggctatcgagcgccccgacggacctgtcgtcgacgcgctgctcgccgccggcctggaggtcgtggttgtggccagccggtcggtgaaggcgctccgggagcgctacgggacgtcgggaaacaagtcggaccgctccgacgcctacgtcctggccgacgcgctgcgcaccgacggccaccgctggcgatccctcgagcccgacagcccagccacggtcaccctgcgtacccacgttcgagcccgcaaggacctggtcgagactcgagtcgccgtcgccaaccagctccgcgcccacctgcgcatcgtgttccccggtgcggtcggggtgttccgcgacctcgacagcccgatctcgctgcgattcctcgagcggttcccgtccgccacccgcgccgcgtggctgtcggagaaacgcctcggcgcttggctgcgcgccaacggctactgcggacgcaagagcccagccgacctgcacgcccggctcgtcgctgcacccgccggcatcgacggcgacgaaggcgacgctcgcggcgccatcacgctcgcctacgtcaccgtcctcaaaaccctgagagctcagatcgacgaactgaacacccgtctcgacgagctcctcgacgcgcaccccgacgccgccatattccggtccctgccgcgctgcgccaccatccgagccgccacgctgctcgccgagatcggcgactgccgcgcaaggttccccgacgccgaagccctgtcgtgtctcgccggtgtcgctccctccacccgcgccagcgggcggcaccgtgccgtcaccttccgcttcagcagcgacaagaagctccgcgacgccctctgcgacttcgccggagacagctggcgcggcaacgtctgggccgaacagcgctaccgacagctgcgtgcgagcggcaaaacccacccccacgccgaacggatcctcgcccgcagctgggcgcacatcatctggcggtgctggacagaccgcatgccctacgacgaggccaagcacaccgcgctccaacgcctcatctgcgaggcggcttgacatagggcta

SEQ ID NO: 3283 - DNA, 1563 bp, unidentified
  source 1..1563: mol_type = unassigned DNA; note = element_4c8879b
  misc_feature 1..2: note = core
  misc_feature 3..242: note = LE
  misc_feature 243..1421: note = CDS
  misc_feature 1422..1563: note = RE
  misc_feature 3..221: note = bridgeRNA
ctcgtattataatgtgtagccaatctttacctcttcctggtaaaaggctatgctgttatggatgctgtggatcagtagtcgtttcctaccacaagatggtttcagaaagggtctgaccacagcctcctgctactttgttgatcagtcagataccgcatgacggtttatgtagaacgaggatacaaaagcagcgagtccctgtgggtcctgcagcatcaaataatcttatggaggtgatccctatgatcattgttgctgttgatgtcgccaaagatgagcacgactgctttatcacgaactcggatggcgaagttctttttgatcccttcgttatcaggaatgaccagaatggttttgatgacctgtttgagaagatccggctcgtggcagattctctgcagaacgtaaaagtaggactggaagcgaccggtcactaccatctcaacctgctcagttatctccttgataaaggccttcctacgtgtcttatcaatccgttacaaaccagtcttttcagaaaaagtctaagctttagaaagacgaaaacggatacaatagatgcccgagcgattgcaagattgctcatgagcgatcgggctttacagccctactcgctcacatcataccagaatgaggagctaaagtcactaactcgttatcgtgccgacaaagtccgcgaacgtgccaagcttaaatcctctctttccaggcttgtcgtgattctcttcccggagttggaaaaacttgttccgacgctgcatatggccactgtctatgacctgctccatgagttccccggtgcttcctctgttgcttccgcgcatctgacccgtctttcccatctcttttcagatgcctccaaaggccgttatggaaaagaggaggctgttcgtatcagagatgctgcccgtcattccattggtgccgtctttccttctaagtctttggaactgcgccacacgatcgatcacatccgctttctgaatgatgagatcgatgagattgaagcgcagatcttcgttttcttggaaaagaatcctccgaaaatgctggacatccccggcatgggaccacgcatggctgctgtcattgttgctgaaatcggtgacttcaagcggttttcctcaccggataaactcctggcctatgccggtctgtctccaacgacttaccagtccggacaactgacctccacttatgccaaaatggaaaaacgcggctctcgatatctccgatttgcgttgttcaacgctacgaagtatgtctgcgtctgggatccgacatttcgtgcctatctcgcgaaaaagcgatctgaaggaaagcactataacgttgcgatttctcatgcagcaaagaaactcgtccgtctgatctatcatctggagacgactggagaaacatacatttccaaagcctgctgataatatcctgatgccctgttcctggagcatcctttcggatgctctgtttgtcatacggttttcaaggtgctgatttatgaaaaactcgcttgcgagttttcatcgttaaatttcatttttgtcttgacttttaatagtcagt

SEQ ID NO: 3284 - DNA, 1529 bp, unidentified
  source 1..1529: mol_type = unassigned DNA; note = element_4c8f1cd
  misc_feature 1: note = core
  misc_feature 2..229: note = LE
  misc_feature 230..1465: note = CDS
  misc_feature 1466..1529: note = RE
  misc_feature 14..244: note = bridgeRNA
ctacttgttgtattgacgtacggccggtgcctggcaaggctcggtcgaggtggttggtggggtcgttctcatcgcggctgtccacgaccttggtcgtgtgactctcatctggcatgcgtcccgccttccgccgtggcgtggagaggctcgagaggggcctgttcgactcgaagtagccatgccctcctcgccggattgtcctgtcgggatgtgaggcgaggaggcagtggtggcacatgtggtgatcggaatggatccgcataagagttcggcgacgatcgagatcatcaacgagaaagagaagatcctgcacgccggccggtacagcaccgatgcggccggataccgatcgatgctggccgcggggcgtaaacaccgcgatcggatctgggcggtggaaggttgcaacgggatcggccgtcatatcgcgcagcggttggtcgccgacggtgaaccggtcgtcgatgtgccggcgaagctgtccgcgagggctcggctgttttctaccgggcagggacgcaaaactgatccggtcgatgcgcattcggtcgccttggtcgggctgcgcaccggcgggttgcgccccatccgcgaagacgatgcgacggtggcgttgcggttgctgatcgatcgccgcgacgagctcggggtggcccgcacccaggtggtcaaccggatccaccggctgctgctggagttgctgcccgggggcgcgaagacgcacctgacggcaacgcaagccaaggtactgctggcaaaagtgcggccccgcgacatcgccgggaagacccggcgccggctggccgccgaactcatcactgacctggccggcttggacgcgaagatcaagacggccgacaaggaactgcaccagttgatcgacaccaccggcagtagcctgcgcgagttgcacggcatcgggcccgcgaacgccgcccggctgctcggtgacgtgggtgacatcgcccggttcgccgacaagggacggttcgcgtcctggaacggcaccgcaccactagatgcgtcatccggtgagcagcaccggcaccggctgtcgcgggccgggaaccggcggatcaaccgggtgctgcacatcatggccgtcgtgcaactacgcaccgacaccgaaggccgccgctattacgaccggaaagtcgccgcggggaaatccagcatggaagcgatgcgctgcctgaaacggcgactgtccgacgtggtttaccggcagatgcgggacgacgcgactgcgttagcggcaggcccgggaggacattcgggggcggctcttgactccagcgcggtcgactacaaccccgacatcgacgcttcggagaagtcacttcccggacccgccaccagcaacgctaccccgacccgcggcagccgaccagaccgttctccggcccgttcccgacgcccgaaaacagcgccggcccgcagccgtcgtcaagcgcagtctgcttgacgacggcgagaaccggcgcaccatcaaaaggcgggaacaacacggtattgacatagaggggcgc

SEQ ID NO: 3285 - DNA, 1513 bp, unidentified
  source 1..1513: mol_type = unassigned DNA; note = element_4cb376a
  misc_feature 1..2: note = core
  misc_feature 3..96: note = LE
  misc_feature 97..1179: note = CDS
  misc_feature 1180..1513: note = RE
  misc_feature 1213..1419: note = bridgeRNA
atgaatacgaagggacttcccgcttcctggtaacggcatcaagtgccaagattggtttttggaagtcaatctacaacctttggaaggagaagtcccatgcaagagattacacgagttggcgttgatctggcaaaacgcgtcatccaggtcctggcggtcaatgctgcaggatcgcgggtcacaggacgcgcattggcgcgtgagaagtttctgccctggtgcgcacagttgcccgcaggctgcctggtcgccatggaggccagctccagcgcccaccactgggcgcgcaagctcatagccctgggtctggatgcgcgcatcatcgccgctcatttggtgagcccctatcggatgcaaggcaagagtggcaagaacgacgccaacgacgctgccgccatttgcgaggcagccagccgaccccagatgcacttcgtacctgtcaaaagcgtcgagcaacaaagcatgctgtgtatccaccgcctgcgcgaaggcttcaagaccgaacggattgcctgcatcaaccgcattcgcggtctcttggccgagttcggcctggtgttcccccaaaagcctgaagtgctgcgccaagccctgcccgatgtcaccgaggacgccaccaacgagttggggggattggcacgcctggcgctgcaacgcgcctgggcgcagtggcaagaactcgatgaacacatggactggtgcgatgagcgaatcgctgcgcacctcaaaaccaatgagcaggtgcgccaggctcagcaactcaagggtgtgggtccagtcaccgcctctgcggtagtagccaccgtgggcgacttccgccagttcaagaatggcgcgcagtttggcgcctggctgggtctgacgccaaggcaaaactccagcgggggcaagaacaatctgggcagaattaccaaacgcggggatatgtacctgcgcacgctcttgatccagggggccaagtcgatcgtgctgacggcgcaaaagcgcgacgacccgatctccaagtgggcactccagatcagagaaaagtcggggtggcagaaagcggtggtggctttggccaacaagaatgctcgcatcctgtgggcggtgtttgtacgaggcaaagcctttaatgctaaccacgtgagcgtgaagccgcctgcggcgatgcctcagatcggtgcagtaccggcttgagccagtcctaagagtcatgttgaagatttcctgccagacgtgagttcgaagatgcagtaaacaggtcagaccggcagcgggcaagctcgactccccctttgtggcaccgattgcggtgattaccacgtgcatgaatggagccccgctgagcggttcgtatctgggtccgcacggcaaccaatccgtgcaacaaggccgtctgtagatgtgcagtctgttccgagttttacagccacttcgaagagcgcgaatgcaggaataccgtttatcaaggaagaaagccaacaccaggaaaaccgaaacccgttgcttgacttggtgggaagtccctgta

SEQ ID NO: 3286 - DNA, 1439 bp, unidentified
  source 1..1439: mol_type = unassigned DNA; note = element_4cb6bdd
  misc_feature 1..2: note = core
  misc_feature 3..252: note = LE
  misc_feature 253..1254: note = CDS
  misc_feature 1255..1439: note = RE
  misc_feature 30..234: note = bridgeRNA
ctcatatctttgctttgaatacagatatatgaaatacttaactttgaaatattatttgataacaaaacaaagttgcataatcgttgtcgggctagatacattttaatgatattgacgtataggaagatcaactttgtttttattacatataagcctcaataagtacttaagcactagattaatatttagatgttgtataaaaaatgagcaaaggcatgtgcaatattttgttatcgtaaaaacaaaaaaattatgaatttgaagtattcagtaggattggacattgctagtaaaaaaattgacatttgtatgtcagtaattgatagtaatcagagagtaattgttgtttcaagcaagtcgtttttaaacactttaaatggatttaaagacatggacgaatgggttgtgaaaaaccataaagagaaagaagttccgttggttctatgtatggaagccactggagtttatcatgaaaattgtgctttgtatttttctgaaagaaaatataacacttccattattttgccaaataaagcaaagcattatttaatttcattgggattaaaatcaaaaaatgatagtattgatgccaaaggattatcaaaaatgggagccgaacaatgtttggaattatggcaaccaatgggtaagtttttctatgaactacgacaatacacaagacagtatcaaaatttacaagaacaaaaaacagtttttaataatcagcttcatgctctagaacatgcaatgtttaaaagtaaaaagatgataaaacaacaacaagacaccattaaactctttgataagcaactcaaagaacttgagaaattaataaagaatctgatatattcagatgaaataataaaacaaaaggtatctaatatttgtagaataaaaggaattggaatgcttacggcagcaacaattttagcagaaacaaatggctttgaattgtttaaaaattataagcaattagtctcttatgcaggttttgatgttgttgaacgagagtctggcaccagtaccggaaaaacaaaaatatcaaaaaaaggcaacagtcatattagaagagcattatttatgccagcctttgtagctgttaaacataatgaaaaaccagcaatagatttatacaatcgaaccattgaaaaacatgggatcaaaatgaaaagttatgttgctgtacaaaaaaaactattggtcctaatataccatatttggaaaaaaatgaggaatatgatccaaattatttagagaaaatcaatcaacagcaagaaaatataacatatcttataaatgacgagaaaaacaaaaaaaatagccccaatcaagtcgaggctataccagataaacaaatcattattgaaaatgaaacgctttctatagtttaacaaatatataaaaattaaaagaaaatcattaggattttaagatagtac

SEQ ID NO: 3287 - DNA, 1356 bp, unidentified
  source 1..1356: mol_type = unassigned DNA; note = element_4cbfd44
  misc_feature 1: note = core
  misc_feature 2..65: note = LE
  misc_feature 66..1115: note = CDS
  misc_feature 1116..1356: note = RE
  misc_feature 1130..1350: note = bridgeRNA
taatgggatggcccgccccgtcctcccgcctcaggatgaggcgctcagcaacggaggacgcaatcatgattcgcaacaagcctcggaatgccaaggtctatggcatcgacctcggcaagaatctcttccacgtcgtcggcacggacgagaatggtgccatcgttcaacgcgtgaagttccgccgcgagaccctactcgcgttcttcgagcgagcagcgccggccctggtcgggatggaagcctgcccgggatcgcagtggctcgctcggaagctgcaggcgattggccacagggtccggctcatcccggcccagttcgtcaagccctacgtgaagtcgaacaagaacgacaccatcgatgccgctgccattgctgaagccgcgacgcgcccaacgatgcggttcgttgaagtgaagcgtcccgagcaaagcgatctgcaggcactgcaccgcatccgggaccggatggtgaccagccgcacgcgattgatctgccagatgcgggctttctgtctcgagcatggcgtggcactgcgtcaaggagcaggtgtcttcaagatcgatatcttgggagtgctggcagatacagggaacgatcttaccccgacgattcgccggcttctgggcgacctgtttgaggatctgaagcggatggagctgcgcatcgctcaggtgacgcgtgagatcgaggctgaggcagctaagaacgagaccgctcggcggctgatgacggttccggggattggcccgctggcggcgacggcgctcttggctgccgccggcgacggtcaccagttcaggaaggcccgcgacatggcggcatggctcggcctggttccccaacagcattcgaccggcggcaagaccacgctgctcgggatcagcaagcgcggcaatcgatatgtacggcgcttattcgttcacggcgcccgatcttgcgtgacccacatggatcgcacgcgggaccacctcggcgcctggctgaacggattgcagacgcgaatgcatgtgaacaaggtgacggtcgcgctggccgcaaaaatggcgcgcatcgcatgggtgatcctgacacggtctggggcgatctacgagcgacgcgatcccgtgctcggctagccgcagcccggacgtaggactgcaaggttcgattgctgatgacgagacggttgatcggcgcaacgtaagccctggcaaaaaaacgtgcccctgcacgaagcatttaattgggaacgatgcgcgcggatctcatcatggcctggctgcaacagcagcccactcgcgagaggccggatacatttatgcagactgctctcgtcggaacaggagcgagccttgcacggacggggcggaccataca

SEQ ID NO: 3288 - DNA, 1625 bp, unidentified
  source 1..1625: mol_type = unassigned DNA; note = element_4cc2679
  misc_feature 1..3: note = core
  misc_feature 4..254: note = LE
  misc_feature 255..1493: note = CDS
  misc_feature 1494..1625: note = RE
  misc_feature 8..225: note = bridgeRNA
gttcgtaatataaggttagccagatatttctggttgacctttttctatatggtcttattataacggtagtcggggtagaacgcagcttccgtgggattcgatcccgtcagctaaactgttcaccccctacttgtataaacatgtttcaggctggttgggacaaaaagatcccgtttaacaagcgaacctatgatattacaagaagcgttaggggttaccgactaatttgtattttctaaggaggagatttatatatgaatccagtcgttggtctggatgtagctaaaggagaaagtcaagtacaggcatttttagataaggggaaaccttatcgtaagagctttagtgttgttcatgatcttgatggtttaggaacattattaatctttctacaagaagtagaaaaaatggctaaaggacaacaacctacggttattttagagtcaactggtcactatcattctcccgtaattcaatttttagaggagaaaaaatacgtctatatcattgtaaaccctctaatttcccatagagcgaaaagttcaagtttacgaaaagtaaaaactgatgcaatagatgcttatcacctttgtgagctcttttataaagaagaattagagccttataaaaaaaggggcatacaactcttaaaccttcgtaacctaacaagacaacaagagagtattacagaagtagctgctcagactaaggttcaattgcacactctgttggatcaaatatttccagagtatagaggtgtctttggtgatttatactctagagtttcgctattaactttatctgtatttcctacttccgagtccgtattaggtgttagcgaaagagagttaacagaaaagatagcttcattatgtaccagacggtctgataaatgggctggagaaaaggcagaaaagctaatagaagcagccaaacgcaatccgtttcaaaagaatatgtatgatagtcatgttttcaatctcaatgtattaatagatattgttcttcaatatcaagagcacctatctaagattgccactgaaatagatgctctcgcacaagaaatcgaagaatataagattctccagaccatccctggtatcggtgaaaaaatcgctgcaacgattatttccgagattggagagatagatcggtttagtcatgccaaaaagcttgtcgcatttgctggagtagatcctagtgtgtattcttcaggtagattcactgcctctgtgaaccgaataaccaaaagaggttcttgtagactacgacacgccttgtatatggctgttcgaagtggaattcgagatgcacgcaaaaagaaaaccactgatgagatcattccacgaaacaaaagacttagagagttttatgataagaaacgtgaagaaggaaagccatttagagtagccgttattgcctgtgtaaataaactcttacattggatttatgccttactaagaaacaagactactttccatgatatagcgtaaaaactatatctaacaaaatacaacaaaaccttccaaaaggagtgtcatggaaggttatttggcgtgttcatttttagtatatcatgcttgttttaaattttttattgaaaaatgttgacaaactattagctg

SEQ ID NO: 3289 - DNA, 1431 bp, unidentified
  source 1..1431: mol_type = unassigned DNA; note = element_4cca21c
  misc_feature 1: note = core
  misc_feature 2..127: note = LE
  misc_feature 128..1165: note = CDS
  misc_feature 1166..1431: note = RE
  misc_feature 1185..1431: note = bridgeRNA
atggtatggacgcctcccacccgtgaggaatggtagggaaggatgggactttcacgggctattggcattggcgtgatgacggtggaagatcgcataaatcttcacattgcaaaccggaggagccgagatgaagctgacgccagttggaatcgatattgcaaagatggtcttccaagtgcactacgtggacgaggaaacgggtgagatcgtgaacaagcccgtcaaacgtgcggtgtttctagaacatttcgcgaaccggtcgtcgtgcctcgtcggaatggaggcgtgcggcggtgcgcaccactgggcgcggaaactgttgaagatgggtcatcaggtcaagttgatgccgggagaattcgtgaaggcgttcaacatccgcaacaagaacgacgcggcggatgctcgggcgatctggctggcggtgcagcaaccaagcaaggcggtcgcggttaaaaccgaaatgcagcaggcaatgctggcgctgcaccggatgcgcgaacaactggtgaagttcaggacgatgcagatcaacggtttacgcgggctgctgaccgagtacggcgaggtgacggctaaaggacgggcatcgcttgacaaggcgataccggaaatccttgcccgggtggcggagcgtttgccagcggtgctgatcgacacgttgcgtgagcagtggaacggactgacgaatctggacgagcagatcgcagcgattgagcgccggatgcgcgaatggaagaaggacgatcgcgccgtgaaagcgatcagtgagatccccggcgtggggttgctgaccgcaaccgcggcggtcgcgatgatgggcgacgcgaaggcgtttcgatcagggagggagtttgccgcgtgggcaggactggtgccgaagcagaccggttcgggcggcaaggtgaatcttcacggcatcagtaagcgcggcgacacctatctgcgcacgctgctgatccacggcgcacgcagtgtgttgataaacgcgaaggccccaggtccgtgggtcgaacagatgaagcagaggcggcatacgaatgtggtgactgtcgccctggcaaacaggatagcgcgaacgatctgggcggtgcttgcccatgaccgaccgtaccaaaaaggatacgtaagcgtgaagccggcgttagcggtaaccaccagatgagaggttgactctgtaaagatggaacgtctatctaggttgcgttgggaatcgatagcgatggcaacacaggtcggaccgggatccgccaaacctgaatggctccaagaacttcgagttcgcgagagaaatgaggtgcgggtcagcggaatccatagtggcccgcagcggaaggatcggctgcaacaaggccggatataaagctgcgaaccgttcctgtcacgtcagaccaactcgaagtcccttgcaaaacgggaggcgtccatata

SEQ ID NO: 3290 - DNA, 1334 bp, unidentified
  source 1..1334: mol_type = unassigned DNA; note = element_4ccce44
  misc_feature 1: note = core
  misc_feature 2..257: note = LE
  misc_feature 258..1292: note = CDS
  misc_feature 1293..1334: note = RE
  misc_feature 85..242: note = bridgeRNA
ctctaagtttgcagcaagaaacttaaacagggtataatcccctttaggaagcaaggttgattcattacctttgttgttaaaaggaagaaccagcctgcaggatagggaaactatataatgactaggaattcaattccagcctatgttttagtccatcctgtatagttgcaaagacctgatagaaagtctaggcttcgagcctatttagagtcttgcgtccaacaactattggctagccttccataaagtgcaaagttatgaagaaagttttaattggcattgatttctcaaaagaaaagttcgatgtagctattatcgtcaagtcaacatctacacaagaacatgcattgttcgataacaaagttagcggttatcgtaaaatgattaagtggattaattcagtagtagaggatattccatgctcttcttggttgttttgtggagagactacagggggatatagtcgtatgatgagtgactggctctatgcgcaaggatatgatgtatggatagaaaatgcactggtcatcaaacggacatttcctctaaaacgcctaaagaacgataccgttgatgcctttatgatagcagagtacgctctgcgttttgaagacagagtacagctgtatgaaccaatgaatcaagccctaacagagctacgagagatttttctataccgtcatcacctcgtacgacataggtgtagctttgaggtacggcgtatagaaaaacgatttacacaacagaaatccgttaacaagaatgtgataagtcagagtgccagacatatcattaccgagataaataaggaaatagccaagtgtgatgaaaagataaaggaatatatcgaatcagatgaccaactctctagtatttttgccattgtcacatctatgccaggtattggaactatcaacgctgtcagtttaatggtatatactaacaactttactaagttcgcatacaacccaagaaagattgcttgctactatggtatagcaccttttggacgtgattctggcacaagcgtacacactgatccgcgagtgggttttatagctaataagatgctcaaatcgctcctcacacaggctgcattaacctctgtacgaacttgtccacagattgcaaagtattatcaaaggcttatagaacgaggaaagaaacctatggttgcactgaataatgtcaagaataaaatgattgccattataactgcaatggtcagaactggttgtatgtatcaacctgacaacatctgtttggcaacgcaaagtgtaaatgttaaataaatagttaaaataagaaatattggaggtttttgacatagaaag

SEQ ID NO: 3291 - DNA, 1140 bp, unidentified
  source 1..1140: mol_type = unassigned DNA; note = element_4ccef76
  misc_feature 1..2: note = core
  misc_feature 3..168: note = LE
  misc_feature 169..1125: note = CDS
  misc_feature 1126..1140: note = RE
  misc_feature 10..183: note = bridgeRNA
cttgtatctttaggcctcggaccaactcgggtagcccgagccgcctctgggccagttgttgaagcccgtgcctgagcactgggcacccgagttggaccgtcctttcttgcagcccgaacggttgtaggaacttgcagttcgcatagacaaggatgggagcgaagggacgtgtccgactctgtttttgtaggtatcgatgtctccagccagacgctggaggtggccagttccagccaggccaagacctggcaggtgtccaacgaagcggcagggcttgattccctggtcagccggctgttggatttgaagcctgcgctgacagtgctggaagccaccggcggctacgagttcgaggctgcctgcgcactgcaagctgctggcttggcggtggccgtggtgaacccgcgcacggcgcgcgactttgcccgtgcgatgggcgcgctggccaagaccgacgcgctggacgctcgcatgctggccgcgtttgcccgtgtgcttcaccagcatcccgagcgcgagcgcttcgtcaagccgctggcagacgccgagttgcagcggctgcaagcgctggtactgcgacggcgccagctggtacagatgatcaccgccgagcgccagcgcatgcggatctcgcacgcagcggctcgcccgagcatcgaacgcgtcatcgagttcctcaaggccgagctggcagacagcgacgccgaggtggcggcccacatccagcgccatcacgccgaactagctactgccctgagcagcgtgcctggcatcggcgcggccagcgtcgcggtgttgctggccgaactgcctgagttgggcaagctcgaccggcgccgcgtcgctgccctggtcggtgtggccccgctgaatcgcgactccgggcagatgcgcggccagcgctcgatctggggtggacgcgccgacgtgcgtcgtaccctctacatggccacgctgaccgcggtccggcacaacgctgtactcaaagcccactacgagcaccttctcgccgcaggcaagcgcaagaaggtcgcgctggtggcttgcatgcgcaagctgctgaccatgctcaacgccatggccaagcatggttcgacgtgggatccatcgcttcataccgcttgacggtcaagacggttg

SEQ ID NO: 3292 - DNA, 1354 bp, unidentified
  source 1..1354: mol_type = unassigned DNA; note = element_4cd00be
  misc_feature 1: note = core
  misc_feature 2..66: note = LE
  misc_feature 67..1101: note = CDS
  misc_feature 1102..1354: note = RE
  misc_feature 1115..1344: note = bridgeRNA
tatggaatggcccgcccctcaccatctggcgcaatgttggcgcctgaaccttgagaggaggagcccatgtccgagcacagcattgccgtccttggtatcgacctcgggaagaacagcgtcagcctcgccggcctcgatgcggccggagccgtcgttgtccgcaagcgaacgacccgggagggtgcgatcaagttcgccgccagcctatcgccgtgtgtggtggcgatggaggcctgctgcggcgcgcatttcatgggacgcattctggtaggccagggccacacgatccggctgatgtcgcccgagtacgtaaagccctacgtcaaggcccagaagaacgacgactgggacgccgaagcgatcactgaggcggcgacccggccgaccatgcgctttgtcacccagaagtccgaagcccagctcgatctccagaccatccatcgcgtgcgagatcggctggtgatggccagaaccgccttaaccaaccagcttcgcgcgatcctgctcgagcgtggcacaaccttccccaaggggcgcaaggtactgatgcgtcgcttggcccagcccgccgagacgttcgaggggctcggggaacggatgcgccggctcgtggaagatatccgggcagagtgcgccgaactcgatgcacggatcgccgccttgaacgacgagcttgccgaggtcgcgcgccaggacgagtccgcccgtcttctatcgacgatcccaggtatcggcgtgatcaacgccacggccttggtcgcggccgtcggcgatgccagtgccttcgccagagggcgcgatctctcggcctggctgggcctcgtcccgcgccagttctcgaccggcgggaagaccaagctcctgggcatcagcaagcgaggcaacgagtatctgagacggcagttgatccacggcgcccgcgcagcgctgctacgcctgaaggatacgccgacgcccctcgggaactggttgcgcggactgctcgcgcgctcccacatgaacgtcgccgtggtcgctctggcaagcaagctcgcccggatcgcctgggcggtgattcggcaacggaccgagttcgatcggcgcgccctcgttggcgcctgatcgcaattgatgagcgatcggcacccgccggtcgcccgcgaagtctgtgggaggtgaagaacagatggcctgaaggtcaatccctgcgacccggcagcctggttaaaaaaatggccgccatagccgacgtgcttatgaggcccggatcgtgcggatctccatcttggccgggggcgaccccgagaccggatacgttgatgcagacctaaaaggccaaccggaattcacccttgcagacggggcgggccatacg

SEQ ID NO: 3293 - DNA, 1429 bp, unidentified
  source 1..1429: mol_type = unassigned DNA; note = element_4cd0b5e
  misc_feature 1..2: note = core
  misc_feature 3..184: note = LE
  misc_feature 185..1333: note = CDS
  misc_feature 1334..1429: note = RE
cttgtataatgattttacccataactccattatggcaatgatcagggaatactgagtagatcttgtggtttaatccacctggaatagtatgtatttcccttttcatattcaagtataaaaataatgtatattgtgcaaatgcaccgataataagcaagactgttggaatatgggaaggaatagtatgaactggtctggaggttatatgatatatgttggaatagatatggccaagaagaagtttgattactgtattatagatagtgaactgagtgtaataaaaaggggaatactgataaacaacatttatggcttcagtgaatttctaagaataataaagaaatataaaaatataaaactgggaatagaatccacaggtatataccatgttaacctgtatacatatttaataaacaacaattgcaatataattttattgaatcctatggaaacaaagctgttgaagagttcaaggataaggaagaataagacagataaaatagatgcggaagcaatagcaaaatatattataatacgtaaaaacaatataattactatggagaaagatactgaaaatacttacacaaatctcagggaatacgtatacacatatgtaagaataaacaggaaaatagcaatggcaaagaaccagttaatcagggatttagatttactataccctggattaactgaaatagtaaatacggattctaaatactttattgagataataaataatatagaaaaaatcattgaaaataattataaaataaaatatatcagtgagagtaaatacagcgagataagaaatattttaataaacagcaatactaataataatgcagtaaaatacgacatagatataaacatagaaacattagaactattgaataagcagttaatgaaaacaaaaagtatcatagaagatgagtataatagtatagattccaaaataaagacaattcctggaatagggactataacaggctctataatattatcatcaataggagacataaataaatttgattctgttctaaagctaagggcctattcaggtatggatccagtggttaaacaatctggagattataatattacatcaaaaatatcgaaaaggggaaacccgttaataaggtatgcactgtatctatcaactatacctgcaataaagtttaatccagtaattaaaagatattacacaaggaaaaagaatgatggaatgaaaggtaataagctattaattgcctgttccaataaattgttgaatatcatatactccgtattgaagaataataaggattttgaagagcctttggataatataaattaaaaaatcattaaaaagaatacgtaattttgaatatcattagcgtaagctatggaaattatgaatatttatgtgtaaaagttaaattaatatagtata

SEQ ID NO: 3294 - DNA, 1579 bp, unidentified
  source 1..1579: mol_type = unassigned DNA; note = element_4cd4cd3
  misc_feature 1..5: note = core
  misc_feature 6..283: note = LE
  misc_feature 284..1459: note = CDS
  misc_feature 1460..1579: note = RE
  misc_feature 37..260: note = bridgeRNA
gtcacgtataatccaattatcctcttttgagggtaatggattattctcctttctcccaatctcttgggttttattgaatactccattataatacttaaagcactgtggatctgtatctattctattacagctttgactgttcggaggtgactcagaccgcagcttttcgtctattactggtaattagtttgttaacgcttgacgtttctatttacgtgattacacagccgaattctctgtggaagacagcagtgctaaatattatttcaggaggtatatttctatgtccatgtactttgttggaattgacatttccaagtacaaacatgattgctgcatcatttctgcagccgaccagcagattgtttccaaatttactgtcaaaaacgataaagatgggtttgaacatctgcttactactcttaactctctctccaatcctgaggatataaaaatagggtttgaatcaactgctcattatgccctcaatcttgaacttttccttgaaaacgctcaccacaacttcatggaagttaatccagttcttatcaaggaatataaaaagtctacaactttaaggcgaaccaaaaccgattctgttgactgcgaatcaatagctcggtggttaatgacggttgaatacaaaccccattcaaaaggattttaccactcttattccttaaagtcactaactcgtttacgagacaggctgattcgtcagcgttctttttatcttgtaaaaattacaaatgttttagaccatacctttccagaattcaaaccttttttcaataagcggctttcaaaaactgccatctatctccttgaaaactatggttcagccgaaaaaatggctcatatgaattcagcttcttacgacaaactccgttgtgcttcaagaggtaagttttctatacaacagttccttcatttgaaagaactggctgccaatacagtcggtgtcaataattctattttcgacatcgaattaaacagtttacttaccctgtacaactctctctgcaaggaaatcaaaacccttgaagccgagattaccaaacttattgaagaagtacatccacactatatgtccattcccggtatcggtcccatttcagcagctgttatttatgctgaatatggtgatatatcaaacttttcaaatcccggacagatgcttgcatttgcaggaatcgaacccggtattaacgattctggaacagaatcccatggtggcagaatggtaaaacatggttcttcacaacttcgttacgttcttcttaacgcctgccttcctttaatccgttttgacataacctttgcaacttactatgcaaagaaacgtgcagaaggcaaaaaacacagggtagctattactcatgtagcaaagaaactgatcagagtcatctatgcattggagaggcaggatgtagactttaacgttcagaagcttcgctaatatctgctctacatacatttatctgtcccatctgaaatacgatgtattcaaatggtctgttaaagttaccctttttacaagtataatttttttcaaaaacctcttgactatttatagttt

SEQ ID NO: 3295 - DNA, 1351 bp, unidentified
  source 1..1351: mol_type = unassigned DNA; note = element_4cd84b7
  misc_feature 1..2: note = core
  misc_feature 3..80: note = LE
  misc_feature 81..1115: note = CDS
  misc_feature 1116..1351: note = RE
  misc_feature 1148..1346: note = bridgeRNA
tgatgtgatggacgccccttcctaagtagctagccagtgccataattttactgactacattaatctgggagtgataccacatgaatacgatcagagttgttggtattgatattgccaaatctgtttttcaagtctgtgtctggatggttgatggttcagttgcctggaataaaaaaatatcacgtccaaaatttctggatacgcttcgtcagtttgaaccgggtacattaatcgcgatggaagcttgttcaacctcccattactgggggcggaccctcggtgctatggggttcagcgtaaaacttattccaacccagcacgtaaaagcatttgtcagaagtcagaagaatgatgccaacgatgctctggctatctgtgaaactgcatgccgtccaggcattcattttgtaccaatcaaaacgatggaacagctggatatcaaagcactgcggaatacccgtcaacttatggttgagcagagaaccgccctggctaatcagcttcgtgctctgctcgctgaatatggcctcatcatccctattgggatccagcgtcttcagcagcaattgcccgaatttattgaagatggatctaacgacctgacattcacacttcgccgtttactgtcttcactgcgtgaagatatgcaggcactgaatgaacgagtcacctgtctggataaagaaattgctgaattatcttcacaacaggcagcatatcgtcatttattaacgatcccgggtgtcggtcccctcatcgcagcggcatttatcagtgaagtggatgcagcgcagttctccagtggcagagaattatcagcctggtgcggtcttgtccctcgccagcacagttcgggcgggaaacaaaggctgtcctctgtgacaaaaaatggcaatcgcagcctgaggacattagtcatccatggtgcacgttcagtaatgcgttgcgtaaaaaaacgcgatgacagtctgggtctttggctgaaagggcttgaagcccgacgaggttttctgaaaaccacagtagctttagccaataaactgacccgaattatctggcgtatactgactgatgatgttgattttaatataaataaggctttcgctacgcgttaattgaagacagcgttagaagtaacatattttactgagtttgcaggcactgatgagaaaacggctaccgtccctgtaacagcctgaagttgacctgggtaatcatataccggtgtagtgataaggaaacagggctcggataacatcatggcgcgggtaaattaacccactaacgacgccggatatatggtcgcaaaccgtatcgaaccagtacttgtaacacccggggcgtccatata

SEQ ID NO: 3296 - DNA, 1373 bp, unidentified
  source 1..1373: mol_type = unassigned DNA; note = element_4ce0868
  misc_feature 1..2: note = core
  misc_feature 3..74: note = LE
  misc_feature 75..1124: note = CDS
  misc_feature 1125..1373: note = RE
  misc_feature 1125..1363: note = bridgeRNA
ttatggaatggcccgcccctttccccagcgtctgttaggatgctgtcgtgtgcgaagaagaaaggaacgagccaatgactattgtgatccttggagttgatctgggcaagacatcttgcagcgtagtaggtgttgatgcgactggggcggtagttgctcgcagaacgatgcgtcgtcagacgctaattgattacgtaacgaaactcccggcttgcgttgtggcgatggaagcatgttgtggcgcccatcacctgggccggttgtttgccacgcgcggtcatgagatacggttgatgtcaccggaatatgtccgcccgtacatcaaagcccagaagaacgatgaccgggatgctgagggtattgccgaagctgcatctcgaccgaccatgcgctttgtcgatctcaagagtcaggaacaactggatatccagacacttcatcgggtgcgttctcgccttgtggcagagcgaaggaatctgatcaatcagcttcgggcaatcctgttggagcgcgggctgatctttgcggttgggaggcgaaaattcgagatcggtatggacgctctgctcgcagagagcaatgagatattatccccacgtatgcgtcggctggttggcgacttgcgtgtggggtggaaggaactcgtgaaccgcagttcactcgacacgaagatcgaagccctgaataccgagtttatccagctggcacgcggggatgccgccatgcgcaggctgacatctatccccggtataggtgtgctcaatgcaacggccctggtggctgcggtgggagatgccagtagcttcaccaaagcgcgcgatctgggtgcctggcttggattggtccccagacagtacagtactggcggtaaaccccgactgcttggaatatctaaacgtggaaacacctatttacggactctgctcaatcatggtgctcgcgcagcgttaccgtcactttcaacgagtgacacgcctctggggcgatggctgaacgcaatgatcgagcgtggtatccaccgtaacgccgtggttgtagcgttagcaaacaagttggcgcggatagcatgggctgccttgcgcaaagaaattggctttgaccgctgtcatccggtagctgcgtaatcgatcggctacgcaccatcaaaagcgtagcccaacgaggtttgcaggaaggatcgtgaagatggcctgacagtcgaacggcgtttggaaagcccggtcaaaaaaatggcacctgttgccgatgtctttattggggctctgaacgtgcggatgtccatcttggccatgagcttgctcatgagaccgtatacgttgacgcagactgatcagaacaccgtaaaatcctcttgcaacggggcgggccatacg

SEQ ID NO: 3297 - DNA, 1455 bp, unidentified
  source 1..1455: mol_type = unassigned DNA; note = element_4ced496
  misc_feature 1..2: note = core
  misc_feature 3..222: note = LE
  misc_feature 223..1434: note = CDS
  misc_feature 1435..1455: note = RE
  misc_feature 6..226: note = bridgeRNA
ctaatgggaaccgccagcagccatgaggcatgctggtcccgagccgccagcgggtgagcactgaccgtcgcagggccgtgagagccctaagtctagatcgtgcccccgtcggccggtgaggggagacgacggccggtgggatgtcgtgccacgagcactgatccatcgatagcgcgccgcttcgcccctccaaggctcgttcgcggaccggaaggggggaggatgatcaacgtcgggatcgactgggcagaggcccatcacgacgtctgcgttgaacacggcgggggacacgtgctcgacaagggacgggtgcccgacggcatcgagggtgtggaggcaatccacgagatgctcggcgcccatgccaccgatccgagcgaggtcgtgatcgggatcgagctcgaccgcgggctgctggtcggagcgttggtggcagcgggctacgaggtgcacgcggtgaacccgctcgcggtctctcgctaccgggaccgcctggcaccggccggggcgaagtcggacccgggtgatgcccgggtgctggccgaggcgatgcgcaccgatcgccacctgctccgtgaggtggccggtgactcgacggaggccgaagcggtcaaggtgctcgcgagggcacaccagaacctcgtctggacccgtcagcgagtaggcaaccagctccgctcggcgctcagggagttctaccccggtgcgctgcacaccttctccgagctggcatcggccgatgcgatcgccgtgcttcagatcgcgccgacgccgaccacggggcgggcgctctccaaggccaaggtccgcaaggcccttgctggaggtgggcgcgagcgccgtctcgacgcgcgagcgagcgagatcgtcgagggacttggtgctccccagctcagtgcacccgcgctcgtcgaggaggccttcgggcaccaggtcgcctcgctcgtggcggtgctgggagcgctgcggacacagatcgaggagcttcgcgccgagctcgaacgttcgcttgagggtcacccggacgccgagatcatcaccagtcttccaggactcagctccgtgctcggcgcccgggtgctcgcggagttcggcgatgaccggacccgctacgccgatgctagagcacggcgctcctacgcgggcaccgcgccgatcacgaaggcctccggcacccgcaaggtcgtgctcgcgagggtggctcgcaacagacgcctggccgatgcgtgctacggctgggcgttctcatcgttgctgcgctcaccgggcgctcgagcgttctacgaccgccaacgagcgacgggcaagacccaccatcaagccctcagggcgctcggcaaccgatgggtcgggatcctccacggctgcctcgagcaccgcacgacgtacagggaagatgtcggatggggaggtcagctcgagacggccgcttgacgagatagggccgtgggatgt

SEQ ID NO: 3298 - DNA, 1468 bp, unidentified
  source 1..1468: mol_type = unassigned DNA; note = element_4cf20ec
  misc_feature 1..2: note = core
  misc_feature 3..44: note = LE
  misc_feature 45..1217: note = CDS
  misc_feature 1218..1468: note = RE
  misc_feature 1287..1407: note = bridgeRNA
taattggatggactcgcccaagccgaggcgtctgtagcgccacggtggcattcttaagaagccaacgacagcgagggcgagcccatgaaaaagcatacgaccaaaacccatccgtctccagtcgatgtgtctgtgtgtctgtgtgtctgtgtgtctgtgtgtctgtgtgttcgactgtggcggtagatcttgccaagaatgtgttccaggtggccggggaagatacccttggccaagtcatttacgaagcccgaatcaagtcacgcgaagcctttctgctcctcctccacaagctgccgaccggcgtgacagtgctgatggaaacaggccctggtgcgcaggcctgggcgcgattgctccagacacaaggcaagctggcgagaattctgccggcgcaacacgtggccgaccaccgcagcggcgccaagaacgatcgcaacgatgtgctggctatattgcgcgcaggccgagaccaaaacattgcggcagtgccgatcaaaagcacagcgcaattggccatgcaggctctgcatcgagcccggcaagggtacggaagacggcacactgcaatgggtaaccagatacgtggtttgttgctcgaacatggcattgccatggcgcagggggcaacgattcttggccgaaatgtccccctaatactggaagatgccacccagccactgccgcagctgttgcgcgaactgatcgctgaaatgctgggcgagtggagccacctgggtggacgcatcgaggtactgacggggcgtctggaagctgccgcgcgcgaagacgagacggcaaagcgtctgatgacagtacgcggtatcggcccgatcatcgccacggcactgctggccaaacagactgagcctgagcgtttcgccaatgcccgaatgtttgctgcctacttcggcacggtgcccgaacagcacagcagcgggcaaacagttcgactgggaaaaatgtgtaaacgcggtgatgcctatctgcgcagcttggctattcaaggggcacacgcggtattgaggcaggtgcggcctgactcggagcatccggatgaccaccgcttgcggcgctggttaagtcgccacggtcaaaaaggagcagccgtaaggttggccaatagaaacctgcgcatcgtctgggtgctgctgcaaaacgatcagacctatcgtcgtcagcctgcaggttgccaggaggcgacgatgaatcattaatcaacagagttctgccaccggggtgctgagtcacctcaaccgctgctgaagaacattgaccccaggtcagaccgtcgcggatagatgcctgcggtcctactggccctttgaggccttaacgtaatcggcataccgcgagctcacccaatgttggccagaagccgtaacgcttcctcgaacaggccttatacatagatgcaaccgggtagcagtgttcaaaagcaggttgaaagtgggggcgagtccataca

SEQ ID NO: 3299 - DNA, 1498 bp, unidentified
  source 1..1498: mol_type = unassigned DNA; note = element_4cf4f86
  misc_feature 1..3: note = core
  misc_feature 4..256: note = LE
  misc_feature 257..1477: note = CDS
  misc_feature 1478..1498: note = RE
  misc_feature 31..247: note = bridgeRNA
ctaatgggttccgatcggcgttgcttccccggctgtggctagctggggaggaaggctggtcgctgagccgctggccgggagcactgtagtcacctggggcgatgattcctagggttagatcgtgccccggccagctggtgagggctgcggagcgctgatggggtggcgtgccgtggagcactgatccattaggtcgccgccgaagccctcacggcttgagacctgtttaccggccaaggagggttgagccgatcagatgatcttcgtgggagatgactgggctgaggaccatcacgacgtgcatgtgatggacgaggccggggcgcggctggcgtcgcggcggctgcccgaggggctagctgggatccgcgcgttccatgaacttaccgccgggctggccggccaggcgggcgaggtggtggtcgggatcgagaccgaccggggtttgtgggtggatgcgctaaccggggcgggctaccaggtgtatgcgatcaacccgctggcggtggcccgctaccgcgaccgccatcacctgtccggggccaagtccgatgccgctgatgccaaggtgctggccgatctggtccgcaccgaccggcacaaccaccgcccgatcgcggccgacagcgcgcaggcggaggcggtcaaggtactcgcccgcgggcaccagaacctgatctgggcccgtaaccggcacaccaacgcgctgcgctcggcgctgcgcgagtactacccggcggccttggaagccttcgatgacctgcatgaccgggacacgctggcgatcttgggccgcgccccggagccggccgccggagccgcgctgacgctggctgccatccgctcggcgctgcagcggggcgggcggcggcgcaacgtcgaagcccgcgcccggcagatccacgccgcgctgcacaccgggcagctcgccgcgccgggaccggtcgcggccgcgttcgccgccaccacccgcgccgccatcggcatcatcgccgagctgaaccggcagatcgccgacctggaaacccagctcgcgcaggattttgaacagcacccggacgccggcatctacctctccctgccaggactcggtgatgtactcggcgcccgggtactcggtgagttcggggacagccccgaccgctacaccaccgccaagtctcgcaagaactacgccggcacgtcaccgctgacggtggcttcgggccgcaaacgcaccgtgctggcccgccacatccgcaaccggcgcctctacgacgccatcgaccaatgggccttctgcgccctccgcgccagccccggctgccgggccttctacgaccagcgccgcgccgccggcgacctccaccaccaagccctcagagcactcggcaaccggctcgtcggcatcctgcacggctgcctgcaccaccgcaccctctacgacgaacacaccgcctgggcccaccgacagcaaaaccagcaaaccgccgcttgacaccttccgaacctggggtgt

SEQ ID NO: 3300 - DNA, 1656 bp, unidentified
  source 1..1656: mol_type = unassigned DNA; note = element_4d0e404
  misc_feature 1: note = core
  misc_feature 2..298: note = LE
  misc_feature 299..1546: note = CDS
  misc_feature 1547..1656: note = RE
aattaccatgccgaccgttgcatggtctgcacaaatagggatgaaagggtgcagacaaacggtcgcctttcttataaaattgagttgaggggaagcacactacaacgcacggggaggtaagtcgtagattacttccagagttcaaaacagtatattaatcagtgttaggatcgccttttcaagcacaaataagtggcgctatgagcccggacactaaggattgtattaacacctgttaattgcttggcggttcagtcactgctttctcctcaccatttcgttatgaggagggtgtagattgaaagttgtatttccaacctgctgtggggtggatgttcacaagtcatttttggttgcaaccattatcaaaacaccaaaggacagtttgcagccaagttatcagaaaaagcgtttttctacgttcaactcggatttgagccgctttgcagattggctgcatctaaatgattgcctggatatttgtatggagtctactgggaagtactgggtcccagtatttaatatcctggaaaagcgcggtatttgtgttgttattgccaaccccaagtgggttaaggcagtgaagggaaacaaggatgacacgaaggactccaagtggattggagacttgttccgcatcggtctggtgaaaagcagctttattccggtcaaggatattcgtattctgcgggaattgacccgttaccgctacaagctcacctcgatgaaaagcagtgaaaagaaccgcttccagaatgcttttacggtttgcaatgtggcgctcgattccgttgtgtctgatatgttcggcaaatccgcgaccgctatcacggactacctgacatccgacgagaattttgacgcgcatcattgtgtttcccttttgcagcgttctctcaagaaaaaggcggacgatgttcttgcctccattgagggttacgagatcacgccagagcagaaataccgcatcggcattgtccgcgaccatctccactacattgaaaagctgattgagcgggtggacatctgcatcaacaccatggtcgaaaagtatgatggaactatttcgctcctttgtacgattcccggcattgaccgtagctccgcaatcacagttatctctgaaatcggtgtggatatgaaccagttcggctcctctaagcgcctttgctgctgggctggactcacccccggcaataacgaatctgctggcaagaaaaagtctgtccgcatttcacgtgcgggggtttatctcaaacctgcgctggtgcaagtggcccacgcagccgtgaaggacaagctgaatccctactacgcgctgaaatatgagcgtattgccaagcgccggggcaagaaacgggccatcatcgccatcgctaggatgattttgaccgctatttattccatgctctccactggggaaatctggaaccctgttgacctgttcaaagtagatatgcctgaacatctcaaagaacagcagcttcaaaaggctgtgaaacaggccattcgattgcttgaagcgcaagggctgaaagtgagttagccgctttcgataccctttaagctgccccgaaaaattcctgtttttcggggctgggtttttataccctttttaggtttaggtgcgcctctgatccgggaagctttcacact

SEQ ID NO: 3301 - DNA, 1595 bp, unidentified
  source 1..1595: mol_type = unassigned DNA; note = element_4d13e30
  misc_feature 1..3: note = core
  misc_feature 4..277: note = LE
  misc_feature 278..1486: note = CDS
  misc_feature 1487..1595: note = RE
  misc_feature 15..297: note = bridgeRNA
tttagtacggtataagcgtagtcggcaaaaccatcacccagatggtcagccagctgcacttattttaggataagggagtagtaattcggtctggcgtgagtcttttggagaaacagcgtccgtatagaaaactgccagccgttcccttatcctaatacattcgtttacgcgagttgagtctgaaataacactctggtatcttactaaaatgcttgaagaataagtgtgagcggtcgccgattactgcatattactgcgcagaaaggagaccgtttttatgattggcgtgggaatcgatgtttcaaagctgaaaagtacgatctgtataacgaatgaatacggagaagtgctgaaggctccgtatgagatctcacatacggaaatggatctgaaggaattaacaaagcaaatcaaaggttacggtggaaagaatgatgttcgggtcgtcatggaagccaccgggtcctacagcagaccagtcctgtattacctgctggatgaaggcatcttcgtgtccgagatcaatccgcttgcgatgaagaaataccgggctgacatcaacttcagaggagttaagaatgacagtatagatgcgatggcaatcgcacagtacacaatcgagaaatggaataagttgaaggagtatcagcgggctgacaaagagtatgcggccatgaaggcattatcaagacaatatctcagttatatgaagccacatgtggcgctggtccagaatctggaccacctgatcgatcaggtaatgccgggaatcaaaaaagaattcgatggatatgatccggtaaccggtaaagaccggctggcagacttcctggaggagttccgtcactatgattacatcacatcgctcgggccaaagaaatttgatgaacgtttcagtaaatgggcgaagaaaaaaggataccgtccgcgtcagaataagtccgacaagatttattcactggcaaaggaaggcatccctacactggcatatgatccgacgagccggctgcttgtagaacaagctgtagcggcactgaaaggtctgaatcaagtgctctatcaaatactaacacagatcagagaacttgcggagaagcggccggaatatgaagcagttcgtgcaatgagcggcgtcggagatgttctggcaccactgcttgtggcggaggtaggcgatccaagaagataccattccggagatgccctgatcgcctgtatcggaatcgatgtcccgccttatgacagcggccagttcaaagcatccgaccggaagatcacccgaaaaggatccaagcagctgagaaagcttggatatctcttggtaaagaatctcagaaagatcaaacccgcaaaagatacagctgtctatgattactatttgaagaagaaatcagaaggcaagaaagacaagcaggctatcgttgcggcaatgaataagttcttccgaatctactacgcaaggtccatggaagcttacagaagctgattcataatcatgacaaccagcccgaaagaaaacccgtcctgtacagaacggattttcatagtgtgcattcttttcattagtgcatttactgttgacaacccttagcgag

SEQ ID NO: 3302 - DNA, 1450 bp, unidentified
  source 1..1450: mol_type = unassigned DNA; note = element_4d200fa
  misc_feature 1: note = core
  misc_feature 2..232: note = LE
  misc_feature 233..1435: note = CDS
  misc_feature 1436..1450: note = RE
  misc_feature 9..235: note = bridgeRNA
cgttaccttcttcatggcctcgcgatgaggctcccggccttcggccccggcatgacttctccccctcgtcgacgatgatcgaaaaagtggtgtcaccgggatcggaggcattggcagaccgctgattagaggcccgagcgtcgaacctggaccggggaaggcagtctcttcgtaacgtggatgccggcacgctgatgccgcaggggagggcacaagtacgggagcgaaggacatggtggacgaaactggcgtcggcatctatctgggactggatgtcggcaagggcgaacaccacgccactgccgtcaatgttgctgggaagaaggtgttcgacaagccgttgcccaacagtgagtcgaagctgcgggagatcttcgacaagctccgggccaagcacggaacggtgcttgtcgccgttgaccagccagcttccatcggggctctgccccttgcagtcgccagggatgcgggctgccaggtcgcctacctgcccggactcacgatgcggcggatcgccgatctttaccctggtgaggccaagaccgacgcccgtgacgctttcatcatcgcggacgccgcgagaacgatgccccacactctgcggacgatcgaccccaacgatgagaccgtcgccgagctcgccatgatcgccgggttcgacgacgacctggcgggcgagtccacccggaccgcaaaccggctccgcggcctgctcacccagatccacccggcgctcgagcgtgtcctgggcccacggatccagcacccggctgtgctcaagctgctggaccagttcggctcaccggcccagatccgcaaagccggaaagcgaaggttgatcaccttgatgcggccgaaggccccgcggatggccgagcgcctggtcgaggacatcttcaccgcactcgacgaacagactgtcgtcgttccaggcaccgatgctgccgcgctgatcgtccccaacctcgccagctctctccagtccgtccttgaccagcgcaaactcctggccacccggatcgaggaactcctggaggcacaccctctttcccaagtcctgatctccatgcccggcatcggggtcaggaccgcagcccgcatcgtcatcggcgttggcgacggcagcggcttcgccacagccgggcatctcgccgcctacgccggcctggcacccgtgacccggagttccggatcgtccatccgcggcgagcacccctccaaacgcggcaacaaacaactcaaacgggccttctacctcgccgcgttcgcttcgctctcccagcctgagtcacgtgcctactatgaccgcaaacggcgcgaggggaaacatcacatcgccgctctcatagcccttgcccgacgtcgcatcgacgtcctcttcgccatgctccgtgacggcaccttctaccaaccgcccaccccagctacggcttgacgaaagccatagagg

SEQ ID NO: 3303 - DNA, 1542 bp, unidentified
  source 1..1542: mol_type = unassigned DNA; note = element_4d2af3e
  misc_feature 1..2: note = core
  misc_feature 3..241: note = LE
  misc_feature 242..1423: note = CDS
  misc_feature 1424..1542: note = RE
  misc_feature 3..217: note = bridgeRNA
cttgtattatagagtcgtagtttttatagcccttctcatagggctgtgctacactgcaagggatgctgtggattggtatcatcctcctaccgcgcagacggttcgaataaggctccgaccacagccctttgcagatttgttaatcagttagataccgccagacggtttatgtggaacaaggttacaaggcaaagtgtctgtggaagacagcatctccattcttctcactggaggtatcatcatgatttgcgttggaattgatgtggcaaaggacaagcacgactgcttcattctcagctcggaaggcgaagtcctggccgatgtgttcaccgtcaccaacaatcgggacggcttcgagactttgtatcagcgaatccgatcctgtgcccgccctacagacaacataaaagtagggcttgaggctaccggacactacagctacaacatcctcgggtttcttcttgacaacggcctggcaacctacgtcatcaaccctctgcacaccaacctctaccggaaaagcctcagcctgcgaaagaccaagaccgaccgtattgatgcacggaccattgcggctatgctcatgtctgatgtggacctcaagtcctacacagacacagcataccacaacgaggaactaaagtcacttacaagatacagattcgacaaagtccgccagagagccaagctcaagcagtctgtttcacgcctcgtcaacattctgttccccgagctggaaacgctcgttcctacgctgcacatggcgtctgtctatgcgcttctcagcgagcttcccggtgctcagcaaatcgccgctgttcatctgacccatctcaaaaccttgctggccaatgcatccaaaggacgttatgacagggacaaagcggtggagatccgtgaggctgccaaatgctccattggctcgaagatgcctgccaagtcgctggaactgcgtcataccattcagctcatacacgagctggacaaggagattgacgagattgaatcgtccattgaggagatcatgaacgcactccagtctcccattactacgatccccggcattggctatcgtatgggggccatgattctggctgagatcggtgacttttccaacttcgattcgccggataagattctcgcttatgccggcctgtccccgtccacgtacgaatccgggaaactcaaagcgtcaggagcctatgctcatatggagaagcgaggctcgcgttatcttcgcttcgctatcttcaacgctaccaagtatgtctgtcactgggacccgacctttgctgcctatctcgccaagaagcgcgctgagggcaagcactacaacgttgccatctctcatgccgctaagaagctcatgagggtcatctactccctgcagaaatccggacaagcctaccgaacagcggcttaaactttttcctctccttacaactctgagcgccgcacgacgctctggtttgtcataccgtctttgctcccgctaccaatcttcaattccctgtatctggggcttgacttttaatagttagt

SEQ ID NO: 3304 - DNA, 1359 bp, unidentified
  source 1..1359: mol_type = unassigned DNA; note = element_4d3145d
  misc_feature 1..2: note = core
  misc_feature 3..87: note = LE
  misc_feature 88..1110: note = CDS
  misc_feature 1111..1359: note = RE
  misc_feature 1126..1358: note = bridgeRNA
ataatgtaatggacccacccttttatacggcttcgcaatgagccatgatgaaagtgtcaaactacatcaaataagggcaggtccactatgaagattacaacagctggcttggatatagcaaaaaataagtttcatttttatggtgttaatcaagtcgggaagaaagttaaaaaacgagtgctaactcgttctgaagttcttcctttctttagcacattagagccaacattggttgtcattgaatcttgtggaagtgcaagccattggggaagaaaactcaaagagcttggtcatgaagtaaaattaatagcaccacaatatgtggtgccttatagacgaaaaaataaaaatgacttcaatgatgccgaagcgatagcggaggcggctcaacgaagtaatatgacttttgtaccgattaagacaatagaacaacaagatgttcaaatgctactgagagtacgtgaccgacatattcaaagtcgaacacagctcagcaatcaaatccgtggcttgctcgcagaatatggattaattatctcatcggtgggcagagcagccttaaggaaagaattgccagagtttttagaagatgctgaaaatgatttaaccagtacaagtcgagccttattctctgaactctatgaagagctcatacagcttgaatctgtgattaaagagtatgataaaaaagtcgaaggcatggttaaattaaatgatatctgtcttcgagcccaaaccgttgttggtatagggcctatcaccgcagcggcactttatgctgccattggaaatggacataatttttcaaatggtcgccatttttcagcatggtgcgggttggtgcctaaacagcactcaactggcggaaaaagcgttttgttagggataacgaaacgaggtaatccttatttacgcactttactgaatcatggtgctcgaacggttttaaaatattgtgaaatgaaagatgataaattgagcctatgggctcaaaggcttaaaaaagaaaagcatcacaaccaagccagtattgcagtcgcaaataagttagcaagaatcgtctgggcagtaatcagcaagaatgaaagctatcaagtcgattacgtttaagaagtaatagagtaaaacactcaccatcagttgcgaaatgagtttgaatggataataaacagttaaactgagctacttaaaaactacctgcgtcataggctcttagaagccgtcgggatgataaagttaagtagcagcagattgcatccaggctatgggattaaagccctattaataagccgaatatatgaaggcaataactattttattaaacgctcaaaatcacttgcaaactgggtgggtccatat

SEQ ID NO: 3305 - DNA, 1366 bp, unidentified
  source 1..1366: mol_type = unassigned DNA; note = element_4d34292
  misc_feature 1..3: note = core
  misc_feature 4..82: note = LE
  misc_feature 83..1102: note = CDS
  misc_feature 1103..1366: note = RE
  misc_feature 1127..1353: note = bridgeRNA
tgatgggatggacggcccctgcaccccggcatcggcgtggcataatggcggccggtgcataacagtcatcaggaggcatcccatggagatcagtgtcattggacttgatgtcgcaaagcaggttttccaagtgcatgccgccgatgcggcaggtcgcacagttgctcagatcaagctgcgacgagcgcaggttctcgactatttccgaaccctgccgccctgccttgtcggccttgaggcgtgcgcgacggcacattactgggcgcgtgagttgagcgcgctcgggcacaccgtacggctcatgccgccagcgtacgtgaagccctacgtcaaacgcaacaagaccgatgccgccgatgcacaggcaatagcggaggcgctcacgcgcccaaccatgcgcttcgtgcccgtgaagtcagccgaccaacaggccatgctgatgttgcaccgaactcgcgagctgctcgtgcgccagcgaacaatgctcgccactgcactgcgcgcgcatctcgccgagttcggcatcattgcaccccaaggtatccagcgcgtcgagaagctggcggcgcaactgcatgacccgtccgtgccgcctctcgcgcgtgacgcgctgaacctgcttgtcgagcaactcgcgagcacatggaagcagatcgacacgatcgagatgcagcttatcgcgatccaccgaacccaagccgtcagccggcggctcgcttccatacccggcgtcggcccgatcaccgctatggcaatcacgagtacagtgtccgatcccaccatgttccgctcgggtcgtgagttcgccgcctggcttggcctaacacccaagagccattcgagcggcggcaaggacaggctggggcgcatatcgaagcgcggcgaccgttacatccgtcacttgctgtatgtgggcgccggcaacgcgatccggtttgcgaaagcgcgcgccgcggcgggtgagaactggatccgcggactgcagcagcgccgtccgcccaaggtcgtcatcatcgcgctcgccaacaagatggcgcggatcgcctgggcgttgatggtgcgtgagcagcctttccgctcgccagctcagtcgacgttgtaaggcgcaggtcagtggacgaggttcacaggttgcgagggcgaacgtgaggtgatggcacaaccgggcggaccggggatcgacaaagcccgcagagctttgggcgccacgagcgcgacccgttgatgagacgtcgatccgcgaattccatcagggccagcggtcatgagcacgggccgcatcaacaggccgtatacatgaacgcacccgacccgtgcgctgccgaaacctcaccaagagccttgcaacgcaggggccgtccataca

SEQ ID NO: 3306 - DNA, 1406 bp, unidentified
  source 1..1406: mol_type = unassigned DNA; note = element_4d37777
  misc_feature 1: note = core
  misc_feature 2..85: note = LE
  misc_feature 86..1120: note = CDS
  misc_feature 1121..1406: note = RE
  misc_feature 1170..1401: note = bridgeRNA
taatgggatggtcacccctgcccgaactggcatagatgtgcgaaagtgacgatgaacctccacttgaacgcaaggagcgaccgtcatgaaaattactacgattgggatcgatttagccaaaaacgtgtttcaaatccatggtgctgacgcgcgcgggaagacggtgctgcgtcggcaattgaaacgcgctcagatgctggcattctttgccaggcttgagccgtgcaaggttgcgatggaggcgtgctctagtgcccactactgggcacgaaagcttaacactcagggtcacacggtaatgctcattgcactgcagtatgtcaaaccctttgttaagcgcaataagaacgatgcggccgacgctgaggcgatttgcgaggcggccacgcgccccgagatgcccacagtacccgtgaagaccgccagccagcaggcaattctgagcatccatcgtgcgcgtcagagcttcgtcaaggcgcgtacagcgcaagctaaccagatccgagggttgctgacggaatttggctttgtcattccccagggaatcagtcacataactaagtgtgtccctgagatcatcgaggatgcagagaacgatcttcccggcagctttcgccagctcatcggtcgcctgacagagcatctgaaggtgcttaatcttcatgtgacagaactggagagcgagatcgtgcgctggcataaagaaaatgaagctagcaaacgactcgcagagattccaggtgtggggccgttaacggcgagcgccttagtggcctcggtgggagatgctagaaacttcaagaatgcgcgccagcttgccgcgtggttgggcttggtgccgcgacagcactcctcgggtggtaagccgaccctgttgggtatcagtaaaaggggcgatgcgtacttacggacattgttgattcacggagctcggtcggtactgcgtttcaaacaggccaagccggatgccggcacgtggacggagcagttgctcgcgcgacgtcataagaacgtagttgctgtggcactggccaacaagaacgccagaatcgtgtgggcgctactcacccatgatcgtcggttccggcttgaccacatgtctgcttgcgcagccgtgtagtcaagccggttagcctattagatttgtttataagaggaggtaaaagagttcacaccaccgattgcgcaggcaatcacgacgtgatggcaaaattggttagaccgtggtcggtcgaacctttgggggctgggagcttcgagctcgatgacctgatgaggagccgaccagcatattccatcagggacatggagcgacggctccagaagaaagtccgaatctatgactgcaatctctacctatttaccattgctgactgggagcttggcaaaacaggggtgaccatcta

SEQ ID NO: 3307 - DNA, 1864 bp, unidentified
  source 1..1864: mol_type = unassigned DNA; note = element_4d3a0be
  misc_feature 1..5: note = core
  misc_feature 6..205: note = LE
  misc_feature 206..1186: note = CDS
  misc_feature 1187..1864: note = RE
  misc_feature 1279..1499: note = bridgeRNA
ttagacaaaatggcgccccttctgggcttgaaaagcgtgggttagatgcgagcatttaccacaaaacaagaaaaccaacagaaggaacgcaatgaaaagaaaattatatgtaggaatggatgtccacaaagaaaagatcagaatcccgtatttaacgagcaattcaaaggaaatattgaaagaacaacaaataaaataggaagaagtgcagatcaagaaattcatcaatcggttaaaaacagaatgggatgaaatagattgttgttacgaagcgggagtaaccggttgttcactttacagatatctaaagtcgttgggagtgaactgtatccttgtagcgcctggaaaggttccaagacaaaataccgataagatcaaaacggataaaagagacgcgatcaaattagcgagattaatgcgaagtggggaattggaatcgattcatgtaccgagtgaagaggacgaagcagtaagagattatttaagatcccgtgacagtcttcgtttggatttaggaaggaatcgtcaaaggttgatgaaattcttattaagaaaagacataaagtattccacaacgaagtattggacggtgagtcattacaaatggttgaacaatcttcactttaacaacgagatccttcaagagacgtttaacgattattatagtcgagtaagagttcaagaagagaatttaaaagcgatggataagaagatacaagaggtagcggaaagtgaaccgtatcgagagaaagtgggaatcttaagatgctttcgaggagtggactatttaacggcaatgttcttactttgtgaggtaaacgacttcaagcgattcaaaacggctggttctttcatgagctttttaggacttgtccctggagaatattccagcggttccaaaagaaaacaaacaggtattacaaaaactggaaatcccagacttcgaaggattttgacggaagcggcctggcaacatcgcttccctggaacaggaagtaaaatcgtaaccgcacgtaggtcgggacaacctgcgttagtcgttgctttagcggaaaaagcttctctcaggttacacaagaaatttcgtaatctacagctaagaggaaaaactcctcaagtgatgataacggcagtttcaagagagttatccggatttctttgggcagcaatgaatcttgttgcatagagctataagtaaaagctatctcaaaaatatcttagaacgattgaaatcggcgttttaagcaaagataaagtatttttgagataacttctcatgtttcattcaatgattgaattcgttagagaagatgtacgataaaggaaaaatacttgttggcgagagtgttgaagcagtctgctttgcagacttgatcttcgtttttagactaagaacagctcccgatgtatagattatcctgcggtatccaacccgcgaatatcagtctgatcaatcgtcgcgaatgcttttctctaacgagttaaattattgggtgattaaaaaaaatgcgaaaaaatatttactgctccggatgggggcgccatatcagaacttgtctcaaaaccaattacaatcatcattcagcaagttcataataaaacgtaggaactctcacattcagagggctgatgacagtgtcgcggggctctcacaaaagacggttttgagaccagctcagcatatcaggtgtgtttttgttttctttcgcaagcaactacgtattcctggaataactcggatagatacccgcttctctatcgcaaataaatgtatttcgaatcggattcttttgcaaattcatcgagggctctgtatccttggaaccactttgtgctttccttatgcgcgtcttgatactctact

SEQ ID NO: 3308 - DNA, 1392 bp, unidentified
  source 1..1392: mol_type = unassigned DNA; note = element_4d4894a
  misc_feature 1..2: note = core
  misc_feature 3..209: note = LE
  misc_feature 210..1220: note = CDS
  misc_feature 1221..1392: note = RE
  misc_feature 13..192: note = bridgeRNA
cttgtatgtaataacaatgtggtggttagctaccagcacatgaggcggagtgagtcagtaactatccttaaggctacgaccttcggtgtcagctaaaaccctccgcttcacctttcacgccagcattaacattgaacggttgccaagagcgatgactctgcatgtacaagggtaataggcgtgatggttctgtgaaaggagaaacggctatgtttcagttaggtgttgacgtcagcaagaaaaccctggatttgtgtctgctgtgcgaaggcataaaaggcaaggtgaaaacgcgcaagcttaaaaacgattttaatgcggccactgctgtaattagttggctctgcaaacagcatgtcgggttaaaaaatgtccatatcattatggaagccacgggcgtttatcacgaatcattagcatatggccttcacaaggctggtgcgattatatcgcttgccaatccataccgcagtagagaatttgcccgtggtatggggatcctgacgaaaaatgacagggttgatgcttatatgcttgcctgttacggcgcgcttaaagcacctgaagcgtggatccctccaccggataatatcctccatctcagtgcacttttgcgtcgtcgtgacgctcttgttgcagacagtatccgcgaaaaaaacagactggaaaaatgcagggcaacagatacccctgctgttattactgaatccatagaaaacatgctccgaagtttaaatgcagaactgaagcacctggatgctctcatacaaagccacctcgatcagcatcctgaattaaaaaggaattttgatttgctgacatcaataaaatccgtaggttttctgttgggtctgaatatgctggtcatcctgcgttgccatcacttcgaaacagcggaacaggccgctgcctttctcggtgtagtgcctgttgaaaagaactcaggtacttcagtccgagggtgggggcggttgtcaaaaatcgggccgccggagctccgtgcaaaactctatctggcttcgttgtgcggcatgagatttaacccggcgatgaaggcaatgtatgagcgattatgccagcgtggcaaggcaaaaatgtgtgccattggcgcacttatgcgaaaacttgttcactggtgctatggcgtactgaaaacacaaaaaccgttcgatgcagaataccgattttctgatgagcacggtgcatgcaaagtgacatgatgcggtggttccatgtggcactggattcactaacgtaagtctctggtggctgattagaaggtgtctacgataaatcgaaagctagcgcaggcagtttgctgatagtcccccagtacacaggatgctattcaccaaaagttgaagtttattttttcttgacttaacacggtag

SEQ ID NO: 3309 - DNA, 1504 bp, unidentified
  source 1..1504: mol_type = unassigned DNA; note = element_4d4f18a
  misc_feature 1..2: note = core
  misc_feature 3..213: note = LE
  misc_feature 214..1482: note = CDS
  misc_feature 1483..1504: note = RE
  misc_feature 5..210: note = bridgeRNA
ctgatggctctaccttcccttcgcacggtggatcccggcagggagcgcttgcggcgcttgtcccttgaggactgtcatgagacggcgcccctgccgggccccggcgaaggcctgacgtccaggagggtgtagtcccgcgaggactggttcatcagcacgacgcagcgccttcccggtccgccgagcatcatggtcacggcggacggaggaccggtgctgggaatcggtatcgactgggcggaagagttccacgacatcgctctcggaacgcaggagaaaggggtgatcgagcagttccgtatcggccacggaccggccggagtcaccgcgctgatcgagcgtgcgctgcggctggaacccgacccggccgaggttcgggtcgtgctcgagacccggcacggactgctggtcgaagcgctgatcgacgccgggttcaccgtcgtaccggtcaaccccgatgtggtcgcccgccggcgcggtccggcgcggaaaaaagacgatgccgaggacgcccggatctgctgcctgctcgccctggaccgacacgccgcactcaagacgctgatcccgcacggcgagctcggcggcgagctgcgcgcgatcgcccgcgacgacgaccgcgccacccgcgaccagcgccgcctgctcaaccggctgcgcgcggacctgcacaccacctaccccgccgcgctggtcctggccggccaggatctgggggcgccgacggtgctgcggctgctggagcgctggcccacccagcccgagctggccgaagcctcctatcaggagctggtcgagttcgcccggctcggccgccacggctggcccgaccggttcgccgaccgcgtcaccgccgcgctcgccgcgccgtcgctgccgacccgggactacctcgtgcgagccaaggccgccgggatccggctggccgcggtgcaactgctcgccctgcacgaggcccgccgcggctggcaggcccggatggccgagctgctgctcggcgggccgcgcaccggacgcgatcacacggtcaagacccccgacccgggaaaagcgttcccgggcggggagatctacctgagcatgcccgggctcggggacctgctcgccgcccgggtcgcgggcgagatcggtgaacacatcaaccagttcgacagcccggccggcttgcagtgctacgccggttccgcgccggtcacccgccggtccgggaagagcgatttcgtcgtcgcgcgccgcctggcccacaaccactacctcggcgccgcggtccaccaatgggcgttctgcagcctgcgacaaagcggctgggcccgcgagttctacgacggcaaaatcgcggccggaaagagccaccatgctgcactgcgggcgctgagcaaccgctggctggaagtcctgtggcactgcctgaccaagggcatcctctacgacgagaacgtgcacgtcgccaaccgcaaccgcgccctcggacacgccgcctgagcccgaggttgacagagggtgt

SEQ ID NO: 3310 - DNA, 1417 bp, unidentified
  source 1..1417: mol_type = unassigned DNA; note = element_4d50786
  misc_feature 1..2: note = core
  misc_feature 3..79: note = LE
  misc_feature 80..1126: note = CDS
  misc_feature 1127..1417: note = RE
  misc_feature 1175..1415: note = bridgeRNA
tgatgagatggacgtcccccgttttcggcacggcagtgccagataacggacaggttcatctcatgacgggggttgtgccatgactgcggcgtttatcggtctcgatctggcaaagtcagtgttccaggtccatggcgtcgacgtccacggcaaggtggtgaggaccaagcggctgcgccgggatgcgatgctggtgttcttcgccaccctgacgccgtgcgtggtcgggatggaggcttgtgccgggtcgcatttttgggcgcgcgagatcgcccggttcggccacacggtgcgcctgatggcgccccagtacgtccggccctacgtgaagcgccacaagaccgaccgggccgacgcggaggcgatctgcgaggccgtgcagcggccgagcatgcgcttcgtgccggtcaagaccgagcagcagcagggcaccctggtggtccaccgggtgcgcgaggtgctggtcgcccagaagacgcagttgatcaacgcgctgcgcgggcacttggccgagttcggcattgtcgcgccgcagggtgccggcaaggttgccgaattgaccgccgtgctggccgacccggaggacacgcggattcccgccctggcctgggaggtcctgcaaggcttggtcgaccacctgcgcgacacggaacggcgggtcggcgaattggacgctcggctggccgggcaggccaaggaggatgaggtatgccggcggctgatgacggtcccgggcatcgggccggtcaccgcgacggcgctggccgcgacgatcggcgacgcgaccgtcttcgcatcgggccgccacttggcggcgtggctcggcttggtgccgcgccagcattcgagcggcggcaaggagcgcctgggcggaatctcgaaggcgggcgacggttacctgcgccggatgctggtgaatggcgcccggacggtgatgcgctggcagggcaagaccgcgccgtggctggccgggctgctgagccgtcgacccttcaacgtcgcggcggtggccctggcgggccagccttgccctgcgttatgcgcggtgctttgggcaaggacaggtcgggacgaagaggtggtcccggcagtcgaacaaagaggttggacgatgaaacgacaatgatcagggccgcgctggtcaccggatcggcgacctgagcgcaggatgacaagctctccttcggttgcgagggcgatggacgacgtgatggcacaacaggtcggaccgggatcggccaagcccgtctgcaacaacgagccgacgagctcgagactttgattgggcgtcgatccgcagatctcatcaaggccagcagctcgcgggctgcaaccgtaggccggatagatggcagcaaccgacttctcgagccgccatgtcgaaaaacgctcttgcagggcggggggcgtccataga

SEQ ID NO: 3311 - DNA, 1392 bp, unidentified
  source 1..1392: mol_type = unassigned DNA; note = element_4d5b1e3
  misc_feature 1..2: note = core
  misc_feature 3..78: note = LE
  misc_feature 79..1161: note = CDS
  misc_feature 1162..1392: note = RE
  misc_feature 1109..1379: note = bridgeRNA
tgttgaggtggacggctcccaacggcatcaaatgtgccagaatgagttcgttgaaatcccaatcgagggagaccgcccgtggaacagatgattggcattggtatggatacgtcaaagagcgttttccagttacatggcgtgaacgcagccgaggaaccaatcttgcgcaagaagctctcgcgtaaggaaatgatgaagttcttcgagaagacaccgccgacaaccattgcagttgaggcatgcggtggttcgcatcactgggcccgattgttgggatcgttgggtcacaacgtgaagctgattgctcggcaactggccaagccgtatgtcaaacgcggcaagaacgacgctgcagatgccgaagcattgtgtgaggcgatgagccgcccgactatgcgcttcgctccggtaaagacagctgaccagcaagcagccttgatgctgattggggtcaggcaacgattgcttcacaatcgcacccaactggccaatgccattcgcggtttcgcgatggagtttggtatcatctccgccaagggcatgtgcaagatcgaaccgctgttggagcagatcgccgccgatcataaattgcccgaactgactcaagaactcttcgccatgcatggcgaggagtaccgcgaattactttctcagatcaaagcgatcgatgaaaagctgatgaggctgcatcgtgctgacgattgcagcaaacgtctggccgaaatccccggcgtcggcccgattggagcgtcacttctgttgatgaagacaccggacccgaggatgtttaaatcgggccgggacttcgcagcctggatcggcctgacaccgaaagatcattcgacagccggagtcaagcttggtgtcatcacccgcgctggcgatgaattgttgcgaagcgtattggttgttggcgcgacagcccttctccagcagatcagaacgggtcgaagtaggcatgcctcgctctggctcctcgggcttctgcagcgaaagagaccaaaactggttgccgtggctctcgccaacaagatcgctcgtattgcgtggaagcttatggtgaacggcgagacgtaccggcagggagaaagacagacacaggcaacaaaagagattggccatcacggtgaacggagacaaaatgctatcgtgttgagctgatgctttgaacttgcaagagaaaagcagatgatgcgatcggacgatccaagtcgtgtgaaactccgttagactcattggccaccgaaggtcgccgttatgttaggaacccacgttgcggaaatcatcttggccagtggtcatcaagccacgctgaaaggccgcacatatgaaagcaagcgatccgatcaaaaatatctgcaaaaacacttgcaagcgggagccgtccacata

SEQ ID NO: 3312 - DNA, 1522 bp, unidentified
  source 1..1522: mol_type = unassigned DNA; note = element_4d5c6af
  misc_feature 1..2: note = core
  misc_feature 3..251: note = LE
  misc_feature 252..1421: note = CDS
  misc_feature 1422..1522: note = RE
  misc_feature 10..228: note = bridgeRNA
cttgtataatgaaatagagctatataagcactatttctagtttatttaatttttagtatataattaacatagacgctgtggattagtgttttctcctatagcttagactattttttaaaggctctaaccatagttctatgtttaattgttaattagttagataacgctcgacgttttatatgtagcaaggatacgttaacatagtttttatggaacacaacgtcaaataaattattcaaggagtgataactatgatatttgttggtatcgatgttgctaaaaataaacacgattgctatatttttgattcttctaaagagatgattgaaacaaaattttcttttctaaattctttagaaggttttacaacttttaaaaatattttatcctcatattcagatgatttttctaatataaaagtaggaatagaatcaactggacattatggcaataatattatcaattttattcgtaaaaacagtctggagttaaaaatatttaacccacttgccgtaaatctttatcgtaaagctatgacacttcgaaagactaaaacagataaaattgatgcacaaattatagctcaaatgcttttcagcgatgattctaattcctacctacctatagattaccacataaatgaattgaaatcactagcaaggcacagatatagattgataggtcatcgcggaaaatataaaatatctgtaacaagaatattagatattgctttccctgagctaagtggtgtagtttggtcagtacatcagaagtcttcttatgctttactattagaatttcctacagtagaagatatttcgaaagcccacttgaccaaattaacaaatatcttatctaaaaattctaaaggacattatactaaagaaaaggctaaagaaattaaagttcttgcagctaattctattggtacaagcgagtggacaattggttttgaactacaacaaaccataagactaattcagaacattcaatatgaaatagatctcttagataagaaaatcaaagaagctgtaatagcaaccaaaacaccattaataacaattccaggggtatcttatgttctagccagtattatcttatctgaaattggaaatgttaaaaacttttctaattctggtaagttattagctttcgcaggattagagccttcaactcatcaatcaggaaactatactgcaaatgtggctagaatggttaagagaggttcaaaatatctccgctgggctctattacaagcagctagaacagtcagtatgagagttccagttttcaaagaatacttgtctttaaagaagtctcagggaaaacaccatttagtagctatgagtcatacagctaaaaaattgctaagagtcatttttcatttattaaaagcagaagaaatatttatctgtagttaatcaaaaaaatctaaattgatatactctttttgtgatgtgattttttaaaaatttaactataaaaaatattaactatttttacttgacttcatatagttagt

SEQ ID NO: 3313 - DNA, 1442 bp, unidentified
  source 1..1442: mol_type = unassigned DNA; note = element_4d5ee28
  misc_feature 1..2: note = core
  misc_feature 3..230: note = LE
  misc_feature 231..1427: note = CDS
  misc_feature 1428..1442: note = RE
  misc_feature 10..223: note = bridgeRNA
gctctaccgtcttgatcgggttgatcgagccattcgtagggttgggtcgcccaggggtgctgggtgtggctatcaggcggctgccgtctcgtggctttcctcgcttcgccgcccggcaccccacgacgactcggccgccgattaggaagtgcgaacaagtcgctgagtagagcaatgccggcgaggtcgtccgtggcacgaacagaacgaacacgcacgtcaggagcacgatgagccggatatgggcggggatcgacagcggcaagggccaccatcacggcctcgcactggacgcagacggcaagaccctgttgtcgcggcgggtcgccaacgacgagcccgagctgctgaagctgatcggcgacgtcctggacctggccgacggccgtcaggtcacctgggccatcgacatgaccggcggggaacccgcgctgctgctggccctgctggtcagccacggccaggagatcctctacatccccggccgactggtgaaccgggcctccgatggctaccgcggagagggcaagaccgacgcccgcgacgcctacgtgatcgccgaccaggccaggatgcgccgcgacctgcggcccgtccgccccggcgacgaagccgccatcgaactgcggctgctgaccggccgccgcggcgacctcgtcgaggaccgcacccgctcggtgaaccgcctgcgcggcacgctgctgggcatgttccctgccctggaacgggccctggacctgaccaacaccggcccgctcaagctgctgacgggctaccagaccccggccgcgatccgccgcgccggcgtcacgcggctgaccaaatggctggccaaccgcaaggtccgaaacgccagagccctcgccgaagcagtcgtcgaggcagccgagcgccagcacacggccgtccccggggagaagaccatcgcgcggctggtccacaccctggccgaggaggtgatggccctcaacgagcagatctccgagatggacaagctcatcgagggccggtttcgcgagcacgaactcgctgacatagtgcagagcgtcccgggcatcggcaccgtgctcggtgcggagttccttgccgccgtcggcggcagtctggacggtttcgactccccggacgccctggcggccttcgccggcgtcgctcccgcaccccgcgactcgggcaaggtcagcggcaacctccaccggcctgccgtctatcaccgaagacttcagcgcgtcttctacacctccgcgctcgtcagcgtccggtacgacccgaactcgagggcgttttacgaccgcaaacgcgccgaggggaagaagcatgtccaagctgtgctcgccctcgcccgccgacgcgtcaacgttctgtgggccctgatccgtgaccgacggtgctatcaagtcgcacctccagtgactacggctgcttgacaacagcattaggaa

SEQ ID NO: 3314 - DNA, 1362 bp, unidentified
  source 1..1362: mol_type = unassigned DNA; note = element_4d62f2f
  misc_feature 1: note = core
  misc_feature 2..133: note = LE
  misc_feature 134..1087: note = CDS
  misc_feature 1088..1362: note = RE
  misc_feature 1122..1359: note = bridgeRNA
atggtatggacgcctcccacttcgagggtgaagtgagtaggtgagcttgtgaagaagtggaccctccggaccgacggcatcaaagtgcccaaggtggaaggtgttcaggcttcacaggcacggagggtccgagatgaatcgtatcgtggttggagtggatatcgcaaagcgagtgtttcagctgcattgggtcgagccgcagacgggcgagattgtggcgctgcaggttaagcgggagaagtttttggagcattttgggaatcgttcgaagagtttgatcggcatgcaagcatgcggaggatcgcagcactgggcgcgagcgctgcagaagcttggtcacgaggccaaattgttgtccgcacggatggttaagccatttgttgtcggcaacaagaacgatgcggcggatgcgcgcgggatctggatggcggttcaacaaacggggatcaaggcggtggcggtcaagagcgaggagcagcaagcggtgttggcgctgcatcggatgagagagcagttggtgaagtttcgcactgcacagatcaacggtctgaggggattactcacggagtacggcgaagtgatgccgcagggtcgagccgggatcaagcgagatattccaggggctctgggacggttatccgagcagattggccggatcgagcggcgcctgcggcagtggcagcgtgaggactcggccacccagcgcattgcggcgattcccggtgtggggctgttgagtgcgaccgcggcggtggcgacgatgggcgatgcgaaagtcttcaagtcggggcgcgagtttgcggcctggctcgggttgctgccgcggcaaagcggcaccggcggacgagtgcgattactcggcatcagcaagcgcggcgataaatatctacgcacgctactaatccacggcgcacgcgcggtgctgacgcacagcaaatcgccacccgagtggttgaccgaattactgaagcgccggccgaagaacgtggccgtcgcggcgctggcgaacaagatggcgcgcacgatctgggcgctgacggcccatgaaccggcgtatcaatctgggtacgtgagtcgacccgcataggccgcacgcacgattcattaacgttaacaaaggaaggtacgccaaaaggttgcgcaaggactaaaaagtgtgatggtaaacaggtcagaccgtgacccgccaagcctgaattgttgtctgagcttcgagctctcaggagaaatgaggcgcgggccagcgaaaaaccatcagggcccgcaggctgcggcttgcaaaacaggccggatataaacctgcagcctcatctgtcgactgtcacaccaaagagaccttgcacatcgggaggcgtccatata

SEQ ID NO: 3315 - DNA, 1545 bp, unidentified
  source 1..1545: mol_type = unassigned DNA; note = element_4d64827
  misc_feature 1..2: note = core
  misc_feature 3..263: note = LE
  misc_feature 264..1439: note = CDS
  misc_feature 1440..1545: note = RE
  misc_feature 11..234: note = bridgeRNA
ctcgtatattggagatgtagtaaaaacactacaatttattctcaatcccattttcttatgggataataattgtatagatagaggtcgtagttcacctccttgaagcttgtcttcccgcggaagggttacgcctctactttacgtccttatcagtatgagctggatagcacattttgttgctgtatgtctaacgaggtttgattgtcgtaaagttcctgaggggtctttctctatctaaatttatattagagttaggtgattttatgttttatgtaggtattgatattgctaagaataaccatgaagcttctattattgattctaatggaaagcttgttactggttctttttccttttctaattctgttagaggtttagaaaagtttaagagaattatttcttctttttctctttcatctaacaattgtattattggtatggaagctacaggtcattattgggtaagtctttattctttcttaattgatttaggatttacttgcattgctatcaatcctattcaatcagatgcctttagaaaaatgtatattagaaaaaccaagaatgattcggttgattcctttatcatagctcaaattttaaggtttggtgagttttcagtttctcatttttctgatgaggatacttttgctttaagaaatctttctagatacaggtttgctcttgttgatgaagttagtgattggaaaagaaagcttgttgctatattagatcaggtatttccagaatattcttcacttttttctaatatttatggtgttacttctaaagagcttttgagtaagtatcctttacctgaggatattctttctatttctgctaatgaacttgctgaacttttatcaaaatgtagcaaaggtcgttttggtattgataaagcaaaagaaattcaagataaggcttctaattcgtttggtattaagtttgctttaaaatctttttcttttcaaattaaacaaattattaatcaaatttctttcctagaagatcaaatattagatattgaagaagaaatttcttctatgctaaattatttatgtcccgttattacaactatcacaggaataggcgatatattaggcgcttctatattttcagaaattggtgatatctcacgttttgaaaaagctagccaattagttgcctatgcaggcttagatgttgcagttaaacaatcaggaaatttcaatgctactgacactaaaatatctaaacgtggttctccttatcttagacgtgctatttggattgctgctaatgttgcagcatttaaagatcctgccttatccttgtattatcaaaaactcagacaaagaggaaaggctcatggtacagctattggtgcagttgctagaaagctaacaaacataatatttgccgttttaagggataacaaagcttatatccctaatatttagttatcataattcataatttctaagcctaaattttaggcttatttgacgtgccgtaaattacaagattaattattttttgattttttcttgacatttgatagctggt

SEQ ID NO: 3316 - DNA, 1353 bp, unidentified
  source 1..1353: mol_type = unassigned DNA; note = element_4d6509b
  misc_feature 1: note = core
  misc_feature 2..71: note = LE
  misc_feature 72..1106: note = CDS
  misc_feature 1107..1353: note = RE
  misc_feature 1108..1343: note = bridgeRNA
tatgggatggcccgccctttcacccagcattgagtacaatgctaatatcgggaaagggaaaggaccagccgatgtctattgctattcttggaattgatctgggcaagaactcctgcagcgtggtcggcgtcaatacggcgggagcagtgatcgttcgtcgaacaatgcgtcgacagacgctgatcgactatgttgcgaagcttccttcttgtgtggttgcgatggaggcatgctgcggcgcgcatcatctcggtcggctgtttacagaacagggtcacgagatccgcttaatgtcgccggaatatgttcggccgtatatcaaggcccagaagaacgatgaccgcgatgcggaggggatcgctgaagccgcctctcggccaacgatgcgcttcgttgaactcaagagcgaggagcagctggatatacagaccttgcatcgggtgcgttcacgcctggtcgcggaaagaacaaaccttctcaatcagatgcgagcaatcttgcttgagcgtggtgtgattttccccgccggcaggctaaagttcgagcgagagctggatagaatgctttttgagagcaatgatgctctgtcgcctcgaatgcagcatcttatcggcgggctccgtgcagaatggaaggagctcgacgagaaaattggagcgctgaatcgcgagtttgttcagttggctcggaatgatgccgccgcgcgtcggttgacctcgatccccggcatagaggtcctcaatgccacggccctgattgcggcggtaggcgatgctagcggctttgctaaagcgcgcgatctcggctcctggcttggattggttccgagacaatacagcacgggcggtaagcctcgcctccttgggatatcgaagcgcggcaatacatatttgcggacgctgctaatccatggtgccagggcggcattgccctcgctttcagcgagcaacacgccgatgggtcgatggttgacggcgatgatcgaacgaggtgtgcatcgcaacgccatcgttgtggcgctggccaacaaactggcccgcatcgcctgggcaactttgcggaagaagacaaattttgaacgtggctacctggcagcgacggcatagtcgagacggcatatgctatcgtcatgtagctcaacgaggtttgcaggaaggatcgtgaagatggcctgacagtttaccggcgtttggaaagcccgtttaaaaaaatggcacttggtgccgacggtcttattgggctctgaacgcgcggatgtccatcttggccatgggggtacccatgagaccgtatacgttgacgcaaactgatcagaacaccgtaaaatcctcttgcagacgggcgggccatacg

SEQ ID NO: 3317 - DNA, 1401 bp, unidentified
  source 1..1401: mol_type = unassigned DNA; note = element_4d67a07
  misc_feature 1..2: note = core
  misc_feature 3..90: note = LE
  misc_feature 91..1128: note = CDS
  misc_feature 1129..1401: note = RE
  misc_feature 1170..1388: note = bridgeRNA
gatggggtggacgccccctgctcgccggcatcgatgtgccatagcgtggtcgtcgatgaagaatcgccacaaggagaggaggcgtccgccatgcaggttaccacgatcggtctcgatcttgcgaagaacgtgttccaggttcacggagtcgatgccaacggtttggttgttgtccgcaaggctctgcgaagagcgcagctcttgttgttcttcaaggagttagccccgtgtctcgtgggcatggaggcctgctcctcggcgcactactgggcacgcgagctaagtgcgctgggtcatacggtaaagctgatgcctccctcgtatgtaaaagcgtacgtcaaacgtggcaagaacgatgcggctgacgcggcggccatctgtgaggcggtaacgcggccgacgatgcgatttgtggagataaagagccccgagcagcaggccgttctcatgttacatcgaacgagagccttgctcatgcgccagcggacgatgacggtgaatgcgctgcgcgctcatcttgccgagttcggatttatcgccgcgcagggagccaagggcttggctgcacttatcgaacgcgtcttcggcagtgacggctgcgaggcacccctcattccgcctctggcccgacgtgcgctcgccccgctagtggcacaggtacaagaactgaggacgcaaatcaaagctatcgatgccgaactgctcgcttggcatcgaacgaatgttgccagcaagcgattggaaacgattccaggtgtcggcctcatcacggcaaccgccatcgccgcgaccgtcactgatccttcccacttcagatctggtcgacagttcgcagcgtggctcgggcttgtcccacggcaaaactcaagcggaggaaaggagcgactcggttctatctcgaagatgggcgaccgatatctgcgtacgctcctcgttgtcggcgcgacgtcggtcatacgctacgctcgcggtaagaatgccgccggcgcccaatggatcaacgcgcttcttgcgcggcggccggcgcgccttgtctccgtcgcgcttgccaacaagacagcgcggatcatatgggcggttctcgcccgcggcgagagctatcgcgctccgcttctcgcagcagcctaaaggatcgtaccagcgccggtcgaccgtgaaatcggaaatcgacagtttggcaagggcataatgacgtgatgcgaaaaggtcgaccccagattggcagagcccgtttagagtcgtgcgccgcaaagcgcgagagactgattgggagccaatccgcggactgcatcaaggccagcggtcacattgccgcatcgataggccggacatattgaccgcacccgaccaactcgcagaagcgctcaaaaaagcacttgcccgcagggggcgtccacatag

SEQ ID NO: 3318 - DNA, 1598 bp, unidentified
  source 1..1598: mol_type = unassigned DNA; note = element_4d6af83
  misc_feature 1: note = core
  misc_feature 2..104: note = LE
  misc_feature 105..1220: note = CDS
  misc_feature 1221..1598: note = RE
ataatatgaaatgacctcctagttgtcaaaacgtggatttaaactcataataagaatagaaaacaaaaagtgagttgttaccataacgacaataggaggtcactatgaaaagtataatttatattggaatggatgtccataagaagacatacagtttatgtgcattattgaaagaaactggtgagattattggtgaaactaagattcctgcagatgtaagtcttatcatcaagttcattgagaacgccaagaaatcagttgacagtgatgatgttcagatcaagacaggctatgaagcaggatgccttggctattctctttactggcagttagctgaaaaaggtattgaatgtgatattcttgcaccatcaactatgcaccgttctgcaaaaaataaagtggtgaagaatgataaaagagatgcaaaaaatattgcaactaacctagctaacggaacttataagtcagtttatgttccaacaaaagaagatgtggaaattaaagaatacataagaatgatgcatgactttaagattgaactaaagaaggttaagcagcatattaatgcatttctcttgagatttgggcatcagtatcctggtaaatcaaaatggattccagctcatattaagtggcttaaggaacttgaactaagtgatatgtatagagaaatacttgatgaatatctatcacagcttgaaatcctatctgaaaagatagaaagatttaaatatagattggaagaattatctcagaaggaaacatacaatgagaagataggtcaattgcgttgtatcaagggtattgatactactgcagctatgactatgcatgctgaaacatctgattttgatagatttcctactgccaatgcctttgcgtcttattgcggtcttacaccaggtgaagattcaagtggtgaatcatatcatagactgggcatcaccaagcaaggaaatagtatgattagaacaactcttgtagaggctgctcaggtacttgtaagagggactataggcaaaaaaggcaaaaaagtgaaatcaaaacagaaagatcaggatgtaaaggttatagattatgcagataaggcagttattagattacagaagaagtatcatcgtatgatttttagaggagttaaaagaaatgtcgcaattacagcagtcgcaagagagcttgcatgttttgtatggggaatagagacaggtcatatctcataacaatctttactaatgtttttaaacttgagagaaaggaaatgaagtgccgttaaatagataaaacaacccagcatcgaaggcatagatggacttcaaattaatagtacaggttcagctatctaagaaaattactttatggcattgtgagttcttactgaaagtcgcgatttagtaagaataatgaaagcaatgatccaagtgtacagattatagggctgtcgacgaaccattaactttttggtcccaatccacgtattacagtttggttaactgtcgcagaatctatatgatttgaggtctttctatgcccttgatgataaaacttaatagaaatattatgaaagttgatttatgtcttgacaacggtcatttcataac

SEQ ID NO: 3319 - DNA, 1532 bp, unidentified
  source 1..1532: mol_type = unassigned DNA; note = element_4d78b3c
  misc_feature 1..2: note = core
  misc_feature 3..255: note = LE
  misc_feature 256..1512: note = CDS
  misc_feature 1513..1532: note = RE
  misc_feature 6..243: note = bridgeRNA
ctaatgagagctaccgagttggtcatccggcagactcgggtttggtagccgcccggcgggtgagcacttgttgcgcctggacgtttgagtcctggtgaaagaccgtgcccctgttggtgggttgggagagttgatcgctgatgggatgtcgtgcccgtccatggtggcgtgagcactgttttcattaggtcgctgatggttctcccgcaggctgccggtgttcgagtacgagatgggtggggacgggagacgcaggtgcggctgtttgttggggatgactgggctgaggaacatcatgatgtcgagttgatggacaccgatgggcggcggttggccaaggcccggctgcccgagggggtggccggtgtgaggcggttgcacgcgatggtcggtgagcagctcggtgtgctcggtgagcgactcggccaggacggcgagggtgtggaggtgctggtcgggatcgagaccgatcgggggccgtgggtgcaggctctggttgccgccgggtacacggtgttcgcggtcaacccgctgtcggtggacgggtaccggcgacgtcacggggtgtccggcgcgaagagtgatgccggggacgcgcacatgctggcggacatggtgcgtaccgattcccaccagttgcggccggtcgcgggcgactccccggaggtggaggcgatcaaggtagtcgcgcgggcgcataagacgctgatctgggaacggacccggcacacccaacggctgcggcacgcgttgcgggactacttcccggccgcgttggaggcgttcaccgacctggatgccggcgacacgctggaactgctcggccaggccccggacccgcacgccgcggcccagttgtcgcgcagcaagatccgtgccgcgttgaaacgggcccgccgccgcgatatcgacaccaaggctgccgcgatccaggccgtgctgcgcggcgagcacctcgatcggccccctgtcatcgccgcggcgtatgcggccaccacccgctcggcggtggcggtgctgaccaccctgcacgagcagatcgccgccctggaaagcgaggtcggtgcctattttgggcggcacccggacgctgagatcatcctgtcccagcccggactcggcatgatcaccggtgcccgggtgctcgccgagttcggtgacgacaccgaccgctacgacaacgcgaaatgccgcaagaactacgccgccaccagcccgatcacccgcgcctcaggcaaaaagaagaccgtgcacacacgctacatacacaacgaccggctcatcgacgccctgatgtcccaagccttctccgcgctacgagcctcaccaggcgcccgcgcctactacgaccaactccgcgcccgcggagcgggacataaccccgccctgcgtcaactcgccaaccgactcgtcggcatcctccacggctgcctcaaaacccgcaccctctacaacgagacaaccgcctggtcacaccacaccaacaagatcaacaacactgcagctgcttgacatccaagctcatgggatgt

SEQ ID NO: 3320 - DNA, 1165 bp, unidentified
  source 1..1165: mol_type = unassigned DNA; note = element_4d7e79c
  misc_feature 1..2: note = core
  misc_feature 3..193: note = LE
  misc_feature 194..1078: note = CDS
  misc_feature 1079..1165: note = RE
  misc_feature 15..202: note = bridgeRNA
cttgtattatccctccagtgcagagaaaatcggccagttttctctgcctgcagtccgcatgccgtatcgggccttgggttctaacctgttgcgtagatttatgcagcggactgcctttctcccaaagtgataaaccggacagtatcatggaccggttttcccggtaatccgtatttgcaaggttggtttcactatggaacatgaacttcattatatcggtatcgacaccgctaaagagaaactggatgtcgatgtgttgcgtcctgatggtcgtcatcgcaccaaaaaattcgctaacaccactaaagggcacgatgagctggtgagctggctgaaaggtcacaagattgaccatgcgcatatctgcatcgaagcgaccggcacctatatggaacctgtcgctgagtgcctttacgatgctggctacatagtgtcagtcattaatcctgcgctgggtaaagctttcgctcagagtgaaggactgcgtaacaagactgataccgtggatgcgcgcatgctggcagagttctgtcgtcagaagcgccctgcagcctgggaagcgcctcacccgcttgaacgcgcgttgcgtgccctggtagtccgccaccaggcgctgacagatatgcacacgcaggaactgaatcgcactgaaacggcgcgggaagtccagagaccgagcattgatgctcaccttctgtggcttgaagcagagctgaagcgtcttgagaagcagataaaagacctgacagacgatgatccggatatgaaacaccgcaggaaactgctggaaagcatcccgggtatcggagagaaaacatctgcggtattgctggcttatatcggtctgaaggaccgcttcgcccatgccagacagttcgccgcttttgcgggtctgacaccacggcgttatgaatcaggtagcagtgtgagaggggcgagccggatgagtaaggccggacatgtgtcgcttcgcagggcgttgtatatgcccgcaatggtagccaccagtaagactgagtggggacgggcgttccgcgaccgtctggcggctaatggcaagaaaggaaaggtgatttagcgtgagtttgggtttacctacctgtgtctggcatgcctgcaatccgggaaaccggaccaggaaaaaacttgcaggccataacagtat

SEQ ID NO: 3321 - DNA, 1493 bp, unidentified
  source 1..1493: mol_type = unassigned DNA; note = element_4d80ff6
  misc_feature 1..2: note = core
  misc_feature 3..243: note = LE
  misc_feature 244..1473: note = CDS
  misc_feature 1474..1493: note = RE
  misc_feature 7..238: note = bridgeRNA
ctaatgggagctgaccgggttcgtctggctggcagactcggtgcctggtagctgctggtgggtgagcactcccgaagcctggcacgttgatgtctggggtcagagcgtgcctccactggtagccagggactagaccgctgatggggtgtcgtgcccgccgtctggcgtgagcactggtccattaggccgctggcaggttcctgcgggctgctgacttgggcggataccgggtggaggggtgcaatgctgttcgtgggagacgattgggcagaagatcatcacgatgtcgaggtgcaggacgagtcgggccggacggtgaagaaggcccgcctgcccgagggcgcggccgggatggcccggttccacgagctggccgcggcttgcctgcccggtgacgctggcccgtcgcaggtgctggtgtgcattgaggccgcccggggtccgtgggtgcgggcgctggtagcggccgggtaccgggtgtatggggtcaaccccaagcaggcggcccggcaccgggagacgctgtcggtatcggggaagaaggacgacgggttcgacgcgcacgcgctggcggatatggcccgtacccgccggcatcagctccgccacctggtggctgactctgatgtcgccgaggcggtcagggtcgtcgcgcgggcgcaccagacgctgatctgggagcgcacccgtcacatgctgcggctgcgggccgcgctgcgcgagtacttcccggccgcgctggccgccttcacgccactcgggctgactgcggcggacaccctggaactgctcgcgatggcccccgatccgcaggccgcggcacggctgggccccgggcagatcgccgcggtcctggccagccaccgccgccgggacgtgccggccaaggctcaggcgatctgccaggcgctcgcggtcccgcagctagggcagggcgacgagatcatcacctcggcctacgccgcgacggtgcgcgccgagatagcggtcctgcaggccctcaacgctgagatcaagaccatggaagcgcaggtcgaggcgcattttcgcaggcacccggacgctgagatctacctgtcccagcccggcctgggcgtgatcctcgccgcccgggtgctcgcagaattcggcgacgccgaaggccgctatgccaccgcccgttcccgcaagaactacgccgccaccagccccatcacccgccagtccggcaagtccaagacggtgcacgcccggttcgtgcacaacgaccggctcgtggacgccgtgcacatgcaagccagcgccgcactgctgcacgaccctggcagccgtgcctactacgacgaactccgcagccgcgacaccggccacaacgccgccctccgccaggtcgccaaccgcctcgtcggcatcctgcacggctgcctcaagaccagcaccacctaccaccccaagaccgcctgggcgcaccgcaactatgacctagccgcttgacattccagctccaggggtgt

SEQ ID NO: 3322 - DNA, 1167 bp, unidentified
  source 1..1167: mol_type = unassigned DNA; note = element_4d8991a
  misc_feature 1..2: note = core
  misc_feature 3..177: note = LE
  misc_feature 178..1146: note = CDS
  misc_feature 1147..1167: note = RE
  misc_feature 34..198: note = bridgeRNA
cttgtatcttgttgttcagctaaaataagaatgattagatttggcaaggtgtgtgtagcctgatgtccctaagggttcatagcccgagtgttagcgaatggcacacacactgagccactcatcagaaacccgaacagttgtccgtattccataacgtattcgcaaggatgggtaattatgagtcagccaaatcctctctgtgtgggaattgatgtttccaaagccactctggacgtagcggttaatagcagtattgtgcaattttctgtcagcaatgatgctgatggatttgatgctattattgcggaattgaaaaaatatcctgttgcattgattttgatggaagcaacaggtgggctggaagctgctgtagcttgtgcacttcaggcggaaagttttgaagtcgcggtgataaatccaaggcaggctcgcgattttgccaaggcaatgggatatttggcgaagacagatcgtattgatgccagagtacttactcaaatggccgaagttattaaccgccatcctgaacgtgaacgttttattaaggcgatacctgatgctcaacgtcagattctcgcggcaatggtagtgcgcagacgtcagttgattgcgatgttggttgctgaacgcaatcggttatacccggctcaccctcaaagcaggaaaagcattaatattattattggtgctctggaaatagaactttcgcgaatcgatgatgatatgaacaaccatatcagaatccacttcaaagcactcgctgaacgtttaagccgcattaaaggtatcggtactatgacggttgctgcactgctggcagaggttcccgaacttggtcatctctccagacgaaaaattagtgcacttgttggtgttgcgccggtaaatcgagactctggcatgatgagagggcggcgaacgatctttggcggcagggctggagtaagaagtgcgctgtatatggcaaccctggtggcaacccgctttaatccagtcatcagaggtttttacacaagactggttgaatctgggaaagtcaaaaaagtagcactggttgcctgcatgagaaaattgttgacgatccttaatgctatgctgagaaaaaacgaagactgggatgagtcgtatcaccaggcagcgacataattttattgttcaagacagttg

SEQ ID NO: 3323 - DNA, 1542 bp, unidentified
  source 1..1542: mol_type = unassigned DNA; note = element_4d89ed3
  misc_feature 1..2: note = core
  misc_feature 3..241: note = LE
  misc_feature 242..1423: note = CDS
  misc_feature 1424..1542: note = RE
  misc_feature 3..217: note = bridgeRNA
cttgtattatagagtagtagttattatagcccctctccaagggctgtgctacactgtaagggatgctgtggattggttttggtctcctaccgcacagacggttccagaaaggctccaaccacagccctttgcagttttgttaatcagttagataccgccagacggtttatgtggaacaaggttacaaggcaaagtgtttgtggataacagcatcaccattttctctgctggaggtatcatcatgatctgtgttggaattgacgtggcaaaggacaagcacgattgctttatcctcagttcagaaggcgaggtgttggcggacgtgtttacgatccccaacaaccgggacggctttgagaccctgttgcggcgtatccgcacctgtgtgctccctgctgacatagtaaaagtagggcttgaggctaccggacactacagctacaacattcttgggtttcttcttgacaaaggtctggccacctacgtcattaaccctctgcacaccaacctcttccggaaaagcctcagtctccgaaaaaccaagaccgaccgaatcgatgcacgaaccattgcagctatgctcatgtctgatgtggacctcaagtcctacacagacacagcataccacaacgaagagctaaagtcactcacaagatacagatttgataaggttcggcagaaagccaaactcaagcaatctgtttctcgtttggtgaacatcctgttccccgaactggaaacgctggttccgacccttcatatcgcctctgtctacgcacttctcaatgagtttccaagcgctcagcagattgccgaagctcatttgactcatctcaaagccttgttgtcaggcgcttccagaggacactacggacgggacaaagctgtggaaatccgtgacgccgcaagacgctctatcggctcagggatgcctgccaagtcgctggagctgcgtcacaccattcagctcatccaagtgctggacacggaaatcgatgagatagaagctgcgattgaagaaatcatgtctggcattcagtcacccatcacaaccattcccggcatcgggattcgcatgggtgcgatgattctggcagagattggcgacttctccaacttcgactcaccggacaagatcctggcctatgccggcctttctccatctacttacgaatccggaaaactgaaggccactggagcctactcacacatggaaaagcgtggatcacgctacctccgatacgccctgttcaacgccgcaaaatatgtctgcctctgggatccactcttcgcagcttacctcgccaagaaacgtgccgagggtaagcattacaacgtagccatctctcatgccgccaagaagctcgtaagggtcatatacgcgttgcagaagtccgggaaggcgtaccaatctgcggcttaaccatttctctcatcatcttcattcgggcgccatatgacgctctgctttgtcatgccgttgttgctctggctgccattcctcaacttctctcatttggggcttgacttttaatagttagt

SEQ ID NO: 3324 - DNA, 1390 bp, unidentified
  source 1..1390: mol_type = unassigned DNA; note = element_4d8f74d
  misc_feature 1..2: note = core
  misc_feature 3..90: note = LE
  misc_feature 91..1116: note = CDS
  misc_feature 1117..1390: note = RE
  misc_feature 1087..1377: note = bridgeRNA
agatggaatggttgccgccctccccaaacggcatcgtagtgtgccaaggtggtgatgtttacagccacaaagcagagaggacggcaacatatggatacgatgattggtgtggatttggcaaagtctgtttatcaaatccacggagcttcgatgacgggcgaggttaagttccgcaagaagctgacgcggcctcagtttctgagatttatgtcggagctggccccagcagttgtagtaatggaggcctgtggtggtgcccattactggtcgcgcgtgatggaagagctggcgcatgaagttaagttgatcgcaccgcaatatgtgcgcccgtttgtgaagcgacaaaagaatgatgcggctgatgccgaggcgattgttatcgccgcacaacgcccagagatgcggtttgtggagcccaagagcgaagaacagcaggcccgcgcagctctgtttcggtcgcgtgaccgcctcgtgaggcagcgcacggaactcatcaatgctctgcgcggtgtgttatatgagcatgggcacagttttccgaccggcgcgcggaaccttgggcgcattcaaactctgctttgtggcgcagaaagcggattgcatcctttggttctggaagactgccgggacctctttgagcagattaccgagaagacgacgcgtattgaggcccgaaccaagaaagcaacagccttgtctgcgcaggcggacacgacacggcgattgcagacgatcccaggtgtcgggccattgacggctttggccgtagaaacctttgctcctccaatggagagcttcaaatcggggcgcgatttcgcggcttggctagggattgtgccgcgccagcattcttcgggcggcaggcaacggcttggaaagatatcaaaggcggggcagggggacataagacgtcttctgatcatgggcgctatgactaggctaacgccaagagggcgacttgggatcaccccaggcagttggctggcgcgcatattggagcgcaagccaaaaatgttggtcgctattgcattggctaacaaaatggcccggatgatttgggctatgctgacgaaaaatgaagactatcgggaaccggcacagatggctgcggcatgattttcatgcggcgttgcgaaatctgaggccggtaaacgggggtgtaagaagtcgatgacctgaatgggaaaatgatcgaacagatctgggttgggaaaaccagttgctccccttgagcgtcatagctcgcagggtagatttggacccgatccgctgatctccataccggccagcggcttttagaatgccgcacacaaaggcctaatagaagaccgcactcgatcacacctcatcaacgtcaaaaacatcttgcatcaaaggcggcaaccataga

SEQ ID NO: 3325 - DNA, 1549 bp, unidentified
  source 1..1549: mol_type = unassigned DNA; note = element_4d900c8
  misc_feature 1..2: note = core
  misc_feature 3..77: note = LE
  misc_feature 78..1241: note = CDS
  misc_feature 1242..1549: note = RE
  misc_feature 1257..1475: note = bridgeRNA
agatcccatgggtgtgtggatggcgaccggcgctctgacagagtgcggttgctcacccccccactccggaggcgacgatgcacgatgacgcacctcggcccgcacgggccgctatccgtaccgatcttggcgcggtctttgtttccatggaactgtctcgctcaaactggctggtcacatccctgtcccccggtgccggggagaagatgtccaagcattcggttgcggcgagcgatgtcgcgggcttgcgcgagcggttcgcccggctcaagcagaaggcgctggcacgaacggggcaggacttcccgatcatagtcatccaagaggccggactggacggcttctggatccaccgcgtgctggaaagcgaagggatcgaaagccacgtggtcgacgccgcgtcgatcttgacttcgcgccgacggcggcgggcgaagaccgacaagatcgacggcgagacgctggtccgcacgctgttggcctataagcgcggtgaaccgcgggtgtgctccatggtcaaggcgccgacacccgaggaggaggatcgccggcggatctgccgtgagcgcaagatcctggtggccgagcggatcgagcacgtcaaccgcatcaaaggtctcctcttcgctcaaggaatcttcgattaccagccgctacgccgcaatcgtcgagagcggctcgaagtcttgaagacgggagatggccgccccgtgcccccgcgcctgaaggtgcaaatcagccgcgaactcgatcggcttgagaacgtcctgacgcagctggaggcggtcgagacggagcgggacgccttgatcgagcaggcgagccaagacgcctctgcaccggcggcgatgctgacgcagctgaaggggatcggcccggagttcgcggctatcctctggtctgaagggctattccgcagtttcgacaaccgaagacaagtggcggcctacgccgggctggcgccgacaccctggcaaagtgggtcggtcgatcgcgagcagggggtgtccaaagccggcaatccgcggctgcgaacggcgatgatccaactcgcttggctgtggctgcgacaccaaccaggctcagcgctcagttgctggttccacgagcgggtcaaacgtaatggcggccgcttgcgaaagacgacaatcgtcgcgttggcgcgaaagctcctcatcgccctttggaaatatgcaactaccggcgtcgtcatcgaaggcgccctggcgaaggccgcctgaggacagaggcccttgacccaatccccaggacctgatcagtcctgacggatccaggtggacgaaccgaacaactctatggcttgaacagccgatcggcagaatggtctcgtcttcctgagccctacccgccgcaagcgggatattggtgcagccacttcgtgcggcgaccgaatgtgaggttgatctggtatggaaacgatcaggtcatggaatcgggctcagaccgtggataccgaaacagttcctacagttttaccggtcgcggcgcgttggtgaaactaaccccttgatccgaacatgcccatgtg

SEQ ID NO: 3326 - DNA, 1183 bp, unidentified
  source 1..1183: mol_type = unassigned DNA; note = element_4d9dc48
  misc_feature 1..2: note = core
  misc_feature 3..205: note = LE
  misc_feature 206..1168: note = CDS
  misc_feature 1169..1183: note = RE
  misc_feature 6..210: note = bridgeRNA
cttgtatctttaaaccggcccagcgcggtagagtctgaacgccgttgaggcggccagacgggcccgtgcagtttggtagcggctggggtgatggagcccgtgactgagtacagaacgcacggccgccgcgctggtcttcgtgaagcccgaacggttacgcgcgccaagcttgagcgcgcatgcacaagcaagggatctgaagatcatgtctgttacctcaatgacggtgggcatcgacgtagccaaggcgcacatcgatgtctgtgtgctggagcccaagagcggggcccagcggtttaccaacgatgctgaaggccactcggcccttgcagcgcttttgcagcccctggatgtgggcctggtggtaatggaggccaccggtggctacgaggtggcgctggcgtgtgccctgcaggccgcaggcctgcccgtggcggtgctcaatccgcgccaggcgcgcgacttcgccaagtccatgggccggctggccaagaccgacgcggtcgatgcacgcatgctcgcggagctggccgcggtgctgctgcgccgcgaagacctgagccgcttcctgcgccccctgaccgacgagtgccagcagtggctggctgcgctggtcacacgcaggcgccagctgctgaccatgcttcattccgaacgccagcgcctgcagatcacccccgcgaagctgcacccaagcatcgaggccatcgtggctgccatcaaggcacagctcaatgagctggagacgcagatggtgggccatgtgcgggagcacttcggcgatctggaccggctgctgcagtcggccgcaggcgttggtccggtggccagcgccacgatgattgccgagttgcccgaactgggccggctcaaccggcgcgagatcgcagccctggtaggcgtggcgcccatggccaacgattccggcagcagcaagggccgacgacgggtgcaaggaggacgcttcgaggtccggcgtgtgctgtacatggcaacgctgactgccactcgctacaacccggccatcaaggccttctacgaacgcctcaaggctgccggcaagctgcccaaggtcgctctggtggcgtgcatgcgcaaactcctgaccacgctcaacgccatggtcagaaccggcaaaccttgggataaatcgctgcacggcacttgactcggaagacggtta

SEQ ID NO: 3327 - DNA, 1167 bp, unidentified
  source 1..1167: mol_type = unassigned DNA; note = element_4d9f5d6
  misc_feature 1..2: note = core
  misc_feature 3..177: note = LE
  misc_feature 178..1146: note = CDS
  misc_feature 1147..1167: note = RE
  misc_feature 34..198: note = bridgeRNA
cttgtatcttgaaaacgatttagaatagctgtgattggatttggcaaggtgtatgcagcccgaagtcccctagggtctaaagcccgcccttcagcgaatggcgcatacactgagccactcatctgaaacccgaacagttgtccgtactccataacgcatttgcaaggatgggtaatcatgagtcagccaaatccactttgtgtgggaattgatgtttcgaaagccacactggacatcgccgccagcagttatattgaacaatttacagtcggcaatgactctgatggttttgatgccattatcaccgaacttagacagcattctgtagagctaattctgatggaggcgactggcggacttgaagccgctgtggcctgctcacttcaatctgaaggcttcgacgttacggtgatcaatccccggcaggctcgtgactttgcccgcgctatggggtatctggcaaaaactgaccgtattgatgcccgagtacttgcacaaatggcagaggttattaatcggcatccagaacggaaacgctttatccggatactgccagaagcggagcgtcaggttcttgctgcgatggtggtacgcagacgacagttgattgcaatgttggtggcagaacgtaacaggctttattctgcccacccacaaagtaaaaaaagtatcagtatcatcatcaacgcactggaagatgagcttgccagaatagatgatggtatgaataaccacataaaaagccactttaaagatctgaccgccagactgagcagcattaaaggagttggaaccataactgctgctgcattgctagccgaggtccctgagctgggcagtctctccaggcgagcaatcagtgcgcttgtaggtgtcgcccccataaacagagactcggggaccatgcgcgggcgtcggaccatctttggtggaagggatggggtccgcacgacgctttatatggccgcgcttgtggcaacccgctttaaccctgtaataaaaaacttttatatgcgcctgcttgcagccggaaaagtcaaaaaagtggcattggttgcctgtatgcgtaaattactgaccatcctgaacgcgatgctcagaaagaacgaagaatgggatgagtcataccatcacgttgcgcaataattttaacgctcaagacagttg

SEQ ID NO: 3328 - DNA, 1375 bp, unidentified
  source 1..1375: mol_type = unassigned DNA; note = element_4da1e50
  misc_feature 1..2: note = core
  misc_feature 3..88: note = LE
  misc_feature 89..1117: note = CDS
  misc_feature 1118..1375: note = RE
  misc_feature 1091..1361: note = bridgeRNA
agatggggtggatgccagccttctccgacggcatcgcaatgtgccaagcttgtggtgttagagccacgcaaaggagaggcaggcatccatggaaaaagttaccatcattggggtcgatctggcaaaaaacgtctttcagctgcatggagccgcggctgacggatcagtcgtgttccgcaagaagctgacgcgcctgcagttttgcaagttcatggcgggtcagccagcatgtgtagtggcgatggaggcgtgcgccggttcccattattgggctcgcgagatggtccggcttggccatcagccgaagctgattgcacctcggtatgtcaaggcgttcatcaagcggcagaagaacgacgcagcggatgcggaggcgatcgtcgaggcagcgcaacggccaacgatgcgcttcgtcgaaccgaaaaccgaggagcagcagtctcggtccataatgtttcgcacccgagaacagctggtcaatcagcgcactgagttggtcaacgcattgcgtgcgcacctttatgagttcggctacatcgcgccgcagggaattcgttatctgagccgacttgaatgtttcgttgaggacgagaacgccaagttgcctgatctggcccgcgagatctgccgcgatctgctggaccagatctaccagctgaccggccggatcgacgcactgaggaagaagatcgatgctctatcgagggaagctgaggcatctcggcgcttgcaaaccatgcccggcgttggccccatcgccgcccttgccatcgaaacctttgcgccaccaatggagaccttcaagtgcggtcgtgacttcgccgcctggcttgggctcgtcccgttgcagaagtcgaccggcggcaaacaacgactaggcagaacctcgaagatgggccaatgcgatattcgacgattgctcatcattggagccatggctgtggtccgatgggcatctcggaagggcgcgccggaaggctcctggctcgcccgcatgatgccgaagaagccgcgcatgctcgtggccattgcgctcgccaacaagatggcgcgtggcatctgggccatgctgacaaagaaagaggattaccggaatccggcgacggtgtctgtatgaccagcgcatctgaagccggtctgtcggggatgtgaggaaggcctgaaccgcatgggcaaatcgatcagatcggggtcaggaaaaccagaatgacgcaccgagcctcacgctcgctttcaagatttggacctgatccgcgtatcaccataccggcccgcggcacgtcatggccgcaaatcaaggcctgacacaagaccgcactcgatcacgcgttcaaaggttcaaaatcttccttgcaaaacggctggcatccacaca

SEQ ID NO: 3329 - DNA, 1341 bp, unidentified
  source 1..1341: mol_type = unassigned DNA; note = element_4da92c6
  misc_feature 1: note = core
  misc_feature 2..272: note = LE
  misc_feature 273..1298: note = CDS
  misc_feature 1299..1341: note = RE
  misc_feature 93..249: note = bridgeRNA
ctctaagtttgcagaagaaagcaattaggctaaataatcaaggtaaaactatgattgataaagacagtttcgtacccttgttgtaaaaaggtagaatcggtctgtcgaagaggtaaaccagctaatgacccagccgtaaagctataaatcgtttaggtcctcatcgacatagttgcaaagaccagatagaaagttatcggctctgagccttgttagagtgttagtccatacaactattgaccaattctacacaataaaactcgtacaaagttatgaagaatttatttatcggagttgatttttcgaaagaaaaagttgatgtggctatcctttttgcagacggactggtagaaaccgctgctagagtgttcaacgagttcaagacaaccgtgtctggctataggcagttggtcaagtgggttgagcagaattcctgcggtatcgactcgtccttgtggctcttctgtggcgagaacacgggcgactacagcaaggggctgtgcaacttcctctacggtaaaggctacgacatgtggcttgagaacgcaaagagcatcaaagacgcatctggtcttagacgattgaagtctgaccgtgctgacgcctcgatgattgcagaatacgccatgaggaattacgataaagccgttatgtacgagcctcttagcgagtcgcttacacaactgcgtgagctgttcctataccgtcagatgatcgtaagacacagatgcagtttccaggtgcgtagaggcgaaaagcgactcactatggagaagtcgccagtcaagacaatgatttcgcagagcggacggcacatcgtctctgaactcaataaggagatagagaagatagataagcgcattgccgatctcatcaagtcggacgaggaactcaccgaggtgttcaccatcgtgacctcggtgcctggcataggaacgcagaacgctgtgtgcctgatggtgtacaccgacaacttccggcgtttcaactacgactcacgcaagattgcctgctattacggcctagctccattcggcaaagattcgggaaccagtgtgcattccgatccgcatgtacattatatggcgaaccgccagataaaggccatgctgacgcaagctgcactatctgccgtcaacttcaatcccattatggcgaggtactacatgcgcctcgtagaacgaggaaagaagaagcaggttgcactgaacaatgtcaagaacaaacttgtacatttggtcacagccatggtcagaaatcgccaaacattcacccctgaatataaaatctcagcataaattgaaaataatggtcaaaacatttggatattaacatagaaag

SEQ ID NO: 3330 - DNA, 1350 bp, unidentified
  source 1..1350: mol_type = unassigned DNA; note = element_4db2ece
  misc_feature 1..3: note = core
  misc_feature 4..84: note = LE
  misc_feature 85..1104: note = CDS
  misc_feature 1105..1350: note = RE
  misc_feature 1128..1337: note = bridgeRNA
ggatggtgtggatggctcctgcaccaccggcgccgaaatgcgccatactgcaattgtcatatgctgttcgagaggagtcaccccatgcaagttacaacaatcggccttgatttggcgaaaaacatatttcaggtccacggcattgatgccaacggtaagatagcattcaaccggtctttgcgtagatctcaagtcctcgcattctttaaaagcctcaagccatgtttagttggcattgaagcctgcggtaccagtcattactgggcacgcgaaattagcaatttaggtcaccctgtcaaactgatcccacctgcatacgtcaagccatatgtaaagcgcggcaaatctgatgctgtagatgcggaagctatctgcgaagccgtaacccgcccaactatgcgatttgttgaaatcaagaccccggagcagcaagcaatattgtcggttcatcgcactcgaaatcttctggttcgacaacgaacccagttgatcaatatgctgcgggcacaattgggtgagtttggcattgtcatcgcgcagggtgtttatcacgcgttacattttgcaaaagaatgtctgaacggagaacagccagacattccctcaattgccagcgatgtgattttcgaactctgtgagctgttgcggcaactacatgaaaaaatcaaccgttgtactcgccagatcaaacaaattgctaagaatgaaagccgggtggcgctgcttgagacaattccgggagttgggcctgttattgcgtcagcgattgttgcaacgattggcagtggcaaacaattcaagaatggccgacagttttctgcttggctggggcttaccccgctcaacaaatcgagcggtgggaaagagcggttaggtcacatatccaagatgggagaccaatatattcgtcgtctattattcctcggcatgacttcccgtattcgtagaatccaggcagaaccggagaaattcgatccatggtttgcagatatgttgtcgcgcaagccacgcatgctggctgcgatagccatggccaacaagacagctcgaatgatttgggcagtcctaacgcgcaacgaaccttacaaggtaagaacagtctgaactgaaacaaaccaaacgaaataggataattgcaagacccacgaagtgatggaaattgtcagcccgaaaccaagaaacccgagaaaggtcccgaacgctagctgttcgatatgcggaatgggacttggttagtggaaaccatcagggccagcggccatgtatgtcgcgtcaacaggccgaacacaagaccgcttctgacaatggaaaacaccaaataggacttgcaaaaaaggagccatccacaca

SEQ ID NO: 3331 - DNA, 1491 bp, unidentified
  source 1..1491: mol_type = unassigned DNA; note = element_4dba40d
  misc_feature 1..2: note = core
  misc_feature 3..244: note = LE
  misc_feature 245..1471: note = CDS
  misc_feature 1472..1491: note = RE
  misc_feature 10..244: note = bridgeRNA
ctaatgacaaataacgagttgcctgtgtggcgactcgggactggtagccgccagcaggtgagcacccccaagatctggaccccgagtcctatcgaaagaccgtgcccctcgttggtagccgggtgagttgatcgctgatgggatgtcgtgcccgctgacctgggcgtgagcactgattcattaggtcgccgacccctccctcacaggctgccaatggtgatcgatatccgagacaggagacgtgttgctgttcgtcggagacgactgggccgaagaccaccacgacatcgaactaatggatgcctcaggccgcagactggccaaagcccggctcccggagggcgtggcgggcatggcccgcctgcacgctctcatcgccgagcacttcgaaagcgacctgggcgaagacgccgaccaggtctcgatcggaatcgaaaccgatcgcggcccgtgggtccaagcgctcatcgccgctggttaccgggtcttcgcaatcaaccccttgcaggcctcgcgttaccgggatcggcatgcggtctcgggtgccaagagcgatgccgccgatgctcatgtgctggccgacatggtccgcaccgactcccaccagctgcgcaccgtggccggcgacagcgccgaggcagcagcaatcaaggtggtcacccgcgcacataagacgctgatctgggaacgcacgcgccacctccaacgcctccgacatgcgctacgcgagtacttccctgccgcgctggaggcgtacgacgatctgagcgccagcgacgcactggaactcctggcgctcgcgccggatcccgcctcggccgcgcagctaccgatcgcgcagatcaccgcagcgctcacccgggcccgccgccgcaacctggctgacaaggccgccgccatccacgcagcactgcacgccgagcacctgggccaaccccaggcagtgacaaccgcctacgccgccacggtccgcgcctcgatagccgtcctgaccgtcatcaacgagcagatcgccttcctcgaagaacaggtggaggcgtccttcagcgagcatccagccgccgagatcatcttgtcgcagccgggtctgggaccaatcgtcggcgcacgtgtgctcgccgagttcggcgacgatcccactcgatacgccaatgcgaaggcccgcaagaactacgccggcaccagcccgatcacccgcgcctccggcaagaagaaggtcatcttggcccgctacgtgcacaacgaccgacttgtcgacgccctcggcacccaagcgttctgcgccctgcgaggttccccaggcgcccgcgcgtactacgaccggctacgcgcccgcggagcgggccaccacaccgcactgcgccaactcgccaaccgactcgtcggcatcctccacggctgcctcaagaccggcacgccctacaacgaggccactgcctggggacaccacgctgcggtcggtggcgcttgactccccacatcctgggatgt

SEQ ID NO: 3332 - DNA, 1618 bp, unidentified
  source 1..1618: mol_type = unassigned DNA; note = element_4dba94b
  misc_feature 1: note = core
  misc_feature 2..272: note = LE
  misc_feature 273..1511: note = CDS
  misc_feature 1512..1618: note = RE
  misc_feature 12..292: note = bridgeRNA
cctgttactatatatttggttggggacatggccaccagccatgtctttatccatcttgttgccaaaactgttagaatgagaggacaagcggcctgacgtatttctccaaggactttgcgtccgttagaaagtcagtcagccatcctcttgttcgcagcgttcgatttgtgcaggtagagccgccgcccggcgcgttcgcgtcatcaaacagatagaatcggcaatgaaaagggtggttcgccaattgtaaatctgtgatgggagcgtgggttatgaacgcagtcggaattgatgtttccaaagggaaaagtatggtgtcggtcattcgtccctttggggaactggtggcaaagccctatgaggtgcgccacacctccagtgaactcagcgagctggcaaagcatctgaaaagtctggagggtgaaacgcgggtggtgatggagcacacggggcggtactatgaaccggtggcccaactgctccatgatgccggtatctttgtaagcgcagtaaatccgctgctcattaaggaatacggaaacaattctttgcgcaaggtgaaaaccgatagagcggatgcgcttaagattgcccggtatggtcttgacaactggacggaattgcgggaacatactcctatggacacgattcgttaccaactgaaaagcatgaaccggcaatacggtctgtacaccaagaacaagacggcgatgaagaacaatctgattgccttgcttgaccaaacctatcccggtgtaaacgccctctttgaaagccccacccgcgcggatggaagccagaagtgggtggattttgccgcgtccttttggcatgtagactgcgtgagaggcctgggacaggctgcatttgccgagcgttaccgcaagtggtgcaagcggcacggatacaatttcaacatcggcaaagccattgaaattcatacagaggcaaaagagcttatctccatgctgccgaaggatgcgttgtccaaggtgatggtgcaggaagcaatcacacaactcaataccgtatctaaaacggtagagctgtttcgcgcggaaatgaatcgacttgcaatggagcttcctgaatacgatatagtcatgggattgtacggcaccggaaaatctcttggccctcaactaatggctgagattggcgatatccgccgctttgcacacaagggctctttgacggcctttgcaggggttgacccgggagcgaatcagtctggaacctatgaagcgaaaagcacacgttcctccaaacggggttctcctgagctgcgaaagacgctctttgtgcttatgacggtgctgttacaaaaagccccaccggcagatcctgtgtttcagttcttggacaaaaagagggccgagggtaaaccttaccacgtttacatgaccgctggctgcaacaagtttctgcgcatttattacggcagggtgaaagagtatatgaatactctggacacacctgtagatacagattcaaccggcctttcgcgttaaatcctttctacatagttcaggtcagcgctccggcggtgacctttttgtgttgctctattttgcgctgcaactttccctcatttgcctattgactttttatttgcagg

SEQ ID NO: 3333 - DNA, 1323 bp, unidentified
  source 1..1323: mol_type = unassigned DNA; note = element_4dbcec0
  misc_feature 1..2: note = core
  misc_feature 3..67: note = LE
  misc_feature 68..1093: note = CDS
  misc_feature 1094..1323: note = RE
  misc_feature 1090..1312: note = bridgeRNA
ttatggaatggctcgcccactcaggctcctgcacaatggcgcaggttcaatcgagaaaggacgggtcatgcagatcgcattattgggaattgatctcggcaagaatagctgcagcgtcgcaggcatcgatgccagcggcgaagttcttctgcgccgacgactgaaccgcaacagcattcccaaattggctgcgaggtttcctggatgcatcattgcgatggaagcgtgctgcggcgctcatcatctcggccgggtgttgcgaaagcagggtcacgtagttcgtctcatgtcgccggagtacgtgcgcccctatgtgaaggcgcagaagaatgacgatcgcgacgctgaggcaattgctgaagccgcgacccgaccaacgatgcggttcgtcgccctcaagaacgaggagcaactcgacctgcagagcctccatcgcgccagagatcgtttggtcggtgaacggacatccctgatcaatcaactgcgtgcaattcttctggagcgcggcatcacaattccgcagggccgtcagaagctcgagagcatgcttccgcaactgatcgaaaacagcggcgatctgttgagtgatcggatccgccgtttgctcgaagagatgtggcaagagcttcgggatctcacccgacgcatcagatcgtttgatgatgagttcactgcctttgcccgcaatgatgcctcctgtcagcgactggaatcgattcccggcataggatcattgaacgccaccgcctttgtcgcggcgatcgacaaggcgcaggcctttgctcgcggccgagatcttgcggcctggctcgggctggtgccgcggcagatgaccaccggcggaaagcctcggctgttgggcatcagcaaacgggggaatgcatatctgcgccgtatgctgatccatggtgcaagggcagctatgccgcatctggcgcgaacccagaccgcaaccggctcgtggctgcgccgactgatcgcgcgcgcccatccgaatgtcgtcgtggtcgcgttggcggcaaagatggcccgaatcatttggacagttttgcagaaacgtgttgcgttcgaacacgcagccgcggctctgtaatcgcggcgtagcggcctcgcgaatatctgcgggtggaatgaaaaagatggcctgacagttagacgacgccttgaaaacccgatcaaaaagatggcggacctcgccggagcgtttatgtggatcagggcgtgcggagctccatcttggccaaggcgtgccttgagaccggatacgttggtgcagattgatcagcctccttcagaccgcttgcggacgggcgagccatacgt

SEQ ID NO: 3334 - DNA, 1514 bp, unidentified
  source 1..1514: mol_type = unassigned DNA; note = element_4dc8e7d
  misc_feature 1..2: note = core
  misc_feature 3..252: note = LE
  misc_feature 253..1494: note = CDS
  misc_feature 1495..1514: note = RE
ctaatgagagctagcgagtcggccgtcgggcagactcggtccggtagccgccggcgggtgagcactcgtgcctcttggatcccttccgggggagtcctgtcgaaagaccgtgcccctgccggctggccgggagagctgatcgccgctgggatgtcgtgcccgctggtgacggcgtgagcactgagtcattaggtcgctgatggttctcccgcaggctgctggcaatggccgatcgcgagggcgggagaagaattgaaactgtttgccggagacgactgggccgaggagcatcacgatgttgagctgatgggcatcgccgggcggcggctggcgaagggccgcctgcccgagggcgtggcaggtatcgccaggctgcacgcgatgatcggcgagcagctcggcgaggacgctgatgaggaggacgccgggcaggtcgcggtcgggatcgagaccgaccggggcccgtgggtgcaggccctgatcgccgccgggtacacggtgttcgcgatcaacccgctgcaggcatccaggtaccgggaacgccatggcgtatccggcgcgaaaagcgacgccgccgatgctcatgtcctggcggacatggtgcgcaccgactcccaccagctgcgtccggtcgccggggacaccgccctggccgcggcggtcaaggcagtgacccgcacgcacaagacgctgatctgggaacgcgcccgccatggccagcggttgcggcacgcgctgcgcgactacttccccgccgcgctggaggccttcggagacctggacgccgccggcaccctggagctgctggcccgcgccccggacccggcgtccgcggcccggctgacgaccgcgcagatcagcgctgccctcaagcgcgcccgccgccgcaacatcgcagagaaagccgggcagatccaggccgtgctgcgcgccccgcacctgggccagcacgacatcgtgacggccgcctatgccgcgtcggcccgggccctgatcgcggtcctgaccacactgaacgagcagatccaggccctgcaagggcaggtcgaggcctattttgggcagcacccggacgctgagatcatcatgtcccagcccggcctgggaccagtcctcggcgcccgggtgctcgcagaatccggcgacgaccccagcaggtacgtctccgcgaaggcccggaagaactacgccggcaccagccccatcacccgcgcctccggcaagaagaaggtcgtcgccgcccggtacgtgcgtaacgaccggctcatcgacgccctcatgggccaggcttacaccgcccttaccgcatcccccggagcacgcgcctattacgaccgccagcgtggccgcggagccgagcacaacgccgccctgcgccagctcgccaaccgcctcaccggcatcctccacggctgcctcaaaacccgcaccctctacaacgaggcaaccgcctggccgcagcgccccgcgaagacacacaaggccgcagcttgacatctaagcccctgggatgt

SEQ ID NO: 3335 - DNA, 1578 bp, unidentified
  source 1..1578: mol_type = unassigned DNA; note = element_4dc98bf
  misc_feature 1..2: note = core
  misc_feature 3..276: note = LE
  misc_feature 277..1446: note = CDS
  misc_feature 1447..1578: note = RE
  misc_feature 23..245: note = bridgeRNA
cttgtatgatatatttaataacttaaatagaccatacactcctttctttatttatttttatattaatatttagtataatctaaatgtggtaactgtggacttttgatttttcttatagctttgactatttaagggagtgtattgccacagtttcgtttttaatcatttattggttggataagtctttgaacttttatgtcacgcaagtttatgagaacgaacacttgtggaaagttgtcacagttattaaatatttttgaaaggtggttttcacacatgtattcttattttgttggcattgatattgctaaaaatactcattgggcttcttgcttatcttctgatggagaaattatcttagagcctttttctttctctaatgataacagtggatttcaaaaatttatttcaaaattagaatctttagacaaaacaaagatactaattggtttagaatctactgctcattacggcgaaaatatcatttcttacttgttcaatcttgattataatattggacttattaatccaattcagaccgctaatcttcgtaggtctaatatcagaaaaactaagaatgataaagttgacaacaaaataattatcaaagctctaactttaggtaattactctctcatcacttctagagatatcaacaatttaaaactcaaaggcttatgccgttcacgtcgtaacttagttactatgaaaagtaaagctaaaattcaattagtatcttacttagatcaaatctttcctgaacttgcacagttctttaaaggaaatcttcatctaaatgtatcataccaattattgaaagaatattcaagtcctaaacaaatttcttctttgcatttgactaaactttctaatattcttcacgataattctcatggtagatataataaacaagatgctattcgtcttcgtgaactagctaaaaactctgttggtattgataatcccagcttatctttacaaattaaacattccattttgcaaattgagctttataatgagcaaattgctgaagttgaagctctttacaaacaaattttagatgagatgaatactcctattttaagtattcctggtatgtcttacaaccaggctgctgttattatttgttgtattggtgacattaatcgttttgaacattcttgtcaacttcttgcttatgctggattagatccatctgttattcaatctggtaactttcaagcaaggtctactcgaatgtcaaaacgtggctctggaatgcttagatactctcttgtttactcagctcataatgttgttaaaaacaataaaacttttagagattactatgaactaaaacgttcacaaggaaaatcccactattgtgctcttggacatgttgctcataaattagttcgtatcatatttaaaatgttaaaagataacgttgcatttaacctagattaactaaatattgatttttcaatgtattcagccgtttttaaaaaattgactaaaaacggttattaaagttgaccttttttctatagaaaattttttaaaaaattttcatttttctattgacttttcatagttggt

SEQ ID NO: 3336 - DNA, 1169 bp, unidentified
  source 1..1169: mol_type = unassigned DNA; note = element_4dcdf20
  misc_feature 1..2: note = core
  misc_feature 3..215: note = LE
  misc_feature 216..1160: note = CDS
  misc_feature 1161..1169: note = RE
  misc_feature 16..191: note = bridgeRNA
cttgtatggcgttagggtaggaacctgtcgggggtggagggacaaagtccgcttctgcaagccagacggtaggagacttcccccgcccacgcgctcacgacaagcgccgataaggaatccatcggactgggtagcggcccggaccgacgataccggcaagcctgcgccactgtgagccccgacaggtagtcccatcttcagcgtcggagcgccccatgacaagccagattgcggtgattggaatcgatgttgccaaggattcgctgagtatctgccgcgccccaacgggcgaagtgctcgagctacccaacgagtcacgctcaatcagggattggctcaagactctgccatcgggttgctccatcgcaatcgaagcgacggggatctaccacgttctgatagccaccctggcccatgcccgtggccatcggatctacgtcatcaatggctatcgcctgagcaattaccgcaagggagttggcgggcggaacaaagatgatcgcagcgatgcccagttgctggcccgttacctggctcacgagcaggcgcaattggatccctggcagccgccgagcaaggtttactgccgcctgcaggccctgttgcatcgccgtgccgtcgtcgttcgtagtgcgatctctctgcgccagagtttctcccaggatcgggagctggccagcgagttgaaaccagtgctcaagcgcatggccgccctggagaggaggctggaaaaagctatccagtgcgtgctggacgaagccggactgacagcccaaagcaagcgctgccagaaagtcgagggcatcgggccgctgacggccgccgctttgaccatggccttcctgcgcgggcatttccgccacagcgatgcgttcatcgccttcataggcctggatgtgcgcctgaaggaatcaggcctctatagcggccgacgcaagctgaccaagcagggagacccggaaattcgtcggttgctgcacaacgcagccatggccgctgctcgcacacagcgctggaaatccgtctatcagagctacctggcgcgcgggctgaaaaagattgaggcgctgaccatcctcgcccgcaaattagcccgaattgcctttgccctgatgaagactcaacagccgtatcggcctacggccgatacggcggggtagacatagaat

SEQ ID NO: 3337 - DNA, 1458 bp, unidentified
  source 1..1458: mol_type = unassigned DNA; note = element_4dd2b63
  misc_feature 1: note = core
  misc_feature 2..215: note = LE
  misc_feature 216..1145: note = CDS
  misc_feature 1146..1458: note = RE
tcgtattataaagtagtagtgtttatagacccactccaaggtcttaatactatttctatcatagctattctttaccttttctacaggtgccgctatgatagttaagatgctgtggactggtatcacctctctaccactcgatggtttcagaaagtgtccagccacagtctctttgtttgattgttaatcagttagataccgcatgacggtttattttgaacgagttcaccattcctaataatgcagatggattccataacctctatcaaaagatttcttccctcacagaagatttttccaacgtaaaagtaggactggaagccaccggacattacaattacaatctcttaggatttctcatggataaaggtctccccacctttgtcatcaatccccttcatactaacctgttccgtaaaagtctcagcctcagacagaccaaaacagataaagtagatgcccatacgattgctcttatgatgatgtccggagtaaacttacagtcctactcagacacatcttatcacaacgaagaactcaagtcattaaccagatataggtttgacaaggtaaaggaacgggcaaaactgaaaacttccgtctccaggcttgtaaacatcctcttccctgaactggaaaaacttgttcctacgctccatttggtttctgtatatgcccttctctcagaacttccttcctcctctcagattgcttcctgtcatctaacacacctcacaaagctgttggaaagcgcttctaaaggacgctatagcaaggaaaaagcaatcgaaatacgggatgctgtcagaacctctatcggttccaacatgcctgccaaatctctggaattaaaacacacaattaagctgatccaggaactaacctccgaaatcaatgaaatagaagactctatcaaatccattatggacagcatccattctccaatcacttccattcccgggatcaactatcggatgggagctatgatcatcgccgaaattggtgattttaaccgcttcagctcacctgataaaatccttgcctatgcagggctttcgccttctacttaccaatcagggcagcttgacagcagttattcccacatggaaaaacgaggctctcgatacctgcgctgtgctgtttaatgccgcaaaatttgtctgcatatgggacaatacctttgctgcttaccttgccaagaaacgtacagaaggaaagcattacaatgttgccatatcccatgcagccaagaaactggtacgggttatttatcggctggaaaaatcacagcagctttacaatagagcagcataaaatttgtccatgtatctcctttttgagcaccggaaacgatgctctatttgtcatgcagttttcaaggtactgatttatctgaaatgcatttctgcaattcatacaaaatttttattttaggtcttgacttttaatagttagact

SEQ ID NO: 3338 - DNA, 1164 bp, unidentified
  source 1..1164: mol_type = unassigned DNA; note = element_4dd9c9c
  misc_feature 1..2: note = core
  misc_feature 3..184: note = LE
  misc_feature 185..1120: note = CDS
  misc_feature 1121..1164: note = RE
  misc_feature 34..199: note = bridgeRNA
cttgtatgtcgagaaaggagcattgtgaggggtgacgagggtcgaatcatgacttggccctcgtcgcgaccggaagcccgcagcctcctcggatatcagaccgcgaatgagcttggtgctccagtcgcttcttccatacccgcacagttgccagggcacgagcccgcatcagcaaggatgggatatgaagatggccatgctctctttttgcggtattgacgtgtcgaaggaccgcttggatgtggtggtgctgcctgaggggtggttcttttcggtgagtaacgacacagccggctgggccgagctggtcgtaaggttgcgcccgctcacagtctccgcaattggccttgagccgagcggtggttacgagcgcggaatcatccgtgccctgctcgcggcgggaatgtcggtgcgacgtatcaacccgaacaagcttcgtcagttcgcccgcgcccgcggcgtgctggccaagaacgatcgcctcgatgcgcggctgatcgcagagtatgttgcgatcatgccgacacgagttgtgcagcgggacgctgcggtcgaaaggctcgccgagatcgtgaccatgcggcgacagctgtgtgacgagcatgttgcggccgagaaccaggcggctcatctcgaagatgccatgctgaggcggctcagcaaacgccgccagacgcgactggaggccgatatccgcctcctcgacaagcgcctggccgagatggttgccgccaatgttgctctcgctcagcgctatgagctgctgacctcgatgccaggcgtcggcccggtgctggccttcacgctcatcgccctgttgccagaactcgggaagatgacccgcaaacagatcgccgccctcgtcggccttgcaccatatgacttcgacagcggcaagctcaagggacaccgcagcatctacggtggtcggatgccggtccgtaatgtcctctacatggccgccctcagcgcaagccgatacagtcccgccctcaaggccttccacaatcgcctcgccgacgccgacaaaaaatccaaggtcatcatcaaaatccaaggtcatcatcgtcgccgtcatgcgaaaaatgatcacaaccctcaacgctatgcttcgcgataatgctgcatggcagccgcaatccgcctgaacgaacaacacagttg

SEQ ID NO: 3339 - DNA, 1567 bp, unidentified
  source 1..1567: mol_type = unassigned DNA; note = element_4ddcc93
  misc_feature 1..2: note = core
  misc_feature 3..94: note = LE
  misc_feature 95..1297: note = CDS
  misc_feature 1298..1567: note = RE
  misc_feature 1306..1514: note = bridgeRNA
agacatgatggattgacctgccccgcctcaacgtcgtgggttacgttgaggtggggacacccaaacacagagccactattgagggaggcaggtcatgaaacagtctaacgcaactcaacgagccgttgtcgaccgcactgtcaccgagcggatcaacgccgccagctacgttcacgccgcctatatcggcctggacgtgcataaggccagcatctcggtggcggtcgctgaggcaggccggcaaacgcccgagtttcgcggtgagatccccaatgaacccaaggcgatcgacaagctgattcgccagatgagcgaacgcttcgacgggcagcccctgctgttcagctacgaggccggaccctgcggctacggggtctatcaccaggtccaggccagcggccatgactgtgaggtggtagcaccgaccctgatcccgcgtcgtgccggcgatcgtgtcaagactgaccgccgcgatgcgcagatgctggcccgcctgtcgcgctctggagaactcacccccgtttgggtacccacgccggaacaggaagcgatacgcgacctgacgcgggctcgggaggatatgaaggccatcgagctcaaggcgcgtcagcggctgaacgccttcctgctgcgacacggcaaggcctaccccggcaagagcaagtggattcctgcccactttcgctggctggaaacggtgcgcttcgacaccccggttcagcagatcgtgctgcaggagtacatcgaggcggtgcgcgaagcgcagcgccgcgtggccggcctggagaggcagatggaggcagcactgccggactggtcgctggccccggtggtcgaagccatccaggcgatgcgcggcgtcagcctgatcaccgccatgacggtgatggctgagctgggggatatcagccgttttgattcgccctgtcagctgatggcctatctggggctcgtgcccagcgagcactcgagcgggggtagccgacgccagggtggcattaccaagaccggcaatggccatgtacgacgcgtcctggtggaggctgcctggagctaccgcttcccggcccgcaagacgcgcattattgagcagcgggccgagaggacctcgccgacggtgcaggcgatagcctgggccgcacagaaacgactctgtgggcgctaccgccggctggcggccacgggcaaggccaagcaacaggtggtgacggccgtggctcgggagctcaccggcttcctgtgggcgattgcctgcgaggccatgggcaagccgcacggcagccgagccacggcatgatcattccgtcccagtgccttcgggtcagggagcgtcgggccggtgggagaacccctgacgctcctatgaggcccccgccctccggggcagggtgaccctcgctcgtagaccagggcagctccgcgacgaagtgatgacaggtcggtacccaacccacgaataccagagagatccaccgtcgctgatagcccctcgcttcctgatccgaaggcattgaggacgacaatagacaacagagacaaccgaacccttgacgggtcaatccatacc

SEQ ID NO: 3340 - DNA, 1497 bp, unidentified
  source 1..1497: mol_type = unassigned DNA; note = element_4dde628
  misc_feature 1: note = core
  misc_feature 2..258: note = LE
  misc_feature 259..1467: note = CDS
  misc_feature 1468..1497: note = RE
  misc_feature 9..237: note = bridgeRNA
cgttatgtttttcgtggtcctgcaagagggccgctggcctccgggcccggtatgacttttgccccctgtcgatcggatgacctggggggtggtgtcaccgggcccgaggggtgccgtcggagacgctgatgagaggtccggccgccgcccggcccggcgcaatgcccggccatccgcgggcggcaggtctgcataacgtggatgcgcgagaacggccccgatgcccaggccagcaggcaacgagcatgtgggggcacggtgatcgacacaagcggtgtgggcgtcttcctcggactggacgtcggcaagagcacccaccacgggcacggcctgacgccgaccggcaagacggtcttcgacaagcagctgcccaacagcgaaccgaagctgcgggcggtcttcggcaagctcgcggcgaagttcggcaccgtgctggtggtcgtggaccagcccgcctcgatcggcgccctgccactggccgtggcccgcgacgcgggctgccgggtcgcctacctgccgggccttgccatgcgccggatcgccgacctctacccgggcgaggccaagaccgacgccaaagacgccgcagtgatcgcagacgccgcccgcaccatgccccacaccctgcgctcgctggaactcaccgacgagatcaccgccgaactcaccgtcctcatcggcttcgaccaggacctcgcagcagaggccacccgcacctccaaccggatacgcggcctgctcacccagttccaccccagcctcgaacgcgtcctgggcccgcgtctggaccaccaggccgtcacctggctcctggaacgccacggatccccgaccgccctacgcacagccggccgccgcaagctcgtcgaactgatccgccccaaggccccccgcatggccacccgactcatcgacgacatcttcgacgccctcgacgaacagaccgtcaccgtccccggcaccggcacccttgacatcgtcgtcccgtccctggcccgctccctcgcggccgtccacgagcaacgccgagccctggaagcccagatcagcgaactcctggaggcccaccctctttcccaggtcctgacgtcactgcccggcgtcggcgtcaggaccgccgcagtcctcctggtcaccgtcggcgacggcagatccttcccgagcgccgcccacctcgcctcctacgccggcctggcaccagcgaccagatcctccggaacctcgatccacggcgagcacgcccccagaagcgggaaccgccagctcaaacgcgcgatgttcctctccgccttcgccgccctccacgaccccgcctcccgcacctactacgacaaatgccggacccgcggcaaaacccacacccaagccctcctccgactcgcccgccaccgcatcagcgtcctgttcgccatgctccgcgacggaaccttctacgacccaccccaatccgatgcagccaccgcatgaccaccccaaacttgacgaaagacatagagg

SEQ ID NO: 3341 - DNA, 1364 bp, unidentified
  source 1..1364: mol_type = unassigned DNA; note = element_4de60b5
  misc_feature 1..2: note = core
  misc_feature 3..76: note = LE
  misc_feature 77..1069: note = CDS
  misc_feature 1070..1364: note = RE
  misc_feature 1077..1351: note = bridgeRNA
cgatggggtggacgcccccgacggcatccgatgtgccaaggtagaggtgtcgtaaaccgctacagaggaggcgtccatggaagaggttagcatcatcggtgtggatattgccaaacacgttttccaggttcatggagcacggcccgacgggtcggtggcgtttagcaagaagctgtccaggggtaagctgcttccgtttctggcattgcggccgagatgcttggtggcgatggaagcttgtgcgagctcccatcactggggacgggagatcgaggccttggggcatcaagtgcgcctgatagccccggcctacgtgaagccgttcgtcaaacgtcagaagaacgacgcagccgacgctgaagcgattgccgaagcggcagcccggccgacgatgcgctttgttgccttgaagagcgcggagaagcaggcgtccggcatggtgttcagaatccgcgacctccttgttcggcagcggacacagacgatcaatgcgctgcgcggtcatctatcggaacatggcgtcatcgcccccaacgggacttatcatgtgagccggctgttggcggagatggagagcccgcacaacagcctgccagctgccgcgatcgagatgtgcaagctgctgtttcaacacgtcgtcgctctcgacgagcagatagccggtctcgatcgacaaattcggcagcgtgcgcggcaggaggcaagcgtgcgtcgactgatgggcattcccggcattggcccgatctgcgcgacggcgctggaggccctcgcgccgccaccagagacgttcgtcaagggtcgcgatttcgcggcttggctgggactagttccgcggcaacatttctcaggcggcaaggcgcggctcggtcgtgtctcgaagatggggcaacgggatctgcggcgcctgctgatcacacgccatgtccgtggttcgctgggcgctccgccgcggtactgcggcaaactcttggctcgcccgcatgttggagcggaagccgcggatgctcgttgcgattgcgctagcgaacaagatggcgcgggtcgcctgggctttgctcgccaagggtgaggactacagggttcctgccgcggccgcctagtcgcggtctacggtcggagatgccgcggatgtggtgggtcaaggaggtttatgggcaaacggtcaagaagacgggatctggagaaccagcgaaatggacggcgcatatcgagcccgcgtaagcgtactggacctgatccgcagacttccataagggcccgcggcgcgtgacagccgcatcgagaggccggacacacgtcagcacctgaccacatgccctgagccaacaaaagattccgcttgcattcgagggggcgtccacaca

SEQ ID NO: 3342 - DNA, 1526 bp, unidentified
  source 1..1526: mol_type = unassigned DNA; note = element_4dec58f
  misc_feature 1..3: note = core
  misc_feature 4..240: note = LE
  misc_feature 241..1407: note = CDS
  misc_feature 1408..1526: note = RE
  misc_feature 8..221: note = bridgeRNA
tttcgtattatcaggtcagccagaatttctggttggcctttttttcatggccgggatacgatggcggtagccgggagaacgtggctttttttggggcaggaccccgtaaaataaactgttttcccactacctccaatgaccatgtttgagctggttgaggcgtggacctcgtatcacaagcgaagctgtgggattggagccatcgtgggagtgccggcaaatcaaataaggggagatggtatgggaccggtcgtcgggttggatgtgtcaaaaggagcaagcgtgcttcaggccttcacggagcggaacaagccatatggcaggtgcaagcgtattgcacatacaccggaaggatttgaacaactgggggaattactgaaggaattagagaagtccaccggtttcgaacctgccgttgtattggaggcaacggggcattaccatcgcagtctggtcgcctatctggagcgcgaaggttatcaacacttcatcgtgaacccgttgcagtccaagcgagcaaaagggacacaccttcgaaaagtcaagaccgatgcgatggatgcctggcatttggcggaaatgtattaccgtggggatctaaagccgcatcgaacgtggtcggaagccttaacggaactgcagcatctgacgcgacagcatgagttcatatgctcgatgctcgttcaagccaagcaaaacgccagggccttattggaccaagtctgccctgcctacgaaaccgtgtttgacaacctgttttgcacgacgtctttacaggttttgcgccaaatgctgagcagcacacccgtcacagcggaaacgattcaggcggcggcaggttcgtcacacggtcaagcgtgggttcaggaaaaactggagcgaatccaggcgttgccgccattaagccaatcgagcaaagcgcagcagatggctttgctgggtgtgctgaatatggtgcttacaggacaagaacaactgcgtcagcttgagaaagccatggaagagttggcgatgatgctgccggaagtggaactgctgaggacgattccaggtgtgggggacaagcttgccgcagtgctggcagcggagattggggatgcatcgcaatttgagactccgaaacagcttgtggcctatgccgggctggatccgggtgtgcacagctcgggaaagtttacggctagcagcagtcgaatttcgaaacgaggctccaaacgtttgcgccgagcgctttaccttgccgctcaatgcgggataaggaatggagtaaacgaacggctaaaggcttatttcgagaagaaaagaaaggagggcaagccctgcaaggttgccgtgatagcctgcgccaacaagcttttacaccacgttcatgccatccttgtaaaaggcgagccctacaaagcctgaattccatatttacccatccaagtctccgcaccaccggaggcttctttgggttgttcaaaaaaagtatagcagtatcttagtcacaatccaagcgctgaagcttgacaagcgttagctgg

SEQ ID NO: 3343 - DNA, 1157 bp, unidentified
  source 1..1157: mol_type = unassigned DNA; note = element_4df1d33
  misc_feature 1..2: note = core
  misc_feature 3..209: note = LE
  misc_feature 210..1145: note = CDS
  misc_feature 1146..1157: note = RE
  misc_feature 12..215: note = bridgeRNA
cttgtctcagactttccgtggctcttctgcgaaggtggggccggtgccagccaccttttggatggcaggcaccggcggcgggtggatcgtctgcagccaggtctttgaggaccgtaatcaagtgagatcgcccgccgtcttcgcatgaggcctgaacggatacgcagcagctcacaggctctgcacgacaagcaaaggacatgacgaagatgatcaacgataccatcggcatcgatatctcgaaagcgcatcttgacgcgcaccggctcagcaccgcaacccacgcccggttcgacaataccgcggcaggcctgcgcgccttcgagcgctggttggggcagacatcgccggagcgcgtggtcttcgagcccaccggcccctaccaccgacgcttcgagagccatttctccggccgcctgccgctcgtcaaggtgaacccgctgcaggcccgccgcttcgcgcaggcccacggcacacgcgccaagaccgacgcggtcgatgcccgcatgctcgcgctcatggggcgcgcgctggagctggtgccggaccagcccaccgaccccaaacagcgtgaactcaaggagttgcatgtcgcccgcaccgggctggtgcgggatcgtaccgcgctgatgaaccgccttggcacgcaacagctcgacgtgacccgccgcctgacccgggcacgcctgcgccaggtcaaccaccagatcgacaggctcaacgccgaaatcgaacggcgaaaccgcgattgcccgaagcgcgccagggcaatcggcattctcacctcgatccccgggatcggtgccatcaccgcacgggcgctgctcagcgaatgccccgagatcggcactctggggtcaaagcagatcgcggcgctcgcaggtctcgcgccgatcatccgtcagtccggtcagtggagcggaaaggcccacatccagggcgggcgcaggctcctgcgcgagagcctgttcatgcccgccctcgtcgccatgaagcgaaaccccgatctgagccagaaatacgatgccctcagagccgccgtaaaaccccacaaggtcgcgctcgccgtcctcatgcgaaaacacctgatcctcgcaaacaccctcataagcgaaaacagagaatggacaccaaaacacccttgaccaagacggata

SEQ ID NO: 3344 - DNA, 1244 bp, unidentified
  source 1..1244: mol_type = unassigned DNA; note = element_4df2856
  misc_feature 1..2: note = core
  misc_feature 3..68: note = LE
  misc_feature 69..989: note = CDS
  misc_feature 990..1244: note = RE
  misc_feature 1011..1242: note = bridgeRNA
ttaatgagatggtcactccctccttcccggtactatgctgaggacaggctttcattcggagaactatcatggaaaacattgcgctcattggtatcgatctgggtaaaaactctttccatattcattgccaggatcgtcgcggcaaggctgtttaccgtaaaaaatttacacggccaaagttaatcgaatttttggcgacatgccccgctacaaccatcgcaatggaagcctgtggtggctctcactttatggcacgcaagttggaagagttggggcattttcctaagctgatatcaccacaatttgtccgtccattcgttaaaagtaacaaaaacgactttggtgcgctgcatcgtgtccgtgaatccctggttcaggataaggtaaaaacaaccaatcagatgcatgcttttctgctggaatttggcatcagcgttccacgaggagctgccgttattagccgactgagtacccttcttgaggacaatagtttgcctctatacctcagccagttattgctgaaattacaacagcattatcactatcttgttgagcagattaaagatttggaatcccagttgaaacgaaagttggacgaagatgagattggacagcgcttgctgagcattccctgcgtcggaacactgacagcgagtactatttcaactgagattggcgacgggaagcagtacgccagcagtcgtgactttgcggcggcaacagggctagtgcctcgacagtacagcacgggaggtcggacgacattgctgggaattagtaagcgaggtaacaaaaagatccgaactttgttggttcaatgtgccagggtattcatacaaaaactggaacaccagtctggcaaattggccgattgggtcagggatctactgtgtaggaaaagcaactttgtcgtcacttgtgctctggcaaacaagctggccagaatagcctgggccctaacggcacgacagcaaacttatgtagcataacggcagaaatacaccggtttaaagaatcactgatctggttttgcgaatactgatattgatgatactaacggcccaccggcctgttgaggaacctgtaaaacggaaaggctcattgaagccgtatattttctggaggttcatcaggcgcggaactcatcgaggcgcgggaataaaatcccattcagacgccggatagattcaagcaagccaatttatcgtcaaaatcggtgttgcaaaaacgggagtgaccataga

SEQ ID NO: 3345 - DNA, 1385 bp, unidentified
  source 1..1385: mol_type = unassigned DNA; note = element_4df9ac7
  misc_feature 1..2: note = core
  misc_feature 3..97: note = LE
  misc_feature 98..1129: note = CDS
  misc_feature 1130..1385: note = RE
  misc_feature 1155..1377: note = bridgeRNA
cgatgagatggtcttccccctcctttcacggctcacggcagcacccatttgcgccatgatggataatctttaatcaggaaaaagtaagagggataccatgtctcaagtgaaaatcaccggcatcgatctggctaaaacaaacttttatcttttcagtatcaatgcctatgggaaaccagttggaaagatgaaactttcacgtagcaacttactcaactggctggttcagcaaccaccgatgactgttgctatggaagcatgtggagcatcgcatcactgggcccgggagatacaaaaactcggtcatacagcgatattgcttccggctcaacatgtcagagcctatcaacgacgccaaaaaaatgattataacgatgcacaggcaattgctgaggcttgccagcatggaactatccgccccgtacctataaaaacgcttgatcagcaggatattcagacgtttttaaaaatgcgtcagctgatttcaatggaaaggacacaactaataaatcacgtacgtgggcttcttgctgaatatggcattgtgctgaataaaggcgcaacagaactacgccgaacgttacccgtgctacttgaggatgctgaaaatgaactcactgacgctatgagagcattgttgcatcgacagtatacccggctgattacattggatgatgaactggaatggtataacgccgagcagaagaaatatgttcaccaggaccctgtgtgccaaaggctgttagctattccaggattcggccctttggtcagccaggtgataaaaagttggatgggtgatggtaaacaatttaaacgaggaagagatgcctctgctgctctggggttggtcccccgacaatgcacaaccggtggtaagcaggttttgttggggataacaaaatgcggtaatcagtacgtgagatccatgctgatacatggtgcaagggctgtactgttcaggtctgctgaaaaaactgacctgcttagtgtgtgggttaaccgtattcgggaaaaacgtgggtttaaccgagcagttgtcgcccttgtaaataaactactacggatctccagggtaattatcgcccgtaatgaattatatttaccagcagcactgaaaaatcagtaagttatacgatacagtacaataaacgctaacctgaaattgcgaagaatgcagaaatgatgaaaaacaggtcagaccggcgttccgaaaacctgcaatatgtgacaggccactcaggccgtgtaagcgatcaggacggaatgcgcgaatgtctcatcgaggccagaagccagagcttcatcaacaggccggatatacgaaagcaaacctgtcactttcattataactgtgctcttgcaatacaggggaagaccatata

SEQ ID NO: 3346 - DNA, 1372 bp, unidentified
  source 1..1372: mol_type = unassigned DNA; note = element_4dfe501
  misc_feature 1..2: note = core
  misc_feature 3..75: note = LE
  misc_feature 76..1110: note = CDS
  misc_feature 1111..1372: note = RE
  misc_feature 1083..1360: note = bridgeRNA
tgatggggtggacgccccccggcggcatttatgtgccatagtggaggtgttgcaacaccattgaaggaggcgtccatgtcacaggttatcacaattggtctggatattgctaagaacgtttttcacgcacacggcgttgatgcgcgcggtggaatggttttcagccgcaagctgacccggagcaagctgctcgacttttttgcgacccatgctcgatgcgtggtggcacttgaagcgtgcggcggtgcgcatcactgggcgcgcgaactgcagtcgatgggttacgatgtccggctgatcccgccggcttacgtcaagccgttcgtcaagcgtcacaagaacgatgcgatcgatgcggaggcgatctgcgaggcagcacaacggcctggcatgcgctttgttgcagtgaagagcgaggagcagcaggcagcgggacttgtgttccgcacgcgggacctggtggtgcgacaacggacccaactcatcaatgcgatccgcggccatctcacagagtatggctgggtggcaccgcgcgggacggcgcacatgacgatgctcgccgatctcctcgacgatgaggagatggcctcgaccctgccggcggcggcgcgacccatgttcaagctgatggtcgatctgctggccgaactgaacaagcgagtcgccatgcttgaccgcgagattgcgcagcgtgcgaaggaggacgaggcggcacgacggctgatgaccatccccggcattgggcccatcgctgccactgctatcctcgcgctcgccccgccgatcgggacgtttaacaaggggcgcgactttgcggcctggctcggtcttgcgcctcgccagcactcgaccggtggcaaacagcggcttggcagtatctcgaagatgggcgagcgtacgatcagacggctgctcatcatcggtggtagctcgatggtgcgtcaggcctgtcgctttggtgcgccctccggttcgtggcttgagcggatgctcgcgcgcaagccgcgcatgctcgtctcggtggcgctcgccaacaagatggcgcggatggtctgggcgttactgaccaagaaagaggattacagagctccggcagcggtcacggtgtaaagccaagacagcggccagaggcgtcgggaacgtaggcggaccgaaggagggtatggcacaacagtcggcgagacggggctggaagaaccagtgaatggcagagcgttatccaagcgcgcaaagctgaaatggatccggtccgcgaactcccatactggcccgcagctatggcgctgctcatcgaggccggacagatgacagcatccgactacgtgccaacataccctaatttatcgcttgcgttcgaaggggcgtccacaga

SEQ ID NO: 3347 - DNA, 1322 bp, unidentified
  source 1..1322: mol_type = unassigned DNA; note = element_4e00acc
  misc_feature 1..2: note = core
  misc_feature 3..72: note = LE
  misc_feature 73..1116: note = CDS
  misc_feature 1117..1322: note = RE
  misc_feature 1096..1316: note = bridgeRNA
ttaatgaaatggttccccctcgcttttcagcgctaagctgaggagtgagtatccttaaaggagaaccatctcatgtccaccattacagttcttggaatcgatttaggcaagtctacgtttcatcttattggtcgtgattctcacgagcaaaccattctaaaaaagaaactcacccgcaaaaaactcattgaatttattgttcaattgcctgcctgcactattgcgtttgaagcctgtggcggcgctcattggttggcgcgcttgtgtcagcgtcatggccacaccacaaagctcattccgccccaatatgttaagccttatgtgaaaggcaataaaaatgattttattgatgcgaatgccattgctgaagccagtggtcgccctagtatgagatttgtgccggtaaaatcagaagaagcgcaatcgctggctgtttgtcatcgattgcgggaaggatttgtggcagatcgaactgcctacatgtcgcgcattggtgccatcttattagagtttggtttggcactgccggtggggcacagcaccatgaagcgtttattcgcctggctggcaacgcagcacaccgttaccttgccgatcatgctatttcaggagctgcaaattgcccatgatcattacctgtatctcaacgaaaaaattactgaacaagaccgaaaaattatcgcgcaggtaaaggccgacaagcgctgccagttgcttaaaactattcctggggtgggcgatatgactgctagccaagtggtgatggaagtcggtaatgctcaacagtttcgcaatgggcgagacatggcagcgtggttagggctggtgccaaggcaatattcgacaggcgggaagccgacactgctggggatcagtaagcgaggcaataagcgattacgttgtttatttgtgcatggggcgcgagcgattatgtcgaaattgagctgcagtgacgggccgctgcatcagtgggtacgaaaattaaggctgagtaaatcgtttaatgtggcctgtgtggcgctggctaataaactggccagaatcgcgtggtcggtactaagaaacagtagggcgtttaacgtgaatgctttacaaccgagtttgcaagcactatgaaagatgatgaaaacggttaaaccagccagataggaacctgtcacaaaaaacagtttttaaaaactgtcggtttttttaagggctatctggcgcggatgctcatcgtggagcgagaaaggaaactttctcaacaagactccgaatacattagcgcaaaccacctcatcattggaaatagtgattgcaatcatgaggggaaccataca

SEQ ID NO: 3348 - DNA, 1788 bp, unidentified
  source 1..1788: mol_type = unassigned DNA; note = element_4e0b18c
  misc_feature 1: note = core
  misc_feature 2..232: note = LE
  misc_feature 233..1318: note = CDS
  misc_feature 1319..1788: note = RE
cctgttgctttaatatttgccccttggtttatggcagccggccataggcatgggacatctcgttacctaagctgttagaataggggagtaatggtctgacttaaatctccaagggcttttacgcccgttagaaagtcagtcagctatctcctattcgcagcgttcgatttgtgcaggtagggccaggtggtagttccacagcgtttgcgtcaccaaacagataggatcggcgatgggtaaagatggctctgtccattgcaattttatcaagcaggagatgcacaacatgaacgcagcaggtattgacgtttccggtaggaagagcatgatcgccgtcctctggcccttttgggaggtggtaatgtgcccctttgaggtaggtcacaacacagaggggctagtccatctggcccagcagctcaaggaactagattgggaaacccgcgtggtgatggaacacacaggccgttactacgaacccgtagccaagattctccacaaagccggcctgtttgtcagtgcggtgaatccgctgctgatcaaggaatacggcggcaattctctgcgcaaggtcaaaccggacaaggccgatgcctccaagcttgccagatatggtcttgacaactgggctgatctgtgcgattatactcccatggataccattcgttatgatttgaaaacgctgaaccgtcagttccacctggcagtcaagcaaaagacagccacggcaaacaacctcatcgcattgcaggagcagtcctttcccggcatccgcaagtgcttcaccagccctgtgcggaaggacggcgcccagaagcgggtagacttcacgcacgatttctggcacgcggactgtgtgcggggcgtcagcaagaacgcttttaccgagcgataccgcaaatggtgcaaacgacatgactacaagttcaagcaggataaggctgaggaggtttacacacttgccaaatctgtcgtcgttctgatagccaagtctgaggtcacaaagctccttatccaggaatctgcagaccagctcaccagcatctcccgttcggcagaaacctatcgcgccgaaatgaaccgcctggcctccatgctgctggaatatccgtttgtcatgcagatgtacggatgcggaggctccactggtccgcagcttatggccgaaattggtgatgtctgccgctttgcaagcaagaaggttcttgctgcatttgccggagttgatccggctcctaatgctttcggggataaggtttcgaaaagcaataggacgacaaagcgggggttctccctatctctgaaagacgctgtttaacatcatgagcgtctatattcaaaagtctccgtcggatgagcctgtctaccaattccttgaccgcaaacgggccgagggtaagccgtattacgtttacatgactgccggtgcgaacaaattcctgcgccgctattatggccaggtgtgggactacctcaatgggcttgaggcagatgacaactgcccgacggaagcggttgctgaagctgtgtcaagcgtttgacacagaggtggcttagccacctcttgtctacccacctgcacaggcgggatggcctgtcaaggacgccataggcgcggcgcagccgtttatccttgactggacagctcggcggtgctacctacaaatgctttccagtttaagccagcgctctgcggcggctcttttgtgttgtccatttttcccacctcacctgtctcaaatattttcttgctcaagcccatttggggcttgactttttgtttgtagg

SEQ ID NO: 3349 - DNA, 1591 bp, unidentified
  source 1..1591: mol_type = unassigned DNA; note = element_4e22371
  misc_feature 1..2: note = core
  misc_feature 3..100: note = LE
  misc_feature 101..1225: note = CDS
  misc_feature 1226..1591: note = RE
  misc_feature 1320..1523: note = bridgeRNA
agacataatgaattaaacctgtccgaccttaaggcacgtgggttaagctttaaggtcagaaaaaccaaaggctcagagccacaattaaggaggacaggttatgaggaattttagcacatttatcgggatggatgtacacaaggagacgattgcggtagccatagctggggaggaaggaggtccgcggtactatggtgatattatgaataccccagaggcgctagcaaagctgattaagaaagtagcaggcaagaaagagcagacagccttctgttacgaggctggtccgtgtgggtatggggtatatcggcagataaccgggctggggtataggtgtgatgtagttgcaccgtcacttataccgaagaaagcgggagaccgggtaaaaacagaccgaagggatgcagtaatgctgacaaggctgtacagagcaggagagttgacgtcagtgtgggtgcctggcttggagcaggaggcgatacgggacctgacgcgggcgcgtgaggacataaaaggcatggagcgtcatgcccggcaacggctcaacggttttctgttgagacacggcaagaggtatcacggcaaatcgaaatggacacctgggtatttccggtggttggcaacagtgagctttgaaagttctgttcagcagatcgtctttcaggagtatgtggatatggtgaaacaactacagaagcgggtggcctcgatagaagaagagatgcggaaagcacttaccggatggtcgttgagggtggtggtagaagcattgatggcgttacgaggggtaaacttggtaacggctatgacggttgtggcggaaataggagacatgagccgatttgaaagcccccggcaattgatggcgcatctgggattggtgccgagcgagcattcaagcggcagccgtcaaaagcgaggaggcattaccaagaccggtaatggacatgtgcggagggttttgacggaagcctcctggagctatcgactgccggcacgcaagacagctcatctgcagaggaaggctgaaaagacgaccgaggctgtacaggcgatagcgtggaaagcacaaaaaaggctttgcaaaagatactggtatcttatacacaaagggaaactgaccgtgcagacctgtacagcgatagcacgggaactggtcggctttatctgggcaatcgcctgcgaagttatgggaaagaacattgtttgcggagtagcagcgtaacgtaatgcatatgcatatcggaaataacctgctgctttgcggggctccgaaagaatgaaatcgtttcttcgccccttcagacaaccgcaaaaagaagtgatgtgcatttcggtcagggcaacagccggtggggagaaccctcgggtgggctatgaggcgccagtgtgcaggatgaccctcgacgttagacagaggcagctccacgacgaagacaagtcatgcggtatccaacccgcgtatatcagagtgatctaccgtcgtttatctgctgatgtcctgtcccaagtgtacaatactaaaagaaggtcataaaagaagacaaaaggtaaagccgagattattctcttgacaggtttaatacatatc

SEQ ID NO: 3350 - DNA, 1418 bp, unidentified
  source 1..1418: mol_type = unassigned DNA; note = element_4e259a8
  misc_feature 1: note = core
  misc_feature 2..96: note = LE
  misc_feature 97..1140: note = CDS
  misc_feature 1141..1418: note = RE
  misc_feature 1186..1413: note = bridgeRNA
caatgggatggactcctcctcaccctgactaatcggcgtctaagcgccagaatggtaggtgcaaagtagccattcagagaatgaggagaagcccaaatgaaccttagcagagccggtgtggatattgcgaagtcggtttttcacgtgcatgcggttgatcgtcacggccagcccaaatggcgtgccaagctcaagcgcaacgagtggctggatgcgctatgtcaacgccttgctcctggcgctgaggtggggatggaggcctgtgcctcggcccatcactgggcccggaagctgcaggcgcgaggatttcgcgtgaagctcattggggcacagttcgtaaaaccctatgtcaagagcaacaagaacgaccaggtggatgccgaggcgatctgtgaggcgatgagtcggcccggtatgcggttcgtggcggtgaagagcgttgcacagcaggatacgcaggcggcgcaccgcatccgtgaggagcttgtcggtcagcgtactgccaaagcgaaccagatccgtggtctcgtgggcgagtatggcattgtcgccccaaagggcatccagcagctacgccgggcgttgccggattggctggaagatgctgagaacgcgttgacggtggacttccgcagtctactggccgatctggcggaagaccttcgatacttggatgatcggatcgcgctgcttgacgagcaaatcgcacagcgcgtgaaagaagaccctgtggcgcggcgattgcttgcgctgcgtgggatcgggccgctcaccgcgagcgccttggccggtgcgttgggcaatgcgcaagcattcaacaaagggcgtgacttcgccgtctcgctcgggctcacgccacgccaacacagcaccggtgggaaagaccggttgctcggtatcagcaaacgcggtgatgcttatctgagaaagctcctagtgcatggtgcacggtccgtgctgcgacatgccaaggatcgcgacgacgcgctcagtcagtggttgaaagcgctgattgcacgcaagcacccgaatgtggtcgttgtcgcgctggccaacaagactgcgcgggtcgcctgggcgatcgtgcacaacgctacggattacgatcctcggcttgtcgccggcaaaggtacaaattgagcatggcgcgaccgaggtagtggagagtgcgatcagattccttttaatgattgcaaagcacattggatgatggcgaacaggtgacaccgacgtcggcaaaacccgttatgtccgtagagctaacaaactcgtgttaccgtttgggagccgacgtgcgaatagcccatcagggtccgatgcctacagatacggcatcacttatgagaccggatacacgtaggcagtcataccttgacgttatcgaacaaagtgcttgcaaacgaggaggagtccataca

SEQ ID NO: 3351 - DNA, 1440 bp, unidentified
  source 1..1440: mol_type = unassigned DNA; note = element_4e26f20
  misc_feature 1..2: note = core
  misc_feature 3..122: note = LE
  misc_feature 123..1157: note = CDS
  misc_feature 1158..1440: note = RE
  misc_feature 1193..1393: note = bridgeRNA
agatggggtaatcggccggcccaacttgtggatagctgaatattttgggtgctgcgcttcaggctgatggtgaatacgaggtccgtggtcacggcctcaagcatcagaaggagaagcgcagcatggaccattttgctggactagatgtttcagtcaaggagacgagcgtctgcattgtggatgacgcaggcaggatcgttcgggaagtgaaggtagcgagcgaacctgcagctctgctgcaggttctggggagccccgtctaccacttcaagcggatcggactggaagccgggccgctgtcgcagtggctttacagcgccttggcggaggcgggcctaccagtgatctgtgtcgagacgcggcacatgcgggcggtgttgcaggcgcagatcaacaagaccgaccgcaacgatgcgcgtggtatcgcgcagatgatgcgggcgggactttatcgtccggtgcatgtgaagacattacgcagccagaagctgcgtatgctgctgacccatcgcaagctgctgcagtcgaaggccatcgccatcgacaacgacctgcgcggtactttgcgtaacttcggcctcaaggttgggatagccgggaaggtaaagttcgaggcgcgcatcaaggagctggtcgagaaccttcctgacctggccgttcttgtcgaaccgctgctcgttgtccggcgggtgcttcgcgaacagctcggcatcctgcatcgtcgcttgctggccatcgtgcgggacgatgacgtgtgccggcgcctgatgacggttcccggtgtcggtcccgtagtggcgctgacctatcgcgccaccgtcgacgtgcccgctcgcttccggcactccaaggcggtcggggcggtgtttggtctgacgccgtccaagtatcaatcgggtgagatcaaccgatccggcgccatatcacactgcggagacgagatgatgcgggtgatgctctacgaagcggcccaggtcatgttgacccgcaccaacaagtggtcctggctcaaggcctgggccatgaagatcgccaggcaccgcgggatgaagaaggcgatcgtggcgctggcgcgccggttggccgtgatcatgcaccgcatatgggttgacggcaccgagttccgctggacccgggaagaagcagccgcagcatgagagcggttcaggatcacatgagataggagaatactcgagctccaccgagcggtggaatgatgtccctcgcgggacgatggatgaggtgagttcgtttggtcgcttggacctgccattcgtctgacggcaaggccgtccaatagattgttccgcctcgtcttcgaatcccatgatggaagggccttggtgccgattccgaagagaagcgcgagcccgtgagcgacatcgacactgcagaggtggatagtctgaaagcgcttgaccccaaccggccgattagaga

SEQ ID NO: 3352 - DNA, 1493 bp, unidentified
  source 1..1493: mol_type = unassigned DNA; note = element_4e2aa95
  misc_feature 1..2: note = core
  misc_feature 3..246: note = LE
  misc_feature 247..1473: note = CDS
  misc_feature 1474..1493: note = RE
  misc_feature 7..245: note = bridgeRNA
ctaatgggagctgtcgggtcagccgctggcagactcgacacccggtagccgcgggcgggtgagcactcccgccgcctggaccgatcgtgagtcctggtgtcagaacgtgccctcgcccgtggtcgggagatgaatggctgatggggtgtcgtgcccgccgattcctggcgtgagcactggtccattaggtcgccggactctcccgcaggctgctgacagtgacccctgggcagagcggagacgggcgtgttgttcgtcggtgacgactgggcagaagatcaccacgatgtggaggtgcaggatcagcacggccgggcgctgcgtacggcccggctacccgagggtgtggacgggatagcccgcttccacgaactcgtcgcgaggttcctgcccgaggacgcggacccgtcccaggtgctggtgtgcatcgagaccgacaagggcccgtgggtacgggcgctggtctcagccggctaccaggtctacggggtcaacccgaagcaggccgcgcggcaccgggagctggtgtcgctgtcgggggccaagagcgacaaggccgacgcgcacgccctggccgacatggcccgtacccgccgtcaccagctgcgccagatcgccgccgactccgacatcgccgaggcggtcaaggtcgtggctcgggcgcatcagaccttgatctgggaacgcacccgccacacgctgcggctgcgcacggcgctgcgggagtacttccccgccgcactgcaggcataccagccgctgacgctgaccggtgccgacaccctggagctgctggcgaaggcgccgaccccggccgcggcggccaagctcacccttgcccagatcagcgcggcgttgaagaaggctcgccgccgaggcatccccgataaggccaccgcgatccagcaggcactacgcgccgagcacctgggccaggccgaggtcgtcaccggcgcctacgcggccaccgtccgcgcgacggtcgcgatcctgcagaccctcaacgccgagatccgcaccatggaaggtcaggtcgaggcgcattttggccagcacccggacgctgacgtgtacctcagccagcccggcatcggcgtgatcctcggcgcccgggtgctcgcagagttcggcgacgccccaggccgctacgccgacgccaaatctcgcaagaactacgccggcaccgcaccgatcacccgccagtccggcaagtccaagaccgtgcacgcccgattcatccacaacgaccggctcgtcgacgccctgcacatgcaggccggcgccgcgatcctgcacgaccccagcgtgcgcgcctactacgacgaactccgcgcccgcgaggtcagccacaacgccgccctccgccaggtcggcaaccgcctcgtcgggatcctccacggatgcctcaagaccaataacccctacagcgagacaaccgcctggtcacaccgggcacaacccgccgcagcttgacatctcagctcctggggtgt

SEQ ID NO: 3353 - DNA, 1352 bp, unidentified
  source 1..1352: mol_type = unassigned DNA; note = element_4e2ee4b
  misc_feature 1..2: note = core
  misc_feature 3..289: note = LE
  misc_feature 290..1099: note = CDS
  misc_feature 1100..1352: note = RE
  misc_feature 1098..1342: note = bridgeRNA
ttatggatggcccgcccctcctgccgacttccgtgtaggatgtcggtgttcatcggaggaaggagcggaccatgagcatcgtgatactgggcatcgatctgggcaagaacagctgcagcgtcgtcggcttggacgaaaccggcaaggttgctgtccgacgacggatgcgtcgtgacggggtcatcgctttgccgcccggctggcgctctgcgcgatggcgatggaggcctgttgcggcgcccatcacatgggacgcgcgctggcggcgctgggtcatgaggttcggctgatgtcgccggagtatgtgcgcccctacgtcaaggcgcagaagaatgacgatcgggacgccgaggcgatcgccgaagccgccacccgtccgaccatgcgctttgtcgaactcaagaccgaggagcagctcgacatccagaccttgcaccgagtgcgcgatcgtcttgtcggtgagcgcacctccctgaccaaccagatccgcagcctgcttctcgagagggggcgcatcgtggcgcagggccatgcccgcctgcgcctcttgctgcgcgaccttctggacgacggcgcggactccctgagcgcacgcatgaccttcctgctcgccgacatgcgtgcgcggtgggatgacttggaccgccggatcgccgcctttgacgccgagttcgcaaccatggcccggagcgacgacagggctcggcggctgaccggcattcccggcatcggcgcgctgaacgcgaccgcactggtggccgcagtcggcagtgcggcaaccttcggcaagggccgcgatctcgcggcctggttggggctcgcgccacggcaagccaccacgggtggcaagcctcggctcctcgggatcaccaagcggggcagccgatacctgcgaaagatgctgatccagggtgcgagatcggcaatgccttcactcatgaggtccgacaccgcggccggggtgtggttgcgggcgcttctgcgacgggcgcaccccaacgttgcagtcgtcgcccttgcagcgaagatggcccgcaccgtctgggcgcttctgcgccacggcggaacctacgacccggcgccgtcggccgcaggatgaggaacacgcacccgaccggaccgcggccgggcgtgacaagctgcgagtggtgagaggaagatggcctgacagtcgaacggcgtgccgaaaacctccggcgaaaaatggcccagcgaggccggcccctttatgaggatcgggacgtgcggatctccatcttggcagcggctgccgagccgacatgccggatacgtttgtgcagactgatcacgccgtcacgcaatcgccgcttgcaaccggggcgggccatacg

SEQ ID NO: 3354 - DNA, 1627 bp, unidentified
  source 1..1627: mol_type = unassigned DNA; note = element_4e34f9c
  misc_feature 1..2: note = core
  misc_feature 3..280: note = LE
  misc_feature 281..1513: note = CDS
  misc_feature 1514..1627: note = RE
  misc_feature 18..303: note = bridgeRNA
ctcctaatatataagttgtagggattaagacacctaacaaccagttaggacttttccctctcattgtttaagctgtatgatgtataagcatcggtctgacctaattttcctatgaccatttagcgtccgtaagaaagcctgtctgccagcttatcatatgcagccgttcggtttacgtaggtaggactgccttgagtacgtccgattgataccacaggagattgaataagcaatgaggaagctggataccatgcaaattcaacttatggaggaatcgtttatgtacaatgcagttggaattgatgcttctaaattcaaaagcaccgttaccgtaattcagcccgcaggaatcgttatccgcaaaccttttgatgtcctacatacatctaacgagcttaacacccttgttacctatctaaaatctctggaaggtgaaaccagggctgtcattgaatgcacaggtcgttatcacgaacctgttgtcaagtctttggaagacgctggcatatttatatccgccgtcaatcctaaactaatcaaaggtcagaaacagaattctctccgcaaagtaaaatctgatcctgctgatgcccgtaaaattgccagatatgctcttgacaactgggcagaactgcgacagtattctagtatggatactataagagaacaactaaaaacactgaattcacagttcgatttttttatgaaacagaaggttgttgcaaaagcaaatctcatttcacttctggataatacttatcctggcgtaaacaagctcttcgacagtcctgccaggaaagatggcagtgaaaaatggggtgattatgcatattccttctggcatgttgactgtgtccgtaaaatcggtttaaaagcatttacggaacgttatgaggcattctgcaaaaaacaccactacaactttcagaaaggaaaacctgcagagctttttgaagcggctaaacaactggttgccgtatttcccaaagagaaatcgtataaactccttattcaccaaagcattcaacagctaaatcttgcttcggaacatatcgaaatactgcgtaaggaaatgaatcagctcgcttcaacccttcccgaatacgatacggtaatgagcatatatggcgtcggtgaaacttatgggccacaactcatcgctgaaattggtgacgtttcccgatttactcatcgtgaagctattactgcattcgccggtgtcaatccgggtgtaaatgaatccggtcagttcagacagcgcagcaatcgggcctctaaaaatggttcaaccaaacttcgtaagacacttttccagatcatgaccacttaccttcaaaataaacctgtaaatgagcctgtttatcagtttcttgacagaaaacgagcagaaggaaagccttatctggtttacatgactgctggagcaaataagtttcttaggatctattacggcaaagtaaaagaatgcttacacaatctggagcaggactcgttaccacctgaagaatcttaaagaactattttgacatacctccttaaaaagctggctattaaggcagcttatttttcgtgcctatttttcaaataaaaacttttttcaatttatacttgactttttattagtagg

SEQ ID NO: 3355 - DNA, 1836 bp, unidentified
  source 1..1836: mol_type = unassigned DNA; note = element_4e37fc0
  misc_feature 1..3: note = core
  misc_feature 4..115: note = LE
  misc_feature 116..1405: note = CDS
  misc_feature 1406..1836: note = RE
  misc_feature 1483..1754: note = bridgeRNA
gagcattcctgtaattcataaatagcaccaattgaataaaaagagacctagcgttaagatttaggtgttcatcttggcggatgaaaaaacatcaaatcaaactgggaggtctcaaatgaattatacacagaacgagaaaatcgaacaagtaacagatacaacattggtggttggaattgatataggaagtcagctccattacgccagagcctttgataatagaggcagagaattaacaaagaaggtattctcgtttgggaatgatcttgaaggttttaacagctttaaccaatgggttgagtccttaaagacggagaataacaagacaaatgtgataataggttgcgagcctacaggccattactggtttgcacttgccaagtacgtggctgatcatcagaagacattagtaatggttaatccattttccgtcaagaagataaaagaactggatgataacagccctaagaaaacggatgcaaaagatccgaagacaatagcaaaactggtggtggatggaaggtattccataccatacacaccggaaggcatttacgccgagataagagatttggtatacagccgtgacaggatcgtcaagcagcacaatatttctgcgaataggatccaacgctggctggcaatacacttcccggaatatctgggattatacacaaggtttgatgcttcatgcggcctggcagtgcttgaaaaggcaccattgccaatggatgtaatagcgcttggagtagacgggattcggaaaatctggcatgagaaaaagctgcgtggcagaggcgttacagaagatagggcgaagaccctggtggaagccgcgcacaacagcatcggattggacggaggagccggaacaagaagcgaattatatatgctacttgaggagcataagctttggacatcacaattagaatcggttgaacgagtgatcggagaaactgttctgaaagtgaagcatgtggagaacctgctcgccattaaaggagtgggaataataacgatagccggattcattgctgaggtgggtgatataagacgcttcaagtcacccaagcagatccagaagtatgcgggactggaaattgttgaaaacagttcgggaaagcataaaggaaagtcaaagatcagcaagagaggaaggcgcaaactcagaaagatactgtatcaggtaatgataccattacttgccagtaacaaggagttcaggcagatatatgattattatgtctgccgggtcaagaatccgctgaagcgcagacaggcaatgatagccgtgagctgtaagcttatccgcgtgttctatgtggtattgaccaaaggaacggattacgacaggttcaagatgatgtcggatatccatcacgaaagcgagcaaaccgccgcttaagcaacaaagtactgtaagcaggaaagcgtccgccaagattggtgctgtgaaacaggaatgcaaaaatatataacaaagtagagccagtagctgcgttgacatttcatatagggcatgaccctgttttaggagcataagcagcacccaactatggataagcagaacgaaggaatttaggacccatcagaggatggtgatcctggtagacatgagaggtttgttactgtaggtgatgtgggaggaaaggaaggccttcataaaggaaaacgacgacgttcttctttgtgtaccattattcatctgaaaagggctcatagaagctacttcatatccagataacactactttggaagatataagtaacttgtaaacagtttaacaaatgctttatttataaggaattttgttaaatatcaataaaagaaagtaga

SEQ ID NO: 3356 - DNA, 1577 bp, unidentified
  source 1..1577: mol_type = unassigned DNA; note = element_4e441ec
  misc_feature 1..2: note = core
  misc_feature 3..253: note = LE
  misc_feature 254..1456: note = CDS
  misc_feature 1457..1577: note = RE
  misc_feature 32..273: note = bridgeRNA
ttagtaccataaaagtgtagttgttagagagtaattaactctgacatctgcacttattttttataatagggggagtaattgatctgacgtggggctttttgggtcgtagcatccgtcatagaaaccgtcaaccaaccccttattataagcattcgattaagcaggtcgggatccgctcccgcgtaaccaactaaactgaatggtaataagtgcggctggaacaattacgaatatcagttttaggaggttcagggtgataagcgtaggagtggatgtatctaaagggaagagcactgtttgtgttcttaagccttatggtgagattgtgtgcagcccattcgaggtgctacatgtggagaaagaactggaaagccttgacagcctgttgcagaagctggatggagaaatccgggttgtgatggaagcaacgggcatttaccacttgccgattctattattccttcaagagaaaggctattttgtctctgtagtgaatccttatgcaatgaagaaatatgcgaaggacaacagcatcaggggagccaagacagatcgtctcgattcagtcatgattgcgcattacggtatagaaaagtggttcaagttacaaaagtatgatagtgacgaagaactttatgctgagcttaagctcctgggtcgtcggtaccgctactatatggaactccatgtgaaagcactgcaagagctgacgcatatcctggattacgtgatgccgggtataaaaaaactattcaacagctgggatgaagccagtggcaaggacaaactcagtgactttgtggagcgcttctggcactttgacctgatcacatccatgagtcttgatgaatttgtcgacgaatacctgatctgggcagaagaaaagaaataccaccggagcagatcaaaggccgaaacagtctatgaactggcatctggtggtatctccacactgtcttccagtaccccatcgaccaaaatgctggtacaggaagccgtaacagtattgagagctgtggataactctctgtctctgattttatcacgaatgcaggagcttgctaagtcattacccgaatattcaacagtacgggcaatgggaggcgtcggagatgtccttgctccaaagttaattgctgagatcggtgatgttcggcgccttcatagtgcaaaggcgcttatcgcgtgggccggaatagatcctccaccgtatgaatccggccagtttgttggctccaggcgcaagataacaaaacgaggttcatctactcttcggaaggtcggatatgaagtcatgagggtgcttaagagtcataaggcgccaaaagacgatgctgtttataactatatcctgaaaaaggaacgagaaggtaaagacaaaaagcacgcaaagattgctggattaaataagttcttgagaatctattacgcaagagtaatggcagtctatcaatagcgaatgatcagagcaggtcctgccaggctgggttattattccggccttattgttgtacacaaaaatcgaatcatgagaaatataaaaacctgctgaaaagctcttgacttttgttagcagg

SEQ ID NO: 3357 - DNA, 1381 bp, unidentified
  source 1..1381: mol_type = unassigned DNA; note = element_4e4b74d
  misc_feature 1..2: note = core
  misc_feature 3..82: note = LE
  misc_feature 83..1114: note = CDS
  misc_feature 1115..1381: note = RE
  misc_feature 1142..1369: note = bridgeRNA
tgatgcagtggacggctcccatccgaggcatcggaatgtgccaaaatggtgatttagaaaccaccggaaataggagccgaccatgaacgacgttatcacaataggtgttgatcttgcgaagaatgtatttcagatccacggggttgatgcggagggcgctgtgattgtccgccgtcagttgaggcgcaggcagatgctgccgttcttcaagaaacagccatcctgccttgttggtattgaagcctgtgccacgtcgcaccattgggcccggcaattggttgaacttggtcatcaggtcaagttgatgccgccgcgttacgtcaaaccctacgtgaagcgcaacaagaacgacatggcggatgcggaagccatctgcgaagcggtaacccgaccgaccatgcggtttgttgcgatcaaaacagaggagcagcaatcggtgctgatgttacaccggacacgtcagctgtttgttcgtcagcgaaccacaataatcaatgctcttcgcgcgcatctggccgagctcggcattattgccggtattggtcgaaatggattggaacgattgctggatgtcattgccgatgatgaagatgagcgcgtaccacccacagcacgtgattgtctgttggccttgcgagttcagctcgaattggtgaagcaacagatcctcgaagcggaccgacgcgttcttgcctggcatcgggccagtgaggcgagtttgcgtctggatgatattcctggtgttgggcccttgattgcttctgcacttgtggcctcagtgcctgatccccatgccttcaaatccggtcgcgatttatcagcctggatcgggttggttcccaagcagaactcaactggtggcaaggagcgtctcggacatatctcgaaagctggcaatcggtatttgcggatgctgcttgtggttggggctctgtctgtgatccgccgcgccaaacaagtgggatatacgcgcaggccctggctgacaaagttattggaacgtcgatcgaccaaggttgccgccatcgcccttgccaacaaaattgcccgtacggcgtgggcgatgatggcgcacggaacatactataaggagcctgtcgtgcgggctatttgaaacacgcgcggggataacccgcgctcacgaggttggaaagggaaacagacgattaatgcacccagccggttgatccgaagatcaggacactccactagtgccagtgcagccaattgactgcgtgcttttgaccggaacctgatctgcggagagcattatggccagcggccatggagagtgccgcacaaacaggccggacacatggccgcaccgaccagctctgcagtatcgtcaaaaaaaccttgccaacagggggccgtccacaca

SEQ ID NO: 3358 - DNA, 1279 bp, unidentified
  source 1..1279: mol_type = unassigned DNA; note = element_4e52b01
  misc_feature 1..2: note = core
  misc_feature 3..239: note = LE
  misc_feature 240..1265: note = CDS
  misc_feature 1266..1279: note = RE
  misc_feature 68..224: note = bridgeRNA
tccattagacttaataagtaaaaagatatagttttacaataatattaaataacaaaataaggtttaaataaaatacccaaagaaccgattaagtctatgactcgctcaaacataaaattatacgctgattaagacccggttctttgatggttaaagctaaataatatttccatataaaagattattaaaatggagtaagctcataccaggctttgggtattttaagcaaaaataacacaatgcaaacaataaaatattttattggctttgatatttcggcagatgattttactgccagttgcattatcagtcctgataatcctgttttttcaacacaaaagttctcaaataacattgatggtactaatgagcttattgagttattcgataagaataacataaaaccatctgaagcaattctctgtatggaagctactggtgtttattctgaaaaactctgttactttttagcttcaaagggatttactgtatctgttgaagctccacacaagataaaaaataagatcaaagattcaccaagaaagaatgattttattgatgcactggcaattgctgaatatgcttaccgctacactgataagcttcccaaatggaagcctcgcaatgagattcttgagcaaatacaggtgctcttgagcactcgtgagcatcttagcgttcagatgattgctaatgtcaatgctcttaaaactctaaagcataaatactatcagactccgctggctaaccagatatatcagcagactatcagtaaactcaaagaacatataaaacagatagatcaggaaataaaatccttaatcgataaagacgattcttttaagaacaatgtttctttagccaaatcagttcctggtgttggattgcttttagcagcaaatcttctggttctttcaaagggctttacagaaaatctaaactataaacatattgcttcctacacaggaatatgcccttatgagcagattagcggaacatcgctgcataaaccaccaagatcaagaatgtgtggcccttcaaagcttagaaaacttctttatcttgctgcattatctgtaagaacacataataagaactttaagaaatacttcctccgcaaagtagaggaaggaaaaaacaaaagactaatactaaacaatattgaaaacaaactgttaaaaataatttgtgctgttattaactcaggctgtgcttatactgaaaattataaatctataaatccaaatagattaaatacagcttgacaatgtcataatat

SEQ ID NO: 3359 - DNA, 1594 bp, unidentified
  source 1..1594: mol_type = unassigned DNA; note = element_4e55af3
  misc_feature 1..2: note = core
  misc_feature 3..247: note = LE
  misc_feature 248..1306: note = CDS
  misc_feature 1307..1594: note = RE
tctaccatcggaatttagcaggtagcaggagcggagagaaacgagtataagagttcctgacgagggtgtggctcttggggtcagtggcctgtcaattcaggttcacatagcctgaaatgccgccctcgtcacctgcatcatccgaagggtcgaccgggatggtgccatattctcaccagaatacgtggctctgtaagtagacgagacctgaggatgatcgatctcgatctgcagaaggaggagctacgtgtcagaagaaaaatcggtacagttacgagtcagtatggatgtgggctaccgtcgtcacagtgtggcgatcgggttacctagtggggaagtgttggaggagtttgagatcgggcaccggctcgaaggttttcaggattttttctcccgcatagaaaaacacagccacaaacagggttattcggtgtcggtagcgatggaaggttataacggctacgcgcggccgctcgatagcatggtacggcagcacggctatcggctttataacatcaacaatctgaagctggcacggtttaaggagatctttcctggatctgccaagagcgaccgcatcgatgcgcgcaaggggttggagctgtttcagctcagcgatcatctgccgttagccaaagaagtcctgcaggaagtttcggggacaccacaggagaacgaagtgctcaaacggttgacccggcgccgacggcgcttggtcaacgagcgggttcgggtggttaataatctacaggcggacttgcaagcggtgtgtccaggactgttagagatcacttcagaggcgagtaaccagtggtttttaaactttcttctcagcgtgaagactcttccccagccagcccggattagaaaagcgactcttctgaagattcccgcagtgggcagaaagtatgcaagcctcatcgaaggctggcagaagcgggcgtactttggtgcagaagtcgattgggtcagtgaaatgatccaggaagacggacagcgctgtgttgagctcgaagaaaagatcaaggctcttctgcagaccaagatcaaacaagtcgccaaggaatccaagatcgccaacattctcatatcacttcctggctttgggccagtgtgtagctcggagctagccggcgagattggcaccatcgagcggtttagcaaggaaggaggtctagctctgtacctgggcatgtctacgttggataacagctcggggaagtaccaaggcaccgaagcacgtcaacacacgggcgaaagcggcaatgatgatcggcttggatcgtcatcgaaaatatgtgcctgagtcgcagaagtactacgagaagaaacgaggcgaggggaaaaagcacaaccaggcgatccgtgctttaggccgacatctgtgccggatcatttacaagatgctcaaagaggggcgcgagtacgagattcggcctgaaaagggggataccaagaccaaggtcaggccgagatcatcgcttaaaacgaaaataccgaggccgaaaatttcaatcaaagaaacgaaataacaaaatctacaaacagagcccgttcacaaccgcgttgccgcttgaaatttccagcgggatga

SEQ ID NO: 3360 - DNA, 1171 bp, unidentified
  source 1..1171: mol_type = unassigned DNA; note = element_4e57ff5
  misc_feature 1..2: note = core
  misc_feature 3..217: note = LE
  misc_feature 218..1168: note = CDS
  misc_feature 1169..1171: note = RE
  misc_feature 16..193: note = bridgeRNA
cttgtatggcgttagggtaggaacctgtcggggtgtggagggacaagatccgcttctgcaagccagacggtaggagacttcccccacccacccgctcacgacaagcgccgataaggaatccatcggattgagtagccgctcaaaccgacaataccggcaagcctgcgccaatgtgagctcccgacaggttggaccatcttcactgtcggagaaccccatgacaagccaagttccggttatcggtatcgatgtcgccaaggagtcgctgagcctctgcgatacacgctcgggcgaggtattcgaactggccaatgacgtccgcactatcaaggcctggctgaaaacccttcctccctgctgcgccatcgcgatcgaagcgaccagcacctatcacatggatgttgcgaccctggcgcatgcgcggggacatcggatctacgtcatcaatggctttcgcctgagcaactaccgcaaggggattggtgggcgaaacaaggatgatcgcagcgatgccctgctgctggcccgttacctgacccacgaacaagcgcaactggagccttggcagccgccgagcaaggcctactgccgcctgcagacactgctgcatcggcgtgctgcactggtccgtagcgccatctcgttgcgccagagcttttcccaggatcgctccttggccaaggcgctaaagcctgttctcaagcaaatggccacactggagtcacgcctggagaaagagattcaacaggcgctgcgagaggctggcctaatggagcaaagcaagcgctgccaggccatcgaagggatcggaccgctgacggcagcggccctgaacctggcatttctgcggggacgttttcgcaatagcgatgccttcatcgcctttatcggattggatgtgcggctcaaggagtccggccgctatagcggccgacgaaagctgaccaagcaaggggaccctgaaatccgtcggctgctccacaacgcggccatggcggcagcgcgcacgcagcgctggcaggccctttaccaaagctacctggcgcgcggcctgaagaagatcgaggccctgactatcctcgcccgcaaattagcccgaattgcctttgccctgatgcaatcccagaccagctaccagcctccaaagcaggagccgtcattgacatagaat

SEQ ID NO: 3361 - DNA, 1469 bp, unidentified
  source 1..1469: mol_type = unassigned DNA; note = element_4e590f9
  misc_feature 1..2: note = core
  misc_feature 3..230: note = LE
  misc_feature 231..1448: note = CDS
  misc_feature 1449..1469: note = RE
  misc_feature 7..232: note = bridgeRNA
ctaatgggggtccaccgctgatcggagccgatccgagaggctgtggccgagccaccggcaggtcagcactgaagcggccaggggcttgacccttaggtctagaacgtgcgcctgccggtcggtgaggccgaccttcgacaactggtgggatgacgtgccaggagcactgaaccattaggaagctgctggtcgcctcgggctcgtgaccgaacgacgaccaggaggtggcgatgggcaaggtgttcgtgggccatgactgggcagaggcccaccacgatgtgtacgccgaggacggggaggggcggcggctgggcaaggcgcggcttcccgagggcgtcgagggcgtggcccgcttccacgagctggtggcccccttcgccgaggagcctgccgacgtcgtggtcgccaccgagaccgaccggggtctgttcgtggggtcgctggtggcggccggctacacggtgctggcggtgaacccgatgtcgacgtcgcggtaccgggagcgccactcgacctcgggggcgaagtccgatcccggcgacgccagggtgctggccgagctggcccgaaccgacgcccacaaccaccggcccatcgccggcgacagcgacctggccgaggcggtgaaggtcctggcccgggcccaccagtcgatgatctggacccgccagcgccagaccaaccagctgcgctcgacgctgcgggagttctatccaggggccctgagctgcttcgatgacctcgacggcgccgacgccttggccatcctggccgtcgcccccacgccgtcgctcggacgcgccctgtcccgggccaagatcgcctcggcccttcgccgcggcggccgccagcggcgcgtcgacgagcgggcggcggagatccaggccgccctgcgctcggcccagctcgccgcccccgccctcgtctccgaggccatgggggcaaccgtccgcgccctggtggcggtgatcggcgagctcaacgtccagatcgcccagctcgaggccaccctggcggaccgttttgagcagcacccggacgccaaggtcgtccgctccctgccaggactcgggacggtcctcggcgcccgggtgctcggcgagttcggggacgacccgaaccgctatgccgacgccaagtctcgcaagaactacgccggcacgtcacccatcaccaaggcgtcgggcacgcggcgggtcgtcctcgcccgcttcgcccgcaaccgccggctcgccgacgcctgctacctctgggcgttcgccgccctcaccgccagtcccggtgctcgggccttctacgaccagcaccgtcaggccggcgacacccaccaccgcgctctgcgggcactcgccaaccggctcgtcggcatcctccacggctgcctccgtcacggcgtcctctatgacgaggacatggcctggggacaccgaatgcaggaagctgcttgacaagtaccgcccgtgggatgt

SEQ ID NO: 3362 - DNA, 1346 bp, unidentified
  source 1..1346: mol_type = unassigned DNA; note = element_4e68b74
  misc_feature 1: note = core
  misc_feature 2..57: note = LE
  misc_feature 58..1092: note = CDS
  misc_feature 1093..1346: note = RE
  misc_feature 1092..1336: note = bridgeRNA
tatggaatggcccgcccctctcctccattctgatcgggtgagcaaccggagggcgacatgaaggacgttcggacacttggagtggacttgggcaagaacagctgcagcgtggttgggctggatgcgacggggcacgtgttgctgcgtcgccggatgcggcgcgagggtgtcgtcgcacttgcggacaagctgccgggctgcgtgattgcgatggaggcatgctgcggcgcgcatcacctggggcggcttttggtcgcgcgagggcatgaggtgcggttgatgtcccccgaatatgttcgaccctacgtcaaggcgcagaagaacgacgaccgggatgccgaggcgattgccgaggccgcgacccggccgacgatgcgcttcgtggcactcaagactgaggcgcagctcgacgtgcaggttctgcaccgcgtgcgcgaccgcctggtcggtcagcgaacgtcactgatgaaccagatgcgcagcatcctgctcgagcgcgggaccgtggtagcacaaggccggcgcagcctgctggacgcgctcgctttgctggcggaggaggctgagcccagcggcattagccggcgcgtgcgggcgctgctcgacgatatgcttgaccagtggcgggcgctcgatgggcggattaaggcgctcgacgacgagttcgccgagatggcgcgcaccgacccggccgcgcggcggctggctacgatccctggcatcggcgtcatgaatgcgacggcgttggtggccgcgatcggcgacgggcgcacgttcagtcgcggccgcgacctctccgcctggctcggcctggtgccgcggcaggcgaccacgggaggcaagccgaagctgctcgggattaccaaacgcgggagcaaatacctgcgcaagctgatcatccagggtgcccgggcggcgctgccgtcgctggctagaacgtcgacaccgctcggcgcctggttgcgaggcttgctcgcgcgggcgcacggcaacacggtcgtcgtggcattggcgagcaagttggcccggatcgcgtgggcgctactgcgcaccgagaccgggttcatggccggcgggccgacggcggcatagggatcggctggcgatgatcacccgacatcgccagccgtagagggtctgcgggtggtggaaacgagatggcctgacagtcaaccggtgtcccgtcagcctacggcgcaaaatggcactcgatgccggcccctttatgaggctcgggacgcgcggatctccatcttggccagggttcgaccctgagaccggatacgttgatgcagactgctcagatcagaccgatgaaactgcttgcagacggggcgggccatacg

SEQ ID NO: 3363 - DNA, 1364 bp, unidentified
  source 1..1364: mol_type = unassigned DNA; note = element_4e819fc
  misc_feature 1..2: note = core
  misc_feature 3..77: note = LE
  misc_feature 78..1103: note = CDS
  misc_feature 1104..1364: note = RE
  misc_feature 1079..1351: note = bridgeRNA
tgatggggtggacgccccctcgacggcatcgtgtgccagagtggtggtgtttcaagccactcgcaaaggatgcgtccatgaagaatgttagcacaatcggcctcgatctcgcgaagcacgtattccaagcgcatggagccgataagagcggcgctgtggtctttcgtaagaagctacgacgccaacaggttctgccgttccttgccaccctcccgccttgcaccgtcgccatggaagcctgcgccggcagccactactgggggcgcgagatcggcaagctcggccactctatcaaactgattgcgccggcctatgtgaagccgttcgtcaagcggcagaagaacgatgcgtccgacgccgaagcaatttctgaagccgcgcaacgaccgacgatgagattcgtatccgtcaaaagcgaagaggcgcaagctgcggcgatcgtattccgcactcgcgatctgcttgtccgtcaacgcacgcagacgatcaacgcgttgcgtggtcacctggccgagttcggcatgatcatcgcgaaggggccgcaacacctgtccaagctcatcgcgatggtgggcgacccaacttctcacctgccggaagccgcacgttcaattctcgcgctgctggtcgaacaattacgcgcgcttgaagaacgcgtcaccaggcttgatcgggagatcgcaggtcgagcgaaggaggataaggtcgctcgtcggctgatgacgattccaggcatcggcgtggtgacagccgtagcattggccgctctcgcaccatcacctgagaccttcaagcgtgggcgcgattttgcagcctggctcggattgacacctctccaacgatcgaccggcggcaaggaacgcctcggcaggacttcgagaatgggcgagcgaacattgcgacgcttgctgatcatcggggcaagctcagttgcagcctggactgctcgcaagggagcgttggccgggtcatggctcgatcgaatgttgcgccgtaagccgcccatgctggtgcgggtggcattggccaacaagatggcgcgcgtcgcatgggctctgctcgccaatggtggggtatatcgaactccgatcgtggccgcatagggcgggatcgcgagggttgtcgacggcgtaggaaggtcaagcggagggtatggcgcaacggtcgacgagacgggatcgggaaaaccagttcatggacgagcgccacgagcgcgcgagattgtaatggatccgatccgcgaactcccatacgggcccgcggcatgtgactgcgccgcatcagaggccggatacatgtcagcacctgaccatgcgctgcgcagcttcgaagattcttcttgcaccggcgggggcgtccataca

SEQ ID NO: 3364 - DNA, 1610 bp, unidentified
  source 1..1610: mol_type = unassigned DNA; note = element_4e8c39a
  misc_feature 1..2: note = core
  misc_feature 3..269: note = LE
  misc_feature 270..1490: note = CDS
  misc_feature 1491..1610: note = RE
  misc_feature 26..289: note = bridgeRNA
ctgatacaatataattgaccgaagaaagtgcggtatttgggaatagcactttcaaagttccgttacctaagctataatggaaagggataaggtctgacggttaactccttgtgcttttacgcacgcatctaagactgtcagccgcccttcccattatagcgttcggtttcagcaggtaggactccgcgtccgtgtaacaaatcagataggatcggtaatggacaaggtcggtcaccttatatccctaatcctttttccggaggtcacatatgaacgctgtcggtatcgatgtttccaaagacaagtctaccgttgccatcctgcgtccgtttggtgaagtcgttgcttcaccgttcgacgtgtatcacaatccaaacgaacttcaagcgctcgtcacacgccttaaaagtttggacggtgatacgaaagttgttatggagtacaccggcaattactacctgccaatcgctcagttcctctccaacaacggtttatttgtctccgtagtcaatcctatcctcgtgaaagactacagctccaaatctttaactgtccgcaaggtcaagaccgacaaaaaagacgccgttaaaatcgccaattttgcctttgaccgctgggctgaactcactccgttttctccgtttacacagattcgtctccaactcaaagcactcaacagacagtacgataagtgcaataaacccaagacaatgcttaaaaacaatctcatctcactcctcgcccagactttcccggaggtaaatcttttatttacttcgtcggttaaaaagtctaacggaaaggagaaatgggtggattttgtcttgaaatactaccatgcggaatgcgtttctggcaggtcgcttgtttctttctccaaatcttaccgctcatggtgcgagaaaaacggatatcgtttttccgaaaagaaagccctgcagatttatgcgtttgcctgtaactgcgttccaactttgccgctctcggaaggcacaaagctccttgtgtcttgtgctgccacgcagctcaatgatatggatgctaccctggcgtctttaattgctcagatgcattccattgctaaagctctgcctgagtacgatgttgtcatgtcgatgtacggcgtgggttacgttctcggccctcagcttattgctgaaataggcgacatatcccgtttcaaaaagaaacaatctctcgctgcctatgccggtgtcgatcccgaacagaaacagtccggcaaaaacgatcctaagtctcgccctattacaaaacgcggttcgcctcatctgcgtaaaacactatttcaaatattgagcgtcttcttacaaaacgctcccgaagacgagcccgttttccaatttattgacaagaaacggaaacaagggaaactttacctcgtttacatgactgccggtgcgaacaagttcttaaaaatctactatgcccgtgtgacggagtacctcaattctctccaacaagcggcttaacttcatattatttttactttttttaagtcggcgatctcttggcggctttttttgcttacctcctgctaaaaaaatattctcaaattttttcatttttttgcttgacttttattagcaggt

SEQ ID NO: 3365 - DNA, 1164 bp, unidentified
  source 1..1164: mol_type = unassigned DNA; note = element_4e9459c
  misc_feature 1..2: note = core
  misc_feature 3..203: note = LE
  misc_feature 204..1154: note = CDS
  misc_feature 1155..1164: note = RE
  misc_feature 30..209: note = bridgeRNA
cttgtatgaggaaatcctgctatggatgaggagttggctctgcaggggtggccacccctgcagagccggtcgattgtcggatcggaaacccctgagccgttgctggctgaggatgagcgtgatcgcagtcgactttcttcatcggacccggatggttgcttgaacaccctggttcgcattaacgcaaggttgggtcgacgaagatgaacgatactagcatgaaatgcgccggtgtggatgtctccaaggccaagctcgacgttgccgttttcgacgggcagcgttttgtggagaccaacgacgccgccggccaccgccggctggcggcgcggctgacggcggccggggtcgaacgggtcggcatggaggcgagcggcaactacgaagccgccgtcagagcggcgctcgaagtggtgggcttcgcggtcaaggtcttcgatccgcgtcaggtccacggctatcgcatctttcgcggtcgccgtgccaagaatgatgcgatcgatgcccatctgatcctcgccgccacggcggcgctgggcagcggcggcgcggcggccgatccgcggctggcggcctttcaggagcacatgacgctgatcgacgccctcaccgacgacattgcccggcacgagacccggcgtgaccgcttcagcgatccggcgcatcggcgctacctcgaggccgagatccggcggttgagcaagcgcaagtccaaggagctcgccaagctcattgcaaaggtgaaggcccatgccgatctggccaagcggttcgccctgctgctgagcatccccggcctgggcgagatcaccgccctggtcttcgtcgtgcgcatgcctgaactcggccgcttgagccgagccgaggcggcggcgctcgtcggcgtggcccccttcgaccacgacagtggaacccatgccggacagcgccgcatcgcgggtggacgccggcggctgcgcaaggccgtctacatggcggccttctcggccgccaaccactggaacccgatcctcgtggccttcaggaaacgcctggtcgacgcgggcaagacctacaaacaggcgatcgtcgcttgcgccagaaagctggtccacatggccaacgctgtcctcgccagaggaacgccgtggaaccctcaaaatgccagcgcctgaatcatggttg

SEQ ID NO: 3366 - DNA, 1282 bp, unidentified
  source 1..1282: mol_type = unassigned DNA; note = element_4e979a5
  misc_feature 1..2: note = core
  misc_feature 3..242: note = LE
  misc_feature 243..1268: note = CDS
  misc_feature 1269..1282: note = RE
tccattagactattaactatgaataatttaaaataaagtaaagtttttaaataaaaccagctatcggatgaagaaggctgaataagtctaaccttgcctaaaagtaataaaacttaaattgcgaataagacccagccttctgaatgattaaagctaaatagtgctttcatcgttaaacaagcgattattaatggagagagctcatatcatcgtttatccggttttagaaaggactaagtatcatgaaaaagaacgtattttttatcggtctggatacctcaaaagatgattttgctgccagcatctatcagtctccggggcaggctgtgatcaccaaagaagccattcccaataacccgaagggctttacacagtttatctcctggttaaaagagcagcagatcaccaagtccaatagccgtatctgtatggaagccaccggagtctattcccaggcaatcgcctattaccttttactccacggctttccggtcagtatcgaaccccctttgaaggtgaagcgggcctttgacccggtcggtcacaagaccgattcgattgacagcaaacagattgctgaatatgcctaccgctttcaggatgagctgaccgcctggcagccgaaagaagagcttctcgaaaagattcggcaattgttgagcgtccgggaacagtttaccaaacagaaaacggctttaaagaatgccatgcacgcctacagcctgcagagggtccaggtggaactcatccgtaaagctcatttggaaaccctagcacagatcgaaaaacagatcgcccggatcgataaggaactttccaagctaatcaaacaggatcctctgatctctcaaagggcaagttacctggatagtatccccggatgcgggatgctcctggctgctcacctgctggttttgaccgataactttacccggattcaaaaagctaaaagattggcgtcttttatcggtattgtcccataccagcataaaagtggtacttctgtagcaaaaagagctaaaatacgccactttggacctgggcccattcgcaaactgctgcggcttgctgcccaatcggtagctacccatgatgcgacttttcgacgctattatttgcgtaaactcgcccagggtaaagccaaatcattggtcctgaataatattgccaataaactgcttaaggtggcctgttctattattcgggataatacccgttatatcaaggatcatcaatcaatacatccaatgtatgtaaaaagtgcttgacaaagtcatagtgt

SEQ ID NO: 3367 - DNA, 1596 bp, unidentified
  source 1..1596: mol_type = unassigned DNA; note = element_4eaa831
  misc_feature 1..3: note = core
  misc_feature 4..270: note = LE
  misc_feature 271..1467: note = CDS
  misc_feature 1468..1596: note = RE
  misc_feature 8..246: note = bridgeRNA
cttgtatatttaatttagtcagttaaaatgacttttctttttaccgtattgttatttatactgatgataagcgctgtggattagtatttcctccaacagattctacttgaatactggttgaaaaaggctctaaccacaactctttgtcagattgttaataagtttgttagcgcaaggcaatcgccctgacgcttgatagttcacaaggttacatcggcttagagagcgtggaacacagcgcatatttttttacacaaggagtggttctttatgttatatgcaggaatagatgtcgctaagcacaaacatgatttagccgtcattgatagtcaaggagaagtgtttatccgtcacttaaaaattcaaaataaccgggagggtttcacccatcttcaaatgacctttgagaatctccgagtgaccacccaacaagagattcaaattgccttagaagatacgggacactattcctataatttgattcgttttctccgtacccatagctattctacattcagttataatccgtttttgattaaagaatttgccaaaaaacagacccttcgtaaaactaagacggataaaaaagatgccgtgaccattgctcgtaaattacgagaagatgttgataaaaccttgtttgagaccgatacgcgtatacttgagctgaagtatgccacacgaaatgtgagccgcctccaacaagcgcgtgcgaaacaaaagaccaattatacccgcttgttagaccttctttttcccgaattagcgccttctctggaagggcaaaatgcccaccataaccaagccatttatgagatgctcaaagtctttccttctccccagaaaatcgctcaggcgcatttgacccggttaaccaaccttttatcccaatcttcacggggaaaatatgggaaagaacaagccattgcctttaaacaactggcagcttcgaccattggtcaagcatccgctattttagaatttgaattactccaaaccattgatttgattgagtatttcactaccttactaaaaagcgcggagaaggaagttgaaaaacttatgaagaccattgattcgcctatactgaccattccaggcattggcgttaagctaggggccattattttagctgagatccgttccattgatcatttccaaacgcccgctcaattactcgcttttgctggttcagaaccttcaatcagtacttcaggagaaaaccaacaagagaatggtcatatggtgaagcgtggttccacctccttacgttgggcattacatgaagctgcacgactctctacggtttgggcgcctccaatgaaaaagtatttgaacaaaaagttagaagaaggcaaacattatacggtcgccatcacgcatgtagtaaaaaaactggttcgcatcattttccatatcttaaaaacaggagagccctatcaagagaacaaagtggtcgttaactaattaaaaaacaacctttctttaaaatggctattttaaaggcttatttcgtatgcccaaatttcgacaaaccaaagaataaatttttgttattccattttttgtttattctcttgacttaatatagtttgt

SEQ ID NO: 3368 - DNA, 1400 bp, unidentified
  source 1..1400: mol_type = unassigned DNA; note = element_4ec11f5
  misc_feature 1: note = core
  misc_feature 2..88: note = LE
  misc_feature 89..1108: note = CDS
  misc_feature 1109..1400: note = RE
  misc_feature 1161..1392: note = bridgeRNA
taatggtatggactcctcctctctacggcatcaaagtgccagactgaagtttgcgaaaacaatcggtcaacaagaagaggagtccgagatgaagattaaccgcatgggcattgatttggcaaagagcgtttttcagttgcatggtgtcgatgagaatgaacaggtcgtggtgcgtcgccagctgaaaagaagccagatgcaaggctattttcatcgtcagcaacctatgctgattggcatggaggcttgtggttcagcgcattactgggcacgcacgctgacagcgatgggccatacggtgaagctcattgcgccccagcacgtaaagccgtatgtcaaatccaataagaatgaccgcaatgatgccgaagcgatttgtgaagccgtatcaagaccgacgatgcgatttgttgcggtaaagacaatcgaacaacaggatatgcagtcgattcatcgcgttcgcgagcgactggtaaaagcccgcaatgccctgaccaatgaagtgcgaggtttgttggcagagtatggcatcgtcatctcggcacttggcgtaagtgcggtcagcaaggcattgccgacaattgtcagcgatgcagagaacggtctgagcagaaagatgcgggagttgttgcatggcatgtacgaagaacttgatgcgctgaaaaagcgaataaaacagtttgaccaacaaatccaacagcacagtcaggaagatgagcgcgtgcatcgattgatgcaaatcgatggtgtaggccccatcaccgcgtcagccatcgtgaccgctgttggcgacgccaagcagtttcgcagtggccgggagatggccgcctggttaggtattgtgccgaagcaacactcaagcggtgggagggaaagactcggcggtatcagcaagcgcggcgacaagcgattgcgaactttggtgatacacggcgcgcgatctgtcatcaagatgagcgagaagaaggatgacagacgcagtcagtgggtaaacgccttggccaaaaggcggaacaagaacatcgcaacggtggcgcttggcaacaagaatgttcgcatcatgtacgcgatgctgacacgcaatgttgaataccaacgagccgcttaacgactaacccgtgcatgcaagaagctagtaagtagtaagcaaacaagtaacaccaaggaaagattgcgaagcaaacgtcgttgatgaaatcaggtaagaccgtcgctccgtgaaccccgcttgacccataggctcactgcgaggcaaagccgctagggtgataggaacggagcgagcgaaccaccatcatggtcagagcaatttaaagctcatcaaaagaccgaatatatggttgcagtcatatcactgatttatcgaggcggttgtttgcaaaatgggaggagtccatata

SEQ ID NO: 3369 - DNA, 1493 bp, unidentified
  source 1..1493: mol_type = unassigned DNA; note = element_4ec4e4c
  misc_feature 1..2: note = core
  misc_feature 3..433: note = LE
  misc_feature 434..1369: note = CDS
  misc_feature 1370..1493: note = RE
  misc_feature 12..197: note = bridgeRNA
tccatacctttcttcgtgggttgatccgggtcattcgtaagatcgggacacccagggatgctgggtgtggctgccatggttgagccgttgtcgtggcttggaaggattggccgcccggcatcccgcgacgactcggctgctgattgggatgcgcgaaccgaatcgctcgtatggacgtgacagcgaggtcgtctgctgggacagcacaggagaacgacgagggagggtctggtgcccgacttgtgggcagggacagacgcgggcaaggccgaacaccactgcaccgtgatcgacacggacggcaccaaggtgctctcgcgccgggtgccgaacaacgaggacgagctgctgcaactgctcggcgacgtcttggccctggccgacggcgaccccgtcactgggcggtcgacctcaacgccggcggggccgcactgtgtggatcgccctgctggtcaaccacgggcagcggctgttctacacccccggccggactgtccaccacgcctccggctcctaccggggcgacggcaatagcgacgcgaaggacgccttcgtcatcgccgaccaggcccgcatgcgccgcgacctccagcccttgcaggagaccagtgagatcgcggtcgatctgaagatcctgaccgcccgccgcctggacctgtctgccgaccgcaccagggcgatcaaccggctccgagcgcagatccttgagtacttccccgctctggaacgggccttcgactacagcacgtccaaggtcgcgctcatcctgctgacggggtaccggaccccggccgccctgcgccggatcggccgcgcccggctgacggtccggctcaagaaccacggcgtccgcacactcaggactgccaagagcgccgccgacaccgcggtcaccgctgccgaggcccagtccaccgtcgtccccggggagaagaccgccgcgaggatggtccacaccctggccagggaggtgatggccctcgacgaggagatctccgagctcaacgccctcatcgagggccggtttcgcgagcatcccgacgcagaggtgatcaccagcatgcccggcatcggcgacatgctcggcgccgagttcatcgccgcgaccggcggtgacatgaccgccttcggcagccccgaccggctcgcaggcgtcgccggactcgcgcccgcccccgcgactcgggcaaggtcagcggcaacctgcgcaggcccagacgctatagccgccgactgctgcgcatgttctacctatccgcccaggtcgccgcgatgcactgcccccagtccaagaccttctgccagcgcaaacgcgccgagggaaagtcccacaagcaagccctcctcgcgctggccagacgccgcctgaacgtgctctgggccctgatacgcgaccaccggaccttcgaggccgtcaccctcagccctgccgccagagcggcatgacccagtcacaaggcgtcgccgccccggcttgacaacgtcattgggaa

SEQ ID NO: 3370 - DNA, 1448 bp, unidentified
  source 1..1448: mol_type = unassigned DNA; note = element_4ec64b7
  misc_feature 1: note = core
  misc_feature 2..257: note = LE
  misc_feature 258..1259: note = CDS
  misc_feature 1260..1448: note = RE
  misc_feature 61..222: note = bridgeRNA
gctctagtcttgcaccatcgattaggacttgcttccttgtcgagcgaaagatcactgaagagaactgagccgggccgtgagtgaaccaactccgcagttagggattgaaccctaatacacctatcggtactcacggccctctcaggtcttaggctcggatagaattccaggcgtaagggcctattagagtcattgagcatcggacctgtcgctcagcctctccagcgatcacttgtataacccaaaagtaactggagatggaacactggataggcattgatgtgagcagcacgacactggacttcgcgctgctcgataggaaaggatcgcatttggaaagtgtgcagatcggtaacgaccgcaaggcggtgttgaagctgatggtccaatggcgcaagcgccatggagtagatacggcaaggagcttgatctgtttggaacccaccggccattacaccttgatggttttgaacctggtggtggagcagcaatggtccacgtggttggcccatccgttggacatccatcaggcaatgggtatcaagcgcgtaaagaacgacaaagtggatgctctgcggatcgcgcagtacgcgcgcaccttccacgagaaggcacggttgttcaccgcagagaacctgaagctggacaagctcaagcacctgctaacgcggcgccagcacttggttcgctcacgggccaagcacaaggctcacatcacggaccttaaccgttacatggaccgtccggtccaagcggagttcgaccgcatggacaagcggcagatcgccttggaggacaagcttgtggcccatgtcgatgcgctgatcattgggcagatcaaggcggacccgaagaccgagcgccagtacgacctgttgcgcaccattcccggcgttggcccgcaactcgcagcctatctggtggctatcaccgacgggttcacgcgcttcaacacgccgcgccagctctcctgccatgccggtgttgcgcccttcgagcgcagctcaggcagcagcgtgcgtggccgcacccaggtgtcgcaccaagccaacaagagcttgaagacgctcctgcatatgtccgccttggtgagcgtgcgtgaaccgggcgaattacgccactattacgagcgcaagcgtgccgaaggcaagaaaccgatcctggtggtcaacgccgtgcgcaacaagctcgtgcatcgcatctgcgctgtgatacgcaacaacaagccctacgagctgcggccgatagcaaccaactgatcggatagctgcaacttcgcgtgtcgcgctcaaacggaagtaggctctgctggagagcaacctaccagggataggcacgatgaacgacgggcatgaacatgtgtcgggggcaatgcgcccctggcacatgcctggagttcctcatgcctgaaaaaaactcaacacaacgcttgtttttaacatagaata

SEQ ID NO: 3371 - DNA, 1354 bp, unidentified
  source 1..1354: mol_type = unassigned DNA; note = element_4ecbfcd
  misc_feature 1..2: note = core
  misc_feature 3..190: note = LE
  misc_feature 191..1108: note = CDS
  misc_feature 1109..1354: note = RE
  misc_feature 1150..1349: note = bridgeRNA
tgatgtgatggacgcccccattaacggcttcgatgagccagaattaaggtgttagcacttaattacgaaggagcatccatcatgaacattaaagttgttggtatcgattgccaaatccgtctttcaggtttgtgttctacttcatgataacaaggtggcatggaacagaaagatcaccagaagcgatttgatgactaagctgactcagcttccagagaacactctcatcgcaatggaagcttgtgcatcatcccaccactgggctcggcaaatgaagcagcacgggtttgaagttatgctaataccagctcaattcgttaaaccgtttgtggggcatcagaagaacgatgctaatgatgcaagagcaatatgcgaagcttcccaacgaccagacgttcacccagtacaagtaaaaactattgagcagcaagatatcaaagcattgcgaaatgtccgtcaacgcctcgtcgataatcgcattgctttagttaatcaatctcgtgctatggccgctgaatacggagtgatatttcctaagcatgtgactaagtttcaagaacttttaccattagctattgaagatgcgagtaatcagctatcccatattatgagacgtctattgattgaaaactacgatgagcttaggcagttaaatcgagatattcagcaagtagaacacgacctaattgagctgtgtaaaaccaaccaccgttttaaggcattacaagaagtaccgggatttggccccattatcagctctgcattaatcagtgaactcggtaccggaaaacaattcactaatggccgtcagttttctgcttggtgtggtttagtccctaagcagcatagctcaggaggtaaatcctgcctgaaaggtattaccaaaaacggcaataaacagctacgaacgctaatcttgcatggcgcacgagcggttgttcggtatgcagataaacgtcaggataagatgggaatgtggttacgggagcttattgccagaagaggcaaagtcaaagctgttgtcgccttggctaataagctatgtcgaattggatggcatcttctaagctcaggtgaacagttcaatgtgaataaagcctttgcgtaacagttaatatatagaattttctacagttaaacagcagtacccgagtttgcaagtattgatgaactaacggtcaacgtctctgcgaaaacctagttttggacaaggcattactgatgccgtggaaatgtaaaggaagtagagagcagattacatcatggcgcgagcagtaaaagctcatagagacgtcggatatatgtcagcgagccgaacctaatcagttcttgcaatcacaggggcgtccatata

SEQ ID NO: 3372 - DNA, 1634 bp, unidentified
  source 1..1634: mol_type = unassigned DNA; note = element_4ee0909
  misc_feature 1..2: note = core
  misc_feature 3..285: note = LE
  misc_feature 286..1512: note = CDS
  misc_feature 1513..1634: note = RE
  misc_feature 13..308: note = bridgeRNA
tcctactatataagtacagggtgtaatacctgacagccagccaggactacatcctctcattgttgaaactgttagaatgaaatggcattggtgtgacgtttaactccttggaccatattgcgtccgttagaaagccagtcagccggccactcattcgcagtcgttcgatttaagcaggttgaaccgtattccggatatgcgttcgtgtgataccccaggagattgaataagcaatgaggaaatgccggtaccattgcacatacaatttcatggaggacaatcagtatgttaaacgcagtaggaattgatgtgtcgaaaggcagaagcaccgttgcggtcctgcagcccggcggtgttgtaatccgtaagcctttcgatgtgtatcacaatcagaatgatctgaatgatcttgtgacttttatcaaatcattggatggtgatacaaaagctgttctcgaatgtaccggccgctatcatcggccaatcgttgaaactctgcacagagcagatatctttgtgtcagctgtcaatccgcatctgatcaggaactttggcaataatacgatccgcaaagttaagacagatcctgcagacgctaagaagattgcccggtacgctcttgacaactggcacgaactcagcgagtattcagacatggattccaagcgtgaacaactgaaaaccatgaatacccagtttgacttcttcatgaagcagaagactgccgccaagtccaacctgatcgctcttttggatcagacataccccggagtcaacaatctgtttgattctcctgtacgtgctgacggaagcgagaaatgggtcgattttgcgtattctttctggcatgtggactgtgtccgcaaactcagcctcaatgcctttaaagagcgttacacggctttctgtaagaagcacggctatatcttcaatgaactgaaggctgaagagatatatagtgcctctaaaagcctcgtggcaaccctcccgaaggagaatggttacagagatctcatccgcttcagtatcaagcagctgaaccttgaatctgagcatgtggagaaactccgcgtggatatgaactcactggctgcgcagcttccggaatatcctgtcgtcatgggtatgtatggcgtaggcacaacctttggaccacagctgatggctgagatcggtgatgtcatgcgttttacccaccgcgaagcactcactgcatttgccggtgtagatcccggcagagacgattccggtcagcgtgtcgccaagagcgtcaaagcctccaagtgcggatctgccaggctgcgtaagacactgttccagatcatgagctgcctgcttcagaatatgccggaggatgatccggtgtatcaattcattgataagaaacgttccgaaggtaaagagtattacgtatacatgactgctggtgcgaacaaattccttcgcatttactacggcaaggtcaaggaatacatgcgtaatctacaggctgagcaatcccagggcaaatgaatgaatgtcctgcttattaccatcaggccgttaaatcggtcttttcatcatggctcctaccacatcaccttccttcctggaagtttctgctaatttactattgactttttattagcaggctt

SEQ ID NO: 3373 - DNA, 1707 bp, unidentified
  source 1..1707: mol_type = unassigned DNA; note = element_4ee6b8d
  misc_feature 1..3: note = core
  misc_feature 4..279: note = LE
  misc_feature 280..1503: note = CDS
  misc_feature 1504..1707: note = RE
  misc_feature 15..299: note = bridgeRNA
tttagtacggtataaatgtagtcggcaggattatcatccggatagtcagccagctgcacttattttaagataagggagtcagtaatccggcctggcgtcgggttttttggagaatcagcgtccgtatataaaactgccagcctctcccttatctttgtacatgcgattacgcgagttgagtctgaaataacactctggtatcttactaaaatgcttgaagaataagtgagcggccgccgattactgcatgcataactacgcagaaaggaggccgtttttatgattggcgtaggaatcgatgtttcaaaactgaaaagtacaatctgtattatgaatgaatatggagaagtacttcagaagccgtatgaaattatgcatacggaaacagatctgaaagaattaaccggaagaatcaaagactatggtggaaagaatgatgttcgggttgtcatggaagccaccggagcctacagcagaccgatcctgtattatctgcttgatgaagacatctttgtctcagagatcaaccctctggcaatgaagaagtacagatcagatatcaacttcagaggtgtaaagaatgacagtattgatgcaatagcgattgcacaatatgcagttgagaaatggaacagactgaaagagtataagaaagccgatgaggaatacgcagcgatgaaagctttgtccaggcagtatctcagctatatgaaaccgcatgtagccctgacacagaatctggatcatctgatcgatcaggtaatgccgggaatcaaaacggaatttgaaggatacgatcctgtaacagggaaagacaaactggcagactttctggaagaatttcgtcattatgattacatcacatcactgggtcctaagaagtttgaggagaaattcaataagtgggcaaagaaaaaaggataccgtccgcgccagggtaagtccggcaagatttatttactggcgaaagaaggtatccctacactcacatatgattcaaccagcagactgctcgtacagcaggctgcagaggcagtcagaggcatgaatcaagtgctctacagaatattagcacagatcagagagcttgcggagaaacggcctgagtattcggcagtccggtcaatgagcggagtcggagacgtattggcgccgctgcttgtggcagaagtaggagatcccagaagataccattcaggagatgccttgatcgcctgtatagggatcgatgtgccgccatatgaaagcggaaaattcaaagcatctgaacgaaggattaccagaaaaggatcgaagcagctcaggaagctgggatatctgctggtaaagaatctcaggaagataaaaccaactcaggatacagcagtatatgactactacctgaagaagaaagccgaaggcaagaaagacaagcaggccattgtggcaggaatgaataaattctttcggatctattatgcccgcgctatggaagcgtacagagatcaggcggaaaaagaataatgcaatacagaagaacgaaacgaaaggcgaagccggaagtgaagtgattctgtattgcattaccctgtgaagtcaccgaccagtccagtcaaagctgcaaataattactcgacaaccaacccgaaagaaaaaccgtcaaatcagacggattttcgtagtgcttcggtatttatgaacaaattactgttgacaacccttagcgag

SEQ ID NO: 3374 - DNA, 1166 bp, unidentified
  source 1..1166: mol_type = unassigned DNA; note = element_4eeee3d
  misc_feature 1..4: note = core
  misc_feature 5..178: note = LE
  misc_feature 179..1078: note = CDS
  misc_feature 1079..1166: note = RE
  misc_feature 35..199: note = bridgeRNA
gcttgtatcttggaaattggttaagataacaacgattagatttggcaaggtgtatgcagcctgattccccccggggtttatagcccgtgattaagcgtttggcgcatgcactgagccactcatctgatacccgaacagttgtccgtactccataacgtatttgcaaggatgggtaataatgagtctgccaaatccactctgtgtgggaattgatgtttccaaaacgacactggacatcgctgctaccagagcgttcgcacagttcactacaaacaacgacgctgatggctttgatgccattattgctgaacttagaaagcattcggtggcgttgattctgatggaggctactggcggtcttgaagctgctgtagcctgctcacttcaggccgacggttttgaggctgctgttgtcaatccaaggcaagccagagactttgcccgtgcaatgggacacctggcaaagactgaccgcattgacgccagagtacttgctcagatggctgaagtcattcatcgtcatccggagcgggaacgctttattcgggctctgccggatgccgaacgtcaggtgcttgctgcaatggtggtacgtcaccgccagctgattgccatgttggtagctgagcgtaaccgcctgcatcctgcgcatccacaaagcagaaaaagcattaatatcatcatccaggctctggagaatgaacttgcccgaatcgatgaagatatgaacagacacattcagagtcactttaaagagcttactgaacgtctgagcagcattaaaggtgttggcaccataactgccgcagcattgctggcggaagtgcctgaacttggccgcctctcgagacgtgaaatcagtgcacttatcggtgttgctccggtaaaccgggactcaggaaccatgcgcggtcgacgaaccattttcggtggccgcgcggggccaagaacagttctgtacatggcaactcttgtggcaatccgatttaatccagttataaaggcgttttacatgcgtctgcttacgccggaaaagccaaaaaagtggcgctggttgcctgtatgcgtaagttgctgactatcctgaacgcaatgctcagaaagaacgaagaatggaatgaatcgtaccatcatattactccataatttttacgttcaagacagtt

SEQ ID NO: 3375 - DNA, 1446 bp, unidentified
  source 1..1446: mol_type = unassigned DNA; note = element_4ef02f7
  misc_feature 1..2: note = core
  misc_feature 3..438: note = LE
  misc_feature 439..1431: note = CDS
  misc_feature 1432..1446: note = RE
  misc_feature 12..201: note = bridgeRNA
tccttacggtttttgcagggtgttcgtggctgtcggccgtaggcttcgagtacccagggacgtcgggtatggctttccatattctgcctttggtgatggctcgaatcgattggccgcccgggcgtcccgcgacgactcgaccgctaattgagaggtgcgatctaatcgctgtgtaaggacacgtcggcgtggtcgtctggtgggttcaaagaccgacaacgaacacggaggtggttgtgccacagcaactatgggcgggtgtggatgccggcaagtcagagcaccattgcgtcgtcgtcgacgttgatggcaggagggtgctctcgcggcgggtagccaacgatggcgacactaaacgagttgatcaacgcggtcaccacgctcgctgatgggggcgacctcacctaggcgatcgacctggccggtggtggtgctgcgttgctgatcacgctgctgctggacgcctcccagcggctgctctacatcccgggccgcagtgtctattacgcatcgggcgcctatcgcggcgacgcgaaaagcgacgccaaagacgcggcgatcatcgccgatcaagcccggatgcgccgtgatctacagccgctgcgttccggtgatcagatcaccgtgcagctgcgcatcctgaccgctcggcgcgctgatctggtcgccgatcgcacccgagcgctaaaccggctgcgcgctcagctgctggagtactttcccgccctcgagcgggcgtttgactacggtcaacacaaggctgcgctgatcttgctcaccggttaccaaacccccgaggcactgcgtcgcgcgggcgccgcgcggctggtggcctggctgcgcaaacgcaaggcccgcaccgccgaggcggtcgccgccgccgcactcgaagctgcccacgctcagcacactgtgctgcccggacaagacctggccgccgccatggtggcccggctagcccaggaggtgatcaccctcaacaccgaaatcgccgacaccgagacgatgctcgaggaacgatttcgccgccaccgccacgccgaaatcatcctgagcatgcccggcttcggggtcatcctcggcgccgaattcctcgccgcaacaaggggagacatgagcgctttcgactccgccgatcgtctggccggcatctgcgggctggcgccggtaccgcgcgactccgggcgcatcagcggcaacctcaaacgcccccgccgctaccaccgacgactcctgcgcacctgctacctggccgcccaaagcgccgcccgcaccgacccggcgtctcgcgcctactacgaacgcaaacgcgctgagggcaaacaccaccgacaagccgtcctagccctggcccgccgacgcctcaacgtcctgtgggccatgctgcgcgaccacaccacctaccaaatcccaaccgccgcagcggcttgacaaacccattgagaa

SEQ ID NO: 3376 - DNA, 1441 bp, unidentified
  source 1..1441: mol_type = unassigned DNA; note = element_4f0b0a6
  misc_feature 1: note = core
  misc_feature 2..231: note = LE
  misc_feature 232..1428: note = CDS
  misc_feature 1429..1441: note = RE
  misc_feature 13..243: note = bridgeRNA
ctactaagagacttcacgcatgatcgatgtcgggccagactcgatctaggtgctcggcgggacgctctcaatcgcggctgcccacccggctcgctcgggtgtggctctcaactggactgcgcctcgtcgggcaccgtgacgaggcgtggctcaagaggggactgcccagctcgtagtagcactgcccacctcgccgttctccctatcggttcgaggagtgcaggaggcgccatgacgggcgtgatcatcggggtcgatccccacaagctgtcggccaccatcgaggtcgtcgaccaacacggccatttgctggggtcgggccggttcacgaccgacaaggccggctacgccgcgatgcgcagctacgtgaagtcgtggcggcaaagagcgtgggccgtcgagggagccaacggggctggaaggccactggcccagcgactcctcgccgacggggagcgggtcgtggacgtcccggcgaagcttgccgccagggttcggctgttcgacaccggccacaaccgcaagaccgacgtgctcgatgcgcactccatcgcgatggtcgcggtgcgcaccgcggggctgcgtgagttggctcctgacggtgagctcgaggccctacggatgttggccgaccgtcgcgacgaactggcccagcgtcgggtgcaaacggtgaaccggcttcagcggctgctgtcggaactcgttccaggacaacggaagcgagacctgtccgccctgcaggccaaggcgatcctggcctcggtgcggccacgggacgttgccgggaagatccggcgccggatggccgcggaggagctggccgacctggtcgcggtcgatgcgaagctgaagacgatcaaggccgagctacgcgcggcggtcctggggcgcgggtcgagcctgatggagatcaccggtgtcgggccggcaggggccgcacgcatcttggccgacgtcggggacatcgcccggttcgccgaccggaaccggttcgcctcctggaccggcacggccccgctagacgcgtcttccggggagcatgtccggcatcgtctgtcccgggccgggaaccggcggatgaaccacgtgctgcacatcgcggccatcgtccagctgcgtcacgacaccccaggccgggcgtacttcctgcggaaggtcgccgccgggaagactcggatggaagcactgcgctgcctcaaacggcgtctgtccgatgtcgtgtaccgacgcctcgtcgccgacgcgcgagcagccgacacgggcccgggagggcactgcggggcgactcttcaatccagcgcggtcgacctgcacccgcacatcgacacttcggaccagccacttcccggacccgcaacaccgacgctacgcccgaccccgccaccccgaaaggccacaccaccaaaggcgcacgcatcggcctcttgacacagaggggagc

SEQ ID NO: 3377 - DNA, 1535 bp, unidentified
  source 1..1535: mol_type = unassigned DNA; note = element_4f0e638
  misc_feature 1..4: note = core
  misc_feature 5..271: note = LE
  misc_feature 272..1525: note = CDS
  misc_feature 1526..1535: note = RE
ctcactggtgcaccatcctttggtcagtaactgtggattggttgctgatgcacccgaggtgccgtctggtcactgccctgctcgcttgacgtcttggacgtccgtcatgagatctgcagggcctggcggttacccggggcgtgccgaccgtcgacagggctgagcgccagggctgtgtgctgcgagcgccgatcagtgagcgaaccggcagcagcgtcccggcaccacataagggtgcctccccactgggtctagcagcgaggaggctgacgtgaagtctgccagaaacaccctgcccgaagaacctctcaacgccgtcacagccggcctggactgggcccgcgacgaccacgccgtatcggtcgtcaacgcccgcggccaagaagtcgaccggtgcaccgtcgaacacaccgccgccggcctgcgcgacctgatcgccgtgctgggacgcaacggtgtcggcgaggtcgcgatcgaacgacccgacggcccggtcgtcgatgcccttctgcaagccggtgtcacagtggtcgtgatcagcccgaaccaggtcaagaacctcaggagccgctacggatcggccggcaacaaagacgaccgattcgacgcctacgtcctggccgacaccctgcgcaccgatcgggcccggctcgcaccgctcaccccggacagccccgaaaccgtcgtactgcgccgcgcctgccggacccgcaaagacctcgtcgctcaccgggtcgcggtcgcgaaccagctccgcgcccacctgcggaacgctttccccggggcagtcgggttgttcgccgagatcgattctccgatcagcctgcagttcctgacccgcttcgacacccaagaccgcgccgactggctctcgccgaaacgcctcggcgcctggctggcatcggtcggctactccggcaagaaagaccctgccgcgctgcacacctacctgctcgccgcaccccgcggtgcgaccggccacgacgccaccttgaacgcccagatcacccacgccctggtcgcactgctcaccacgctggtcgaccagatcaaaaccctcaccggccagatcagcgaccagctcaccacgcacaccgatcagcacatcttcaccagcctgccccgctccggccgcgtccgcgccgcccggctcctggccgagatcggcgactgccgcgcccgcttccccacccccgaagccctcgcctgcctggccggagccgcaccctcgacccggcaatcgggcaaactccgcacggtcagcttccgctgggcctgcgacaaacaactccgcgacgccgtcaccgacttcgccggcgactcccgacgagccaacccctgggcagccgacctctacgaccgagcccgatcccgaggccacgaccacccccacgccgtccgcatcctcgcccgcgcctggctgttcgtcatctggcactgctggcaaaacaacaccgcctacaaccccaccaaacacaacgctctgcaacacatcctcaaccccacccagcaggaggcgggttgacacagggctt

SEQ ID NO: 3378 - DNA, 1426 bp, unidentified
  source 1..1426: mol_type = unassigned DNA; note = element_4f15322
  misc_feature 1: note = core
  misc_feature 2..386: note = LE
  misc_feature 387..1415: note = CDS
  misc_feature 1416..1426: note = RE
  misc_feature 83..323: note = bridgeRNA
cacttcctcagaatggtggtgggttggggttgcggattcggtctttcggtgtgtcttcgttaatccgcagcccggctcggcgaggcttggcgcgttctgccgccgggccccggcttggctctgcacgcaactgaccgcgtcagcgtgtcctgtgcccgaaccgccggccggggtccgacgggagggcgtgtaacccgcggggcccggggcggccgtgacctgataggagcctgacacacctctgttgtcccagaagtgttctgtccgtccgtcccgggctccgcggtgccatcccagtccgcgcaaaggaatggagacgacatgctcacgatctcagatggagccggctggtcaccggtggcgttgatactcacgccgaggtacacgtggccggcgtagccgaccaggtcggctggataccgggaaccagagagttcccggccaccgccgagggctatgcggcggccctggcctggatgcgcagccacggtgagctggtcaaagtcggcgtagagggcaccgggagctacggggccgggctggcccgctacctggccgcggagggcgtcgaggtagccgaggtgatgcggccgaaccggcaggcccggcgccggcgcggcaagtccgacgccgccgacgcggtcgccgccgcgctggccgccctgaacggcgaggcatcggggaagccgaaatccggtgacggcgcggtggagtcgatccgggccctgcacgtagcccgccgcggcgcgggtaaggcccgcacccaggccggcaaccagctccgcgacctgatcatcaccgccccccaggcgctgcgggagaaactggccggcctacccgcccccgagcggatcagggtggccgcacggtttcgccccgccggcctgaccagccccgccgaggcggtcaaagcggccatggccaccgtggcccgccgtcaccaggccctggccgccgagatcgcccagctagacaccgcactggaagcgctcgttgagcacgccgccccggccgggttccgggaccggacaggcgtgggcacccgcgtcgcggccacgttgctggtcaccgtcggcgacaacccggcccgggtgcgcaccgaggcgagcttcgccgcgctgtgcggcgtcagcccagtcgacgcctcctccggcaagcagcgccgccaccgcctcaaccgcggcggggaccgccaggccaactccgtcctctggcggatcgtcttcacccggatggccaccgacccgcgcacccaggcctacgtaacccggcgcaccagcgagggcaagaccaccagagagatcatgcgctgcctcaagcgctacgtcgcccgcgaggtctacaagaccctggccgcccacgcccggcagcctactcaggattcaatgacacagatctattccatgatcccttgacataggagctt
